United States Patent Application Publication US 2014/0057251 A1 - sequence listing, part 158

SEQ ID NO: 303849 - DNA, 1059 bp, Cannabis indica
tataatcaacatacatgatagtagtctagatcctgataaaataattagttttcaacactcagagctactgccttgggagtgtccccttcacccagagctactgccttgggcgcattttctagtgctttcttggatcccatcttagtttgtaacctagtctttagcttttttggtgattcacacagacagcgccagctgttgatgctgaaattagctcaataacaaattggtattacgatattgaattctttacatcaggttcgatctagtccaaatacaaactctctgttagtttacacaattcctccttagtttttactatctttctgattcatttaatctcaagctcgaaatggtttcaaggatgtatccaacagtgtttcgactagcttgatgtgagtaagaatctatccccctttttgaatgatggggcgtcttatttataggcgagagtgactgtttgtccttcggcttttcttctattcggattgggccgatgtaaattagttcctctcagagtttttgggcattccatctgcttgtttcgatcttcagaactcctcaagctctgctcctaattctctcgagtttcgctctgctttataatatggttgagctctgtattttgacccctacattttctttcaaatgaaacggtgtgttaatcgtgtctatcatatgattttattagttcttcttatatataataataaaaaaattatctttttttttttaatttttatcacttataatttcaatgtagatatataattttattaaaatactacatatatttaattcttagttttatatactttaattgtattatatttcgtctattttaaataatattcaattgtatttgcataccgattattagtacattaattttctgtactacgatatataaaagggatattggcggctaaaccacctgaactttacgttttgtaacacttaaccacaaaaaccaaaattttggtggcaaaacttactgaactcccattctgttttgctctgtacctctccgtccaaaaatcacagttaagtgccacgatg

SEQ ID NO: 303850 - DNA, 2008 bp, Cannabis indica
ttgtaatttttttctttttttgtatttttctattttttcccatatattttttggtgtttaacctttaaaggaggagtttgccacaagattgcggaggtgttataaaaagcaataagagaagataattagtatttcgatggcaaaaatctaagaaagcccattatatgtgatacccatcaaatgaggcattttgtgttattattgtttttgtttttttcttttaatagacaggtgttattgttatttgcaagatagattttatctttttctaaatgaaaaaacaattatagtttgcgtgttgaagaattacaagttagagactttaactatcttagtcaacattttcgtctctttttgtggttgaagtaatatgttgcaactccaatccaatctcccaaaactaaaaaatataaaggaaagacacgcccagtgggactcgaacccacaatcgcctgattagaagtcagacgccttatccattaggccatgggcgctcatgtttaatcgtaaatgtaattatttacaaattagaaaagctgagtttaatttctttccttatatataatcacacctaatattttcatatcctattttcttctctcatattactcattaatttacgaataaatagtatttatctccccaaattttaatttttttagagaaaaaacttttagagttaatatctcttttaatcataaaaaatgttgttaatatctcttttagttacattttgcttatttatttgaacaatttattatgtagtactaatgtagataatctaactcaagttattaagagttcatacaaaatataaatatattaataaaaatgtaataataaattatgaaaatatgtatatatatatatttagagttaatgtttatgtgtttaatatcaataaattaaattttgaataacttaaaattgttaaatagacttgcctaatgaactatacaacatagaacaaattattttaaaaaacgagtaaaaatgtaattctatactttagaagctttcgcaataaaataataataagatgatgcatagttcaaagaattatttattcttaatttaatattgtattagctatacttttgttcacctcaaattattcttttgataacacaaatgcccattagaatctaaattatattatatttgttgacaacttttatagggtgggtggctatatttttgtgattccttgactaattaaaaacattatttgaattgataatacttaatcaatggacaatgacaatttactattattggtgatacttcataatcttgcctgtataagttatttctttaaaaaaaaaaatgaagattatgaaaaatagttttacggctgtttttttatattattattattattattattattaaaacttcttttttggtaaacaaatgagttcgatcttataacttgttataataaagaaaaacaaggtcaagcactcctcgtttcttctttctttgttacaatgtttttttgtttatttttttataatgataatgttaaattatagtttttaatttcaattttgttttattaacgtgatattcctttagccgaccaacttttaatcattgacgaatttgtaaactaaaagtattttgcttccacagaaaacttattaatctcttcttcttttctttttttgaatggagcaggaaacctattttcggaggttaccttttgaactattaaacaagtattttaaataaactattaaacgtgatatttaaataaaataatatataatttataatactattctgtaattaattataataatacaaaccttacaaaaaaaaattataataacatataatttttcatcaaaaaaattgttgaaaatcctaacaaataaaaaaatatatcattaattttgttactcttgatatagtcattaaatattatatatatatatatatatatttttttttatttaagcgtttatatattacacaatgcattggaactcgaacccaggacctc

SEQ ID NO: 303851 - DNA, 1711 bp, Cannabis indica
tgaattcttaatatcttgttcggcaaaatagttagtaattatatgggaaaatgatattttttagtagctaatgtttaatatagaaagtttttagtaattacacagtgtaattacattcaattctcatgggggccatgagaattggagagtgtaattggaacctctcaattacttccaattacacagttacagtgtaattacatggtcaaacaaacatgccaaattgtgtaattacctccaattacacacaaattcaattacattgtagcctaaggtgcgtttggaaagccaatcagggttaattgatcctgggctaaagtggactaggcctgcactcatttagtggtaaaaaaaatcctttcaaaaatacatatttttttttcattaaatttcaaaaataccacatatgtttgaattaaaggcccaataatatttctttacttaaggcaggcaagttcaaatattcaactttcaaagatattttctaattaatttatatctagatttactacatgaacatgtgtgatagcctttttttttaacaaaattttctttttaattaataaaaataaaatacaaccttattttttacaaaacaaaaaaaaaaatcaaataaatatataatgaaatttttgtatacattaaattttactcttatttttttttcttggatttaactatgtagtgagggcttgatataaaagttgattccaagtgtcttgaacaccagcaatacaccaatgtgtgccaatccattcccctaagacctactatacttactaggatgcccatcttttctaagttgtgacaatgttgttatgtctagaaaatgaaatggtttctttatttgtttcaacacttgtttcaatacatttgatgctcttggtgatccacctgggtatcttgatccatttactggtcttctctcttttccacaattaatcactccttttttgttccaccctttgccactataaataataataataataaagatttaattaattagttccaaaaaaatatatatttatatataaacaaaattttacaatgtacccttctagaaatggtgtactgtacctttatctatttcagtattttaaaaaaaaaaattagtctattttttttaatgattgtgtaagttgtagttatttaaaacatcttgtaaaattttaagaaatttaaaaatatttaatacgttgaaaatagaattcaaatagtctattggatgcgtgatttttttattttatacgcgtattaaataaactatttaaacactgttttttatattataaatttttcaaaattttacaaaattttataaaatatcttaaataattatgacgtacacgtctataaaaaaataaattaaattattttttttagatgctaaaataaataaattgcttactcataatggcttggagtaattccctgaaaaatgacttttgtttttcttgtattgacagttgtgttaaaccactttgcccaagtcattaatccttttctaaatgcttccattctatccatgtctttcactatcttcttcccatcttgaatataatcccatctgtaattaataaatatattattattagagacattgtcataataaacgtactaacaattgctatattggtataatttagtaatatttaaaattctaaaattaatttatatttatctagaccaatgatgggcctaagataaa

SEQ ID NO: 303852 - DNA, 921 bp, Cannabis indica
tttgccataccttataaggaggcattatttcactattgacaaggttgtattccacatgtactctatcttggcttacatggacatgccacatcaggtgaacaaattttgggattacagagagaactcatgaaaaagtctttaagtgaaaagaggatccgtaagggagtaaccacatgagaaagaggttacggaagctcatggaaggcttaaagtgccacatattttgaaagaggtcaataaagctcaagaaactaacactcccttggctaaagaataacacaaatcaaaaagatgttaagaaggcttaaagtgtcaaaactccttcatcaaaaagagagttttgtatcatgaagagttatcacacaaaaaaaatctactagggatctaacataacacacaagaaagaagtctttattaaaagtttgtctcgctaagacgttttcaaccctagcttgtctcataaaggtgacttctttcaaagatgttgtcccacgaggatagtgttgggaaaacatgcttagtaggatcaattttattttttatgtaaataaatatttaacatatatatgaatctacaataataccaatatcatcaatttagaatagaatgcttacagagatgtgacacaataaattatgtctgatttcgtttagtgatctaatcttttttctcttatgttgcaaagtatcagtaatcactaaacttagatattcacttgaacaagaactcaatcttgaatcttcaatttcttcacaatcttctacaaagatctaggtgttgtaacaaaattatgtgagaaattcttacactactaagtggagtttcaaaaaatacaaggagagagagagagagagagagagagagagagagagagagagagagagagagagagagagagagagagagtagagtagtagagt

SEQ ID NO: 303853 - DNA, 4006 bp, Cannabis indica
gtcagcctcgccgtgcaaaattaataatggcagggaaacctgcggcagcatccatcaacagaaatatattaggggaattgtccagaaggtgttcgggaagtgagcaaaaaggtcgattcgtgagaatttaggtatattacttgtcctcttcaatcatgaatgtatgctcaaattccattgggattatagtaaataaaaattaagcatatttagatgaatcttaaacatggatctcttaagcttacaatatccatattctatcttagccaccttaggtaggttcacaaataacataccctagtgaaaaaaagagagattgaattgaataagctcaatgcaagcaaagaaaccggatcaaagcaatgattcaggtgatccaaaatttataaacgtttatacagaaagtagagaacaacgtacttctcccagtcgatgttctatctcttgtgtggtgttaagcatttctaaggcagtacgtaaccgtggtttatctttataagcaatgacattgtaagctgcctgcattttttgaaaaaaagaaccaaatgagaaaaccttgatcaatatagaatgaagcatgtcaaaaaacaaagtataaataacatgaaggagatcagagttacttaaatatagagaattagcattaaaaaatccagacagtaatttcactttcatacattttgctttaagcctagatattaccactgcagttttcatcctgttctaagagaaaagacgtaccaattttctcttattcaagtctctaaatgcagcctcagccaaatccttctgtggaactaatttcatctttggaagaactttggccaacccaatcaggatctgagttaccagcactggtggatacatgtcatctgcaatctataaacggttttctgttaattaaaggtttaaccacaaaagtggcagcagttagacgttcattgattcaaaacatactttgcacataggtgctacaagaactgcaccactccatgcgtgtggttgctttagatgcatcttaagagctacagctccacccattgattggccaaagaggaagcttggaagagcattgaactgcgggttctctgccatcagcattcagcatgtacaaacaaaaccatgagatgctatacagcagatcattactcattaatgactcattgtgtttactttctgtcatcatagaaaagagagacgcaaacagacaccagaaacgtaaaaggcacatgaaagaatgaaagaaagaccagacaaacaacttctgctaatatccacaattaatcatttcagaaaatatcttttcgtcgtcgcattaattgttcatgatgcaggagaacaaagcaaagattttatttcatgttaaaaatccttcacagtgtaaaggtctctaattacaatcgtagattaaacataatggggagaataaatggaaaccacgtacattttgaaggaaaaaaaacaaaaaggcagctcccttcccaagaggaagatttatgcaattcatataactccaaacaaaattatacacaacatctcggcaaaatgtacacagcaacaaaatccgcaattatggcctttgggttccttcccacttcatcacggaatttcaaagcaatgctaaagcttttgttaaaagtcattctacttcaaaagatttacgtcactacttataatgattcagattttcagctttctacaatcaaattacttactcctaggtggactctacagatttatcatataaggtacggtgcaacttccacaagaaatatagacgtggacaattgtgacagtcagacttctgtgatctgcaaggaaaaagacccagtaagctgtgcaatcccacataatttgggaaatgtaaagtgtgataattctaagactgtatgggtacgagactacacagttgaagatgacttaaatgaattgatgagtactaactatgacacaagatgcattttcttttcagtagcccatcacttaaaaactccaaaactaaacgtgcctcatgggatgttttcctataaagcgtgcgagtgaggacaacagtagcaactatacacctcggtttttaatcattagttcctttgatctccaacagctctcctctgtattggaataataatcaagaactcttgtgactaccgtttttataagagtaccctccttattcctcatgaaaagtaaacagaaccaataaacggaaactagcatgctaacttctaacgagaattattgctaactagtcacgaaatgaagtttcttttctgtaactatttgtaagctaggatatagagaagactctctcaaagtagaacaacgttagtcagccaaaactcatgtaaaaagactgttaacgcttagttttgtgaaactttgtcatggtctcattcatagtcatgagaagaaagagacctggtgatctgtatccatctaataaccagttgactagcacaatacaaatagattatagttaaacatggttaccttcatataacaaaagttgcacaccggaagcagaaaaaaatataataagatgataaaagaatgtttgcactactactttgaagagtgatctagctaaaggatctcaaaaattcaaatggactccatacatatcaaagaatgcaaaggcatggatgtaagcaaagcaaactcaatgcaccttagatgtgtgatttcacaatcttataactcagtcttttgattattaactatacttggcttattgcttacaagacaggattctttattgtctagattttgtttaaccaaatttgttcagacaagttacttagcagtacctttcactttagtgtaatgctcaatgcaatcatctactagctggtcaaagcttggaatgtaacaatgaaggccttccgaaaggccaaatcctggataatccattgcaaaaaccccatatccctttaatgccaacttccttgcaagtcctgaaagtattatgaaatagttaaattccataatccattaacaatatcaaggcataccgaaaaccaaaattttattaatctccgttgaaaatcaacatgccttcaaagaaaaatgtgcaagtgtcaccataaccgtgacaataacacactattgcttttggggaagatgtctctggaagccaactcttggagaaaatttccactcccctagagttcctctcataagactgcaccacagtaaacatgactatgaattaactacttaataaacaatactaactgtgttaaacatttgctcttaactaaacaaacttgaaggttttacaagcaaaacaattgacgaaaatcacattaaacaatgaaaatgaaaagactgaaacatcctcaaattacggatagagatagcagcaattatagaaatagatgttcgtcactgaattaaataagtccccacctccttcattttcaatccatcagtaggtgtctgcaagagtaaaaagtgtgtacacaatattagttttaaatattataacaattcgaggaccataagctaccccttaattttaatgaattaaatatttaaaagatttacagtgattaaagataaataatcaacaaagaccagttaccatttcccaattcccatgtaaccaatttcgactcactccgacaaacaaagggaattaataacagttaaaacatcatgttgtgtattcaaactaaaattaaaaacgcgttatgaaaatgaataccttaaacaaaatatgatcaattccaagctgaatatccttaaaagcctccctcgcacgtcttctagcaggagcttcgtccatgtttgaatccaaaagcttctgcatttcatcatcaacgccttgcagccttacagagacagaaggtgccattgattcacgagtggtcttattcttattcttcttcttctggaaattaaatctgaccctgaattctgtaatactagaagaaattcattcttgggtctaaagccatcaaaactgaaaatggtaagatgggttttaataattaaaataaaataa

SEQ ID NO: 303854 - DNA, 3347 bp, Cannabis indica
atagaataataaatatataacgcacagagggaatgaaaactactataaggtgtgtacgatccatgattcagcacacaacatccattatatgctcatttggtttttctcttatttgaaggtattttattatatatatttaaaaaacaacattaattattattaagtatttattaagtattactaatactttctgtaagagacgttttttaattggttagtattatttttcttaaattatataaaactcaatattaaattacactaacaataatataaaaaatagtaagtaccgataatatgttttttaaaaaataaaaatagattacagtacaagtacgtaatatccaaaaaaccaaattcaattgcatagtaatgattcgtgaagcacgagaactagttgtatctcaaatctcaattctcaatcctttatgttttctcttgttttttagccacaaaccaaagtaaattaaaaaataaaattattacaacaaggaaaaaagtgataagcccatgttgcggttgagattttcaactcacatgggcacatgaaaagtcgagtcaaaggaatagaataggtcgtcaaagggtggggaagtggcttaaagagagaagacaaagcaaattaagccaatgagctaaaacgtagagagagagagaaggaaaataatccaataaaggaaaaagagagtagtatagtattgcatcagaaattgtggagtattatgtcgtactatccacatgaaggctgcaaaggcagggaggcagctaggcaaagcgcagcgcagcagcatgcacccgtcagaaccaaagcacatgcctcttgccagtgctttccattatcagtcccacacaccactccaactacacttaccatttttaccatctctctctctctctcacccacttttatatatatatatataccaacttctccacctcatcaccttcattctctctctctctctctctctctctttcccaacccattttcgctaacttttcggtcctagccagctatagacaagctcccactttatcaaccatccttcgccctttgatctcacaatccacaaatccaatggtgcacctgccaccatgcataaatattatatatacattgattaaaactgtcgacgtatatatactagcctattgttaattattaataagtatagttaatttctctttatcacggtaatcatatcacaaatatttgtcatgcttgtttgtgtgtaataagtacctttaacattggtgtaagtgttagtatattagtactgttatttttgggtggtcggctctcccacgtgatcagtcaatagggactattgtacttttttttaaggtcatgtaaacagctgtcaggtatacatataatctgtcgtaactgggctttattacatcagagtccccaaatctaggtttggacagttaattactatgttcacttacatacctgttctatattttggcaaactaatttgaaaaagaaataaacatttatgctttaatctttgttaataaaataaattggccctttaatctggctctatcactgtttgcatgcatatatatatatatatacatatctggttatgtgactgtagcaaaaacaacaaggaaaccagcatgaaagtaactatacttaaaaaaaataacgaaaataacaaggattattgctaataaaattattgtttaaaatggttgttatagtaaagtattcttgacaattttagtcattgggaatccccagccgttaaatatatattcacaaaaaattaagctctacatttttaaaagggggcatcccttaatagtttaaaatcgttaagtatactttagccgacagtttaaaatttagttttgtgagggtcgaataggcgatgtttatagaacccgagaacaatacattagtcaattgttcaaaactttcgagaaaatccaacttttttattagtgacactttttttgtaatattttgaaaaagaaaatttaaggatgaaaacactttgaaaacattaagtacatcattcaccattataatattgagaaatttacataaattttatttttagtaaaaataaaaattacactttcaccttcaaatataattttttttttatatatttttacgacgtcctataaaaacaacacgaaaacaacaagtaaactatcataaaagtaaaaaaaataaataacataaaaataatatatacaaataacaataaactaaaaacaatacatgacaaaagtataacaaaaaaatacaaaaaaaaaatacaaaaaaaaattgtttttttttaaaataaaattttaaaaagtgtaaaaatatttaaaatttaatacaatcgtgtttttgtaattttttttttgttatttttaagtatttatgaaattatcctaataatatttactcaaatatttttgaatgtttgtaacaatgtatccttcaaaacaaatgacacaattaagttcatctaagctgaattaatgagttataacagccgaggactttgtgcatacgaccatggcaactggcaagttagaccaaggcgtagtgccttccattaaaatgggttttttttatttatttaaataccaatattttgctacacagaaaggtccctttattaacttctaaaaatgttactttatatgcatgcaatgtttgttaatgtactacattttttattaggccccttttaggttagggaccaacctagacactcattcaagtttaaatgatatatataattgagaacttatttataaatagagatcatttcctcacttgacaaaaataattgtaatgacatcctcatctttaggacatcagatatgtatgaataggcttgataaatatcccattaagcatttctaatgagtattcctaaagtatttttgtgatgaaggaaatatttaagctatttttatcaaattattaagtaaatttttagaaagagtacaaagtattttgtctatatacaaattatgatataaatttgttatagttaaataatttattaaaataagaaaaaaataccaaaaaaaacatcaaaacattaaaatatcaattcaccatgccattgatttattataaaatgaataaataaaaatgaaatagagaaattaagttctcaaacaaatattttacatgtacatatttttttaatctataaaacaagataagagaaagctaacaaaatacacaaaaatgaaaattgaaaaaggcaagccattacattgtaacttgtcttctcaattcttctatatattagatagactagtaaaaagtttaattttatgttaggtattttttactttatttaaaagatataataacaatt

SEQ ID NO: 303855 - DNA, 1862 bp, Cannabis indica
tttttattttagttttaaaaaaaaattatattcttatttttattattaacaaaccaaatcattttaaaatttcttataaactacaattttttttacaagtaatcaaaatattatttaaaaatattataaattatttttatcaaatacatataaatttagggtgttccttaggtgagagcatccattttgctctcacaagtaaggaaatttttataacctttgatcttgaattaagtagtggtggaccacggtggtttatttgcttatgatatgtcattctatataggattactaatatatatatattggtatttattttataacctacgcacaagacaaaaggtaaaataaaaacatcccgtgtagtcattattcaactcacacaaaagaaaggatttcaaatttattggtttttttttttatttttttcttctactgagttaggtttgtttggagattatttcccaattaaggtgggagattttttttttcttttggagtttcttagaaccatttttttggaattgtttgtattagaatcagttaaattagttaagtttgttactcgggttagttactacattctgctggagttaattaatcatacaactaactcagttccctgtcttggcctacatataaatgtactatgtacattgtaattgaataatatgaacataataataagaaagcattttagcttcttatttttcactcagttttcctcatatggtatcaaacaaaattcttcacactgcatccatggcgagaccatccacaaggtcccaagatggtgttcctccattaacgaacaatccacctccattaaccagatgctacttccgctcctattcctcattcttcaattgctccaagaagacaacacactttgagaatgagatctcacaccaatctcgatacactagatcatgtccaatcagttacaaatgctccaattgaagatgcaccacagtctgccatgcctactagaagatcttcttctcacgatcgtctctcacatgaagatgtttccagtctattttgtctcatcacagttgatcatctaggattagttcttgtctccactgtgctcactggtgcgaactctcaatcgatggaaatgtggaatcaccatggccctcacattaaagaataaataaacttcattggtggctctcttcctcgaccagctcctggtaatcatcttcttcattcttggattcgctgtaacaatatggtcatgtcttggttggttcactctgtctcccgtgagattgcacagagtataatatattttgatcttgctagacatatgtggcaagatcttgcagaaagatttaatgagggtaatggccctcaaatctttcagctgcaaactcaactcacctgtttgcagcaaggtgatcaatctgtcacctcctattttaccaaactaaaattaatttgggacgaattaaaagaattccaatccaacactacatgcacttgcggtgcaatgaaaattttcttgattattacaatcaaaatcaagttttacagttcttgattagattaaatgagtcatatacttccgttcgtgctcaaattctcctcaacgaaccaattctaaatttttcgagggtgtttgccctaattgttcaagaaaaacgtcaaaggactcttggttcttcagattcacacaattttgcttcttctatgcgtccttcctcttccactaatcctctaagattcaagaaacctcggccttaattatggtaaacctggacattatgtcgacaaatgctatttcatccatggcttttgtaatgaccgctctagtaatttggattagtaagggcgattagcactaatttttattattt

SEQ ID NO: 303856 - DNA, 1068 bp, Cannabis indica
tttgttgtttttatatttttgtgaaataatcccactattctaatatgtaaaacatctttttctttttgttttttaaggagaaaattcttgccacaaaagatggttccctaatatagtgaaactcacactcaaacaataagaacaaatttctttacaagtataaatttcatgaagcctagctttgatcttgtgggatcccaatataaaaatgtgatagttttataaaatataacataaaatggtatttttcaaaatttggagacctttgctcatagaataattgatatttttgaaagaaagcaaaaaaataggtctgacttagggactgacctactacttaaaactggtctctattttaggttgtttttcattgaattgctcctaaaatattcaatctaattaatctgcacgattcaatttgatctaattcataaaatgtgaatatctgcacttgtataaattggattggactggaaaataaaaaatatacacttgtgtagattaaatgtaagcggtaaccctatgagaaatcctgaagactgtagtcggagtgaacatgatagtcattcgggaattccctttcggactcaactatcattccacaagactccttttcgggatgaacaagttagttgtttaggaacaatatccaggagacacctaactttccaggaacaacttttagataccttttcatttggaggaactatatcacagatccaaaataagaaatctccacttaatacaaatcgggtgtactatgggtaaaaagtgtatattggattggacgaacacccctaatttttcaatcaataaacaaaagttatagtttttgctgggtctccctttacttattattgaacttacttgttttgtaatggtatctatatttactaagagattcttgacatttcataagttagtattaggctgtttttttttctttaaagaatttggcaaatttgttatccaacttttttgagtctctgtaatttgtgtttatttattaataaattaaagtgaaggtaataaaatagaatgtaatagaaagtaaataatttttattat

SEQ ID NO: 303857 - DNA, 4686 bp, Cannabis indica
gatacatttaatgaaaatgctccaccgacaaatgacactgcgtatatttcatcgcttggagctgccgtgtataaagcaatgtcggaaggtgacaaggatgctgtttggttaatgcaagtatgtttccccttcttccccaaacatgacattagaattgtttggaaagttcttttgcattgaaatcatttcgccagttccatttaatattttagaatttctcacaataaccatgattttgtttgatgaagagttgaccttgacatttatcatcctattgctgacatttgtgtaattttgcagggttggctcttctatacagactcttctttctggaagccgcctcaaatgaaagtacgaaacttaataattttgttgcttaagtttttgtatttttcattgaatattgataaggttattttaaacaagaatagttttgatgatgacatacaaaagagaggatgagcttttaatatttgagtatatgcataagcgtcacgactttggaggaagattgatacgagacacgcatagtgtgtttgagaaagaagattggatccataatgatatacctctgttgatttgatttcatttacaactgatattttgcaggcacttctacattctgtcccatttgggaaaatgatagttcttgacttattgctgatgttaaacctgatggagacatctctcaattttatggcacaccttatgtctggtaactaactgatctttacatttcaataagatgggcaacaaagtctctcttttataattttggtgagcaatcaggtgtctattacacaatttcggtggaaatatcgaaatgtatggagtattggattcagtttcttcaggaccaatcgatgctcgcaccagtgagaattctactatggtatatgtcaatttacaatttcctcctgtacttaattgtttcactgaattagacattatattcaagcaagtagcaatcttcttgctatttaaataacttgatgttgcaataggttggtgttggtatgtgcatggaaggaatagagcacaatccagttgtatatgacctgatgtccgaaatggcctttcgaagtgaaaaagttaatgttcaggtacccatgtcagcctttctattcattattgtagaaacttttaattcctttacaatttactttatttctgttctgatcaaaagttttctttctgatcataattgcatatcaaatgcttctaaaggaatggctgaagtcctatactcatagacgttatggtaaagcggttcaccaagtcgaagcagcttggaaaattcttcatcaaacaatttacaattgtaccgatggaatcgcggtatgtcaaccatatcaattcttgtttatctcactgtttttaacagttatgatttgcttttaaggcatcttaataatggtgaataacttctttcaggaccacaacacagacttcatagtaaaatttccagattgggatccacaaccaaaacaaagatcaaacatttctagacataatcggatggaaatgatttcgaaaatagatggaaaaagaagatttttactccaagaaactagctctgatttgcccaaagcacatttatggtattctactcaagaggtgatcaatgccttgaaattatttattgacaatggtagtgaatttgccggaagcctcacctataggtaagacgatttttagaatatgctctctttcattatcactatttttctctgagatcattttctaattatgcattccattgtggaagatatgatttggttgatctaacaagacaagtgctctcaaagtatgcaaaccaagtatacatcgatgcagtgcttgcttttcgacagaaggatgaagatgcttataaacttcatagccagaaattcgttcaactcattaccgatattgatgtgcttcttgcttctgatgataattttttgcttggaacttggcttgaaagcgcgaaaaatcttgctgttaatcctcgcgaaaaacggcaggtaagtttgaaagatttctttcatggttgacacatatcaacactcccaacaaatttgggatatgatattttctattcaaggtggtgatctcataacaagttttttttttgtttgtttgttttcttcagtatgagtggaatgcaaggacacaagtaacaatgtggtatgacacaacaaaaactaatcaaagcaagctacatgattatggtaatgtcataaaatggaatcaccataatgtttgttacctctttaaccatcaacaattttagttgttttaactttacatttgtccttatcaatgtagcaaataaattctggagtggcctgctgcaaagctactatctaccaagagcttctgcctatttcaacttactctcgaaaagcttgcacgaaaatgagaacttccaattggaagaatggagacaagaatggatattgttctctaataactggcaaacaggcacaaatacttatccagttaaggccaaaggagatgcacttgccatttccaaaatgttgtatgaaaagtatttcagctgaaaatgactggtttcggcttgtaatattgctatcaaacttgagggtgttaatatttagtaccctaagttggtaacattattttcccaaaaaattaaatcataagtgatttattaccgtaaaagctttaaattgaaccagtttttacatactattaggggtagcaattcatgttcgtgggtcatattcgtgtcatgttgaagcttaagtattataagcaaatgtcaaactcaaactcgactcatttattaatcgtgtcaataattaaaattcaaactcaactagtttataaacgggtttgagctgacttgacctgtttatataagaaatcatgtaattttagttaatttatcaactaataagttttaacatgtttacaattttatcatgacacaattatgaacaatttaacatgttatttaataaaaaatataataaaataaacttaagagtgaatactcttacctaaattattaggtgtcatcttcagtgaaaataaccagtttaataaacgggtttagcgtgtttgaccttaaaatgacccaaatctatttaaggcaaatccaaactcatttattttgtgtgggtttcgagtcgtgttattgtgtatactcagattgccacccctaactaccatgatcccagctattaagttaaacttggttgcatgaagatcagctctaaccatttcattactgaagagagtaattttatgatataaccttgagtaaatacaatttctaatgacaatttacatcaatgaatcatacagtggaaactatgtgtaaaaagatttaaaaaaaatctacaatatatcaaatatgatgaataatgaagataagacattttcctcagagcagcatagacaagggaattttcaatgtcaaaagtgttgtatgaactttctccacataaccgaaagtgttgttcttgcacttagagattcacttctaatgaactgctcttttaaaccagctccattagaagggggtccccagctgccatgactcttatgagctctacaaaaccgacctcattggaaacggtccaagggtatacagcaggtacttgagcagaataagagcgagaagagttactagacagtaactctggcttgtaaatcatcttaaagaagacattgtcaaattgttgtggcgaatccattgcagtgaaaaacataggaattgctaccttgtagtgcatattgaaatttcccacaaggcctacaagatctacaaagtccccaacaaaagcccgagggatgtagaaaacctccaaactacagattgtgagactcttttcacctgtgctacttgctttgtagctgacctgaaggtgagccggcatagtgcttacaactttcttaaccattcgagcttgtttcgaaaaccaatcttgactttttctccttacttgagactgtagtccatgactgaggcacctaaaacaaggtcaaagtaaatcagacatgattgatcatactgaaatcagtgttcggtgattgggatttcgttaccttatcagtgatccacaacttagatttgtctgcttgtactaaattccagtagtttaggattgtattgtcctggagaaacaagaatccttctgcactagtaaacctttcaaatatctttggcaaatacctagacaccattaaaacatgttaaaagcaattcatcagttggtaatttgaaaagttcttcatttgatttatttcaaaaaatggaaatgactcaaactgtatcagccattgttctatactacatattccttaggttgccaatatttagaacgtaatatatcaataacaagctatcaaatgaaaaatttgtcaataatccaatacaacaacttacttgtatatttggtcgagtgaagcttcttccacagctaactcttcattggctttctcagacaaaatcaccacagttttgaatatcctgccataaagcaatctccactccaaggcagttccttcaaccgacccacttacaaacatgatcagcacaatgttaccgaaattcttcttccagcgaacaaggttcccaatctcataatttacagtctccgattccttaactccaagatgcacacaaggtagtttttgaggaacaaactccttcaactctccctggttgacagt

SEQ ID NO: 303858 - DNA, 1144 bp, Cannabis indica
atttaaaaaaaaaataattaaacttaagaaaatttcgcccgaaaaaataaaaattaaaacagaagtttcacttgccattattctattttaaaaatgacaaaactcattgttttgcttgcgagtgtggatgtgtattgaacaaaataaggatcaaaagttggatctatttctaaaaccaaaatgaaaagagacaagtatatgatgtaataataatattaatggggaagcgtacgtggcccaatgattgaattggtgaactagtgatgatgatgatgatgatgatgatgcatgcatgtttgatgtgtctattctctatgaaatgatgatctctgaaattccaatttgactagctagtagtacggcattcatttatacaacaaatagatgcaccatatgtaaatttatatgaaaatccggctttggactagtctaaaagttattacacatctattgtttacccttttgttcttttcttttcatatacatgcataaagaaaaagaaaatatatattctgctcaattattgttacataataaagaaagattttagacaatgtggtgagtgttctgatcgagatgacaaggtacatcttgatcacatatcatgtaaatatatatagggacacgattttgtcccgtgatgtactttcacggaatgtattccgtggtacattagatgagtctcagggtacattaaatgagtgtcagggtacgttttactttttaaccctaattacccttagatcaatctcagccgtcagatcaaataactcccttatctgacggctgtcgtatatcacggattacaatccgtgaaagtacaataatagaacaaaatcatatcccaatatatatatatgtatatatatttacaatttttcatatatatatatatataataaaaaagatataatatagatgtgacaaaacttaataataattttgctgtacatgatttcaacatctttgaaaaatttgaagaaaaaaataaaagagaaactagtcgagatatataagtatttgtgtgtacgtacgtaatggccttcaaatcacacacgtgctgtttcaaaagacaatatgctcgctgatcagtcaacaagtgttaatctatatatatatatatatatatatatatagtatagat

SEQ ID NO: 303859 - DNA, 2868 bp, Cannabis indica
ataataaagttatttggaactaggttacatcattccaaataactacattatattttggcatgactccaagcccaagaagggatacaagggctcgaatttgggagccaatttcaaattgttttggctccaaaatggaagccttccaaaggaaagacttgaaaatgggattgaaaatgcaccccgcccttatatcatgtatgtacgtacatgtgtaaatgttaaagtatcttgttcattcactttaaaagaaaaagataatgataatagctcatctttatgacaaggaaagaaaaatggtcagtttagttccacaggcatggttcaaaagtttccctataaactatgtttcttgttttctcaggtaaggtattatgattcttgtatacactgcctcgggtgtttgcatacatgaaaagaacagaatttcattatttctttttttccatcctacttcatcttctagtttgattttgattttagttggtttaatggcaagaaactaatgctgttatggaaacttacatgtccccagttgtcaatgccttgagatactagtccaataacctgcaaattatatcttattgtcattgaaaaaataaagaaagaaaaaagtgagaagcaaataataaaaagacaaatcatgtttataatttgagtgaatcagtcagaattaggtgagatcagtggagaagtaagcaaagatttaaatgacgcgcatccaaaagtgagggcataccatgtttaaagcaattacattcactatatgctgtaactgtcttctgccccctccaacctggcctctatgcctcatcacaaacacagcaacagatccaacctgacacaagagagcatgtgtaagtataaaagtactaaatattggcaaaaaagaaccatgtgagttcttatcctgaaatagaattccaccggacaatctggatttacaattattcaataataataataaaaatcatctcacttcccttggatacaaagttaaacatcctatctatctatattttcctttttcacccagatgttatggcttttgaataagaggtgatgtgatgataagtacaggtttccatacaaactttctgaaattatacatttattaaatattcttgtgaggataaaaggtacatgcttactttaaatttttaagtatagaagcagaagatagaaaaatgtaagcactctagcaataagaagtatgcagaaacaatttctgttaaagattcactagtgactgtaaatttcaaatcatagcatgatactaccttaatctaaatgaaattcattgacatttcatatcatgaccaaaaagtgcaaccaactatggggttttttttaacaaaatgttcaattaacttacgagtccaaagattgctcctgatgcaccaactgcaggatcactgctgaacatacaactcatcgctggacctgattttcttgaaattattaaaccacaaaactagttggtactaaccaaatatgttgactattgcagaaagatcatgagcctttacttgaaattgcagaggcaaagtagatagcaagaaatctcccaggaccactaattttctccacagatggcccaacagagttcaaagaataacaattaacctgaacaaaaattcaaattgtagcaaacctttcaagatacattattatatacaattaggaagcctttaactggtgaagttcagatcagaccaagagatgcccaacattcgcatgcagaaatgcagatgtcaccaacctccacagctgcccttcctctatcagattattcacctgttaattgttaaataatgcttaaatcgcttgtgttcaataatcttaagggccagcttgtaacactaaattcattattgggataattttattaagaaacatttccagaaaatcctcaaacttcaattcactttcttttttcacctaatgtagaggaacataaaagtgttactaagtaaccaaactagctctgtacacattttctctggatcattttaaagagcatatttgaatttaccttggctccccaagatattaaccttccatttgatgcaatctgtgcaatataaattctgcccacaatacaatttcattgaattaaaccaaagaaacaaatcatttcatcatttgaattgatggaaaaaaacaacactgagaaactaaaatactcacgccacattaagtgcaagaagtacattggtcaatcccctgtcctcgaatggactcggactagatgtgttcgacttggagtcagaaaaagaaatcccttgttttctcaattcctttccgttttcctcctcgccaaacagaaaaattcgagcccaacttgccgaaaccaaagaaacccctaacctgggcccgtgactgagacgacccagtttctgttcttgtattccataaagattaaccaaaaaaaaacccgcttattacgagcacccatttctagaattcaactaaaatcatcaaaagatagcttctccgattcaatcatgggatggcaataacaactcaacaagatagaaatggatagcaaatacctgaaagtaggagcggagaagaggcttaacggcatggtggatgaggtggccgagtcgaagggaggaggcggtggtggtaagcacattcattggagttgaaccgatctccgatgccggtgagccaaatccaaatggctgaggcaacggccatgaacccgatcgtatcataatggtaagtttcattactgaagcgaaggatggaatatggatgtaagcagtgagaaagtgattgaggaaagaaaaagaaaagtaggaaaaaataagggattttttctataataaactgaaaatgaaaaaaatttacatttatgaccta

SEQ ID NO: 303860 - DNA, 1611 bp, Cannabis indica
ttttttttttttttctgttttaaaattttcccagatgagagagagtggattttctcgagttgggatttttacattggtatgtatttatagaacattgatttggtgtttgtttcttagtaaaaacaaaaagagaaaaaaggaaaattaaaaagaaaattgggtagagaaagtggaaattgagaggaaattgatggtgatgcgcgtgagctgcggagtagttgaagcaaaaaaaaaggctttaatgagaaaagatgaattggcttctatttattggggcccaaaaaattatttataaaattaattaacacattttttttattgatatgatcgatttaagattgaaatggatatgtgcgtgagctagatttaactatttttggtgtaacaaaatagtgaaacaaatttcgttatttttcatgcataatttgtttgtatggaatatttgaaaagatattagactctgaaaaaggttaccttctttatttttattttatttttgttatataactaatatttggtggagaatatatttatattcaaagccagcctggattaaaagtttgtttttttatattactaatctaaggtatattctcatttgtaaatgttttttaccaattagagaaagtaaaagtaaaatagaaatagctaattattggtgttgggtaatcagtaaagttgagttgttatatggccggttacttattattaaatagctcagcttaaagaagtttcaggggtgtttccttttctcaattttgttattattatcattattatttgagattaatgtataattttccacctttcaaaaaattaaaacagtatatatctatggtaagtaagtagtttcagatcttaatttcactgtaataaaagttgttttggttggaccaaatatgtaaatgttagagcattaatatgagtggttaattgcagaggagttagctaaacggatcttaatgagctttgaagaagagcattgctattaggcaccaccttctcgacatgttgcgttgtgattggctagcgatactatacttcctaaaaactattatattaaattatataaaatccaatacttaattaaaacaatggtgatattgacacataagatggtagtatactagtaccctttagcatttgtctttgaagaatatcacttaatttgcatgatgggtaagcattaattgtcagtttttattttttgccttgccagtacacaaaaacaaaatcgtcagaaattgtaactcagtcctaattaattacggatatagataacagatgtaatactcatcacaattgccgtacagtgtttgagtgtcttttacgctctctcttgattgaaaatggttcaatgttattatttctggctactcatctgatatgtttggagtcattctaccgatacaccgcacaaaatgtatttttactgatattatatgttattatttgaaattaattattcattacatttcaaaaaagaaaaaaaaaatattattcatttatcatgttataatgtaggaattgttttttttttttttattttttttgaaacagagagtgctttaaacctgagaaaaagaaaacaacacaacaagaatcctcagg

SEQ ID NO: 303861 - DNA, 1549 bp, Cannabis indica
tatacattaaacataatcatgaaataaatcatgtgaaccatgcaacataaaattatgatttctaatctttattaattagtcaatctgattgtattgaaatgagttttatttagggcacaaaacacaacaggtacctctcgtgtggccgacgcacatgtggcacatggtagagaagatgtagctgttattgagaacctagagaagggcactcctagtggaaatccaaaagcaaacaacgagaacgttggagaaagtcatggggatgatcagtatgctgagacttatgaagaggatgacgatagcgactactataaagatggatacgataaggatggtctatattcaagcatgatcctagtttgatgcgggtaactaaagagcttacagccgcaccagaggccctagcaaatgaacaaatgctcacagctaagatgaaaaagaccatgaagcagctataaattgagtttaatggcttgacaggaatagacgaaaaattttctatagaagaaatagctaaataatgagcctaggcgcaaactaacgtagaaatctagaatccttgtacggataagggtaaaagcaaagtaggccaaccctcacgcataatcgctcctaaaccttgccagaaaaatacgccttcagttggataaccctggagaacgtagaaggccatcagcacctttgggcctggacgcccttttgacccttgaaatagggttgcactgaaaggactggcgacggaggtcccttggcctaagagacaagtggatccccctagcgattcagttaatcaagacgagaggactactgttagttattctggagatagttggtccacgccagatttgcggtagcagttagacgcgaagtatgaaaggtacaagagcgagagggtgaggccacggcggggtgatctaagaaatcatctgtgtgataaactgcgggggtgcgacctcccaagaagtgacgtaaaaaggctggaagaggaaattgctacactaacaaagttggaaaaaaaagtaaattggagcgttatcagattctgaggatgaagatccggaccctgtgtcaaaagaatcgtggaaactcctcttcccaaaaacttcaagatgttgcacatcgaattgtatgagggaaccgatccgtgaacacacttagctaaatacaacaagatgatgcaagtcgctcgcgttagtgaagatgctaagtgcctatgcttatctttgactttaaccaagtctgcggaggactggtagaagcggctggctatgggatcaattgacagctggaaagacttacagtctaattctgcaagcaatttattatcgcaggcgagaaagacatgggagttgggttccttaaccaatgtcaagcaccagtctaatgaaagtttgaaagctttcactcaaaggatgatggaggctgcagccaagaccaaggtcagtgatgacttgaagctaatgttgggttttgtgccctaaataaaacccattttagtataatcagatttactaattaagaacgatcagaaataacattttatgttgca

SEQ ID NO: 303862 - DNA, 3999 bp, Cannabis indica
atctttattattagtaaatctgattatattgaaatggattttatttagggcgtaaaacccaacagttaggttccttcagttttaattgtgtgtagaagtataaactttgatcgtcttttatccttaacggttggtatcattctttcacttaatatttcaattgcaggtcatttttttcttgttacattccgggacttctttcagcttgtgtattagttcatcatatttacaatcaattgagatgtattgcccactatagctttataattttcataattcattccatcatcaaactgtccattgtaaaagactaggaatataatttcgccttttttttgagattataaaagtttaattattgtaagtgaacttgtttaaaactataataaacttgtaatactactattatatatgatgcgggccaatttttataaaaactcagaaaacaaaaataataataatctatatgaagtagaaaagaaacttacttctatcgattttcatctgttcaagttatgtaataaaaattttgaaccttgtatgtattattcgttattgttgttgcaactaaactgttatgcaactaattaattggtcttttttttaaaaaaaaaaaaacatttaacaacaaccaattgtacattaatataaataagttgagaaacaactcttagacatctgtaaaccaacttaaatatcaaccaattgaataaattcatataactaaccatgttatagaagtttttttttaaagagatttctcttgcactaacaaatgaaatacccgcaaatttgataaatgccattatgaattgataatgcaactatcatgcaacataaaaaacatgaatcatatttcaatgtatgtggttgtagatacattcgaattttctataatttttcgtgatttgatattaataaatttactattggaaattcgaaaattagcgtcaatgcaatgggataaatattagctatagtattgatgtattttttttttctttttatggaatatatctgattgggattgattggaagctccagatatatttatttgaaatatacattttatgaatctgaaatttgatattaggaggattagttttgtttgaattttagttttgaaccaggttttttgctctttctttcatcaatacgaatcaacctttgtttcgattgatccctgtcttcttctcaggtgaagtcaccggaattaatggtagtttttctcctacttgggttttattttggttgtcttgatcggttgaacaatggaaactttcgttggtgattctttttgtttcgtgcggctgaagctttagaacaggaaatattattgtaattttttttgtgggttgtataattgtttaaaaggtcggcccactatattttagtaatatatttgtttttttgtatattcttgaaaaattcctatttatattatacaattaattaattaataataacaatctttatttaattatatatataatataatgtgaatataattggagctaatctgatttgaatgagatttaatcccaagcacttaaaataatttatcatattattttaattaaataaatatttaacctaaccctattgaatgtttatataaagaaagtgataaagctagaaattcctaatggcttattctcttctcttcttcttttagtgaaatttaaaaattctatttacacagtggatttcaaaaattttctctttttctcatagaattcaaccatcattttgagtgaaatttaatctcaaccactcaaaataatttatcctattattttaattaaaaatatatttaacctaaacctattgaaagcctatataaagattgtgatgaagctagaaaaccctcatggctcattcttttctcttattcttttattgaaatttctaaattttgtttacacaaaggattttgaaattgcctttacacaatggcttttgagatttttctatctttctcatagaattcagctatcatctttatcttagtaattcagaaattgctcacacttgtcatgtgtgagacccaggacactatggaagacggatgaaacttagtcggttatgtcagagtaaagaatatttaggttcatcacttgataataccttgctacagaaacaaatcaaaggttagagtgattgaatggaatgagtcattattctgcgatgtcacctctgtaagtatactcaaacttaatgtgtttatattctattttaaaaaggtatgttctaggttgttagataattatgctaattatcaatatctttgatagtaaacaaaatcatagtaaagtaagttcgaccaaattctccatttaataaaatgtaccattattttatattctttacattaaatttttagcatatcacaaggcgactcgtattttgcctttaagaaaggtcttttcgttatgtttggcttagtccacctatggaggtgactcgtattttcctttaagaaggtatttttgttatgtcagcttagtcctcttgtagagacaactcgtacattgcctttaagaaggccttttaattatgtcgtcttagtccacttgtggaggagactcacactttgcttagttctcaaaatagttcttttcatattccatccctcttttccatacatcttttagccttgctctagattttatttattctaagaatactttatctttacatatttttccggactgcttaaacataaaatctttaagattcttgacattccagcttctttctattacacttccatccatcacgactatttgataagctccttttcctctaagtccaacgattttgtagggccctttcccattggctgttagtttttcagcccaatattcttcgacgttctggaagaccttttgtagtacaagttcttctggtgtgaagcttctcaaacagacttttttcttgggattctctcttttctttgttcataatgggctttacttttctctatctaatttttttaacacaaacttctctactcctttatccttgacctgtgaaaaggcatccactttgatccatttggaaaaataaccagtgagtgctagcatgaatctcttttgtattggagcttgtggtaatggtccaacaatgcccattgcccatttcaagaatggccacgagttcttcactgatattaattcaattgtggggtctagaatggatggggcatggctctaaaaattctcacataccctagaatagttggctgagtcatcatatattattggccaatgatatccctggcgcatgagtcgttgatcactgattcatcttctgaaatggcttacgcattcccctttgtctatttcaaccaacaccaaattcgacttgggtttgacaacgcattttaagtatggtatgtggtacaacttcaaatacaactgatgattgataattttatattttgctgcccttgatatgatctttttagcctctgttgaacattaaggtaattttttttcttttatgtaatctgttatgggctttctccaattcggttcttgcattatttgtgcttctaggcattgtatatcttagtttgttgatatgttgggtcttgcacatgcttgcctgattaggcaatgcaatacaggattatcagattaaagcattgacttgcctgattagggaatgtgatgtaatgaagatggttactttatgaggtaacacatatatatatataatttatatgattaaatgaatatgaattctattattgatataatagttttttattaccaaatatttgtatactaatgtttattcgtgatagatgccaatagtgatttagatttcatcttatgaacaatgcgtgatggtttgattctaactgtgtataaatgatagtattcgaataataaactatatgattattattattacttttctttttgagtccttgtgactcacgggtgctatgtggtgtaggtaaaggcaaagaaaaactagatcaaccatgag

SEQ ID NO: 303863 - DNA, 1804 bp, Cannabis indica
aatagttgtgcttaaatatttttaagagccacacttcgcatgtgagattcgactagtatataaataaatatatataccacaaaaacatcacttgaatataaaatttggaagaaaaaaaaaattgaatgaatttgtatgtttaagaactacacatataaattatatgatatgaagtaatgttacctatcaagcttgtagggatgagttcatgatacggcatcgattagcataatagattgagaagcataatcatataattatgtatagttaaattaaaatatataatacgtacatcatacataatattacacaaaataataatggtgagagtaacacaatcaccatgagatccatgtacacaccatctaaaatctttatgttttccttacctgtctttctcacaaaaataataatatgctctttaaatagtaaactatatgttacttgcatgtgactttttaaattccataacatatattataaaattcaaatactttataatgatagctaattatatcaagacatgaatatattatacaacaaatattaataactattaatcatgaatatattatatagtaaatatcaataactatatcccacaaaatatgttatatacaaagaatatcaagagacatatgtttaaattcttacattattatatgttttattagagaatatgtttttatgttaaatactatattattattgaataataaaaaaaattgaaaaatttgattaaaaaaaaaacaatagtagtagaagaatcataaaagaagcgacatcacggttctaagtttctggagcggttacacttttaaaaaaaattgaaacactaaaaaatattaataaaaacaataataattaacaattcttaatatattatcataatcaaattatttttgagtaaatataattttaaataaaattattaattctaaaaaatcaagagtgcatgcgtttggtaacacttttttaataagattttagttgtttaaattaaaaaagtgaaaatattttctaaaattatgttgtacaaactatttttcattttttcattaaaatttttttaaatgattttttcttcttaattaatattttctgacccaaacctagaccttggcattaggacccagactctgaccccgatccagaccccaatcccggacccaaacctaggccctgtcattggatccgaagcccaaacccaggctcggaccctaaccctaaccctaaacccatactccgaccccaaccttaaccatgatccgaaccctagaccgagatactgaagttggaccccgacccagacacgaacgcggactctggtctcaaatctggacctagaccccggacctaaacttcggaccccaagcccggtcttggccccgaacccgaaccctagaccccgaactaagactccggatcctagccccagttttggccctagacccaaaccccgagcccgtccccagacccataatgcattggagcataagtgtaaaatttaggctaactatactattgacttatttttttagcctaatttagcccaaaatttacacaatctattggagatagtcttagtatggtgttgagctcttatggtgccaaataaaagaccatttccaatggataatgtaaattattttgctaaatttggctcaaaaataaatcaattgtatattttgcctaaattttacaattgtgatctaatgcataagaagtaaaataagtttaattttaatagaacagtttaaaaaaactaacaaaattattagttttttattgaaagtatataaaa

SEQ ID NO: 303864 - DNA, 1412 bp, Cannabis indica
catcggtaccacctcaagggtttccacagatagcaccacgccaacaagcttaacctttcattcctctaatataaaggggttgaagtaagtttcgaatctttgacccaaataagaaaggatgccagtaaagtgaaaacaatctctatcactacaccacacaacacatggtaaagcgacatgacacttaatttcctataattaatttgtcttgtctattctacaacaaatacactatacttttttattttttttaaattaattattagttcattttatttcctgtttttctgaaaatctgcctgtgtgggggtatggtgatgaggttgtaaagtatttcttttatttattattgttctttcacagtacggattataaatataatattagtattattattttttatttcccttaaaatatcatattttagtacaacttcttttgtaatgttttatataccttcccataattagaaaagaagaaaaaacatgtcccaacttctttggtaagtgagattttctctcattacttaaaaatatattcatttgagttgctatagtttaattggtacatatataatcattttctagctactatgactttttgttacatatttattatgttattatatatttcatgctcataagtttgtaacaatcaatttctaacatcttcttttccaaagtcattttctcaacaataacaaacaacattacagttgaggctgaatcatcatcatcatcatcatcatcagtagtagtaatggaggattccaaatcaaacaaggaagaagatagaatcagtagatcaaccatcaaagatgatcacaactcgaaaacagtgtcgtttcgcaaactattctctttcgccgattcaactgactattttctaatgtttgttggcacaattagtgctgttggaaatggaatctctattccacttatgactgttatctttggaactctagttgattcatttggagaatctgttaacaaccaacaagttctttccaaagtttctaaggtatttatatctatatatattaccatatataactatatcttctctttgcttaatatggattataagaaattgttataatttcatgttcctgaaaaaagtaatatgaattatagtactaaaaatgaagtaatactaatatgaatcataactatatctttactatgaattataaggtttgagtcctttctgagtacctacatagcaattgttattttttgttgtcgaaaaaagctgaaatttgaagtaatatgggttacattgcaaaaaatgaagtaatatggattaaaactatatcttctttactcaatataaattataaagttcaagtctttcttggatatctacatagcaattgttataatttttattctcaaaaagctaaaatttgaagt

SEQ ID NO: 303865 - DNA, 3303 bp, Cannabis indica
taaatacacattcaagacagatcatgacaagtagtgggatgaatacaaaatacaaataatcaattgcgaccaaaacacaattatatatattctaattagtgcagagatcgatcagtacttgccgacctgtattattttaattaattaatcacttcttttaattaaggatatcttaattaatcctccacctcaagaaagacaatgtgaataatgatatattattattgaactagaccgtttatcatttgtcaaatgtacctaacaagaaagaatatagattaacttaaatgtaaataaatttgcacaatgaaggaaaccggcctatgtataattttactattacttctgtaagaaaaaataaatatccacccttttgaattactcgacaaaaggaagaggaaataataacaagaggaaacttttaaaatgtaaaagaaagtaacatgtgtgtgttaggttcattactgaataattccaaattaaattaaaacatcaaacatggcccctctgttttttatttcttaggattcttgtacatcgatcgttatcaatagtaaccggccaaattgcatgatttgataattaaaaccacttaaataagatgaacacatcaccaaacacaagccacccctcttattattcttttgtgtatacttacataaacatagtatatggctaaaataagcctcaaccactcattttggttttaatttatgaattttcaacttcgccatgtttggtcggttaccttttgtggggccgaaaccaaaagttgaaatcatgcggaatcacttttcttactttctttctttctttattggctaagaatggcccaccagacacaccatcaacaccactctaatctgtctctttggttactatgtagattggtcacatggtggaaatggatcagtgaatataattgatgagcttctggacatttctattatattaaagcatcctaatattgcaattgacagctagctatcaatgactatactgccaaaattaacttaactccatctccgtggatacatcccaactttcctaattcagatatccctttttaatatctcttttaaaataataaactagtgtatattacttctccactcctctgctatatagtatataccccttattatattataaattaatacactcttctactaatttaactcatccatcaagataactattttaatatttttgtagtcttagtcatacatgataatttaacgtgcattagataatgtctaagctgtttgttatatcctatttttatgtagagtttttctctaatttgttattaggggctgtattatataatctgatttattcctacaaacaccactttatagtacatacctgtttatccaaataagaatatataataaaaattaaaacctaccccactcccactcccactccatatgatttaataatatacattatataatattgtagttgctcgctactactataaatacgtgagacagaaataagcatttcagtgctatctgaaaagctttaattctttctcaatttccatctttattattgttcattaataataaagaattaattaatatggccagaattgccttcggacgttgtgatgattctttcagcttggcctccatcaaggcctatattgctgagttcatctccaccttgctttttgttttcgtctggcgttggttcagccattgctttcagttagtacttcttcaatatacatatcttctcattaattacttgtatcacaccaaacccaactatgaaaatattttacttttttcttttctttatatagctagatcaatcatataaatactacttattttgaaaagttaaaactcaatcaacttaataaaataatcaactctataggtagttagagagatagagtcatataaaaacttgttaaagcttttttgattaatgtatatattatttgtgtacgtgcagacaagttaacaagcaacgcggctcttgacccggctggcttagtagccatagcaatatgccatggctttgctctattcgttgccgtctccgtcggagctaacatctccggtggccacgtcaaccctgccgttaccttcggattggctgttggtggccaaatcaccatcctcactggtatcttttactggatcgctcagcttcttggctccattgttgcatgcttcctcctcaaattcgtaaccggaggattggtaactcttattttctattatcattaatgctacgtaatcgtaattagaattatttgaaatgacaataatgttcatatctttataagcttcagtacaaaaacacagagggtaattatgagttttcacatccttaattataaacattatttttataggccgttccaacccatggtgtggctgagggagtgggtgcgattcaaggagtggtaatggagatcatcatcaccttcgccttggtgtacaccgtttacgccaccgccgccgaccccaagaagggatccattggaacaatcgctcccatcgccattggtttcatcgtgggcgcaaacatcttggctgccggcccattctcgggtggatccatgaacccagctcgatcatttgggcctgctgttgtcagtggtgacttctcaggcaactggatctactgggttgggcctctcgttgggggtgccattgctggccttgtctacggcaatgtctacatcaacagtgaacaccaacctttagccagcgattattgaaattgaaattggtgtggtttttattgatttgtctttgtaataaaagcaaattttctttatgggattttcttttgttttattattgttcttgtaaagagtagctgttgtcaactttcttttgctttattgagttaatgcatgaatttgatttgcagcctttctgctacctgatccatctctctttttttacatcaagttttaattttcgagaaaaataatgctacacgctacactacttttttcttttaaaaaaaaaagagtaatttgcggcaaaactccctcaactatcaatttacttgcaaaaaatcatccaacctcatattttggtgggaaaaccctctaaagtactgtttcgtttacatttttaaggtgccgtctattcagcctcgttaagtcttaattttgcccacgtggcaatgtacaggtcaataaaaaattatcctaacgtggccatattttacaaaataaaaattaaaataaaaaacaaaaaatttaaagagtaatttgcggcaaaactccctcaactatcaatttacttgcaaaaaaccatccaacct

SEQ ID NO: 303866 - DNA, 758 bp, Cannabis indica
gttttcctttaaaaaaaaaaaatcaatatgaactttaaataaaattaaagactattaatctctcccaacaaattctataattaatagcatgaatgtatgaatatgtttaccatgttacttgaatagcattaataattaatgttccaaaatctccaagttaaaagagacatatggtacaataatgattatgccaagaaatatatacataaaaaatattataccaaaaaggacaataatgtatactaataagtacatagagttggctagcattgaagagccaaaatgtacacaatgttattatggcatttttccccctcaaattatttgttttgtcaattttttttagcctagtaatgttttccttgaagaatcatagttgttgagacatatttatgaccagttttcctcaaagaaaaaaaaataacaaagcttatgacattgcacaaagtataatgtaaaaattataaaaaaattacaataaaattgtaaaaattataaaaattgcgtaggaaatataaaaattgtatcatatttaatacaaaaataactttaaaataagataattgcatccatttttagcattgtgttctaatgcaaaattaaaaaacctgatgcaaactttatgttgcatttagttagaggtaagggaatggcaagaaatttcattcctatacttggttgcattttaaatatttgaatgtcattctaatagaatgatttttctatcattttcgtaaaatgactattctattttgaaa

SEQ ID NO: 303867 - DNA, 2201 bp, Cannabis indica
ggtataattgcttttttttttttgataagaagctggtataattgcttggtttcacatttttgaaacagaagaaaattttcttttcactatctgatcctcttcttaaaaagaattaaaataattgaaatcctgttcactgtggggattattttcatttcttaggggctccttgtcaatttttctgtagtcaagtatattttgttgctaggggactgattttcctattaatattgtgtaccatgctaatattttatgttttttttccttccctttttgcctttcactttggatctagttttaatattataatatatgaaatgtctaacagagtttacttaaatcatgataaaaactttaaatttataatttagagtattgctatggactatggagcctgtggtgttgagctctacacactaatttggtggttttacaatattaatttatccatgtggttaccacaccagtatcacttttcgtgtcaagcatctgcggtggctcttaacctataatatttggtgttgcattgtccatttaccaaaactattaatgtttgtaaatgtttacattgttgtagtttccaaataggatattcagaagtaatgacatgaaaaaataacaaccaagtatctgtctcttttgtcttcttcatcatacttgtagcttgctgattacaatgtctgtgatccatgttcaatttactgtggaaaggcatatgctccaggggataagcattccctatataaatggactgggaactttatttttcaactccctctaattttgaaatggaagtgttctgaaggatttttttttttttgagtttcaaccatgtgccttagttggtgtttttttcctacttgtgtctagagcaagaacggcattctttacaagcctgatcaagaatgggtgcagtgtgataaatgcagaaagtggagaatgttggactttgagtttgactccaataacttacctccagaatggtacatgtactttttatgctatctttacttttatgtactctatatacagtttacttgcatttcattggtatactttggagtgttcatgtctgtcaggttcaaacaattcactcaactaaagatgtacaaaaaaaaaaaaaaaaactgtcataaagaataactagtgatcaggctttgtggtttactcctcttagaagttacaattccatctagggagcaaccatgagtttcgtactccaaagcttttagtatattgaaaggttttaattcaaagcataaagcccaatgagcaagttcaagagatcttagctatatgtacataatccgactttcacttgaaaccaaaataataaaagatacataaataaatgtagagtactagttcctttcaggtgttggatggacacggtattagtcttaggctaccatgttttttttttcaattgtatcttgcatagcgcaaagtatgttactcagatatgcaataaatgtttgaacttggattttccatgtaaatagggaaattgaacttgtattttccatgtaaatagggaaattgaacttggattttccatgtatgatactctagagccatgtaacaaatatacacataccttgagttagcacaagctgttgcatttagagtgatgatatgtgcaccctaagattaaccatatgtctctgttgtaatgtttgggtgcatatttttggtgcacatatctttactcattgcatttaataaccattcgagtgtagaaaataatgaaagatttgatttatttataactgttgaagctttactagcaatcatttgttggttatttcaacttctggcattttttagtattctgtcactacatttgtacactgattatatgtcactgcttttttccttgaaaataaataatggcaggttttgtcatatgaaaccttttgagcgaagctgtgatgtcctggagcaaaaatcatcgggattgattacagtatctgcaaagcgatctggatacgaatttggtgtctctatcaaatctgagggtgagctcgtgaacaatctctattattataatttttgctgtggaatttatgcttttattcttaaattcatataaatgtatgtttgtgcatatatcactaatgtagaaaagaaacttgttgtagaaaaatgagaaaaatgagagaaatgatttttattttctgatgatctcttttagtgtatac

SEQ ID NO: 303868 - DNA, 1448 bp, Cannabis indica
aaataaaaattattattttattatatctatttaatgtcatacataaaaataaaataattattctttgaaaaaaacatatttattaattagttatattaaatttgtctaaacaatcacatcatcattattaattaaagttataactattttttttaattaattgcacgtatagtggtgatatagaactatttaaacaatcacatcatcattatgtttgtcacgtatggcaaaatctgacagaataattaattgataacactgttaatagttttaagactatttttttaatgggctaaaaaatttagaggcataatactacatagttataactttatctattcattttaatccatccattctctaatccattcaagcaaacaatgcataagtgaattagtcattacccagccttaaatcaattttgacacctaatttcactataaatataactcaaattggtcacgaaatttgtaataataggagcatttattctcttcaaattaattttccaagaaactcgtaaatacaatctcttcaaaagtggatgtaggttgttatagtggccgaagcactacaattattttgtgctctttacttttattgcacccaaatattcttgtaaagttatgcttcaaaagttctctttaatattatatagtagttgactaaattattttaatatatattttgaaaaataaagttgagattatattgtgagtgctttaagtaaataatgagatattataacatgtcgttaattgatttagtttgattgatgtttgccatgcatgacacactttagttgagttactcttttggtgttttggtattattataattattattattattattaagggggaatgttttggtattattgacaggcataataatcattgtaatgacaaataagaatgtaaagagtaaacaatccacttataggtatccaatcatatgatattattttgagaaaacaaaaaacgaaaaaagtaagaaacaaacttaattgtaaatttattacggctaattgtcgttgtcatgaattttatatgttctcttctgctccccaaagtcatgattgtgcatgtaattgatgaacatagtatagtatcaaaatgagaatctaccgaaaatggtagatagtgaaatatataagttggcgcctacgggcggtgatcatcgactcgcttagtattagtattggtggtatcatcagctccacccccacttcccatgctaaagcccattcccatgcccattccaaatcccatactcataccattacctgatttactactacttccaccgtaaccttttccaacgccacttcctacagtaccctctcctttcccacttcccattccaaacccactaccctcaccatgaccttctcccccaccactaccaccaccaccaccgccgccacctccacctccaccgccacctcc

SEQ ID NO: 303869 - DNA, 1167 bp, Cannabis indica
ttattttattaaataaaataataaagtcacccatgaatttctcataaactaagaatttcagttatataggcaaactttatatagaatagatatataaatgtatgagtcgtaaattaaatctgtttataatcgataggttaatgaaataataataagaaaaagaagaaataatttgagtgatggtatggctcaaatattagttttagaaaattaaccatctatattaatataaacattataaaaacgttttcatggcaagtaattaatgcaactctcttcaaaaatgaaataataatatacaacttttactatatttacacctttaaatatgaatttataataactttctcaaaattttagaaaaaaattacatttggcacggtttttaaaaaagaaacattcatattttacttaaaaataattaattacaaattaatatgtaaaatattcttgtgtaaaataattggttgttttattgtgaatttgtgcaactttatttttgtctctaaagtattgaaatttgtccatattaacaaatagatgaatattcttcctatatataaatgttttatatatatatatatatatatttatatatactaacatatttttaaattaatattagaactccccaattaattatatttaaatatatatactttttaattttatataaaaaaatagatagcaattagcactagaagtttcatgctggcacttcaactgttttaattggttctaaagattcaatatctataattattggatccattaattaatttatttgatctgcatgcttaaattaatattaactactaattattatcactatattatatatggtttgtaattacgcgtggtgcactgatctacaatattactatattctcctgttttaaattaataatgagaattgtgtttatttttatattaaaaaatatatattatacatagagtacacagtaggagataagctcatgctaactatatttaaatatttgagccacgtacgtatacaattggagtaacccaagataataataataataataataataataataataataataataataataataataataataataagaataagagtaatttgcggcaaaaatacttaagttttctcccgagtagcagataaatacctaagtcgta

SEQ ID NO: 303870 - DNA, 2813 bp, Cannabis indica
gttgttagttcttttttgttttttgttggtctcgccataaatcactattaatgattgtagaataacaagttctctacgacaaaaggggttattagtagtgcaactacttatcttgcacaatagttgagtgctcatgctaagaggttgaatagacatgttctaacaatttctactgttgtttcttctgagcagtagataaaattgaatataggtgttcttaaggtactttatgatgctgcaatctttttcaatgttttttttatcaaatgatctaggaattagacgattgattatttgatttgttttttactaattctaattttatttgtgtcttcaacggaagatgtactttaattgaattgcatactaatattttaactgattgttattaataaaattatctcatttattaaaaaaaaaattaaaattagactaaaaataacactttagaaagtgttaaagatattttgatagcaattctcttgagaataagttgaaaaagtgaagagaatcacagtaaatccatgtgggtgtgttttactatgatatgtctcaacctaattttatgggacaaaaggagtatcatcaattattattattattgctattattatatatgggtccattccatgcatttcaatgcaaaatttcagtctttaaattttcaaaaatatttatatatctttaatatatatatatatatgtatgtagtgaacatataatacacttgctttcatggatgtgactaagcactgtagtatttgtctggtgtttaatataatttattttgggttatattattatttgttttcatttaggtctctaaattgttgtctttatgtgcaacacaagaacaagaaataatcccacattatattattgttattttcctcttatatactaaacaactcaacaacaagtgaatatataactcacatttctcttcttttattactaggaatataataatataggaaaatggattttgtccttttttattataagattgtttgatgtacttatttgattaaggtgggatatactctggcctcggtattatgtaatttggtttttaaccgttagatcaactcaatcttaattcaataattttcaggattacgaaatacatactctcacggaacaaaattcactccctataataatatagctattgagaatatattacatgttacccaaaattatatgttgtcttattatgtgcagtaagattctaagtgggttgtgactaaagatgaaatatcattttcatcttattttcagtactgaaaaaaaaattatatgttatgataaaagtgtcattctttttgtgataaagatgagtttcaaccaaagaggaaataatgtaagagaaaagagttagtgatttctgtaaaaggcaatctttctaactataaagttcataatagagatgaggagatgagaagagctttaaatatagtttctctatttaaggatacacaaaacttaagcttcttctgaattgggattttcttcctttgtaaatttagttaaaatctcctcacaacatttatagtgatattccccaaaatgtcaattattactaagtagtgagtgagtgagtgacatagttatataagagggaaagtgatatgaatcattaatgatatataatcatttatgtttataccaaatccactacctgagctagtttttctctttctcttttttccaaacaaaaaatgagtatctagattgactagaaactggatttagaagtgtttgccttatccaatctcataagcctaataaacacaaatttgggcccaatatatcttggatctaagaccattcatttggcccattagatattgattttatatttgcatccatgattcatatagaataatgtgagttttaaattattttgtagttatatttgattaatgtgcaataaaaaagagttaattttaatttatcttaaataatttataacataaatatttaagcttaactctcttgtaaacaaatatttaagtttgatttttgatggtaagaatatttaaattatattttccaaacttctacaagtatctcactgttaagtgtaaagttaatgaccacgtgacaacttttaattagtccagactactaatttttatttttatttaaaaattaattaaaatataccaataaaaaaacgacatgtagataatgactagacatctaacggctaggtggtacttatagaaattctagaaatataacttatgtattattactgtcaaaaataaaatttaagtatttatctgcaaccaagaattaaacttaaatatttgcaccacaaattactctatataataattataataaaatctattacaggatcaatgtaaactagttgacttcattatcattatctttgaaatcttccaactttacattacataattgcaacaataataatcatgatcatgaccttaatttagtttgaccaacatggccaacatatgctgcagagtaaaatcatgtatcaactacagattagtccactgaaccatttatgaaccagtgtcactcttctttaaatattggtccaattatgttgtgtatccctaaaagggacatacatatatgataattacattatgcaactatctaaacaagtaagaaaaataaaaggttctaattgctcaactaatcatagtgattcagattccactcactaggatttactaagttcatgaatgaagaacaaagtactaaacttgatttaacaagattgactgaaaccttaggataaactatcacaaactttgctagttcaattctac

SEQ ID NO: 303871 - DNA, 5745 bp, Cannabis indica
catagtgagtaagacggtggtaaccaaacccaaaagagagaaagagatccaggtgcagatcttgataatgctctcctacagaaaggaatcaagggccagagatatgaacagaaggagtcattatattccactgcaaccaatgtagggttttcaaaactcttatgtgtttaatttcattgttttatagatatttatatttaggatgttaatcaacatactggttagtaaatctagatactagtaaaattttcccaacacttcattagtgggtaactcttcaaatcccattttctagttgttttcttgaatcaaccattattgagttcaagctttttacatttttgattcttacgttagattataatcttctccacattctgatccacgtgatagctttacgatgcataatgtgtgataacctgatgaaaaagatttgacgttgagatttgttttgattcttgactctttgactcacaaagaacacgaagaacatattcgagttttcaaaaaatatattttttgatccatagaacaccctggccggcacatggagccatttcggggagctttctgattctgggcctccgcctggaaccctggccagttcctgctttgatcagggaccctagccggcacatgctaatgccttggaaccctagctggcacatgcctttgaggcaaacataatggccagtttttggtcctctttgactctagcaagtactttattatggccttatgagcctgttcaactcttgtctagtacttgattcccttagatactctgtatgacacttcttagggcaagtctatctttgtcaattaacaacttaagaatcaatgtccatccaagttcttgcacttggaactcgtactttgctgatttttagctttgaaccatagaacttcctggctagtatccttaggttcaattgacaagtatttcatctaagtcttgtcactttgtctagttggtcacctccccttatcttttgtatgcaaaggaactcgcgtgacttttggggaggtgacaatcgaatagacgaagatttacttagtcttctctttgaagaccaccatctagctggttcttcgagtagttcctcgagtgatctttaggttagcagtggttccctagagcctagagtctagcatcaaggatacgcggagcgaataggaagtgaattttatggtcgattcatctgggagatgaaccaagggtggaggcagttcctccctagtttatggacctatattgttcgggaaggtgtactcgatatattacccactggttgagcaacttcactagctagagatctccctaccatagagactacggttaccatttctataaactctgagtctatcatggcaaggaccaaacaaacatgttgtagggcacccccttatgacccacacatcactgtgctaatgacgagcaaaagggtcagtattgttgaggaggattaacaaccccaacatgtttaggcaggagtcgaccaggtcgaggaatcgatggctgagctacttgtggctagtcaagaagaagacgctttgattaggatagatatcatatttgaagtccaaaaggctgtacccgttaggaggcggtacaaaacttgtaccatatttttgaaaacccctctgggttcttttgatgaggtcaagcgacctttgaatgctcttggtcatccgtcagtggtcaggatagaccatgtcttggacgagtctactgggcctcaaattcttgagcggagggagcagtagagatggatatcccctccattgtctttgtcggctagaaagtttgatgagataaggagtggaggactcgtgagagaagttcgctgtgataagcctaccaggagctatactctcttacattcgtattttagggacattgccaactactttgggttgtgtcctacttagatcacctcgaaaggaataaagtacctttcgatacttttttcctttatgcaaagttgggctggccgtagccctcaccctatgagattgggtatttctttaacgtgaactctgttccaaaacaaggccagtttggatcttctattttagccagatgggttagtaattgttaggtaacacaaacagccatgtcgaaggtaagacggtactcccataactatttcattgcctgggatattagatatgtcagtcactgcttttagaggggcctacatatgctcgttttattttcatcttcagctgaaggatagagctaatcacatcatatccctccttgtggagaggagggacatactcagactggcttgtgaggcaaacttttagaggtatggttcatatcctcctatttctggtgttgagggagttgaaggtcctttctgaggcccaaatgacactccaatgatatgagcctagcctgggggaaggcctacaactgagacatagccaggagggattgggccctccgacaacgtttggcacatggaggtactgttggtaatgcctccttgctaattaggcctagaggccaaggatctgccaggcctggtagtccactgcctgcctctagagacaaaggtaaggtagccgttagtgatagtagtttagttgattcctcctccaaggatgattatcccttagatggtagttgatagtatcgattgtttactttttcttgcatttaatactgataacttctattctaactttgttactttctattttctagatatggcttctaggatgagggatttagcaggaaggctttttggtagtacttcctcaggtcatcctcaggccaaggtggcccaaactgctagatcatttaatgctaatcaatctacattgcctcctcctcctccagggcctgttttcgttgaccacctagtgattatggaccctcccccgaggagcattccaccccctcgtaggccttcaagtaagggggtctagaggcttagcagggtagctagttcatccacaggtgaaaggatgctgaggttgctctgaatgaccttcgcaaattcattccaagcgttgacggggagctctaggagctggagtccgagtagttggagtgcttgacatccaacaccctgagagatttctcattcttaagttgtttattcgattttacttgaggtgctgatctgacaggggctgggcgacctatagaatcttttagccagccaaagagacaatattaagattctggttggccaggttggttccacttctaactggatttttcttttgattttaggccatgctaaagcttagcctcacccatgcaaggaccaaggaatctgctggtgttcctcaaaagaagttagaggccaaggaggctgagcttaaggtggagaaggatgcacacacccagatacaggctgacttttcgactcgcttgacagagaaccaagatctaaatgatggcctaaactgactgcttggtcttcaaaaccgagaggtgacaaggctcattgctgagacctataggatgcaaaaggagcttgagaaggagcatcgggagaagaaattggcccttgatgggcaacaatccatcaagaacgaatatataggcttatcctctgaggtcctatatgaggtttatctacacaatcccaacgtcgatcttgggtacatagggtgtcccttctacgagagttcacttctaaggggaatgacttctatacgagtaggttggtggaagatcaagccagctaggggacagaccaagtggttggccctgctgaggaagcactgtctggccaacttgaagaggttgtggccagcccacctatggaggcagtggtcggctagcctattgaggctatggccagccaaccttttagagagcaggttttagacccttcctcttaggctccactcgtccaggctaatgtgtcatttgtggcccagacaatttgaacccacctatgcctatagatgattagacacttttttttagttgctcatgcttttatttagcaatttcttattcttgtatggcttgttggccttttacttttgaacaatacttgtatgtggccttaaggccttttattttttatatatgaccgactaggcggtatttaatcctggatttttcttcttttggtatacatgtaagtatctaaatttacttttttatatctaatttgaagtaagccttttgcacttacttagcttttaatttttttgcttataaaaagctttaaattttgcttaaatttagcttgtgcttgttagatgcttgtatggtgtgagtgccccccaagtgatcaagcagacttatggtctcttagtcacttgcaattcaccaagtattataaaccattgcgtatgtgttttcttttggggggacttgttgttagcatatggaactaaaaataaaaaataactttaagaagttctcttgttagcaagttgtttgacctaatattgaagtgaaacactatttttattccttaattggtcttaaatatctattgttgctgcacaatgtacatttattgattctaaattcttgcaaaataaaagtctacttttagaactcatatgaatacccccactcgacatgccagacaggggacatcactgaagagtcttggatacttatctctttctaaactaactcttataaatgagttgacaaaactactactgaagagtagcgttcttacaacttggtcattgatagtaccttcttagatgttccacataccaataccttggtagaagaacaaactccatgttcttattatacctgccaagcttgtaggcaccttttcttgttatctcggtaacttggtagaggccttcctagtttggtctgaaaactcctactgaggaatctctggtatttaggaacactctttggagtactaagtccaatatgaagagtttcatttccttcacttgtttgttgaagtacctagcaaacttctactggtaggcatgaaccttgaggttggcttggtctcttctttcttctattttgtcaagggattccgccaacaaggtgtgtttactcctttgtcataggttatcctcctatgagatggtggctctagttctacaagcaacattgcttgatagccataggctaatataaacggtgtttgcttagtggttgtcttcctggtggtcctgtgtgactagagtacctctgggactaatttagaacaattgccttttgccttttctagatgctttttcaaagtgtccttaagggtcctgttcacaacttccacttgaccattcatttaacgatgagcaatggtggagaagcttttattgatgtcgtgtttgttgtagaagtcagtgaacatgtcactatcaaattgtttcccattgtcttacaaaatattttgtggtcatccaaaccagcatatgatgttcttgacaacaaagtcaaggactttctttgaagttattgtcgtcaggggttcggcttttgtcaacttagtgaagttgtctactgcgactacgacatattgtacacctccttttgccttttggagttcaccaatgaggtctgttccccacccaacaaagaaccaagacgactgcatcaatgtgagctcgtttggtggagctctcgtgacctttgagaatcttttgcacttgttacattttttgatgtagtctattgaatccacgatcatggtagcccaaaaatacccttgttggagtatctttttgaataggttttaccccctgactgttgggttttgtgccctaaataaaacccattac

SEQ ID NO: 303872 - DNA, 3948 bp, Cannabis indica
ttggaggttacttttgactaatttgaatatgaattggcgctaacaaataataagcttaagtacatttattgggtacataacattgtcaactttactttaggacatttaggaaatgactaaaatgtctccttttcccggatttactaccaccaaaccaacataggcatttcgtacttcgttggtataaacgtactttaagtaacaaatcagtcatttcacatacgaatagatttacaaatattgcatttgaagttaaacgctctcaactccacaccctgactctactttccccaccaaagaagaagaaaagaaaatcaccagaagatcatatcattccttgtcagtttttttttgacagaaatggtgagttgggtaatctctgtatctatcctcatcgatctctttctttgcttttcaaatcttgttctaagctggatctatggttttttttttctcctcttcctttgagatggaagatccaatttcgtacatctaaacagatagggtttcagaattttgaaatgctcaaatgtggtttctgttttctaattcaattggttatgatttcttcgaaccacaatgcaatgtcttcccagaaattttatcggttctacagctaatcttaaattcaagccattcattagtagtcttttttcttctctttcttgggttattctgtttatgaactagtagtatggaaacaattgatctattaaacaattggtatatgttaatgtttggttacgttttgtcgtttgcgcttaagtattgcatgtgatttgtttcgattattaatcttgtcaggacggtcacaattcagaggatacaaaggagagtaccgcggacatgtctgcttttgtgagtaccttatttctttatgaagttggaactttgttgttgagcaattctgtgtcagttagaattcgttaaattttaccttatcaatcttttgtcagattgggattacatacaatgttatcaccacaatacccttaaattgtaaaatacttataatgcatttaataatcattggattaacattgatatagttggtgcctattgcaaggatgttgttagccataaaacatgtaccaaactcatatgcatacctccctttacgtgcttccatgaagtatcaaagccatatgaagtgtctttttcgtatgaaatgccttcctccttgaactattcaccaacacctgtatataaatagaacaagaacataatttaattctcaatcacacatagacttttacatggtataaggatttgaatcccaaattttctttttcatacatctttttcctctgaaatgtttgtctatatgatcgtttgttatagtcatctttagattaattcctttcccatcaatgttttgtttgtttactcgcttgtttgttcactcattttacccaagaggggtagctcaaatggtcgacatgtggtttgctcccacaaggtctgagatttgagtccctttttgggtacctacatagcaattgctatagtttcttggtccccaaatattgtagggttaggcgggaatcctagttaaaaaaaaaaaagaaagaaaaatcaaggatcaaattcaatcagatattgagatttttttagcatctgaatatgtagtttgggatatggctcaataacataactattttgtgtgttgaactcagtaaaacagaagataggttagtataatagtatgtacatgaattttgttgtaaaaggacatttatttggaacaacttttttgagactgtatacttgtatcaaaatgctcaaatggcatgctataagtggaagcacacgagggatgtatttcaatgtggtttggagcaatgtacttcatattgaaaatgaatgactagataaaataacgtttaacaaactaatgacaacaaacactcatacctaaaataacagagtaactaacgacactagttattgctgtcttgacaaatggatttgtcacatgctttatagctaacatatccccttgagttaaacacttgctgcctatctgagttcaaccattccaaatgccatataggcttttatatggtcgcagcagctgcagaagaatttgaatctcaattttttttttcgtatttgactctgtttgataatttttattatcatattgattaattattttttcatcattgttcctttattcactcatttgttttatttgagttattcatcatatcaaagataaaattctttagttaaatattgggtccaaaaagaaacgaaaaatgataagattgtatatttttgttgaatgtgcttttgaattaacaatttaacagtatatcaaggattgacttgcatatatatatatatatatatatccaccaactgaattttgttctgaatttctgatatttaactgtttctgggggcttacttgtcaaagtctcggcataacatggttgcaatttttttttttgcaggtgcaagatcttcttcaacagatggtgagtttagactttaaattataatttctaagtacatggtcagcaattaaagtgagcgttactgattagaggattctgtttatagcaatgcaggttccaatcaatgtctgactccattgtcacaaagaatatccttttgcttacgtgatttggatgatatcttgattttgtttccaaccaaaagaaaaagccaacctttcccaaccattttctatgctgttatttgaaacttatattacctctagtggagaatgtctgctcaataattttttttccttttgaacggctctatacttaatttttaattattgtagaaagtggtcgaaggggcatggagagctatgacatatcaatttctacggtctagttttgatatatttgaattataatgaagtagggaaaataatatttgtatctgttcttgattttgcttgtggggatgtcggtgattgtttcaaatgtgtctgaaattgcggtatgctttgttgttattgcgctactttgctacttttttgctttctctgaaacttatttaaaatctggaggtttcatcttccttaacctgcaatgaacttgatgatatggggagccgaataaacgatttggagcagagtatcaatgacttaaagacagagatgggcatggagggctctccctctcccgtggtctcatccaaaccaaatgccgatgacatgaaaccagaggaaggctctgcgtagatttagccaaagctcaagttctccattgcatgctggattttctctgtctaccattgtggctgaggattgactagtcattcatgtgaggatatatgtgcttttgctatgccgcagctgcagctgatttttattttcattttaggtcactgacttactatatgttttgagtaactgctgtgtgtgttacttcaactatgatcatgaacattgcaatcaaatgatgattacatattctatgctagtggccccaattcaatccatatttttgaattggtgtctagatctctagaattgtttggaaattcattgttcctcttgtttttttgtcagttcatgcaaaattttactttcaaaatcctacataattgttgtgagttgcaaccaatgaagaatttgaaaaagaatagcaatttctctgcaagagtttttaaaaaggaacattgctattaggcaatatacaacaccattaacagtataacaatgctagaatgctatatacatgctcaaattatacacttttgtgtatttaattttaaccgtaaatagtttcaaatgacataccataaattactttgatcttattaaataaaattaattgtagacagtagtttttatttcccttgtgtttccagcagggccggctctgagctaagacgaaggaggcagccgccttaggccccccgccgctcagggccccatttcgaaaaaaaaattaaaatatagttagttataaaataaataataat

SEQ ID NO: 303873 - DNA, 1822 bp, Cannabis indica
ataagataaatattataaatgagggataaaattgcattttgtttgtgaatcccttcacagtcacatatccttttattcgaaacttagattttatttttattgaaaaatattaagtattatatttacaccttaaaaaattatataaaggggtattttatatataaggtgttcaaaataattatattatatattgagaatattatgaaagaaaatataattgttcataaacttttaaattgtatttaattatgcatgagcatatttaacaaaattcccgctatttattgaatcatattgtttgattgttaagataattgaaagaaataattcaagcttgtcatatcataagaagtgttaacattactcttctctataatagtaattttaatattataatttttaatattttaattgaaagaaataattttaatattataattttttttacaagcattaacccattctaaacaatcttttaagcgcctaggactagaaacaaaaaaaatcaatttaaagtaatttttgaaagtgactcttaattattttctacattatttgtgttaatttcaataattcatttttatttttatttttatttttatatatattttaaataatatatgtatatatttattcttgttggccactattttcgacaactatttaatcttattttctaaaaattaattatgcatccaaaaagatatttttacgtagttcaggtgtgtcacttgcatttatttgtgcaatgttgttcttagtcttacaaaggagtttcttttctcctctctagaaaatctcccatttactttccattattttcctatttataggagagaatggggaagcacatcggggtttaaggtacatcgaggttgaagcccaccaaacacatggctaattcccaaatggccaagtatttcggtaaaaaaatacgaacaacatttatccccaagtttcaacttgcaattttttaagtcaggacttgttattgattgccctttcagctctctcccgaaggggttattcccgaaggggagcttcatacccatgggttttactcctttgacttagagattttgtcttggtatactgaagaacagggaaacatggtttgtccgagaagcaagaagagttccaagaaacttaagggggtctctaagccccctttggtcccattaaagaatgttctcaatggtccagttctagtgtgggaggatgttcgtcaagctactggttggaaagcaaatgaattgcattcgtccttgaaaggattacaccaactcgaagagatttttgtaaagagcggtatcataccccgcgggggagggattttccactggctacccagagaccaggagactctgaatcacacctatggaagcttcagagcacagagttagacacaactgatgtctaacaccagtctttcgctagtacttagttgatttctttgtttttgtggggcttgctccataccaattgatctcgcaggccaatctttgatggataaactttttattttttattcatttcgaaggtgggaggttcctacccttgcaaacccatctaaacaataagggccaagtgccttataaacaccaaaagaatatccaactgtcgaagaggtgggtcttcttacgactcccagggctgtcaaagaccatataaagtgctatgtttaatatattttcgaattgataattattaatataatacactgttagaattattttaccaggatctagatttactaccaagtatgtttgattaacatcctaatatgaattctaaaacaatgaaataaacacataagagttta

SEQ ID NO: 303874 - DNA, 3160 bp, Cannabis indica
tatggcgtcggttcaaataaaccctttagcgtcgccctgataggcgtcggttgcgaatttcgcgaaaaccgacgcctaaagggcttaaaaaccgcctctaaagggtgtttttgtagtagtgacatgatattttcctcatttaattttcaggttttccacaatcaaagaaattatttaattcttaattagctagagatagagtcaactatcaaatattttctattagtctcgtgcttctaccaagttatgtattagtatagaatattgctaaaggaattatttacataaagacaagtttagtggtcatatatatatgaatttttgaaggaaaaaaaaaaatcatttttagctaggttagataaaaaaaaaaaaaaaaaaacaacttgtacataatgatataataagtgaaagacaaaatgtacaatttacaacctatcaacggttgaaaatagcattttaaacacatgtttctaatgctcaagtaggtacctaacataggattctttttacttactttttaaatcctttattaatttctgccaaccatattaattagcacatgtgaacagtgcattatatatacacccatttataccgtgtacctacaaggaaattagaacaagaatattcaatacactaaaatacatatatatatatatatattactctactgcttcatcctttttctagtcgttgttttacttggtaccagagccaatagcgtccactggttcgcaaggtgactccttcgtcaacaacaacaacagaccccaagccgtcgatgctcctcctccagcacttccagcacctctgcaccagcaacttttgcacccatcaccattcgacttgacagagacaactacccctactggtggtcacaagtggtgacgaccgtgcgtgctcatgacctcgacggtttcctgtttggcacgagacagtgccctcctcagtttgtcgagatactccttggtccaaaccaagagatgtaaagataggtaaactcctcatatactctttggattagaattgaccaagctattttgagttggcttctcaactccatttcagaggctatgcttggccaagtcctgcaatgtcaattctcccatgaactatggtcgcttttggagaatctgctcaccactcagtctcgagcacgcctccttcagctgtaatttcagcttcaatcactcaagaaggggtctctgtccattcatgactacatcctcaaaatgaaagccatagcagcagcactcaactccacaggacatacatttagcgatgatgatcttatcctctatattcttggaggtctcggatccgaatatgactcggttgtcataaatctcaccctagagcagatcaactcaccctatctgaagtgcaatacctccttcaaagttaagaaatgtgaatctataaagctaacgatgccttgaacacaaacctcaccaatctgactgcaaactttgtagcacgcaacagaaagccatttgtgcctccaaactctggcagaagttccaacttccgcggacatggacgtggtagaggcagaggaaatcaaggatgtgtcatctgtcaactatgtaacaaaccaggtcatcatgtgaccaaatgctactatcgatttgatggtgccttcaatccaaacaacaacatccaaaaccatccaaacagctctgcctcagccaataatccaaacaacaaccagcaagctttccttgccaactccactttgcagcctcgcccaaatgacactaattggtatgaggatagtggtgtttcgaaccacataactgacaacgcaaacaatttgcagaactccactaagtacaatggtaagacaagactcatagtgggtaatggtcaatctctccacatttctcatattggcaatacttttattaaacctttaaatagctctattcctgtcaaacttaaaaatatcttgtgtgtacccactattgctaatactcttcaaagtgtttctcaactcactaaagataacaatgctcaggccaagttttatgctgactcttgtgttttaaaggacatggactcaaagaaggttcttcttcaagggaaggttagcaatggactatatcacctcacagcaccagcagccggttctcctcagttgtccataaataacagtcgtagtgtttgtcctagagtctgccaagtcctgttttcaagcttctgtcaatgaatcaagtttgtggcattttaggctaggccatccttccctcaatgcactcaaacatattttaattaatgagaaaaagtctttaccttctaccttacaattctgtcctagttgtcaacttggcaaagctcatcataaaaattatccctccaccctcaaagaatcaaaacaattgctagaacttgtccactccgacatatggggaccatctcctaatatctctcgacatggctatcgctactacattcacttcattgatgatttcagccgctatacctggatatttcccctcaaaactaaagacgaagccctgcccaccttccaaaaacaggtcaaaaaacacttaacacaaccattaaaaccgtccaaaaatagattggggggcaaatatcgaaagtttgagccttatctcgagtccattagagtaaaattcaggcatccttgtccacacactcaccaacaaaatggaaagcccgagcataaacatcgtcatatcgtaaaaaccggcctcactcttctagctcactctagtatgtctcaacgattttggtgggaagccatccaaatagccactttcctaatcaatcatctacccacaccaattctccattacaaatgtcctttggaaaaactatttggtctcactcccaactacaagttcctcaaagccttcggcagtgcttgttatccatatcttcgtccatacaactccagcaaactcatgtttcgatccgccaagtgcgtcttcattggatatagtccaagccacaaaggttatctctgtctccactcctcaggtcatgtctccattgctagtagtgtctcgtttgacgaaaatgactttccctttgcttcaggcttcacttatccttccgcacacaaagatccaccactcacatgtgacagtcagtagtcccgtgatccataaggggaaataccgggtaagctgtgcaa

SEQ ID NO: 303875 - DNA, 3316 bp, Cannabis indica
agagagagagagattgtcatttcaatatgctcaattatttcatggggtatcaaatcatggcctaaagaaagactaaaagtgtctttagctttatatttattaatgtcatccctttcttatttattatttaaacattcttatagaatattagtagtgttgaacattttttataagtaacattttacgattaattaacaatattatttaaaaattattttattaagatataaaatctaatacttaattatactaataaaaaaaataaaaaaaaaaaaaaaggaaaaaaacaaataatattttttaataattctttttttatttatatgaagagaaattaatattgggtaaattaaaattactcgtatgacattcaacttgcgaaatctcacttaatctttgaaataattgattccatacaatgacggggccataaggggttatgtaggggcacatgaccccacttaagttttaaaaaattatatttttatatagaaatttttaaataactttaagtttgcctacataaaattaaatttttagtagttttaccttttaaaatttatattttttaaaatttttatttctaataattttatgtttattcttgtaaaatgtatattttttttctttttattcctataaaaaaaattccccaacaaaattatattttttttattaatatattattgccttcgtcactgattccatgtgatcgcaaagttctcttattctttcattatttatttatttatatacagatttgcttttcttttttctttaaaaaattattacatgttaacttgaatagtagaatttaattgatgttatgttactaaaatactgtccatttgcgtccgcaaaaaaaagacacaatagccatttgtgtcactttaataaaaccaacgtatatttttaggagacctatttgctcgaacatttgtgtcgacacaattgagtgtgtttgtgttacgcgaaattggcctgccctaacttcatttgtattggtctattattacgaaattaacaagagtattgatcgacgagaaaagcgatatttgcattactgtgtacgcacaaaacatgtaaatgatcttcaatccaacaaaagcacaccaaaaattatggaaaaaaaattagcctcttcacgatgaatggtgtccataagagaccaacaataacatctaagaacttcgagtagttcaaactcaatactcctacgttgaaaagcataagaactatctaatttaatctaaggagtaatgttaaaagataccaaaagtgcttttaaaatctacacaaaatgtgagtttacgataaaaaatacttctttttttgtatccattaattaaaatatttttatattatattttactaaaatatactaatttttcttgagtggattgtctaatatactttcactctctacttaagtctagcatataatttacttcaacctagaaatttaataggaacatcatctataaaagtgaatatatcttaaaggatataaaaataaaagtaaaaattaaaacaaataaagtaaagtgaatatacaatctaatttctccccaaatgtgatatttttaaactatttgtataaggttatacctagtaatagtgtatgatataatatatattggactttttttttatttgatgtgacaaaatctgacccaaccaacaaaccccacctgatcgaatccaaacccatgttcctttactgtttattgcttaattattaaataaatgaagtgaattaaatattaattgctatggaaatactttgctttgttaaataataataataattattattatagtgtctatgtgagttgaacagtttgatgttaggagatgtatttatgacttattatgaggattgttgaagtcttcgttaacacgtaagctaatgctcattaaaaaatacttataaatattatcttaaaatattatataaaaaaaaatgctttttaatcaatatttatctaaaaataaaataattattaaaaatattaaaatataccactttaaaatattaattcaattaataatttagtctttctttttgaaaaaaaaaagtataataatttaatctttaactatgagtgaagctgtgtgaaggcattagtcttattaaaaattacacttaagtacttaaatttaattatttatcataccaaatatatttaaaattaacttttagtgtacatatgtattatggttaattaactttatcattaaacatcgatgtggtagagtaatttaaatatcaagagaatggaagaattcatctcatgagcgtgcattggattattatttatggcttcaagttagcttatgtacactaataagtttgttaagtcattccctctaaatactatttgttaatttggaaattttttttggtggcgtgaatatcaatatttgacacgtggcaaaaaatatatcgttacacagttgaatagactcgaatcatagcagtcgacctaagaggagacactagccctgggcctaagttaacttcgggagctccaaaatggaagtttagacttcaataacttgaattcaattaaatatccattaatattctgtaccatgaagacatagaacaatcaaatacaggccccgagagttaaaattacacgaagttgcaatttggaagccaacttgggcacctagggtttcacctaacgcctaagttgacatttccaactaggattttaattttcgagaccgtcttagtacaaatggggcaaaaattttattgggacatcaactaaacataccacagacatgtttgaggtatcgaaatcagattcgaagtaagttcattttttagcacccgaacccggtgcccaggcacccaccgcccaagttgacaatttgtcaatctgggcgcctttcgagtatcagatcgacgatatgactttttcatcttctttgtcttcatcaaaaataggaaaatatgtactttcggggaagaaacaacacttcttgggtaccaaaagtaaggtccagcgcccaagttgacattttgtcaacatgggccaattttgatgatgttttctgagaaatcttccaaattaaaaatcaactatttctagggaccaaacgaaactttcgaaaggccataactgggacccagtgcccagattgacacctggcattggcccatcgcccaagttgacatattgccaatttggattgtttctaatcaagttctcaaaaaagcattccgagcattttttctatcatcagagataatgaagatttaagcaaatttggggagaaaaccacaaacttgagcccctagaaa

SEQ ID NO: 303876 - DNA, 2293 bp, Cannabis indica
cttaaaaaaactattacaaaaataccttcctaattattttatacaattttatcctaataattcctcactttactcaaaaaaaacccttcctatttattttatgtcaaaaattgaaaaaccctaatcaacttatctctctcttcctttcccttctcatcagtccaaaagaacagcactcctcctcccccatctctctacctccctcctacagaacgcccaaagctgcccaaagccactgtcctcctcctcccccaaagtcgtcgctctccgatctacctacctctcatcctccgcccaatgaccttgagacaaccaaagttcttcaggcctctcttgacaattttctttgcaaagatgaattattttggaagcaaagatcaagaactgattggcttaaagttgggaataaaaatactaaattttttcaccacaagactttagctaggagaaaaaacaatttcattaggtccattacccttgaggatggtactgtgttcaggagaacttcaactattgtctctcattttgttaacttttataactctttatttgcctctcaaggcagtgaccatgtggctatctctaatatccttgctggagtcaatgatcgcgcttcccttcttgaaagctttttcactaaggatgacattagagaggctttatttcaactttatagtgacaaggccgcaggcctagatggtcttaatgccttcttctaccaaaaaaactagtccacgcttggggctgatttttgtgatgatgtcttgtccattctgaatgataacctgaatatctctcttattaataatattgttattgttcttatccccaagaaaaagaatacctctcgagttagggactttatacccatcagtctttgctccactatttacaaagtggtttgctaaaagttttagccaatagaataaaacttgtcctaaattctattatctctaacaaccaaagcgctttcctttctgatagactcatctttgacaatatttttattgccaatgaaattgtcaatgccattaactgtataaagaaaggtaaagtggattgggcagccttaaaacttgacatagagaaggctttcgatagaattgaatggagctttatcgaagccattctcaagaatattggcttccccttgagatttgtgtccattgtgcttaattgtatatcctatatctcttttaaaatcctattgaatggttgtctttttgaaatttttgagtttcagccctactaaagggattaggtaaggggaccctgtgtccccttatttgttccttctggtggctgaggggatttcttctaccattcgaattaaagaggccactagagagttctctggtcttgctatttgcagaaatgcctcaattatttctcatctaatgtttgttgatgtgagcatcttgttttgtccaggtagtgtgaactttaactctgctatcagtagtatcttgagcacctatgttagtttgtgaacttagccaaatccttgatcttgttctcccctaatactaacccagaggataaagagactttttgtgaccaactagggctatctaatgaaggatttattagcaaatatttaggggttcccaatggactggtagggttaataactcggtattctattacctagttgaaagtctcttctaagatgaatgtatggaatgttaagtttttttccagagctagcaaagaaactcttatcaaagctgtgatccaagctgtaccttcgtataccatgtcttgcttcaaactgcccatgagtattgtaagcaacttcaaagacttattgcaaatttttggtgagggtcttctaataacattaagaaatttcattggaaaaagtggcctagcttatgtgctttgaaattttatgggggattgaggttcagatctataatataccataactaagctcttcttgctaaccaagcatggagagtttggactaatcctacatcctttctttattagttgttaaaagctaggtatttcaagtataatgactttcttaatgctcttaagggacatttcccctctatgacttggagaagtattccttggggcagataacttcttttgaaaggtttggtttagacagtaggaagtgggaaatccatctccttagttgatactaggactgaatattttgagcggcttcgacccgaattcgagcaagctgcccgaacccgaaccggtgaacccgcattttttttttaaaaaaaattgttaaggcaggtcgggttcaacctggtacccttcggacgggttcgcg

SEQ ID NO: 303877 - DNA, 1823 bp, Cannabis indica
tttttgtatttggaattctccacatagtttcagtctcatcagctttcttcgatttgccggcctttcggagagaaaaagaagaagttccagactccccaactaaagattttttacatgtaaaagacctaccaaatctaactcctaaagcagcggctccgtcgtcctataacaagtatgagtatcatgatgatgatgagaattcttcacctcatgatgatcacgataaaccattggagggtatcttttccctaccccttccctctttactctctgatcaccacaccaaccaatccaatgatgaagacaaagacaaagacaaagacagagattacaacgatgaagattattattccctttccaataactactactaccagagttgtccagatttggaatatattgtcaatagcaaagtacaacaatgggttgccaaagataacacccttgctcctgcactcctcaggttgcacttccatgactgtgcggtccgggtaagctagattttatcaattatattaattgaatttgaataatatcttaatgttgacaaaatctttttctttttggatgggttatataatataaatatagggatgcgatggctcagttttgctaaatgacgatggaagcgagaggacagcagcagtaagcaaaacactcagaggatttgaagtgatcgacgatataaaatcagaggtggagaagaattgtccgaaaacggtgtcgtgtgctgatattctgactgcagctgcaagagatgccacggttcaagctggaggtcaatactgggcagttgactttggtagaaaggatggtctggtttccattgctgaagaagctgagtcgatggtcccaatgggtcgggaaagcatcacggatttgatcatgtttttccagtctcttgggttagatattgatgacttggtttccctctctggtaagcaaatttacttattactatagtactaatttcattcattcaagcatttgaattattacattattgagcgatcgagagtgttttaatttaacaataattaaacatttcaggggcgcacaccattggaaggtcatcttgtgagtcgttacaacaccgtctgttcaactacagtcagacccagccattagatgggaccattaattcaaagttcgctgattacttgcagagaaaatgtagatggtcgaccgatcactacgtacagctagactcacagactccctctaaattcgacaatgaatacttttttaacataaagtataggaaaacaggagtcttatcaactgatcagctactcgcttccgattcaagaacttcatacattgtcgagactttggctaacaacgatggctcttacactttcaaccaacaatttcagaaatccatgaagaagcttggcaatgttcaagtccttactggtcgcaaccaaggcgaaatccgagcaaattgcaattttgtcaactctgctccttattgaccattgttctcttgacaaatgtgaaatatttaatttgtataactttgttaaacgtttcattttaattttcgtcattttaaatgatcatttgaaatattctccatcgttttgatactatatagaaaataatcttgatgatgaagctccctactataatttcttgaaaaatgtaagggatatttgtgagataaatgtctcatttatagattccatatacttatatactactagcaaaaattacgtgcgaggcacgtatactaaattttatgctagtttttttctatgttatttaaaagtgatacaataaaaaattaaagaaaaatattattagttattaggtgaaattat

SEQ ID NO: 303878 - DNA, 1056 bp, Cannabis indica
aaagtgttaccaaacgacacttaaattaatggaagttatgactagtaaggaaagtaagattagattaatgtcggtatcattttgtttgatatggatcgatatatattgggggacaacttcggagttgggacttgagttgagagttgggaggagggaggttcggtcggctgatgaatggtgatgcaaattaaatttaggattttactatcctatccttaaatttgttaacctgttacaaataattttttaaattattcacaattataaattgatcttttagtgctatgtatataatttaaaattaaaaaataaaaataatatatttttaaaaaatcattaaattaaaaatcaattaataattaaaaaaaataacgaaaaataaaaaaaaaaaaattaattattttttctaaattaactacacatataacattgatatattattgacatgataactagtttagtagtcatatcatcatttatttatgacgttgtgataaaacttgactaaagatgatgaataattccaagactattttaagaaagtatcgggacactaatacataaattatactttggggcttaaaatcctaagagcaactccaatagtgaaacctaaacttaatattaaaatcaatactaaaaaaaatactattttagaactaattttttttgtcaatttcaactacaacactataaattacaccaaaaaaatatatatttttattacttttatatataaatataaataatacatatatattaagaaaattcaattatttaacattattttattattaaaatttaaaaataaaaataaaaaagcaattttagtgtggctgtagataataagataacttttgggattattttacaaatacacaagaataaaaaaaatacaattatacgaaattttaaatatttttatgaattttatgattttatttataaaaaataggatattttgatctatttttatgtttgtaatttttattttttattgtttttgattgttattttttttgtttactttttatttaattttttatttatttttat

SEQ ID NO: 303879 - DNA, 1659 bp, Cannabis indica
ttattgacttttcaaagtcaaacacagctactgtagcttctcctaagccaaattattgacttttcaaagtcaaacacaactaatgtagcttgagccatgctgtattattttttttaattattttttccttcctccattaaacttgcccttatatataggacgtggaaaagaaaatcacttttacccggcactttaatttcgggtgagaggagaactatagccttttcacatcaacattatatattttatatatatttatatttgttccaaaacattaaatttttttatttttgccatcatatatatatatatttttattttcgtccttataaagttataatttattttcatttttattctcacatgtcctcaaaaagtttatgatttatttctcaataaaaataataataataataataattattattattattattagctatattttaggtaaaaaaaaaaattcttcccaccactaatattcacccctactccgccactgtctgtagtaatattagatcacgtcaaacatccatcccaaaggcgcaagcgtgcatatattattaactttttctgttaataatcctttaataataataaactcttcgtctttgtatacatataccaaccaaatttcatatatgtgtcaacctctccttaatttatatatattcaaaatctgaatttttctatgtacatatatatatatatatcttggaatgttttaacttgtgttctataattcgatctgaatatataacgttcgatgactacatctttaatttgatcagatccatatatcagcaaaggctgacttctcagccaaatacatatatataagaaacttttgatcatacacgcaacaaaagaaattaatattactaattaactggagttgaagcactaattaatccccataatctcagttcataatctctggatgaccgtcatataaaaacggcgacgtattagctgtagtagtagtattgaacgttggaggcaccactacagacgaagaaaccttgaaccttttactactattattacttccactactactcatcacatccgggctatccatccagaaccccaaattattgttattattattaccattcattataatttgatgatccaaaaacccttctccgatttccgacccgtccgaatcgaacccgccacccgcttgccgaaaccctacccattcatcaggactgcaatccgaaacactcgaagtctcccaagacgcagtcgacgatgaacacgacgtcgtttggtcatgatgataagaaggaaccacaatactcggttgcaccactgtctgatctatattcatgtttctcgtcatcatcatcgtggagttttgatattgatgatctggatagtacttgttcctgaaatggaatatactagcaaaggtaaagtggtcgctaaccctacttttcgacttgttgttattattctcgctatttctcgccatgatgctctggagattcttgctcaatttggccttaatagaagagaagctcagcccctgccgcccttccgggccaccgctcgctgatccagcaccagaaggagaggggactattggacaaggtactactgagctgttggcgtcggcaggtggcgacggtgcgaagttggtgcgagcattat

SEQ ID NO: 303880 - DNA, 1298 bp, Cannabis indica
ttttttttcttttcttcgactaaaatgacagccagatgatcaagcttgtacaggtgaagtgggattaatccctctatatctaggtgcaagtgataggttgcttaatgctgatcatgaagaagtttattttaagggaatgccactatacaaaggaatggtatgcctagaactattcttttttaatccttgtagacttaactctttaattgtttgtagaattctttgaaagataagtaattctttcttaagtttatctctcaataagacgtgagaaatctgtgtcaaattttatttgggatttctttcctaataagcatacagtaaagattttactgtaagaagaaactaataacaacaagagctatgaatttgcagcgcctgaggagacatggagacatcatcaacagaactgttggaggctatttcattgtacaaggcagagctgatgacaccatgaaccttggaggcattaaggtatatggcgctcaataagctccttaaaaactctattgatcattgctaatatattaaattctattattgatatgtagacaagttcttttgaaatcgaacatgtatgtgaccgagctgatgatagcatcttagagactgcagctgttagcgtttctccaattggcggtggtccagaacaactagttatgtttgtggtattaaagaacgggtatgacgctgaagctgaaaatcttaggacaaagttctcaaaagccattcaaagtaatcttaatccattgttcaaggtttgaattttaactctcttatttttatttcagtgtaactgacactagagtacaaagtttcattaaaccttaacaagcttacataatttacctcatcattggaaattaattaacaggtgactgctgtgaaaattgttcatgagtttcctcgaacaatgtcaaacaagttactaaggagagttttgagggatcaactgaaccgtgaattctcaattcagagtaaaatttagtgaaatggagttcactagctttttacatgggtggaaaagtgaaatatgtagttttttatttgaagaatggatgtatcaatcaatatattcaatatatattaataaaggaatgcataatagctgcttaggtggcagtttatattttgattttttttttactaattaagcgatataatataaaatataatattttgatgtttgtattataaatgaaataactcttttaaaattataaacgaaatttgttattgtcaaaatatgtaaaaatattgtaattttataacaaatattaaaaatagtagaattaaca

SEQ ID NO: 303881 - DNA, 1162 bp, Cannabis indica
tttggatcgtgctacatattttttatttaagtcattgatttaagtttgtgagactaattttcatgctattttattagtagatttgtatttttagtaaaaatatagcaaactttcaataaaaaattaaatttgtgattggttggaaattttaaaataaaaatataagagaatatttaaagaatttttagatttaatatttcggaatacataaaacataaaattattattttaattttttcagtataaaactacaaaatcatattcaattttaatttttaaaactaaacccctaccttttaagttatataaatatatatatatatatatatatatatatatatatatattaaatcatagaccattcaagcccgaattattaagattagtggatcaaaataattctatcaaattttatttaattttagtgactaatgtctaatgtgacaaatgtacatatactaaattatatctcttgaactttcatatatactatagtaaatcgtatcagacatttgataaaattaaataattagacaaaatttcttgaattagcaaacccaataactcaagagaacttttaacggcttataaagttgggatggtatgactgaatagaataaatcttaattaacaattttagaataaaaagaaattttttcatagagttcgttttctttagaatgagttcgatctaaccatttttgtatgtatcctctctttgtaacatttttcaacaatttgctaatgtaacgtgcattttttggaaatgcaactaagtaatgtaaatgtaaaatataatttattttgtaaaaatatattctaatagtgtgtcaaattataatgcgaatttatcacatagcaaaaattaattctaatttagatcacaatataacttgatgcaaaatttacatcataataatattatactttttatatttcttattacatcattttgatatttttttagttaaatttaagttaacatgctacattgaattaaatagatgacagaggatgtaagggagaagttgataaatacccactttaaatatatctctttttaaatatttctctttttacctctaaataaaatttatttaaaatatatctctttttatgagtattgtacttaaattatagtctactacttgaaacgatacgt

SEQ ID NO: 303882 - DNA, 2027 bp, Cannabis indica
tggattggatggatccaatctaatctaataaatactggatctaaaatatggattgatatgatccgattcaaaaaatactaggcttaaaacattagataaacccaaattaaaccaataaatatgcatgaaatccatctaattgatagttacgatctaatccaacatccaatggatgttgaatcgattgaatgactgaaattaattaaatcaaatcgaatggtaaatctaacatttaatatataattagatcgaatttgaatagatctaaaatttaaatgtggtctaataaatactcctaataaaaataatgatatacatgtgatgtaataacaaagaaatatatcaaattcagtatttatacttataattataaggtaatcaatccattaaatgtatttctaatttttacttgaacttaaacataataaaatttaattaatttcacattattgggctcaaatatttttacatttttttcttcatttaattaatttatacatatgccatttatttaattatcaaaatctcactgagttaaaacataaggactttgtaactataaatgtaatatttggatcaaacattgagattattttgagttatttattgacttttgtattaaattgcaggtggcggggtggacacaagtgcatggtgatattttatcttatgccaccattagaggagcatctcacgaagctccattttctcagccagagagatctctagttctcttcaattcatttctagccgggaaaccactgccagataatttttagtttcacagaatatttctaaattattcttttctactctaataatataattcttcgcaaaattgtatttcttattgtttacagtaaacattatatccttacaaaataaataaataatgcgattctcacttgttcagttttattatttgacgattttaaaaatagttttatttagtcttttcttttcttttacactaaaattttctttttaatggaaaggaggtgctaagcaccgtattcaataaaactaaataaaatacaagctgaagttcaagaacaaaaacagaaacaaccaacaaaaaagaaaaataagaaacagcaggaaacacagaagaaaaaaaaataagaacatcttcaatcaacataatacaggatcgcatgtcagttggctgtaagagacttgtgatatgcctctttcttgctcacttagcagtgttatgagccatgaaattgcatttacaagagatatgaacaatctcccactgtatgaagttactgttagaaattcatttatttggaagcacaattatatatataaatatgtgttaagtcatcgtgtcaaatttatgtggtctattttagaataaaatttagcatgattgttataatgttaatatgtagatatcataaatacaatttttgatttaatgtggggctaaattaatttgcatcatatctttttattcttgaatcttcatcatcaagagaccaaaatttcagagaaaaagttttgatgcaaagttggaagctcatacaattctaaagttgattttatggactcaagtatgcttttactaatttttgattctattgttagattttttatgaattaattaaagctaaatgtaaattagagtattctaacatttaatattagagcatcttaaattaattcttcaagatttatggtaatttattatttcatgaagttgcttttgcctttgtgtatgttagaattattattgtggactaatataatcataagcttaataccataaacacaattattaactatgtgcccaatatttgttcataaccataatggaatggttgataaattaattatgtattagaggcacatgagagcaccctttatattataattggtccattaaattatagtataccataaaaagaccacttaagccctattagtgaataaccccttagggttataagggtatgggatgtatatatatatatatatactaggtgagttgttacgtgccaagccacgtagtgttagtttta

SEQ ID NO: 303883 - DNA, 1213 bp, Cannabis indica
ttacaaatatatttttataattaaaaatttttaatcttaaaattgtaaataaaatataaaagaaggttatttttgaaaattttacaaaattctattgctctgctctcattatattttttgtagaaaagaaaaattgctttgcattataattggctactttatgtttatgttattatttgttgatctcttatatgatatcagttacttcgtctttagattttgcaacagtgtagaaaaataatatacttttttaatctataaatagtcacgagaattatatataactgattaagaggggaaatcatgaccactcaaaagttgcaaatataaaatgtagagtattactatcaatatgcaaacgcaaatgccgtaaagaggatggatcatcccagggacagctaattaaggattattgtcattattgaaacgacgaatctaacacatagatttgatattatgaaaaagttggggtccttcgccatgcatgcacaatcttaataacatttatattctccaccactagacatttcctataaaatatttctctctctatgtatatacatatcaataaaatatctttctttttaatcattaattcctccttttgtggcctgctcgtttaattttgcaaatctttaattattacatctttgtatattacatatgatcatctgtaagaatatttgtaatataacaatggttaagggtaatcatgattattcgattcgaaatggaatggtaaacattatgtttttgaagtaattatataattattaagtggtataattactattgtagttatttatagtgttataaatactggttaggcattttgatttgacacgagtctagaagatacgagtacgattaggcacgataacatacaaacttaaacacaacacgtatacagcatgaaaaataggtccttaagcacgacacggcacgacacaagaagaataaaaggcacgacaggtaaggcacaacatgttacaagcccgaaaagccctacaagaataatgggtatctctaaggacactattactgaaggcataaagtcttcactaaaagtaacattattacaaatgacatttaagtattctcagtaataaaaattgaaaaaccgtgtttttgcaaaatgtcagttatatataagaaaatataaaactgtaaccgtttgcagaagcagaaagtaattctgctacagcaaaacaaa

SEQ ID NO: 303884 - DNA, 4079 bp, Cannabis indica
acgtggacccacattccgtaatcctttgcaacgttgcaaagcggtccaagtgggtccactgcagtagttgaggttgttccgatagtagctagaaggaagatggggacgagcccatcttccatgtcagctactatcgttttacgtaaaacctcgggtgacatagaaaaggcagaggacaacgttgttggtatgatgcgaaagttgttcatgttgatcccagcaatctgagcagctttcttgaaagcgcaatgagtttggtcagaacaataaacggaaagttttccgatattctctttcccaatcttattcagtgtcctatcacgagcagccacgagggtacacaagatagcctcgcaggtggttccttgcaagactccaccgccatttcccgagaagagaaatgacttaggaagtcttaacatatcaccaagccaatccatgacgatactctccagctcagtagcagctggagaggacatccagttaaaaccaacaacattaaatccagtggctagcatttcgccgagaaagccagcaatgctgccactggatggaaagtaggcgtagtagttaggactttgccagtgagttatgccagggacaatatggtcttttacgtcactcatgatagtctcaatagactcaggataataaggtgcagatttagggagtcttttcttgagataaccgggttcaacttggctcaaaacggggtatttctcaatgtttttgtagtaatcagctatgaaatcgatcatcatgtggccttggcgcctgaactcttcagggtccattgggttagtcatgtcatttgaggaagagatggtgttgttcatttggtaatcgaagtcgcctaggcttcccatactaaaaataagtggagttgtttggtgagataaaatgaaaaaaatgaataaatgaaataaacaaagagaaagagagagagaaaaggttaggtgggttgttgttggcttttttgtgaaagaataacaaaagagtgaaagagatagagagaacaagattggttgtatttgtctttctcttgatcttttagatttgagagaaaagactatatattgatattgttctctctttctttttttctttttggatgaggaaaatgggttgaggatatagagtatatatatatgtggcgtagtgggatttttgggggtaggcaggaattggaaatttcatgagagtccttgttttacgcgtggtgagttttgggacttataatgggatatgaacaggtgtataagttgacataattgaacacggacacaaattcagaaatattatattaataataatattactaaaccattttttttaatacctattaatgatcatcacctaccatagtttatatatacatgtgactttgaagtcaaaaaaaaaactaagggtgacatcatgcatggagtttaacttatatatgtaaatatatataaaaacagaattatggtatatatgcaatttaagttatgcatccacaacaaaaattggcaaaagtaaaacacttgagtccaaactaaactacttggtccaacccaatagcaataacaaaaacaccctaagtttgagttaccacttagattattctcaatgagggttaattatgaaaattataatgtcctacttgtttaagcgcgctacaatattttcaaaattactgtatcaacatttactaatcaaaaggctttaaggaaaaaaatgtgatttatttaaacttttaaaaataaaatattttgactttaataaacatatttattacaatttttgggaacctgtatttaaactttttaaaaacataatatgcaaaaggtgtcgctcaacaattacaaaatataagtctatgtcgtctcgaagaactaaacccttcaggtctaaacatctcgatatgtacaatcaccagcgagcaccagactcactgttgctcaacttttgttttgtctttacctacacaagaaattatatctatgagtctacagactcggtaagaaaagtataaaacatgtaaacatacaatttatctcatgacccaggggcccatacacctagttacaagtttgactcgcgtccaacacgtataatgagtcttgaacgtttttgacgatagtacgccctctgtaccacatgcactaagtatctttctaacactagtgttagtgttagtagggttatttaaactatgattactactgatcgttataccatataaactatgtacgcatcaagtaccaatgttggtaacgctatgtcatacctcttgaaaacatactataccacatacactttgtaccgtaatcgtactagtgttggtagtttacaattcatataatctaatatgtatactatatgcacataggtatatcttatattaatcttacctcatttctagattcaggtatgacgatcaaccagagtggaaatatcacttgttgaacggaggccttatgtcacatttacgtaaaatcgatacgtgttactctaaacactttccgggacttaaactcaaaactagaagttttcctatcgaaaaatagcgtgggaataccctaaaatcgagaaaatacaaaaaattgggattcctgaaaaacaccctatctggagaaccggattcctcaaatggtagatcattttctagggttatgtctgggaaaacatttcaccatttcttaaaaaatagttgattgtgtttatgcaaaaatcacaaaaaacctaattccaagttcagttacaccccaaatcacatgcaattttccagaacacctaataacaacatatagaacatgttccatctcataaacgcacaatcaaagccctgtggtaaaattcaccattaataagtcaagcttgagcttaaaaactcaaacctaacccatattaagctacaaccaccaaaaacccataaaagcaactcaatcatactcaaaattaccttacaaatagaaccaaactaacttaaaccctaatagaattgcaatagcaaaaccaaataaaaaaaacaagcttaaaacatagaaaacaatgaggatggaagagctagggatttaccatgatttctctaacattttccattctaacttgctgcaattccttaagaattagagctgaaatgggtctagttccttttatttccttaggaccgaaaagagagagagactaaggagagaaaaaaaaattcctttgttttgattttgagataattatcaaaattatctgtttttatctaacaatatcaaccaactaatataggataattgtctagaaaaatccactactccaactagaattaacttaggataaaaagactcggcaattaaaataacaaggaaagcacatataataatgaatatttagatcaggatcataatataattaaacaacaatgttcaaatagttgtataataaaacaagtcgtatttgctgcttcataaagtaactatctttattattgtctaataaaacaactatgatgccctaacccagcatccttatatttcattgcctaataagtcaatgtcggtgccctagcttggcatcccgatatcacattgcctaataaggtaagtcgatgtctcaattaacctggtatccatatatcacaatgcctaataaggtaagttaatgccctaactcggcatccatatatcacattgcctaataaggaaagtcgatgccctaacttggcatccttatatcaatgtcattgtctaataagataatcgacaagtaagaaatctaaccacgatttcaattaacgtcatgaccttaacctattttaacggcaatcatcatttcattacctcaatcatcatcgagtcatcacgataataatcgtatcttaacatgccatgtggtataaatgtacttttcttaccttaaatttctcttaggtggcgtttggttggagataatgaaatggaatggaatggaaaggaaacaattttcattccattcctttgtttggttgcattttaaagtattggaatggcattccaatggaatgctctttccaccattttggtggaatggctattccattttaaaaaagaaggaatgaccattccaat

SEQ ID NO: 303885 - DNA, 2106 bp, Cannabis indica
cgtaaaaattgtaaaaaaaaaaaaaaaacaaaaaagaaactgttttaaaaatgtaaaaataaaaaaacccaatattttaaataaataaatcacatgtctcggttaatagataattttaatattacttgttttgtcttaaaatgtttatctcccttttagtttgtgggacaattaatttgtatcattattattttataatgcacgctatcaatgcattttcacaattattactctttgaatcttgataagcaaaattttaccaaactattaattattttcaatttatcaatattttattataaattaataaattaataattattttcactgtcctagtgttattaatttattgaggcttcacttgtttatttagattaaattaaagatgcacataattttgcctaatttatattaaattatattaaatataaataagagatgataatatatatatatatatatataaatatatatatttattctcacattattcattattgtgcttattcttgaaactgataaaccaccaaaactatattttcagctactctaaagctcttcatttaatttcttctatgttggttacctctcagtgtgatctaatgtgacctgttatttattatatgacaatgttcatgtataatttggtgacagtgatttcttttattttttattttgggatgaaagagagtgatttgatagtatgttacttaactaactcatgcatcattgaatgctaggggattcgtgggtatttggacagtgacacaaacaagaagttgccttttattttatttaatttttttgtaagttgtttcaatttttatccttgaggatattactttaatttatattcaaatattgtatatttatttatatgcaaaaagtcaaataacacataacacataaaagtatgatataaatatatccatgatgaatgatcaataataaaaattatttaaagaaaaataaaaaaattgttaagtacattagtataaataaactactgaatatattataggcttaattaagatttttcctcctgaactttgacatgtaccaaatcatgccctctaaacttttttagtcgttaaaaattctccctcaactattgagattgttaaatttaaggacttttgtccaattttagtaaaacaattctaacatggatgaaaattcagagggcatgatttagtacatatcaaagttcgagggacataatttagtaaatattaaagtctggggagcatggtttagtacataaacaatcaatgaaacaataatattgaatgaaattatataaaagtccttaaatctaacaatctcaatagttgaggggaaatttttaacaaccaaaaaagttcaggggacatgatttggtacccgtcaaagttcggggaaaaaaaaatcctaatcaacgtatattttattgagcactcccaactcttctccttcttttaaaatatatcattaaatttttactctattttattttacattatactatatatcaatttttttatatcattaaaattatattatttttattttctacacaattaaaataataatttgctagcacatatataatacaaataaataaatattatatatataattaaaataaatttagagtaacaactattgattctctatatttaaatcaagttgtattggttttagtagtgcatatgtattatatatgagatatgcaatctagagaagttgatcgaaggtatttgttgggctctattcttttactttgtcggcccgctacctcaccttgactcccacattagtatgatattattcactttgggcctaagcccttacgattattatattttggacaccttcccaaaaagcctcatacaaatgaagtagatggaacacttatatccaagacaactcttgtattcttctaatatgggacttgggttgataccccaacaatcctctcctcaaatcaaagaccacatactcgtggcctcccctccagcgaaaccacaccttatgccgctactatcaccaacagaactcgtcacctgattatcacctttataaggaggactttcgacacaagttctaacaccgatcttcatctta

SEQ ID NO: 303886 - DNA, 2189 bp, Cannabis indica
gtataattttataaatattaaattaaatttatatttagatttatctaaattagtaattttaattaaataaataaattaatattaaaataaataaattaaaataaatatatcaaataaaaatacaacccttaaaataatgagctttagttataaggatattcgatctccattgatggttctacacaattcttgttttagtgagtaatcatccctaatggatgaacgctcattagcaatttaacgccgtacaatctcgaaagataagtattattgtaattgttttattcctagtaacgtcaaccctaaagtggttgctaagagtaagacttacaaggtatgaaataatggtggaagctcataagatagaatgacattgactctcgcgtaaacgggacaacgtcggattctagtcttgatcgaataaaaggttgctagaatgatatccattttagatgactacgatattaattcgggttaaatctcaaattggttcccaatagttattcgagttgtatgggtttgggataccatagtacgagttgttactagtaacctaaatgtggaactaggagtaacaacggtcaaacccatgggtgatcagatctacgtagttctaaatataaaaattatattgactatcgttgaatttgatgagacatggttgatcagctttaaggacagtaggcgaccacccatataagtgttcaattttaccttgaggagccccttcaagagtttgggtagcttctcaagtaacattagcctaaatatatgtgactcagacaacacgctcttgtttttcttcttctctcatagctgatattgaatttcaagttgaatactttggaaccttcacgtccattggtgattggtctaaaccaagaaggccacaattcctcaagtgtaactcatgaagaagaaagccagtagacctcatcccatatgaaaaattatctaattgttaatgatgtcttgccacatcttgagttgactcaggattcgaaaaaattgctaatgattataattgacaatgtcgagttagaaaaagtacaaaaagtaacataaataccaaaaaaagatgagagttatgcaattcacgtggttttttaacagatgtgtaataacattgataaagtccagtggtccagaaaaattgatccttgaactcttttcttttgggaagataaacaataatcttatactcgacatagtatgtcccgagataaaagaatcccccagaataattcttactcgcagaggtcactttgagggtggacatcttggaaacttattttaccaagatctagatttactaacaagtatgttgcattataattttataatctaacatcttaaatatgaatttcctagaacaatgaatcaaacacacaagagctgtagaaaatcttacattaatggcaacagaattaattgactcatttcgttcagatctctaacccttgatcatttcttttgtagagtatgatcaagatttaaacttgggttctccttctgatgagaaaataactacacaatcctcctcactatgctgagtattgctttaatatgtgtggggtaatttttgaatactaatgagcacaaaatttgatgaagaaatctcaagagaaatttgaaaaatataatgaaaataagaaagcttttctttagattcagtttgtcagataagagagagtctaaagtgttggttacttgaattaaaggctatcacattatctttatagaaagacgtgaggtttaaggttagaattaaatgggctgaataaaagaataaaatttctttaaatatcaacccttggcctaattgtacatcaaggcccatgggtttgaattttgatatttttgttaccaaaagtgaaacaatcttttctttcttcaaaattactatttttatattctatttatttaaatgcttctatttaataattataattaattattaaacaagattaccatttaaatatatttattaattagacctctaagctctctaatcaaaaagaccctgaattctttttcttctcaatatgccctttagtgaaattcataaataagacaatcattctttagaatttgtattgataaaacaaatcaattaattaagactataaataaatatttaatcttagttagtttgcagaccatgtgtcaatgtaatcaagcttctaatc

SEQ ID NO: 303887 - DNA, 1083 bp, Cannabis indica
gcctcctcggcctgagaaaaatccgacttacctccattctcattatcctgattgatgccttccaaggaattcacattcggatttgactttcttgcatcagtgtcctcagtgttggaacaatcctcacctgaaactggaataaggatcccatccctctcacgaacattttccactgtttcaaatataatccccaaatagtctttttttttaagttgagcccaatttcttccaaaccctgtgaacagggctggcccatacaaaaggattccacctccctatcatcaagcctcctttttttccctgggcaggggcccaaaagaggcttcccactgggcttatgcaggcccactatatcttttttagcaatgtttttagaattttgcctcatcattttcgtagctgacccacttataagatctgacacatctttgaaaaccatagccaggtgtccgatttgtgattctgcgggaccacccgtgtcagacacaaccttgccaccccattcttcgtacagttcgtacccccgtatgcatggcctcaacgttcacctcaccctcctccaccacatccttgggatcagtacccttttccgtactcaccacttgtccctctggaaaggacaccaggggcacagccacaccgaaagtcgtcgcaacgtcactctcttctagatattcctggtggatatatgatcccaccaaccctggttcgaagtccggaaccatgtcctgaacaccagagacgctggcatctgtcctctgcctaggaccttccttagagggagcctcctcctcaacaggaataatctctgtagggcccagatgaatcccctccaaatctctagcaatctcctctgccaagacactttcaaagcaatgcttcatccatgacccgaacctcatccatggaccatacatagggatagtatgatttagatcatccgagataacacgtctcctccggtgacagcttactgttacgaattttatgtttactacgcaagtatacgcaatcaagtagtatctcacgcaagtgaggtcgaaccacagggaatttgattaagtactactaaactatacttat

SEQ ID NO: 303888 - DNA, 3434 bp, Cannabis indica
ctgcatgggattatttatcccatccagcagggtgggataaataatcccagacagatgaggttaactggattagttatccagacttctaacatgcccaaacactggattggacaaattagcctgtctaatccaatccagtcctgcgtaccaaacggacccttcaagaaaatacttgttcaaaaaaacaataacacttaaaccttgattaaccttatctaaccctccacccaaaagaaaaacccttagaagttaagacaataacatatcccgtcaacattagaaaagaaaataaacaaaagagactaaaaataaagggataagtttaccctgatattatatttcatcaaaatctacctacttttatgagtgggttgcctaatatacttctgcagtgtagcacatgatttatattgatctaattggtataatagagatatcatctataaaagtgtgtatatcttaaagaatatagaaatgaaaagtaaaaattaaaataaataaaataaagtggttatacaatgcaattttcacaaaaataaacaattaaccaaaggaaaaccctttggttagtaactacaattttatgttattctccttaaaaaactaagaaaaacttgtaggaattacaattttatcacacaattacataaactcaaaccttgaaaaagcttatttacaccacttacctcgtaaaagtttacttaacgctgtcaacaatgcttgatttgctgacataataatggcccccaatctaattaccctagattcatttaaaatagttgcatgtaccatcaatgtagaatcgatgttcgtgaatcgttccatttgaatagaagaaaagctagaaataacctcactctccttacttcgtagtcaaagtcttctttactaattcatttgttaaatcaacagagttacgaaaactcgaaatctagctaattatttgattaggatatctttgttgtattctgtgtgttatcttatgtcattccaaccttattgcccatgcaatagtaatcaatctcttaagagaatctttctcaacaatattaaaataaggataaaaaattattattatttcattccggccatattgtctatgagattatgttaactgttaattaaagtagaacctctgtcccatagaagaatatcatacgaccaagatgttaagtacaccctcctagcagagccctaagatgaacttgaaaaaagaatgaatctagccaacttgagcttcaagcttattagcagaaagtggctacacaattcaataaataagtaaaggaaagaaatatctttgtgagaaattggtactgagaatggttttcttgaacacaaaaggatgtgcgataggtgtgctcggaccaaattgagaagggtcatatcaagtcactgaagtcacaaggttaggagcctacaatttgggttggtgtacaatgataaaatgaaacttttgtgcctcaatatactagaatggagataacttgaaaaactactactagtgaatgaaaaggtctagagaccacgtaatttcttcttgataaaaacatcattcttaaatgatggatttgggatggagttttcgttcaatagttcataaatttttagtgctaaggttcgctgattgtacatttaaagcatttttctacgtaataaaacattacttttaagtaatgtcccgttcaaaagttttaaagtttatttacttatggtctgtttcaccatgtaagagtttttcattctcaaataaatgtgtatttgaagtaatgacacattctgaccaataaatgaatacaacgattcattatcattcaaattgtgttaatattatatatgactgcttgtaaaaactttgtgatttattttaaagtcatagaattgcctaacatgtgtacaaatagatctggttaggaatgaggtccgaacgggctatagtggcgtactctggttaatttacaactgaccaaggctcaaaaatctacttgatcacttggggcacctacacccgtacaacataggcaagaaggcacgtgaagatacttaagcaaaaaaactaagaatgaagtatgtgtaaaaaataaaaggttttatcagatgcataaaggttaaagtctgggattacaagctacctggccataaaaccaagtttcaaagcctcttggtcgactaaattgtaccaacaaaaaggcccttagggtcgtacagaaaaaaaaaataaaaaaaaaaagaaagtgagaaacagcttcaaggattcattagggttagagggtttagatcatcgatcgtcgagaagtggtcctactgctggacgaaaaaattagggtaaatatcttcattcttctcggtatttggagcagcaattcaccagaactccccttagttcttttcagatcctcctcagctttctggctctcacaaaaaagggaaacaagtgctttcaaggaagaaacataccaacctagaggcctaaatgaggaactagcacccaggttaatgcctggtgctggcccaacgcctaagttgacattttgtcaacctaggccaatttcgaggagttttccgaaaattttctaagcatattcttcatttttcgtcaaacattaagactcaagtatttttggggtgcccatggaactttctaaaggcccgaaattggacccagcgtccaggttaacatattgtcagcctaggctgtttccaatcacttttccaaaaatttattcttggaatgttttccatcttcagaattaatgaagatacaagtaaactgaaggagaaaacgacaattctacgggcatcaaaattgagcccatcgcccaggttgacctcctattaggcccaacgcctaagttgacaattaacttgatgcactaatttcgatcactcaaatgtaaattctgtttcgagcattctctttgaaatggtcaaaaaagggtttgagaccttgtccttaatttcaagaattttggaaataccaaaatgacaacttggaagctctgaaaagagtacccaacgcccagattttcatatggactagtgtgctgaattttacttatctcattttggttctgtctctactgttcagctagttttttttatagtgactgggagctatgaagttagaagagtcaaattgataacttcatattttgacttttctggcaaagtgacttattcgaaaatcaggtagtttcgagtcttttgtttctacgaaacagcaacatctctgagaactgctgaccagcttcaccagaatgcaaaaactagctaagtgttgtcaaaatatcacttaggctaacaaattatacatcctagacactattttccttggccaggttagcgctagatgtcaatctaggagctagatgtcaacctgggcggtgggagcagaccagcctttagtaaaacagtcataattcactcaatattga

SEQ ID NO: 303889 - DNA, 1684 bp, Cannabis indica
gaggtagctctaagacaagacatcacctaattaataaaatttttaggaggattaaaagcagtgaggaggtcatcaaggacatcccaattaactaacagtatcataaactttgcttatgtctatttttatatcacactgagaaaacacattctttctcttataattcttcaacatgtgtcttgtaaaatcatcacattatgagaaattgaccttccctaaataaaggctcattggttttgattaattaagccaggaagcacttcaacaaacctagaacacaagagtttcgaaatacacttataagttgtgttgcagcaagcaataggcttgtagtcaacaatctttgaaggattttcatgtttagaaacaagagaaatcatagtagaatgaaactcagaaggcataaaacctgttatgaaaaagtctgctgacactgccttgtagaactcaacaccaaactcaagccacacggttttgaaaaaacttgacccaaaaccattcgaatttccttatttgaaaacaatttcaatagacctaattgtcggtctaaattaagtctagatccttactcaatgcggtcaagatttcgtctgttcgaaacattgcaactactttccatataatcacgaaaatgagtaagaaaatgattaaccacatcagcaaagttatcattgacaataccttgatcagtagtataagtgacaattctatttttcacctttcttttctttaaaatagcatgaaaaaaggaaatgttctcatcctttttatagagccaagtgactttactacattgcctcaagaagttgtgatacatcttctcttggtaattttaaatcaatcgctgccattttttcctaatcctaatgaatagggtccctcgaatgaacttgagcctgtattttagcttcaagatgattagtttttgctgcttgaaaagtcttccccacataaccaatgacctcatgattaaatttcttaagataatgctttactctcatgagcttgagatacaaagctttcaaccctctagcaaccatagatttcctccaactagtcaaaactaactctttgaaattaagatggtctgaccgaaaattaaaatatcaaaatggcttaaatccaatcttctcagtaacaattacagaaactacacaagagcaatggtgagatatggttttccaaccaaaatgagctttagtgttagtaaacatatcatttcattcttcattaataaaaatatggtctatcttaaaataaatcatacgagtcccttcttgattattagtccaagtgaaaatagagccagttttaacaagagccttaacatgagattgagccaaccaattagacgaattaaccatatcattaagagagataggattcccacatgatctatcattaatgttaaagataaaattaaagtctccaagcaataaccaagatttcataggaaatctcaaatttaaaaggtccatccacatgcttttcctctcatctatagtgttaaaactataaataaaagtgacacaaaaagtagcatcatgactactcgtatataagagtcattaatccgtgggggaagacccaatggagacttgatatatggagatgttacaaccgcaaccctaaagaaaagccaacatcaaaaaaaaaaaataagagattagagagagagagagag

SEQ ID NO: 303890 - DNA, 1632 bp, Cannabis indica
ctcaattagaatataatttaattagtcccaagtctattcttgaatagaagttctactgtatatatagttttttttgaagataaatatattgaaatactacatatatgtatctataccattggacaaaaaatgaaaggggaacttgatatttccactaattgatgtagtactattgactggttggtaatccgaactgatgaatatatatatatataagaaaattcatttgatctaaaaaatccaaataatttgcatttttcaattgatatcagttatagttttttttttaaaaaaacatgcaatatataaataattaaatctgttaattaataacataacgtatatctttttaatacatgacgtctaatttttatttaaccatatctataattaatgagcgttgtgaatctcgtgagtgattatatatacttcaacagttatactgcctaattataaatatatatatatatatatatatcctcaaagaatattgagatatatagcccatacatcacgaggaaagatttctagttaatgtacatggatgaacgtgcataactatagtgttcatctaaactttaataatttttcatataattcaaattgaaaagaaaaaatatcaaattaatcaatatgtaaacgtacctccttgaaagctagtctaggaaaaggaagcagcaaagcaaggacacaagcggagaggccaactccagtgctagccgccacgcggagggggtgcataacagcctcgtctagctcaccattaataaacccaacaacgtacacaatcacaatctggcccagcgctattcgcttcgagatcagatgagtcgattcaggcagggccacaacgaaagctccaagcgcaacggccagggcagtcacgctttctgagaaacgagatggacctatcagccagaggctgagcatggccggcccaaggctctgaaccgtggcatggagacctagccagcagccgcgcaacgtgtcacccagagtggcgtctgtcacgacaaggatcaccgtcacgtaagagaatgctgggaagcgtaccacgctgcggaaggattctgggccgtacagagttgtacaagccactatggagcaagctattgcggtcctgaaggctgcggctaggcatgttaacaaggtggctcgggctcggtcggtgtggtcgaaaaaagaaaccatattatatactatttacttatcgttaggtaaatgaatatatggtttttcttattgggatgagagagaggagagagtgagtattacagtactactatgaaattatagagatgggggttgaggagtgtttatataagaggcaattataatgtgaggtcgtaatcgaaactatgtggaaggctccagtgggcccacgttttgtttataatggaatactatatatggtactttattaattaatttagtttagtttaattgttagttatcattacatgaagagaagttctttatacaaaattgaataagaaatatattgcaattaagtgtgattttatttgttttggaaagaatactgttaaagtgtgaaatttatagatatgcatctaattacatatattttttagaataattagcttttttagtccctgtacttatgacactata

SEQ ID NO: 303891 - DNA, 2903 bp, Cannabis indica
tgaaatggcaaaatcactacctccgagatcctctgccttaaattctcagttagcgtcttcttccttgcctatgatgatgcaacaagctgttctcatgcaacagagacaattccagcaagctttagtgatgcagcaaaccatgactgcacaacaagcagctaaccgagctgcaacaatgaaatctgcgacagaattggcagcagcaagagctgctgaaataagtaagaaattaaaagctgatggacttgtgactgaagagaaggaagagaagccaaaatctcggtatgtcatctttctaatttcaagaagctctataattttaatttacagtctctcaccatctcgcatattttggagtcaagccaggtgttctgttatattaatgcatgctccaagtttatcttttggacattatattaataaatatctaactttttttcctttaattacttcatttgcaggtcaccttcacctgctcgagcaaagtcaagatccaagtcaagatcaccaatcaattatcaaagacgacgaaagtcaccttcctactctcctccatctcgccacccaagagatcgaagatctagatcaccttttaggtctcgtcatggctatgacaatgagcgacgtccgtatagggactttagggatatcaatgacagatatagacgaagagattcaattagatcacgcgattactattcatctagttctagaaagcataggagtaggagtgttagccctggaacaagaaaatcatatcgagttgactctgtgtcacctaaacgtcatcgggaaggttctccacgtagagcaactcgtgctggttcaagatcaccaaatcacaccagaggaaatagattgtctccaagaattgatgaagatcacaagcttaagcagagaaaacgctctaggtcaaagtctccaaatggcaagtatcactcaaatggcagaagagatgaaactcgccatgaaagatcaaagcatagtgatagaaggaggtccagatcaatatctgcagaaggtaagcatcacagaaggtcatctccacaaagtccagatgagattagatccaaacatagaaggcggtccaggtcaaaatctgtggaagataagcaccgttccactgagaaagtggatggtaacaaaagtgaaaaatcaaagcatcgtgacagaaggcgctcaaggtcaaaatctttggaaggtaagcatatctcagatgagaaagtaaaccaagcaaaaactgaagataaagaagatgatagaaggcaatcaatgtcagactctttggaagataagattaactctgatgacaaagtgagagaaaccagagaggaaagatcaaaacatcgtggaaggaggcgttccaggtcaagatctgttgacagcaagcataaaatgaaggaaaaattagacgatagtaaggggaaaaaaccaaagcatcggggtaggagacgatccaggtcaagatctgttgaggctaagcatcacaagggaagtgggtcatccttgagaggttttgatgataataaagctaaacacagaaggcgctccaggtctaggtctgctgatgaaaagcattactcaaatgacaaaataaaggaaagtagagaggggaaatccaagagtcaccggagaagacggtccaggtcaaattcatcagaacgaaaggttcccaatgaaagtagcagatatcaaagtagttcagatgaaagtgagtcaaaactcccaagaagatctatgtcagattctgaaggtaagtaatttgacaatattaataaaaccttcactgtttaagtttaaccagtttgaatgtgaacattaactctaggtacctgctttagcttatcgctgtaacataaatagatttcttgagcttgcataccaagttagcatttctagggaaaataaattattagattctttaaatgtactggttatttatttggggggagggtggcgggaaactcaggggaattatagcaattaaagttggtcagaatgtgcggagtaaatatgtcccaggaatacatacatctaaaaaaataaccgggaaggagctctgatattttgaagtacagcatattctttgatgcaggggaaccaagcaagaaggaagcattgatccctgagcatttggagatgtccggagctggtactgtagcacacctacctatcttttctcctaaccctgttaacatctatgtttcttctttacgaatatgatattttctaggcatttctgagttttccattatcattggcatgccttatgaaaaagcttaaatttatttcagaacttgaagatcaaaatcatttggggaagtcgaggcacatggatgacattgcagatagtccaacagacacgagtgcataagactcaaagaattatattgatggcaggactgcttgatttcaagattcttcattttgaggatgttgacaagagtcatagtgcccgataaaacacaccctaaatttgagaagtttatcaaggcgcttagcgattctgagaaacggggcttaatttaactttatgaggaggaccattttcttggaagattgcttaatttttctattggcgtggctcttcatgaatatgctctgttttttttttttaatcttttgcaggtctcttggaatagattggataaatgtctgtgggctggatagttatgtatttcaaggatgttctgctttcttctgcaatgaaccaatgcatggttgtagtgagcttcttttactaattgatgtatgttggaaataaacttaatcattttgacataatttgtgttacttaaaggatgttaagattttgctctttgcataagatgatctcattttttttccctgatttgctaaaaaatctttgctttagaatattctgatctaggcaagttaacaca

SEQ ID NO: 303892 - DNA, 3151 bp, Cannabis indica
tttttatgttgttttcgtgttattttttagaaaaccgtaaaaatgtaaaaaacattctttgaacgtaaaaatgtaaatattttacaaaaaattgtatcttatgtaattattcctttttttaagggatttttacaccacatactgaaattttaaacttttttcttttttactatggggcggaatttttttcaaaaattttgtgttttttttttcaaaaatactgtgcaagtttcatactgtgcactcttaagttttcactgttattttacggtggatttttagttgttttactgttgtttttaattgttctgttatgttgcggttgttttaggttgttttataaaaaaatagtatttttgtaaaaaaattcgtgtggcagtaaaacaaaccgcaacaaaacagaacaattaaaaaaatactgttttttgccatcttaaaggtaaatataataggttgttttgttgccattaataatcatgagaaaattacactgtatacttctattaatttgatgcctttaatttttgccatctttttcaaaatctattatatttacctatttttttaatcattttactaattttactcctatcacttctcaaaaattttcattcttctctaatcaaaattttgtcctaactttctcacaaacctacacatccatctacaaagaacacaaatctattatgtttaaaatatgtcttagttatataagtgcgtgaggataatttaaatacaagactcatatataaatagaggtatatttgaattaaattttatttagagataaatttaatatatatataaataaaaaaaaatatgtattcttcaacttctaccaataaccattaatgatattttagcaaaaaaaataatcattcatgatatttttactttttatactactctgcatcataaaatgtgaattagcacaattacaaatattgtgataaatatggtctaatcctttcgaaataattaaatattattaaagtttttttaacccttaaaaaaacaatcttagctagtattactaatttagttttttgttctcactaaaatttttttatactataaaaaaaagagtatacattggattaattagtttcgtaaaaagaaacgattattcttttttcttacaaaatcattaattatacaacttctttaagggataatatttatacaaaattgactttaaataaaaaatatatataaagctgtaaatattaccaataaattgtcaccaaacaaaagtatagtagagataattattttccatcctttattcctaatcaatctctatctcaacatttatattaattattatatataaagatctgtcaaagctctccacacactatagctaatcttctacaagttttgagagatgccaatatcagaggtccaagaataatattggtgggtatgtattcatttgtcttatattaaattagccttttaactaagaaaatcatatgttgttctttccctgtgtattcctcttttcttatattaattattttgttcatggagtactgttctaatattagttaaatatatagtttaagaaccaaaaaaattaattatgagaagagagagtaattaactaaaaaagcaataaattcattaactttaaagttacactataggccacagatcgaaacaaagggaaacgataaacatagtaaaaactgaagacacacaacacatgcatatatcttcagaagagacacgataaacaaacacaagtttacatctgaacaacacacaatattgttatttgaccactaatattacatgattattattgttcagtagtcaaaataagactccccacattaattattataattatatatataataataaggagtgtttttgctgtgcttaatgaccacaggtgcagtttgtgcaagtgcagctagtaccgcacttgcactttccgtcgttctcagctgagggaccatccatcaccatggtctccatgtagctgcaatattaattaatataccaaataattaagaatacatatatagtttcattatatatatcttttgtgtgaaccatatagatatatagatcctatgtgtaatcagaaagtatgttatacgtacctcttctcagcctcgacaataacgagactgtagctgcttcccttcttcctgcacacataatagtaaagcatagcggcccatgttaattaataatatattatacttgaatataattatgcctaaacagctactagctagaactgttacaagtatatatatagttaatcaggatgataacttttagactataatttgtagaaattaatatattacttacacacactgggtcttgtcagcacagtcgcagttaccgcacttgtccgacatggtgattgagcgaagaattaaaggtttttaaaatgtaagtttgatttttgagctttgataatggtatatactacttgtgttgatgagttcaattcaactcaacttggtggtgaatttatagatggaggaggatatgggccgagaatgataaggcccactagccacacgcttccccagaagaatccgaaaggaatcttagcagtggggcccatggactggcttggccttctaccctcctctcgtgtcaacttcatttctctttttacagaataactaaatcaaatcaaactctaatagttgaagaatgaattcatgatatctcaacaaatctttctctctattcatttcctcctatctttttccacctactaattattctctaatctataaataatacaaaaaacgtaccaagtaacataaagttatttagagagatatatttaatattgtgaaagtttcttcataatttatccaatcattatatatgcttatccacaactgtgtaatttgatttttattcaagtgatgatttagtaaaagaatttctgtatatttatttgtgttatattctttttcgttcttttcttgctcgaaacgtagaggagttaactatatgcgcatccatattactttagcatatataaaaatatagatgcatcatatttagacgtggacgagtttctcttttcttcttcttttataattgaatgaaagaaaatgacaattttgttcttcttgttatataaattaacaattaacccaagatctat

SEQ ID NO: 303893 - DNA, 3051 bp, Cannabis indica
aaaagtgtgaccttgaggactattgccgctattttcggaccttggggactaatcagcatcaacgtgaaccttttggggacttttgccgcaaatttcccttataataattcatccaactaaatattgagtatttaaattttaaagatcacactaaaaaatgtaagagttgaaattaatttattagagtactatagtttatatcacaaatatagttttttatatgtaaatttttatacttagccccatccatagcaatgctttatttaataccgtgagcaacttagagcattcccatcaattattttttcctcttaaattttcggcactacctaattttactccctaaaatataggatttgttaaaaattctccataaaatataacaattacataattatgcccattctgttaggttccgtttctaattaaaaattagtatttttaccccctaaattttgactaatataaaaaaaaaattacccttttattaaaagaaaattaattttaagaattatgatattctatctttttcaaaacaattataatattctattaatttagaaaaaataataaaaattattaaaaaatttggataaaaatattaattttacttaaaaaaatattttcaaacgttatttgatttatcaacacgtatcttaaaaaatcaaaccaaaattattgagaatttaataaataatttaaatgaattaagattttttgaagaaaaaattaaaacttatttatatttataaactcatatcttaacaaataaagaaaaataattaaaaattcaataaaaatataaaattattttgaaaaaaaagttaataaattaaacaaaaaaaaaaaagttatgtttacttaaacaaatctatcttttttgataaaaataaaatatattcaagtttgttcctgtaaaatttagtttttacaaattatttttttaatatctaaacaaattttctaataaaaaataaatattattttacatcacgtaattaattttaaaattttaatttattttttaattttcttcataattcaaaataatcaaagttgctaattgataaagaaacgtcatcattttagatgaataatgggacagaacctaacagaatgactaaatttctgtaaatgtaatagttcaggggaattcttagcaggttgtatattttaagggcgaaaattaatattatcgaaagttcatggggcaaaattactaattattcttattttaaaattgctaaagtgcttaaaatgacactctatcaacttctttaaatgcttctttattttaatgatcctttaaatccatagctaaatgtaaagatagaataaagcttcttcaaaattattttattactttctctttcattcattttacaaattaattaattattatttttttgacacaaaaattataatcactaataaattcacaaaacgtagacctccttcagcaaagataactgatactctaaccaaaaaatatgctcagtgaaatcaaaaactttatacaaaaggttatgaactattatttaaaaatactaatcccaaaaaattaagacaatacaaatataagaacaacatcttgcacgcccaacgtaataatatatcacgaacaatccataaaacatctacaaaataaaataagataatgatagatgaattagtccccttataatgatattaataaaatcgttaaaaaaaaattctcaaaacttattataagaaaacgacacttcaacatattatattgaaattaaatttatccataaaatctatgtcatcatagcctcttaacaaaaccgacctacaaataataataaataaaatctatcgcaaaaaaatttaatgatacaaatatataatatcaaagaaagatagtaaaataatccaaattaaaatacaataaacaacttaaaatacttatttgtcaaagctcaaaagtcatccaggtgaaagttaatggtacaaaatgaatcacttttcttggccatgtctttcaataatgaccgcatgattagaaaagagaattttaataatttatcatatgaagtataataaaatataaattattttattatgtgatttatgtccatgaactatttaagatctatttataaagaaatatgcaaatatgtgattggtaaattaattatggaattaattaatgcttgtgccatatttgtatgttaaaatataattatccttaaattatcgtcaacaatggaaatttggtaaataagcaaaaatgcacagtgatataattttagcggtttagtggtaccgcagattagttataaataattaaaaattatttgttagtacgatagttgggaaaagttccttttgtccgtatgtttagttttattttttgtttatgcataattgtaatttaggttttccctttttttttaaccatggataaagtccattttatgtagattaaactagaaatattattacatgacaaaagagagtctctccctatgttgttggaggaattttgacaacatcgaataaaaaattaaaacatagatattaattaaaatatacattactccacttaaaatggtgagtattcaaataatagacactcagacgtactgaaaaatacaatgagcacaaggaaattatagtggttcaatcagatcacggtctggttagtccactgttgcaaggatttctgtcctgttttatttcatgttggatcactcctttatatacaaagcaagcgtcctttgattacacaaaaacttaatttaatatcgaatcgttttacattgaatatcaacattaaatcaagaaaaacataaacggaataaatgaaaaacagtttcgactcaatttactaaatacaacaacgtacgcgaccttaatggtgcgagttatctgtttatttacatgcataagctcgcgggcataggatgcgtgaaggactaacggtaatatctaagatcttttgatcttttgatctaagatcaaccagtaatattgacttagaaagatacaacagtaagattataatatctttaccaagatcaatat

SEQ ID NO: 303894 - DNA, 3058 bp, Cannabis indica
atatgtaaagtgattttttaaatatatatacataatatttttaatcaagatgaagctaaaagtgcaccatataataacataaaatcaaatagcatatatttattctctaaatgattttcatggtaaaagattttaaaaaagacaactcaatataaaaaatttattattgagggagagggttaaataatctagatgtttctagttattagtaatagtagtttagtcctatagtagaaaatcagtttttcaataacatgttaatttttttttgtcatttcttttttgctacctttatccaaaaagaaaacataatgttatataaatttaaagacaaagaatccccaataataaaaggaatctcatctaatcatacaagttttttatccactcagagatgccaagctaatccatgtgtagctttaacggccaaccaacgtacatggattagggacactcttaaaaaattaaaaacaaaaactgccaatcatctaacaaagaactaagtttattgaggaaaaaataatatttagaaaagcattaacatgctgctaaacaatttgactcaacaaaaatatgaaaaagttaatagtaattaagagttcaattcaatgctacaaaaagagtcacaacttctgtctgaataactaaaaaataatttttaacatatataatcagtaactaattgatttatgaaaaatgctaaaagataaaatatatcatattacaattagtacaattaaatatatattccacataaactattatagaatattaccaaattatttataaggcgtaaaagcgatactagacaacaccgttatccttataacaatattgttgatatataaattaattaaagccaattatttgataattgataaaatatttttaattattaattgtagtagatactttaatagaatatttcatctatattttttgacaaaatataggatttctactaattttcgagctagctactcaaattctgtctccaataactattttttttttctgaaagaattgatgttcattaaaagagaagatagctagagatcacaggaggatcacccgcatactgatttaagctacgattaatataataaaacttacaaatattgaaacagttaatgagagctcaaaagcttaaatacgcattgtaattcgtgcttttttttttttttttttttccaaaataatgttagtagattaagctatatcaaaatcaaagattggagaggtacacagtctcgatctttttatatttatgtaacaatttacttgtttcgcattaaggttattttaatctaacattattattaatgatatatgtatttataattttttttttgtactaatttacatcttaaaatgccaaacattatagaaaagataggttcacttatttatttgtcaagcactatatttggatctcgatgatctaacatctcattaattgctctagagttatataaaagcttcatatgttttcagaactagtttgtatatttatgttacaagataaatattttgaaaaatgagaatattaataggagtattataaccgactgataaatattggatatctaattgtgatcggatcggctgtattggatgttatttttgaatatccaatcagatcgaaggatattgattgaggtgtctaaaaatccaatacatccaacatctaatcaaattaatgaatattttcatttaggttgaatgagtaattagattttatgttgttataagtaaaaaaaaatatatgtatatataaaaattaatatgaaaattattattttttttattggatatgtccaattcaatccaatagatattttggatggatctgatccaataaatattaggtctaaaatattggataaacccaaattaaaccaatagatatacatattaagtattaaatagttatatttaatatttggatatagagataatgttattcttagttgggtttggtgtatattctagggttagatatcctcccctatataaagtctatgtaacatttaatatattcaatataattaaaatacttttactttactaatatgtatcaaactctctctaggtgacctagatcctattttcacgcatcacattcggatttcacagatcttgctgttctccttagctcgcactcgccggatctctgctccctccaatcttccttcggctcttcccactaccgctgcttccactgctggtaacgtcgtggctgattacaccactgctcccatagtgtctcctcctgtctaagaaatgaatttagcatcttttgatgcttcgatcgaacaacctgctaaagctctggatctccaacacactgttccgtctccacctcaggatattcggtcttctttagtcattcctccttcgatcggagccacttccatggctgctccggccatgccttcaagatccatccctcccgtgaccattggtaatgttcttctcactaatcttggtcctcacaatgccgatcccgtttctttgcaactttcctctcacgattgcccaaccaacgaagataatccctatttcgttggctctggtgaccatcccgggttgattcttgtgactcctcccttgttcgaccataactttcagcaatggcgtcaggattttcacttggctcttgaagataagaacaaaactggcttcattgatggaactcttccacaacccgatcctactagtcatctcttccattcttggatccgctacaaccaaatggtaatgtcttggattattcattgtgtttgtttagatattaagagtagtgttatgtttcttgatactgctcataagatgtggattgagcttactaaccgttttagtcaagggaatggaccttgtcttgttgaacttcaagaatctcttacagatttacgataaggagacgaatctgtcaagcctccgctgacaacgccaagttttagaaccaagaaaaggtctttcaatttcttactggccttaacaaatcataccaggtggttcgtgatcaagtgttaatcaccgaacccttcccatctct

SEQ ID NO: 303895 - DNA, 2112 bp, Cannabis indica
tcttacattccactgcttgtgtgtaatcttgtgtaacaagaaaaataaagaacgtatagcattgtactgatatctaccctgttctacatttttgcttctgcaggcgcttcctatatatcttgataagcttttccatccatttgttgctgttgtactgtctgtaacctttgtcctagcttttggagaggtgtggttaattttttttctttcaaactctttatgctttccatgtaagtgttttagctttgggtaggactaacatgtcttacaatgtgggaacagataattccacaggctatatgctcaagatatggactagcggttggtgctaattttgtggggcttgtacgcattctgatgataatatgttacccaatttcgtacccaattggaaaggtaagcaccaaaccttgagttttctttgggaatttacctgacatcgtgattgatttattgcattatgattactatgcttttttacgttctttggaatgaaatctactcctttatatcagttatgagtgagtacttttattgtgtaggattttaaattcttgctttaagaagaaattagttttgtttatatttaaaaatttgcaaccggaatgatctcgaagatgaatttgtggaaacttccaatagttttaaggaaattgacagaatacataatcaattgcttgtctaatttaaaaatatctttaatcgattttaattctgtcccgtctcaagcagttcctgaactcaacttgttttcaggttctggatgctgttctagggcacaacgaagttttatttaggcgagctcagttgaaagcccttgtctctatccatggcaaagaggtagccacctttatctagaaaactctgtgatgggccaccacatgtactattcgatattagttatcttgaaacgacaacctttactagaaatgataatgagtccctctaaatgtttgaattgggaagaaatctgttggtgttgtttcactaatttgtttgtctcatggcttaggctggcaaaggtggtgaactctcgcatgatgaaacaacaattatcagtggagcacttgatttaacagaaaaggtagctactgtgatttaaggattcccttatgtactttgagaattttcctttgtaactacagtacttgtttttaaatacttatctctctgctgaggtgaatctttcatgtatcacgttgccacttaaaagagaaactataatgtccttctgagttggagagtgtcgtctgataaatcgaatacatccgctatatagcatatatacgaagtttctcttttttaatacttcttaatactgtacatatgaagcaactttaatgaactgttgactcttttagggtttcattatccaatgttaatggttttattacgtagacaaaagaattcgatgaccttcatgacgtgatagttaatgattatgagcatgtatcttttatattagaaaccttatttattttgtgtttattttgcattgtctataaacaataaaatgtaaacaaagcttttttgaggtgtgtagactgcagaggaagctatgacacctattgaatcaacattttccttggatgtcagctccaaattagactggtgagttttagattcagattgttactacactattgtctttttgtttcctatgtctaggtgccattgttgtatttaaggtcacttttacttttttttttggattggtaaaactgtgtagttcatattcatatatttctagattgaacttggattttgttgttatccttttgcacaattttttcattcttttataaagaatgaagaattttaggaggcacaagatgttaggtgattgtgggtggagtgggggttggggtggcttagtttttattgttaatactctgtatagaatgcagtgtgatcattttgtataaatcggtatgtgatgtgtcctacggcatatttgctcatttctcagtgaagtttattatatcatatgttccctattttacattgcagggaagcaattggaaaaattctggcacgtggccatagtcgagtccctgtctattctgggaatccaaaaaacattattgggcttttgctggtctctctctctct

SEQ ID NO: 303896 - DNA, 871 bp, Cannabis indica
ttataagacttatgaaatcgcaaaatcacatattaacacaaattttcactaaattacacacaattagttgattttggagcagcgacttccatcagacactatacatgaagttttcatgtgagaataaagtactagaacggtgaggcgtgatcaaaaaagcgcacacaagtgttatagtgtctccgccaaagcagttttcatggtgagaaaagacattgaagaatcaaatcctagaatatcagctcaactggcactgtagtagtccgggaagaagatgagttagatctcttagtgggggttgagagaaagatcaaactaatggaggacatggaagaagtctgcatcaataaaatagaccccgccaaggtcattaaggtgggaaagaactgtctctggcgtcaatagagaacaaagtggcaaaagtgaaagccaatcaagatgtcctcgtatggagtcatgcagagtgagtgtaagatcttagattctctgaaggttccgtctccctcccttttattcaccccatttagtgttgttacttcttcttcctattggctctatttgactcgctcatcagagtttttccatgaatatcgtagaaagggttacattccttccaattaatctattgccacattttcttgatccctttgattgggtagaattggctttccagtcaagttagtcatttgcatgacccatgggttcattcatttattaatatggacccttgatccagtctgtctacttgcgtcattgggcatcgttagtcattctaactacctcaatgggccttatgtgttattctcagagaaacttacaaaaatactagaattttggttaacttttacaaaaatactgtcacacggaaaag

SEQ ID NO: 303897 - DNA, 1128 bp, Cannabis indica
aggcccctaaaatatttgggccggccctgattactaccatgtcattaagtataatattttagtaaatatttgtttgtatatatattataatacttatgaaagaagtgaatgtaaaaaaatatgacaacaattcactagtagttttataatagtaataaatttgtcatatggtttaatgttttcattactctattgatattaactcactttttgattaaacttttatacactcaattcaaataatgattattagcaagaggactcaagtatttgggatgtaaaataattattgagtaataataattttttattttttttaaagggagagtaataataaatattaagtctttataatagttccatcattagtaaaactttacattcaattaattatttttattgatttatgagctttcaaattttagttcccatcctccttttacatagagtgaggattcggattgtgagtttaagttttcatacttaaatcacctaataattgtaaatacacatatgtaaacttatcgccttagtgtattgcaatgagatcgaagaaataccatagaccatttctttttgttttagaataaaaattagaacaagatcaccaaataaaatatctgattgagtcgttaataatgttgttttatttatgatgtgtttcatgaccttgctaaaaatgtgcacaataatttatcaaccacatcgtttccaagacctaacaatccaaattcaaatcttaatattccattttattcatttcatgtgaaactctttctagtatggtacacttaaaacacttatattattttgtaatattataagaatacaataatagaaaaaagaaacaaatagagatagcaacatatggtgtcaaataatagaaatgaatgaatgtgatttgttcaatttctaatggatgaaagtgagccacgtttaacactctgtcttgaccccaaattttctcaacttcgtaaataataatgtatatttttttagaaaataaaaaattgaagaaatatattggggcttttataaaaatattaggttttgggtaaaaatttataattttactgtcacacgtattttttttttttttttttactaaaagtactgtcttcttataaa

SEQ ID NO: 303898 - DNA, 1692 bp, Cannabis indica
aaacattaaaatacaatttttttatacaaaaaatggtgtcttatgtaattatcccaatattaattggataaatattaatatattaaacaaagagtgcattcttaatggatattaactatcaatggtgatattaggaacatctgagtaattttatgcttattttttctatttaattaaaaaaatctctcatttttatcttacatgagctaacgttgttccatcaattgaaataaaataataaaaaaaagttttttggaaaaaaaaaagataaaacaaagttgagtttgactaaatattttcttatacaaacatatttttgatatagagtaataagaggtattttttgatatatatattttttttaattaagtagttaaattaagcatacaaatttcactttctctttcattgttctccatcagataaaaatctaatgggttaataattttaaaattatttataattaatttttttagtaaccattaattggtaatacctattgagaagtgttccattaaataatattctttcaaaatagaaaaaaaaaatatattaatatatcctgtgaattttaaattttaactacaatatctaaataaaatcaaaattatcaactataaagtttaaaatttaaattaaatactataaaatacaaaatagtttaactattaaatataatttatgtagtataatttatgtagtatagtttattctagttatatgacagttagaataatattcaattcatttaaaatatttattggacggtttaagatttttgttaggttatttcgggttttttttttttgttgatttattcgatttatcagagtaattattgtaacctaacaaagaatataagcatatatttataatgttaacattagaaggatttttttgaattagcctcgcatgaagcataaaatttaaaatttcccaattaatatattgctgcctcattactgactgaattttgagggttatcgttgttgtagttgtttgtggacctcacgtgagatgcattcgtgcggtgaatgattcacgtgaggagtacggcaaaaggacagggttaggtgaggggagggatgcgcgtggacgtgagagtgcgtgtaagaataggtatttatttctatacagctgtttcccgcgttaaagaattgctaaccgtagagttagggctctgggtcctacctctcttccctctgcttgaattttcgtcgttttcctgactaaactttttctttttttttttaataaaaaaactttatttcagttttttctgttgtaaccactccaaacgcatttcgcattgcttgtgtgatcgtgttgctcacgtcccatttgagttgatcgttttgttgggttacgtatgtgtatattccaaaagggcatcaattaggctactgttggagaaaagagaacttctacgtcgctctcttacgtgttttgttgcgttgctgacatccacttaatgatgaaaacaatttatgtgctggttctattgatagaaaaatatttattgtatctcaatattcttaatgaaaaatattaaaaatgtggtgagtaacagtcggtttggtcggtcttttaaacaaacaaattttaaaatttgattttcagtttttatggttataatccgaaaatcaactgactattatataaatgtaaaaaaaaaaaccgaccgttttaatc

SEQ ID NO: 303899 - DNA, 1992 bp, Cannabis indica
ataactcaaaccaattataattaaaatagaaccggttctataacagtattataataaataaaaacaaataacacgccgacgtagctctattactatcgcgacatgtgaagtgaactactataaattttgtgtctttctatttactctactcatatcatattttatctttccaatctagcgagcgagtgttgaccactttttagcgtcaacagttaaaagtaggtattgctctttaggatattcacttcttcattactttttaggatattcatttcttcttttcttcattgtatgtattttcacggtaatgttaacttagaagtaggatgaaagtgacttcggaatagctttgagcaacaagtaaccactaatttacaaaagcaacaacaaaaattgaactcaaaacatgcctaccccccaaaaaaatagtaaagttttatgaccaacttgtagacaatttcactactataaaacgaatatacacaagtgatacatcatttaggagttgttttccaccaagccatcatataaccaatttctagccatggtgaaagcttgctctgcatccgcatcttcttcaggagactctggcctgtgtacaaagccatgaccccgtcccttaaatactaccttttttgatcctctgccaattctcttctcaacattttctagcaaactaactggacatagaggatccttgtcccctgaaatgaacaacacaggaaccttcacatttgaagccaaagatggattcatcatcgtgccataaaacgagaccccaacaccaaaataggcgccctcatcttgggcgagcacctcgatcactttgccaccaccaaagcagaatcctattaagccaagcttctttgagattcctgcagccaaaaattcattaaccatccattttgttgatatgtcaatatcatttgcaaccctctcagggtcttgttttttgatccactcttcaaacatagccattggtcgatgctttccccatggatctcctcgaaataggtctggaactagaacactgcagtgtttttattcaaagaacacaagaattatcatacaagagtagtttcagaaaatatactcctacaacgtgtagctctctctatacaacaataacagtacaaagcaaaggatttgatgttggaagccaatcatcaaagttacctacttgtagccattgcaagcaacacggtatgcaaaatctctagtagctgaatcttcaaacccataaacatcagacaagagaagtatcccagttttgttattgttctttactgctgtgaaaaggtaggcatcaacattatcaccaatagagaattctatcccattcactaactcacatgtctcatcatctaaaccatcttccatttttactacgccacaacttatttttctcactacattcttcgcacttgatctccaaagatttaacttgctgcactttctctgtaagaaactgaagctttacagtcaagactcaaggtaacaaaacataaaatccacataaacatgaatactaggaaatgcctcttaaagacaaagaagggtacacaatgttgataagaagtcaagaaaaaaaaatgcttttccaactcagttggagaatcaatgcgttctgtccttgatgcacagaaaagctaaatgatgtttttccttataaattttctactagcattatgcattattactaaagaaaaactccacattccagaaagttcaattagtagcagcttaaaaactgaaatatgaagctttagtatgccctcttctaatccaatttcaactccacagtcaaaggaaaatgctaaacaagaaagctttcatgatttgccacttgaacgaacataactgtgaaaatcaatacgcaattattataagttctaattcaatttattttattttttgacattgaatgctaacctacatgaatgatgtgaagtcattgagaccttgctctccacccccacacacactatagtc

SEQ ID NO: 303900 - DNA, 737 bp, Cannabis indica
aaaaatttaaaagcaaaagtattaccaaacgccacctaaaaataattaagaattttcaattacactctttcacgagattcttgtggctctcatgagaattagagtgtaattaccaaatattaccattttaaaaaaattaatattaaattgtgtaagtgttaactcatttgctataaatataaaaataaaaattgatatgtaattactacttaatgtatatatctaaatacacattacattatgtactaaagtataattattatctaataattataatacttgctaattatatagttactttcaaacgtattcaaattaataaatgcaatgtgtgaatagttcaaataaattattatgtcttgtacgtatataaattttcagttgattatattagtttagggctccctatcattaatatctatgtgtgcatgtaggactgatttggtcactatctatataagtctatgtagtcctatatatatacatatgtattagtgtgaacatatacacatcaaacccatatcatattgttactttatgaagcataagggatattatatatggttggatattgggtgtggtttaaatttaatagtgagctgaactatcccatctatctatattatctatattctcttattcattatatttatcctaacacaccatgaaaatcaaataaaatttaaaattatagtacgagtgtaacgcccgtattttaataataataaactcggaaa

SEQ ID NO: 303901 - DNA, 1749 bp, Cannabis indica
taaatacatattgtctcatcacaatggtatatttttgataatcagataaataaaactgttcctgatttagagacctagggaggaagacttagtttgatagtattgcactatcaaatagtagtaattactatggatcaattaagtacgcttgtctaattattatatattattattgtcttctatattatatacaaattgatcttgagtttattatcaatttttctaacaaatgttatttagagatttttttaattttaaccaaaaaaaaaattataaaaatacagatctatagtatttataatatttttacagatttgaagttttctttcttacaaaaataaaaataattgtttttctactgtattaataattatgttgttatttttatgttgttgttacatttatattttgttgttttttataaaaatataataaaaaaatccgtaaaaaattaaattaaagtctctaaaaatataaaatcccattttttaatctttttacatttttactatggggcgaattttttaaaagaaatattgtgtaaattttatactgtgtactgtgttaagtttttacgattgtttcacggttgtttttaagttgttccactattgttttaattgttctgttttattgttttacggttgttttaaaaaaaaagacagtatttttgtaaaaaaatttaccctacaataaaattgtaaacttttactcaaaatctattatttttataaaaaccccatgtaaaatgtaagtaacttgacttctgaagctgccactcacacgcacaaagtagtgggtgtgtaaattctaatattttattctcctttgtggaaaacttttcttgttggtacgaaataagggtggagttaggatgagaagttaggaggcaggtaaactatattataaatttaaatgataaatctctcaaaaatattttattaaatttataattaaaattaaaatacaaaatacgtcaaaaaaaaaataaattaaaatacagaactttttccatacatagcacaaaaattaaagtgaatttatactaatttttttgatcattcttttaatttatgctagcaaacaatcacttaaaaattcatttatcatattattgcgaagtgtaatctttattatatttgtagttgaaaaatattgctttatagtagttgtagaaactgaaagtgtaagtgtaactattgatgccgaaaactggctcaacaacaaatttatattatcatttcgaattctttacaccatatttggtctaatcaaaatatactttatatcgggtgactcgatttccttctcaattatttcaattcggtataggtctactaattcctaagctcaaatgtgcttttgaagatgtatttcgacagaattttgactaatttggtgtgagcaagaattcgttatcccccctttttttttgaataaatataaaaaagagactacaatttataatagttcactcttcgtgtcgcgatagtaatgagttacgtctacttaaagcttttattcttcataagaattataagattattagttaagagataactcttagtcctagaaagaaaaactagagagatactcttactttatgtagacttttcaaaatgtaaaaaatgagtttattaaaggagtctccaattatatatatataggtgcactcttaatgtgtattacccataaataggtattgttgctccaaaattcgcccaaaatacgtggaccagtcgagagggg

SEQ ID NO: 303902 - DNA, 2718 bp, Cannabis indica
tttttgtaaatagccctttataatatatatgagaagttaagtgtacaaccagatgaaccagaccagtatttccaaaattctatttttattatgaaacatagttcgtataatagcaatatgacaacttacgtcaagcctagcacgatccataaacacgaattatttgtgtcagtccatgcgcgacttaatttatatatatattagctataatatgggtttatgttaaaatttatatttttttttcctcttttcaaactaatttctaactaccgatgtatattgttataattttatttaaataatttaaaattttaaaaaaataattatatatttttagaataattttttaaaaataaaatatatatatatgtatataactactaattaaattatatttaattcgtactgtgtttttaattatatttgagaaattaaattagtgtgatttttgtttcttataacacttacatctcaatctgtaatattaaaaaaaaaaattaatgtgcactcttaatgggtaatattaaattattgtgcactcttaatgggtattacccatgaatgggtactattaaaaaaaattgagtttttatgtttaatttttctatttaattaaaaaaatcttttattttttcattatatggactgatgttatttcatcggctgaaaagaaaataataataaaaaaaatcggcaaaaaaatgataaaaatatattgagttttatttaaatattgttcatataaacttatttttgatataatgtaaaaaatatatattttttggatattttctttaattaagtagttaatttaagcataaaaattcaaatttctcttttaatattcgccatcggatcaaaatccaatgacttaatatttttaaaattaatatttatagttaaatttatttagtactcattaatggataatattcattaagaagtgttccatatatatctatataaaaaaatcatagtgaaacattatattataagtatcatctaatcaatatattatatattcacatatatgttgatttatggggttattatagtgctaaaatattagtagattctatatgagaaattagattctctatcaattaataaacatacaaaaatcactaactacaaataagttaccaaacaaatttataaattaaaaaatactatacgtaaacaatctaaaaaaaaataaaagaataatataatacaatgtgatattaaaatgaaaatcacgcgttcttcaaaattatatattaaacaaaaataatttaataatttagatttaataattatttatttaaaatatagaatgattcaaataatatgatttttcttatttgaaattttatattttttaaaaaaaaaatatacgactttatgtgaaaatattatactaaaaaaagaaaataaatagtgtttgaaaaagaaaagaaaaaacagagctaaaaatgttctaattaattatgtgaccacagccaagcaagtgatcgttagaccatatttaatattaattaggaattattagacggaaattgacactttatttacaaaaacatttttataaggtgtggatagtatttataccttttatgtgatttcaattactaaaatagctcttacaatatcacttacacaatcatggttgcagggtggttgttgtgtgattgcacggtggttgcatcagacgaaagtttcaatcagacaatggttgcagggtagttggccgaaggttgcatcagacgaaggtttcaatctgacaaaagttgttatgttgttggtcgaaggacgttgcatcagacgaaggtttcaatcagacgaaataactgttagaaaaataattatgcaactgttatgaaacattaaaaattaaaacagtgtttccacgtacgtaactctaactacatgtctctttataatttattataaacaatttaccattagaaatttgaaaaacaacaaaaatacaccatgataaatatatttttttaatcaaaagaaaaaattttattgatcaaagaacatccaacaaacaacccgaaccaacaaagacagctagccaaagcagccaacaacctcaaacaaaattatcatctataaatttcttatataacattgatcttttatacttagcttctttttagctaagtcgtacaatctacatctcaaaatactcaaaatttctttaactaaatacataagagttcgggtaaattcttcataattatttttattatataaatatattttttaagaatataaattaaaagaaaaaaattaaaaatataaattttatataaaataaaaaattttaaaataggatatcttttaaaaaaatttgatgtaaataaaattttcctattgaattaatatttatgacaggaagtttatagtataaccatgtattaataagtttgattactaactatagatattttcaacctaacgcaaaatcctatcttcttgattgatgtcaaagtttttctcattcccacatcaatttaatgctgtgatcgtgtttatgtgttgaaactaatttagtttttccattactcttgtcttttgacatggttctttagtcttttctttttagttttttctggttcgagtcttttcttttggcatgggttgtgtagctcgcaatcatcacggtacaacggtagaagcattcaagaagggaaagattggatgtgttcaactcgaaattgctgagat

SEQ ID NO: 303903 - DNA, 2352 bp, Cannabis indica
atttgtaatatgacatcagagctcaatgtatcattattgttaatttttaacaaatattaaaattaaatttatttttttaacaaaattgaagaactaactatttaattttataaaacatgaggtactaaaatagtaagtagttattaaaataaaaattaatcattattcaattaattcgtatgtatataattttaatatcttatattttaggaccaagtatataataaaaagtgataagagaaagacataataacactcatattagatgatgtataagttacctttttttttgttttttttttttttttcattttggaggagtaccgaattgtaaaaatatttataaaatggtgctacatcataagctttataatagagaaagcaataaataacacaatagtgttcatttacatataaggaaacagtactatttattacgtaaacatttatatatatatgatattttattttattttttttaaaaaaatacttaatcaatataaaaataatactttattcatatttttataacgtatatataatgaaaaatatatgatttaattaatatgaaatgataataaacatgtatggtgtattgtaaaaatttgaggtaaaataataaaaaaaaattatgtttggtgttatattttaaagaataaagaaaagaagcttatgagaatgctccaataaaacaataattactaaattgagtaatatttattgctatatgaattacaaatttacaaatttcaattgatttatatatatttcaatcacatacataccattaattaagtactaaagtactaattaacaaaattttatttattattgattaggattttcaaacattcgatttccttgtttaattatatagagacgaagataaaattagtactagctagtactaactctggtcctacaagtactacatttaaccatccttccgatcctttggatgttgctgttaataatattattgcacaaaggtaattaatttagtaactttactaagtctgttttcttaccttagtttattattagtttgttcatgcatattatttttaataattaattagttggtttgctttatgctaaaaacgaatattataattcttatgccaataatttaccagacaattcttacattaattccacattaaaggtaataagtaataatgcattacttttttgggcttatatattttcatctatatattgactgcatgcatatataattttgtttactgttcttttagctagttaggattttctttttccaatattttctttctacaccgtaagtactagttttgctactaatgtgggattttttttttttaaaaaaatcacttaagttaaatcatccaaatattaaaaactaaatagtgttttaggacgacacatcatctcttttatatatgtatttgctaaatgggagttttcttttttgtattttcatatttaataaaggctattttggtaattcaattagtataagcccattaacattctcatttttattaaagttatagatatatatagagtaatttgcggcataacctccttaagtggccatgtttttacaactaacttctaattctaaaattttagtggtaaaacctcctaaactcaagttctattagcacttagccctttccatccatttttgggtgttaagtgctaggttggaatgactacgtgtacacaatgtacacgtggctgttggaattattttaccaagatctagatttactaacaaatatgtttttaacatccaaataatgaaaaaattaataataaattgcccattaagtggccagccatggatattgggccccactttgtaattttgtcacttttccaattattcatcttattgtctcaaaaataccatctttccaatttaaccacttaaatgtcaaatctaattatttaataattaaaattaattattaaataaaattatcatttaacatatttattaattagacttaataaagtctcttaaataacaaataaaccctagaatctcttttcttcacaattaagccctagctaattagtgaaaattcataaactagacatagtctaattttagaattataattgattaattaaaattaattaattgagtcttacaagcagtattgtctcaactagtatggggaccatgggcctatatatccgagcttccaataaacagatctagaatttaccaagtaaatccactagcttattattcctcattgcatccaccatagaacttggaattgcactcctagttatatagaacgctttatatgttccacgatatagacactgtaacgccctaatgctaaggcacgctac

SEQ ID NO: 303904 - DNA, 9743 bp, Cannabis indica
attttcttttttaaaaaaaaatttaggcaatcaaacttgtaaatttttaaaaaatctgaatagtttacagtatcgacaacagagttcgtaatatttcaatttaccattcgtgtttaaaaaatttcaaatttgttttcgacattataaactattcaaattttttaaaattttacagaaatgatatcgtaattataataaataccgtcaagaaagaaataaataaaaaaattgtttctgatatgtgttttcaaacttggagatcgagaaaaaatgtatgtaatgggatgttgtaatttttgagaaataaaaaagctataatagtagtttcaaagtattattattattattattatatgaacttccatttaataaaattaaaaagtacacgaaaatacactgtatagtaattacgttgtatttattacgaactgtataattactatgtagtgtaattactagggtaattactagggtagtaattacactgtatagtaattacattgtattttaaaatacaaggtgtgtttggacgtcaagtggtaattacatgtgaattcctaatatcatgtttggcatgatagttagtaattacacattaaattaatattataatatttaaaataaatttcatcaattcctgaatttgaattaaaatcaatattgttcaaactttcacaatttcctaactatttcattttccatgtcctcttcgaaaaattcatcatcctaattccacttgcgaataaagttgtgaagtacacaccatgctaatacaatccagccatgttttttgatgattgatagaaaaagagaaagtccatacattaaaaataattaaaatatcatatcaattaattaaaataatttgaatttatttttggtatgtaattacacagtgtatttacacccaattctcatggggggtatgagaattggagagagtaattgaggcctcccaattacctctgattacacagttactatgtaattacgtggccacacaaacacgttaaactgtgtaattacctccaattacatccaattccaattcccaggtggctttccaaacgcgccctaagtgggaattccaccaaactcatcaattttttttttaaaaaaaatatataactttcaattaaaagaatatgattacagctacaagatcttaaaaaactatgaggaatattaccattccacaatactttattgtctatcctagttgtaatttagccaaatcataaactaatgtattatcactcctatacatatgacaaactttaacattatgggaacaaagacaataaagattaagtttccctaaccaaatctaaaaaaggctacaaatcttcattacaagagtttattcggttggctgacatttgagaatcagtctccacaatagaaatcaaaaggaaaactgtggcacaccatcgaaaagccccaagcaaagcttggtcttctgaaataaaagggcaggggcagcaaacataggcctaattaacccagcaaccacacctcctaagctattatagtcaacactgctccttgtcaacttttatactaagattgattgagaggttgcatctatcaatgtttaatttgcaagtaccaaatccaaatgcaaccttttaatatgactctttgacaagttttgaagatgaacaatatcaattctcttctattgtgcttgcttatagtcatgtgtaaaatctctaacccttacccaaccatatatcttgtcttttgcaaaccttcttttctcaaagataattacattcctatcattccaaatttcctatagcaatccgaggcattattcaaacaaatttgcattaagttatttaaaagcttgggaaagaaaatcataaacattaatatatttatgttgtttataaaaggagtacagggtagaagattttcaaatctatcgagttttgtaacaatacaagacaacatgagatgtagactttgttgaagtaattagtgaataatatattatgaatatataaaatatcaatatatttataaaatgaatatgttaattgttgaaaaataattaataaaattagaaaattctttattcatataggagtgtatgatcttgttgttagggtttatgtcttaaaagtttgtaaagacatttctgtttataaataagagttgaacattttcatatatacttgacatttaaattattaatattcaatattaaataatttatatacataaatatcgaaaaatttattattcatacatgagattgtgacttgtattgtaaggagaattaagatcacttagccataaataaaacagtcagcaacatattaaaatttaggaatctttaatcaacaattgctactgtatagttcactaatgcccgttattcggtgttgtttaccgagatttttagaaaataaattataataaattagaaccgaaaaaataaataatttaaagaaagaaataaaacaacacacgaagtttttacatggttggaatgttaataagccttagtccatgagtcaatattattatgtatttttggctagaaaaaatctttgataatacaatgagtgtaagttctctatttttcctgagcaagtgttgttagagaattcaatccttaattcgaatgaattagttggtgtttataatgtttataggaattatacttagtttcccttttttctctaatggggagtttacatgaaaatacataaggttgggtgttgtttttgtgaggcctagcccatgaaaggatcggtgtgctgactaggcaaataagatacgattaagttgtcaataccatgtaattgtgggaaattatttatgaattaattgcttgatctccattttatgtagttttcctttgtagctcgatacgatcttttatctgagatttgaggagaaaaagggagaccacacttgtattctaggaacacgctatttggccctccgagatctcggtactggaactacttctagatacgggttgtccttggcagaagcttgtgtgaatatggagctaagataccttcttggaaggtcttatctaacttgggcttgacccaagttatcttccttgagcccactggtgggcttttgatactgagcagaagtccacgtgttccttgtcaaaaatacagataacatttactccccaagcttccataatgttgtgtagtgtggaagcttgccccaatccatataaatggaaatgtggaggttggaaagtaatatttttatttctttctaggtgctaactgatcatggaaggtgaactttcatcttttgagttgggaaataaacgtggcaatcatctattggtggaggtatacatttatcgaggagttactttcctggaaagattttatttcaacgactattcattgttggtgcaaaaattaagaaaagcatttttatcattaatttgggcctcgattccagagtgcattaattgcttgacacgcttagcgtctagactttcgagtcgttggatgtgcttctgcttttggagataatatcttggatcgttcattcttttttcacgtggatagccacctcaggtataaataccctcaaaaaacaccatttaccacttttctccaaatttaaattttcaatcgtttgagtttaaattttcttgagagaaaaatgtagtgaatgaaccctgttgactcagaattcgatcaactgattatgaagccttattaataactggtaatcattgcatgtaaataataataataaaaataataaaagtgacatactgatttatagaggttcatcccccttgattagcaggtaatgacctaatccccttttagttgtattcacccttgagataataccatgcagatcacaggttaaaaccttgtaatttctagctatggctctcttcagtattacaatagtgagaacaatgtgttacaaataaaaaactggtaagatcttgtgaagaacttatgaagatacttgacttagtgtctaggaggcattgatggaatgtgaagattgagagagagggagtctttgggtgtgtaagaatcttaatggagcccctctaattcctgtggaatgacttagggcttgagagagtgatctaatgccatttatatagtgtagagctaacaagagatcgtaattcaaataggtgaagatatttcgttaaaatagggatattaacatctttttatctattatataaattacagaaaaagatagttaaattcttagaatatatgactaatatcttgagggaatatctctatattcgtgggctgttggacttgtcccataattcgttcagcttgtttggagctgtttgcataagttggcaggccagtcctatttttagggcatggctggcatgtgtcctccatggattagccatgtatggtccagccaaccttttccacatagcttttctgttcaacttttttgtacagctttgctgtagaactgccttgtacaaccttattattctacttggccgaccagctttccttacaaaggctaggcctccttagttgaacaaacctctttggtctgacaattattcttggccagccaacttgttctcaagacctggccagcctataagcttcccttggctaggctacaagcttcccttccctagatagacatggttggtcaagttcttgatgacctgcttaactcctttttcttattcttgcttggcaattttgcttgattactttagaatccttgaaagttggcatgtcgtgtaaggtgactttgtcctattattgacaagttttatttcacgtgtcttaagtttttactatgtgggcatgccaagtcagatgggaaaaatttgggataatatttgcccccaagtccctgttcggaagtctgtatgaatagggaatttttcgctcttgtcttgactgtaggaacctttactgagcagccttgtctaatcaagtatcaaactttttagatgatgtgcttttaaacctttgatcttctctctcccatgtatgccttttactttcctcatatgctctctttctttgaatctgccattgatgagtttcacttttagagtagtctttccacattataatctgacttgatagctttaggatgcataatgtttgagtttttgatgagcaagatcgactcttagattggtatcttaggtttgttaaagacccatgtccgactattagatctttagtttaggaacttctgtccaataataggaactctatcctggaacttagatcatgtataggaactctctctaagacttagatcctgtccaagaactttgtccaagacttagatcttgcctaggaactctatctaagacttagatcccgtctaggaactctgtccaggacttagatccttcctaggaattctatcctatcaacataggtcaattgtatacccttgtttggtaatttccctttttaggagctctgtccagtacgtctcgggtcaaatcttccctagccagtcaatggcctttgattcataggctacccagttcatgattcttgatactttgttgattattggctttgtatttcaaggatgtctagtgaatacccttaggttttggccagttaactcacattttgtctaagtctttttatgttttctggttgttaactcgtattttgtctttttatgtttttgtagggatgagctcacacaactttttgggaggtgacatctgaattaacgaagacttactcagtgtggacagctagtccttctaatactactttgaacccatcgactccagttattattctgaagacatttgaggctttgttgtctatttttatgcttttattttgggtacttcatcttttgttcttgtatggccttaaggccttttacttttaaactagtgatatttttgttcttgtatggccttaaggcccttaacttttgaacaatgtttgtgtgtggtcttagggccttttacttatgaacagacgattggccaggcaatctttaataacatgtagctaaccgagcaaattttactctcaaacttatactttttatgtctaatctgaagtatgccactcacacttacttagctttatatttttttcttatcaaagctttaaattttgcttaagttgagctgtgcttgttcgatactatacggtatgggtgccctccaagtgatcgagcagacttatggtctcttggtcgcttgtaattcaccaagtactatagacgttttgcctgtgtattttcttggagggacttatttgtatgaactaaaaaaataaagaattaactactaagtaagttattcttgttagctaaggttgtttgacattaggtttaggaaaagggtaaacttcttttatccatatataggtgctcacacatatgttattgatgtgcaacgcactacgttacgtactttttttttttttttttttgataataaaagcttacaatcataaagtctgctttcattcatcattttggctacacctgcacggcatactaggccagggccacgactaaagagtggtggaaacttagctcttttatactaattcctgtatggtgagtcgtacaagaaccactactgaagattagtgtttttacaagttggttactggtagtactttttgagatgttctccattccagtatcttggcaggggaaccaattctctgctctcattgtacgtgtcaagcttgtacgcacctatacttgttatctctgtaacttggtgcataccttctcaatttggtctaaacactcctcccgcaagatctttggtattcaagaatattattcacaacactaagtctcttacaaagaatttccttccctgacttatttattgaagtacctggaaactttttgttggtaggcatacaactttaagttggcttggtctcttctttcttctatttctcaaggaattctgctagcaagatgtggtttgcttcttggtcatagtaggtcaaagtacccttgtctgagtatctttttggacaggctttgcccccagcatgattgttacataagccttcatgcacttctatcaacagtcattcaacttctttcttagtaacacatcttagaggtggcattgagaaaccacgtctgtacataaccctatacaggattagatgcctaacatctttctttctcatttttcttgcttcattcttactttttgtcaagaatcatgtctagaggtatgccgctatgggtgtcatccatgttggggtgtcatcaagcatgtctatttcttctgaaatagtgatgctcagttctttatagaactaaatgggcaccaagtttgccttgtctctcaaggtgttgttggctagacgtgctagtgcattgtttgttgcactcccttctctggggacttaccttatagtatagcctttgagctgacttagtaagtcttgaatcttgctcaaataggctatcattttttgcctcggctgtattttcacctaggatatgattaacgaccaactgggagtcgttgtatatgtccaggtaatctgcccgcacttcgtgtgctaacttgaggccagcagttagagcttcatattcagcttcattttttggaggctttgaaattaaactatttttccctgtgcagctattgccccatatgtaatgagggcaatgcctcaaaagacaagtggtcaatacagcttccgtcaacatgtaacttctaggctgaattttcttgctcttgctttttctcttgctctcgctttttctctagctcttgcttttctcctgattcttgtgagattttaggagatatgcatgtgcatttggccacaaagttagtattagcttggctttttatagccactcttggctagaatgtgatctcgtcttggctaagttcaatggcccacttgaatagtcaaccatatgcttcaggtttttgtaacacctgtcacaatggctagctggttggtgtatattgtttcaagagtttttgtaggagaatgaagcatgtgtacttctctcattcttgaatttcccttttttgatattattttgactagagtcattgttattgcgtttgctttcattattcttattggttgagggttggtcggtatttcgtatgctggctggtatgttggacataaattgggcctatgacaccctgagcctgtccaacactagcatatcttcctgtctgggcctgccggacagcttcttccaactttatgaagccattagctcactcaaggaactctttcatgttgttcgttgagatccttttgatatctttctgaaattcacttaacggcaagatacctccaagtatggtcatatatcgaccttcttctaataggcatttgaccttagtggcctcagccatgaatctttgaatgtagtctttcaagggttcgccttgcctttgttttatttcgacaatgtcctctagttgtgaaggtatttgcttacaaagatgacatggtccacattttcccgcaaattccttacccaatttgggtaatcctcgaacaattcctacatttgataattttttctaatttttgtaatgaatgtgtccaagtttttcacgccataaattagtggatttatcaatagcagaatgacaagtaacataggtattgaaaatgtaacaattatcattaaatctaaaaccttgcaaaataattttggcattgatgttaagaacataacaatgattactatcaaagttaacactgtgacccttttcacaaacatgactaatgctaagaagattagcctttagtccttcaacctatatcacattttaagcttgggaagactttcaaaattaagagatcccacccctatgacttttatagctagaccattgccaaaagtaactttaccacattgcattggtctaatgtggttgagataatctttttcacctgtcatatgactagaataaccactgtcaaaatactatatttgagaagcaatagattgaaaataagaagaatcaaccaacatttatttttgacggcccatttatttttttagtaacatattcatttccaaactatttagaatcatacatctttttcatggtaacatatctaggtcaaatgtgacatttattctacaaaaatagcataaaggaatgaaccgattcctttttcctttggagtttccaaaattaccaaactgcttcttttttgtaacaacaatgcactttgctacaacaatataaccttgcaaagtggagtcagaaattccataaaccaaactttcagattttacaaatctagagttttaacaaaatctaatccaacatgacttatttgcccagatttctggacttctttaaaatgttaaatcctggatttagcattttaacattcctttaaaactttcaagttccttagttaatgatacaattttagaagttctcgaattcaactcaaaatcacaacatttatttttctcttcatggtctttgatgtcgtgtaataatgttggatatattttaccaggatttagatttactaacaagtatgtttcattaacatgctaatatgaactctaaaacaatgaaataaacacatataaagtttaggaaaccttacattgggtgcagcggaatataatgactccttctgttcagatctctagcccttgattcctttctgtaacagagcatcaccaagatctgaacctggatctcttgctctccttcctttgatgctgattctccttcttgttggttgatt

SEQ ID NO: 303905 - DNA, 2389 bp, Cannabis indica
attaaaatttatatatttaggaacttatttgctagaaaaacaagtttggcaaaatctacttacgtgtagttaaggtaagtctttaatttaaatcaaataatgaaattcaataattataaatgtatatatttttttttgaatggaaataatagttttattaaatcaccatctctgttaccaaactaggtaacaaatcagttggaacagactccaagctgaaactgcaatcaggatataatatagaggctctagcaaagttatgagccaccatattcgctgattgtctaacaaagtaaatatcaacattttttagatctttaagcatctccttacaagctttaacaatttgaccaaacatggaaaccatgtcaattgggcttcgtaaggcttgaattactgtgaggcaatcagtttcaagtattacattcatccattgtcacgccttgatccaacttagtgcctcacgaattcccattgcttcggttgttacaggaggaaaatggccttggaaagtcttcatgcaaccctccattaataatcctcgagtgtcgcgagccaccaatccaatcccaacttgttgagggtccgaaaacaaagcagcatccacatttaccttaactctaccgacagttggggcaacccaatgctcaaccgcatcttctggtagaaaaccaaataaagtggtctcaattactgttttttgagcattttgccaatgattaaggaagttttttgctgacgaaactatgctatccactcccacaattttaccttgccacaccttatcgttccttgcattccacacagaccaacacacagccacaagcatttcttttttctccttgtctgcctgttgaaacacctccatgcaccaaaccagaaaacttgaaatctggtgtgtacccgtgcctattccagtccgttccgaacaagcagcagcagccagacattcaaccaaaacatgtataatggattcttcagcacaagagcaaaccagacacaaagatgcaacctcaacatgctttgaccgaagctgaagcatcgtgggaagacagtccgtacatgctctccaaaccagatttttcatcttgggggggactttcagacaccagaaatttttccaaaatttgttcaccactgtctcttctaaatcagcaacaccattaagacttgtaattgcttataagcactcctaaccgtgaacagacccgatgtctccattgaccaagacaagcagtccattattgttgaaggttggagaggaatttggatgataaggtctcggtctctaggctcaaacaagtcactcaacaactcaacatcccactccttaccatccatagtcaacaagttttctactctaacattcacaagacctggatgggaagacataaccattggattaacattgtcaggtaaccaaggctcccctaacaccagacttttactaccatttccaacaatccatctaacaccactagccaccagcttttgagcttcaagaatactttgccaaacatagctcggattaggtcctagagatgcagaaagaaaagagccattaggatagtatctagctttgaaaacccgagcaactaacgagttagtgttaacacataaccgccagccttgtttccccaagagcgccaaattaaaatcctttaaattccaaaatcccattcctccctttgatttgtgatggcaaagtcttttccaagacatccaatgaatacccgatttagtagaagatgaagattgccagcaatatctagccattaaactctccatttccttagttatttttgttggaagcaaaaagacattcatggcataacttggtaatgattgagcaaccaccttgataagcacttctttgcccgctcgagaaataaacttggttccccaactttgcaatttctttctaatcttttccttcaaataacccaaggcagccgtcttattccgactcatggagctagggaggcctagataaagacttccttcaggagcaattcccatttccatggtcatacaaagatcatgtcgtaagttctcctctacattagagctgagaaagatagaagatttggcaaaattaacttttgacccgaaaccaattcaaatttttggagaatttcctttatacgaagagcttcaactttggtggctttacaatacaaataactgtcgtctacaaacagtatatgagaaaaccttggcgctctatttgcaactttgcacccatgtatccaatccctttgctcatatttacgaagtaaagctgagaggccctccgcaaaaaaagaataaagaggtatggtgagagggggtccccttgccgaatccctcttgacagaacaatcggacaaactgttggaattaattttac

SEQ ID NO: 303906 - DNA, 2373 bp, Cannabis indica
  modified_base (2296)..(2296): a, c, t, g, unknown or other
gagtgtttctagcgtgctttgtcctcacttgcatgcttcttgagaaaacttcctaggaggtcacccatcctgaaattatcctaggtcaagcacgcttaactgtagagttttcatgataggctaccgaaaaacaagatgcactttgttgatataagtagtaccaatcaatccgtttaagccttttcaactatgtagtcccatacatatacagtctcagaatcatcccacttgaccttccccaggcaatgtgggattgcacaacttactcggtatttccccttatgaatcacgagactactgactgtcacaattaccccccttacgggatccgacgtcctcgtcgaccacactttcggctaggtcaaggctctgataccatttgtaacgtcctcgcttcaagcctccatactgaaaccttaataattaatttaataattcttgaaaaaattaaccaatactaaatgaaaagaaaattaaccaatttttttttctattcttattattattttttttatatatattttcattcttattcctaataattgttttcatttattcttatcaaacatagcccttaataattgtttttttttctcctaattctaccaaaagtttagcactaggaataggattatattctaaaagggatatttacaaacacgtgggatttttgtttatttttttttatttttttttattttagggttaagacttaggggggcgcacattgcagggctggaaacatgtgtccaggctatcaatgcgcgtgcccctatatgtcactaattttttttagtatgtataacatatctttattgacatgcattgtgtaattcaatttttttttaacatccattaatgcaggactctaacgagtgtcactaataattaaaattttactagtgaaattttaagccaacaaataacactcaaaacaatatcacttgattgatttttttagattcatagtgaacatctttttttattaatacacattttatccattattatgaaaaagggaaaaaaaaaattaaatcccactaagatataataatattttaaatcttcaaaagtgtcattagatgtttttattactattagaataaaactatacaaaaacatttgaaagaaataacaattcatgtccccacaaaaacacatgattcatgaaaattcctcatacaatataactaatatatgatgataatataataaaagaaaatcaagtaattcagaattacaattgatgattgagaatttatgaataatgatacatagttatttttcaccacaaatcaacaaaataattaagttttaacactttaatacttaaaattttacataaaatttatttaaatagtactattccttgtacttattataaaactaataattaagaaggaatatgattaattatcaattctgaaattctttgttttgataaactatcctgagaagcatgtccatctccatattgatatataaattgtgatattctagcaagatttttacaattttgaagaaattgttttgagaaaggagagtccatattttcatcttcattatttatttccttccataattcacttattagaaacttcatatgatctcgagcttcatcttcagaaacacctgtatcgttcatgtaacattgaattgatttcggaatatcacctcttttcatttcatcctacacagtaaataattaagagaaagtaactaattaaataaataaatatattaggatatgtaatttagttacgagagattaattactatgtaataaatttttgaaaaattttgaataatcagtttaagtcaaaatcataatttcaaccagtgtatatacttttgtacaagtgtataaatttcgaagcaatacaagtgcgatgagctgcttgaatattgattttgatatcttaaattatttaaaacttcttgaaaatttacttaacatctaaaaaatactaaaatacctataaatagtgatttaaatatcaatcaatatcccattttttttttctatatatgtatatatttggtgagaattaacttacattcgatgttcctagatcatctgtaagtcgtagaatcatggatgcatggtaaattatgggtggataacctaattccagtaaatttatggcatcttttgtaacaggatttgtaagagagaaataagcatccataagaataatcggtcctgaatccgaaatccatgcattgtaatgtattcttcgaatgtggtttgtatccactgtgaaaccatttttgcctcttgtaattgatgtttacngaaatctaccactgcatgcatgcatacgtgaacataatgttaatttttcacaaaaaaaatatagtaagaaaaaaaat

SEQ ID NO: 303907 - DNA, 4402 bp, Cannabis indica
cgtaacacgaagagtaaactactataaagttatggtgtccctttcttttatttgctttcatttattacttatatcacgaatcatagatacggtgttggccaattctgagtgtcaatagttagaaaaaaaaaacttgttgctgccaaggaatggaatttttggtttaatcctctcattctctatgggattttataaagtgtttgaaatttcatcttgagattcatatcaggtttgtcgagaaatgggctcttcatcactagattagcatttggagttacccagatgggaatttagaattttatttttgtatcagtatttcatattaattagtatttaaaatgtatcaattatttttagttaatctttttttttttttaatgtgtattaattggctataattttgaaaaatttttgagttttcagttaatatgagatatcttacacttttttgtgttaatggatttttttttcttgaaatttgcgactacaatattatttttattaactttcaattttgaatttcaaattattatttatatatatttatcatgattaatattattaaattatttattatatttttcaaaataaaagagatttatgtttaacaaagctcgacatgaaataaaataatataaaaaaaattatattttgttggacatgaaaacagcatccctaaggttctcatgatcatgtccagcaatactagatataaatttttttcatgtccaccattgttagacatgaaaaatactcatttcagtgcgttggatatcaagtccagcagaaaaagggacaagaaagagttttcgtgtccaactttaatggccatagaaagaaatttttgtagtagtgtacttgttgtaatgtatttcgaacagtcataatagcacactagttcgagttgttggatattagcctaaaggttatctcaacaatgttgaagttgcctaaatggtatcccaacaatgttaaagtatctcagttcataaacattacaattattttcggatgacattacaccactagtcatgtcatgacttattgacgccttcttatttgcatttactaaaataacatttatgccatgtgctacacaattcgatctacttatcaattgcttaaaaatggttataacacatacatattatatgtataacaacatataaaatataattacttgtccaaactcaattaaactactaatcagtttaattggatacaagatatatattagatttcaagacactccatccaactgctgatccgacctaattggatattaaaaagtagcacccgatcagatctgatccaatcataattaaatatcaaatatttgatagtctatattcattagattggttaattatgattggattgaatcaaatttatgcacacctctactgccagccatatgagtggattaatgagtcagaaattgcaccattaataattaattaataagaaaattggttaaacctattttttaattactcttacctttccaataaattgaaggtattacttgagagaggagagaaaagagagtttatgaaattattaaaaaaattggtcattttttaaggaaataattacactttgtaagtaaataatggtaaaatgttaaaatatggtatttttaaaaataaaaaaataataattaagttttttctctaacaaaaagttttggactagtgtaggaggcctgaggcaacgaccccaacgcgccctactcttgagtcggcttgattttgaatctgatggatgaagaatcatttatgagtcatggtgttggttgatgtggcatgtggctttgttgatggataaaagtgtaatatgtggaggtgttgatggagtgttgtttttttagagagatgtcacatgtaattgttttgcgttttgtatgaatttgtagggtaggcaaaactgatttcaataagacaatctaatctaaaaataaaataattttctcgagttagagttgagaaaattacatatgtagattgaatacaaatattctttgctagtatttgtaagaacacaaaccagaaaagaaagaaacagagcaagaaagcagagtaagagaaaattggtataaatcaagattagcacagcaaaagctaatcaaggattaggccttgcctttatttatattgagagtttgttacaataaaatagctaacagaaagtaactactaactacgtttaactaacaactaacaaaaaaaaaaacaaacattagttgttaacaccccccctcaaactaaacttggaaacaaccatgtttagtttggatttaaggtagtgattagatttggtgagaaggtcagttacttgattggctcaaggtacaaatctgatagcaagtttttgagcaacaatttgatcccgaacaaagtgtaagtcaatttcaatatgcttcgatcttgcatgaaaacaggattggcagctagtgtagtagcacttcgattgccatcccagataacaggacaatggttaagagggaatcaaagtttagacagtacagattgtatccatttgagttcagtagttgtgttggcaagagctctaaattcgctttcagtgctagaccgagcaacaatttgttgcttctttgctgaccatgagattagattcccacctaagaaaataacatagccccatgttgatctacgatcattgacacaactggcccaatccgcatcagaatagctttgaagtgtcatttttgttgttggtcgaagcactaatccctctgagattgtacctttgaggtacctgagcaatttcttacaagcctcccaatgacaggaagtaggagccttgatgaattaacttagtttatttatgataaatgccacatctggtctagttaaggaaagataatgcagagctccaatggtgcttctgtacaaagtgacatctgaaaatggcttaccttcagttaaggataatttggtggaaatactggatggattaggggaacatttggcactttccatatggagtttcttgagaaggtcagtaatatactttgtttgagaaaggtacatgctagaggagtctctatagattttaacacccaggaaataatgaacatcaccgagatccttgagtaagaactgcttgttgaggtcatttgtaagcttgttgatgagtgacaaactaggtctagtaactactatgttgtcaacgtatacaagtagaatgataagagatgtgcctgaactgtagataaatagtgagttatcagctttggatggtgtgaatccccactgaataagacaatctttgagcttagtgtttcatgctttcagggcctgcttaaggccgtaaatagctttatgtaataggcatacatgatttggtttctgagagtctataaatcctagtggttgtcacatgtagactgtttcattcagagttccatttaggaacgcatttctgacatcgagttgcttgacaggccatttgtgagaaacagcaagagacaaaatagttctcacagtgacaggtttgacaacaggagaaaatgtatcagcatagtttattcttggtgtttgaagaaagcccttggctacaagtttggacttatatcgatctagtgagccataagcatttagcttaatgctatgaacccatttgttgtcaataacatgcatacccggttcacaggggacaaatgtccaagtaccagcagatttaagagccccaatttcaaagttcatagaagcaagccacttaggattttggagggcttcttttaaatttcttggttcagatggtagcaaagactgtggaagtggatgtttagtagccagataagattttggtttaaaaattatattttgtgatctggtttgcatcttgtgtgttcgactggaaggagcttcactagaaccacctataaaatgttgtgtatcgatttgttgaatggtacctgagacaagggagttgataggtatagatgtggtattgggatctatgtttggaattggtaagcgggtgggaggtatggttgatggagcttcaatgtttgggtcatctagtgtgggtgcagcagtagtagttgctggtggggtgatggtagaagattgattaaggacaggctcatgattaggagctaaaatatgtggtgtaggtaataattgttgtggcatgggaatggggtcaggttgagtgataggaggtaaatgtgttgtctcagtaccatgagtggacacactagtaggataagtagtattagtgtgtgaaaacacagatgaagtattaaaagtagcagtaggaacaataatgggagtagaatgtacctggtgtgaagttgaaggtgataaaacccctggatagtgatcttcattaaagataacattccttgcaatgtatatccttccgtgagcattct

SEQ ID NO: 303908 - DNA, 1911 bp, Cannabis indica
taataataaataaataaaaatcacagaatgggtgagtgaatgagtgagtgcacattggttcatgatgaggggtgagagcgataatagaccacaccacagtgcgcgtgcagcagtgcttgcttgttactagtgagttgagtacttaaaacttaaaagcctttttcccaaaggtaagccaagttttttcgctttctcttgtcacggaatcagtcactcacacttttggaatcatatacgtactaacatacatacatatatacacattccaatacatatttatatgaatataatttatttatttttaaaacgaagtggtggattttaactcatacaaccctcaactcaattctaactaacccagtttcttttgggcttttatctgtatcttatctacctgtcatgcttctgtgtacagtttctgtgttctagcttcaatcaaaaagcaatttcttatctgggttttggctgtttaaacagagagttttgaaatggagcatgaaaatttctgtgactggattggattggtggagtgatcttttgttttctacacattgagagatttcgtttggtttttatgtggtaaggcttcttgatcgatctccatttatggcaatgtatagaacaggggtagtgtatttattaacctttgttttatactagtatttggaggtgtttgctttctcttaaaacctttcttgtttgttttctaatgttaaatttaatgaagttgttatcatcattattattgaattgggttcgtcttttttgtcatggtcttcgcagatttcaataagccaaatttggaagatgaatactagagtaaggacgactaggctacaaaagccagggaaaactccattgaagagtgaaaacgtaatgatgatgataatattagtctcaaatctcaaatggggtcctgttaattctttttaatataataaatatatattttgaaaaacggtttctactgtaggatattataatccattggagctctataattattaatcttatcagtttctattagaaaaattatggttccaaattcagtgacaaggctccaaatgctgaagtttccgaaaaattctcagattgctgacgtatgggacagaaagccaaaatttgagtcttcgtattctctccgataatggaaaaaagaaaaagaaaacagtatttatatatttttcctctgcaattattttcccagattgcacaagtgttttgttttccgaatcctccgagttcgcaaattttccgggaaaagtagattcttttctttcccattcttccttctctcccagattcccagattgtggtttacattttcagacacaaaaaaagttagcttctttgatccatatcagcaagtgtctagctttttcagttcactctcatgttttttttgttttattatttcgatcaaattcttttgtcttgtgatatattttgtgttgtggaagctaattttacttactctgtaacctctgtttttggccttacagaagaagccagagatgcaagagaccaagcttagagataccctgaaagcatccattaatggccgagcttccagaagagagagaaagtttgcattacaacaagatgtaagaaagaaaaaaaaaatatttcatttcttggagcacccttttttcttcttctgaatcgttaaacaacattctccatttttgttcccctcttgtctgagattatattctattggattcaggtcgataaactgaagaagaaacttcggcacgaggagaatgttcaccgagctcttgaaagggctttcaataggccattgggtgctctacctcgtcttcctccttatctccctcctaacgtaagtgtattcaattattcataataataataatcttctttctttcagtactactatttgtacacaca

SEQ ID NO: 303909 - DNA, 3055 bp, Cannabis indica
cctatgatgcttcgatagtgagtgggattgtccaataaagttcctgtttttgcagataacttggtagtggaacacattagtgtggattgtggtttggagtcaagtagttgagttctagccaataaatctctggtgtacttctgttgtgtcaaataaattgctaaagtggtgtgatgaacttcaaatcctaagaagtaagtgactgagccaagagctttgacagagaaactgtaatgtaattgagaaataagattgtgaacaacattgttatcagcaccagtaatgagaatatcatcaagatatattaaaataagaagcacgttgccattgtgattggaaaagaagagactgttatccaatttgctgctcttgtattcccactgaaccaatgtgtttttcagagagtcaaaccaggctcttggagcctgtttgagaccatagatggctttgtgaagcttgcacacatgatcgggaaaatctttgtccacaaatccttgtggttgagccatgtaaacatttcttgaagttgaccattgaggaatgcattattaatgtcaacttgttgaatgtcccaaccattagagatagttaaagtgaacataattcggattgtgcaaggtttgatgacagggctatatgtctcaaagaagtcaataccaactgtttgttggaagcctttggcaacaagccttgctttgagtctctcaacactaccatttgcattgaacttaattttgtatacccatttgttatgaattacaatcatgtcagctgtcttggaacaagagtccaagtttctttttctttagagcagtcatttcagatcccattgcgacattccacttgggattggcaagttgaaggaagttggttcatgttcagtgtgtgtatttgcaagaaagcttctagtttgtgaatgcctagtttagatctagttaccataggatgttggtttgtggtgtgagttgggacatggacagtaggtatattctgaggtacagatggaggagtactggtagcagtagggtactggtttggtgattgttgagttgtgattggttgttgttggttgctagtagatggaacagtagctataggtgagatggttgttatgtcaggttgtggtgttggagcaggtataggacttggaattgggaaagagtgttggttactggtttgggcagaggcatctctagtgggaagagttgtaggaaatagctcattgtagggaaattcttgttcattaaaggtcacactcctagccacatatattctacctgaagggtgtagacacctatatcctctaaaattggggttgtatcctatgaagatacatttagaggatcgaaaggcaactttatgagaggcatagggggtaagaagggggaaacatgaacaaccaaataccttaagtaaattgtaatcaggtgagtgatgaaataatttttcataaggtgtttgatagttcaagattggtgttgggagcctatttattagataagctgcagaagcaaatgcttcccaccaaaaagataaaggcattgtggcttcggacagcaatgttaagccaatatcaacaacatgtctatgctttctctcaactcgaccttgttgttgatgagtgtgaggacaagaattcctttgaacaatgccaagatttttaacaagtttgtacaaaaggtcaaactctttcccaagatcacattggacagcttgtattttagtttgaaattgcctttcaacaaaagaattaaattgatagaataaggtattagcttgtgattttgatttcattggaaaaagccaagtgaatttagtaaatcatcaaggaaacttatgtaatatttgaaaccatcagcagaagtatagaaagagggaccccaaacatcagtaagaattaaatcaaaaggctggacagttttattagaagtgcttttaaagctgaattggtgcaatttaccagtttgacatgcattacagaaatcaagtgtcttgtactttacataaggaacaattttgtgtaaaactttattgagtataggatgagatggatgtccaagtcttgagtgccaaatattggcaacttgagacttgtcaaaaatcgagttggaagtagtggtgtgattgagagcttatggttgtggaggatctaaggcttgaacttcaagcttgtacaatccgtcactgagatggccctgcagaagaattttcttggttgtcttgtcctttatgagactagaaaattcatcaaattcaagaatgacatgattatgttttgtgaattgggaaatgttaagtaggtttttggttacactaggtacatgaagaatatcttgtgatacaagagggtgattaggaaactttgtacacactgaactagaaccaattcgatggatagggatagaagtgccattacctacaaccactttaccctttcctttgtaatttgtagcagtagtaaggtggtcagcatcatttgtcatgtggtgtgttgcacctgaatccagataccatgctgttgagttgtcaatgttgttgttcaattcagagataagagcctgggggttatcagtgttgaaggggtttgaggaggaactattggtgttggcacctgtgtaggtaatgtcaaaataatggtaacacttgacagcaatgcgtccagcacgtccacagagttgacaaacaggtttggtgccacggccacctctgttgctggtgttggatcggcctcctcgattggcacctctgaatccacgagtgggatagtaacctctggtgctggccacatgtgcttgaacattatgcaaagagacagaggaacctcagttgtatgttgctggatttgcatttcttgactttgaagcatgaattgcacttcttgaagagacagaagttcgattcttgaagataaattgacaactacagcttcgtactctgatgctaatccaccaagattgtatagcaccagatcatcatcaaaaatcggttgtcctgctgctgcaagctgatctgcaaactgtttcattttcaagatgaattcttcgatcgagagaga

SEQ ID NO: 303910 - DNA, 2842 bp, Cannabis indica
attacatatcgttcatatatgctttattattcattctgttgtcaacaaggtaaaaatcatagatttccctttctattgtctcaaaatcgtgacagtcaacctcttgaaattgttcatacaaaattttggggccctctcatgttgcatccaagataattataagtattacatatatttgtcgatgattaacaacaaattctcttggatatttccccttaccatcaagtctcaagcttttgaaactttcatttagtaaaaaggtctagttaaaaaataatttaatttaccaatgaaagttgttcaagctggtgggggaggtgagtgcaggccttttgagaaattcttagtggattaaaatattttgttttagcatccttgtctacacatacatgaacaaaatgggagaattaggaggaaacacatgcacattacagatgttggtttaacacttttggcttagtctggattagatttgtcatattggtagtatgcctttcagtgtgatgcatactctatttatagaatgcatactcatgtgcttcgtaatatcatcccttattagtgcttgtttcaacaagttcctaactacaaaatcttgaaatcatttgggtgtgcttgttttcctcatttaaggccttaccatcatcataagttggagtttttttttttgaaaattttccaaaactcaacagaaacttctgtgaaaatgtaattggcaggttgttcatagctcaaaatgtagtgtttaatgagctctcatttccagcatccagacctactcctatgtttaggtacattctagtcttgatacttgtcctactattcaactctttacaaacgttgtccatactcatgctaatttagtttcttcacctagtgtctctattgtgtctcctgaggttcaaactcattctagagatgagtctacttccacaccagatgcatcttcagctattctcataaatgctcctagtgcatctccatcatctacacaaggatctccactgccattggcaattcctaagatgtcagcatctcactctcctcctactgcagctatggcacctattgatcagcctacttcttctgttgctgttacagttcctaagctacagagaactcataatatggtgaccagatctcaaagaggtttctataagccaaagacaaatatggctaccaagcattaatttcctaaatgcctacttcctagtgaccataaatcaactaaagcacctcttcgaaatctagctttgaatgcatctatgcaaaaagagtttaatgtcttaattgttaaaggaacttggactttagttccttatgaatctcatatgagtcttattggcaacaagtgggtttttaggatcaggttaaaggcaaatggatcattagatagattcaagtctcaattggttgctaaagggtatcttcaacatctagaaatggactatgaggacactttcagtcctatggtaggtcggtgcttaccttggttgtctcatctaagtgggaagtgaaacaattggatgatgcatttggtgcttacatgacacaatcgcatggttttgaagaaccaaatcatgctacttatgtatgtcaatttcacaaagccatctatggcttaaaacatgcacctcatgaccgaatgagaagctcaaaactacattacttacctagggatttacaacaattctaaggtggatgccacattgtctgcgtatggttaaagtattaatctagtcatcctactagtctatgtagagagcatcttaattgcatggcctaattcaagtttgattcagaaactatatatgttgatatttatgattaacactcccactcaattgaaatgatagtttttttttaaacttaaaatgatagtttcttttgtccttacctcaaagaaaatacatcacagttttattagtcaaggttcattttgaaggtgttaaagtttgttcaagtcctaccattagctcttacaaaagggtcatgttcagatcaagcatatacttgtaatacatgggtctcgactcgacacaaacacgatccgcaaacatgaattgccatcactatccacaagaggttatgaagtgtttcttagggccaaatttgatttcttgatctgcaaagaagcaataagtagttgctaaatcattaattgagtttaaattcagggccttagttaatactgttgctgaaattaagtgactttagtcttagtttattgagcttcttgctaccttagttgatattcttgttatttgggttggcaataaaggtatagaagtcgtggctgtcaatcttatttttcatgctcgctgcaagcacatagagatcgattatcactttgttaaagataatcctcaatcatgaacatccagttcgatatatcccttatgttgatcgagttgcaaatgtgttaaccaagtccttgcctaagacaaattttactacttaaaggccaaactcaaagtggtatctactctcttttcgtttgagggagatgataactaacaaactaattagttagttagtagttaggtttagttgtaatcttgtttcttaatgtttgttttcattcgcttgtaacataattgtatggagaagtaagtctataaatattgaaataaaatcaaaggcatgctatgattttctagtatcattttgcagctctctctctctcaaaattccctcccctgcttctactctttcatatcgaaatagggaagaaaccaaactacaaaaatttagttagattgaatctcctcatcataagttaaaagctcatgaaaaaccgtgtttttgcaaatgtcagttgtatataagaaaatataaaaac

SEQ ID NO: 303911 - DNA, 3910 bp, Cannabis indica
atattttcagggccggccctgctaatcaccactactttctagcatttctcatctaaaagatacatgatattattagctaattaattatatgaatacaaatgtaatcctgcagaccagtacttgatcagaacttgtacaacttgggaatgaagtacacctctgcaacattcggatccgctattgtgaacattttacctgctattaccttcataatggctctcgcctttaggtaattaacttacataataataaaaacctgaaatagctggcaactaatttcttcatttttttatttttcttctttataataataataataataaataagtaaatacataaatacactgtccgaaaaatatagttgctttaaagtgaatgtatatttttagtgatgtgatcaatataaaaaataatgtaattatttattgatgatggtcaggttagaaacggtgaatgtgaaaaagtggcatagccttgcaaaggtgatagggacagtaattacagtgtcaggagcaatggtgatgactctttacaaaggccccatccttgacattatacatagcagcagcagcagcagccatgggcattcgggtcagcagaccacgaccgagtcctccgatcaccactgggtcaccggaaccctcatgctggtcgggagttgcggtggctgggctagcttcttcattgtacaatcttttacgttgaagaagtatccggcggaactgtctctgacagcgtggatttgcttgatgggtgtgttggaaggtggggtggtcactcttgtgttcgaacgtgacatgcatgtttgggttctcggatgggattccaggcttcttgctgctgtctactctgttagtaccctgccccttaattattatttacgtataccattttcattaattatgatcaattcaagatatagtgtaccctacctacctgtcgcccatttccgtaagtctaattaattattattggtggtttaatatatagggtgtggtttgctctggaattgcatattatgtgcaaggaatggtgataagagaacgaggcccagtttttgtgacatctttcagtcctctatgcatgatcataacattcgctcttggtgccattgttttggctgaacaagtccaccttggaaggtacctatgattattatcatatattaattaattagaatagaaaattactagaatatatatatttatatataatttttttttctaactgtgtttgtagtctaattttgtttttcaataatattgtgcagtataattggggcattattcatagtcatgggactctacactgtggtttggggtaaaagcaaagatccaatagaatcatcagcaccgtccaaaaatattgatcaattgccaatcacagacaccattgtcaaaccagttactgtcactcctaacaataacaatggaggaggaccactagagatgtccaagatttctacgtcttctcagctcgcttcataaatatataattaatgaatattatatataaagataattaacaatttggggctatctatatataattatatatcatctctagttataaagagcaaatgaaattattacgtatatctcctcgacgagatcgtaatgtctgaagaaatatgcaacttaatttgcttcgttttttcctctacattagctttttatttttattgataaatgtaacttgagagtaattacgagttacagttatataatatatttggctagctagctcctattgtgtttttttttttttgtctacactcttaatccatattttctatttaaatatttatgatttcattatgtatgtagttattagttatattaattacaatttacatttttatgaatttatatatatatataaaatattatagatattgaagcttaattatacaattatatgtatgttaaaaaagaaaatatactattatggatgaaaaagtgataataatatgcaaagagatgagagaataaaatagaatcgaataactgatcactttttctctctctgtatatatatatacgtactgtgtgcggattctcttgtgtcacatctaaagtggagctagaattttttatttcacgatatctatgaatagaaagattaattgataccttatttataaacaagaatgacaaatatatacctgtaagaataattgataactccttaatttttattcatttatttatttatttattttgtaaggttaatatataactccataattagatactgaaagttgagtttaagcttcagctaactcctcatcattatgtactttgtttaaagaaagatataccatcatcatatgcctatgaaacgaataaaggacaagaatagttcttgggcgctgtctatatttttctagagacacatttattaattacttttataaatatatataatagggcaacgatgcataggcattagtttatcacttaataatttatacatgatccaatggttaagagaatttattgtagctttgaggagtgaatagttgataaaatgactcagaacctactaataggggctatcttttacccttatcagattaaattaaagtcttattttttaaatcttcacccttatcttcatttcctttcactattttttttttttataaattattgtttttttgattgataaatattgttttactatttacgtaagatgtcttttttgcttttaatttctccctcaagccaagttttgcatttaattttttttcctaaaaaataattttcaaaatgaattttggttggattcatttaccactactacaaattataatattcatgtcagtcaacgctataatttatagcgttggtcgacgtgaacagtacccaaattattggacgtgtctgtttaaaaatgacactaataatatctaattaatgtcatttggttaaatgacggtaaaagggcaactgacgacataaagccaaaaaaaattggatacttgcttttattttgggtctgttattaatagtcgattattgtgtttgtgagggcttaaaattgacgcgaaattaaattgtgagaaatataaacggatgctaatttaataaatcccctaaaatccaaaaatcaattcgccactgttcacacatccctaaccctaaaactcttcgaaagctctggcgaaaccatcctctcgaccccttcgaattcgcccagtaatctccaaaaccaacctcaactctctcgatcgtcctctctgaaaccagcctctcaaccctttcgatcgtcctcttcgaaaccggccactcgagcccctttccctttcgatcgtcctcttccccacgatggtggtttgaagctctctactccgatgtagctctcaacagaagcttctctccttttcctataccattttttgggtaatggtccatctccatttcagctctaaaacttttatttttaaagcttgatatcgtttatgaatggcagctctctgttttggttactaggtcttaggattgaaccacaaaacactaatgatttgtccttatccacaatatatgttgacctcagatttggccaaccgacaatggagtcgaatttaacattgatgcttgccacgtgttacacaattagcataaaaaaataaatagacataagattttatagaggtgactcttaattagcaagtaacgacctactccctttttaattatattgataccagagataataccacttagatcactatagtaatgggatctagaatggctctttaaagattataatgtgagaaccagagttggcaaatctcgagtgagagtagagcaatgtgcgtgtgagagagagacgagatgagttaccagacttagagcttaatgcatatggtttgatacttagggttttagggtttgactaatgctct

SEQ ID NO: 303912 - DNA, 788 bp, Cannabis indica
ggtgcaaatataactacccttttaattattataatatgtttagccataaattacactgaaacacatttaatatggcatgatagtaattggtctcaaaaatcacatttatttaacctagaacctattatatattctgaaaaaataaatacgtacatacttataatttgtgcatggtgcatatattatatattactaaaactttatatggatttatcagcaaatcaagtaactcatttatgttattattaggcatatatctttttaattgtagcattttttttttatctgtattcagaatgtttaatttcaataaaattgttatttcatataaacaaaaaattataaatacatataaatttaattatataatgacttggaataggctgctttcttttttatccttattcatgtaaattaatgcttgacatatatatagtactcctttcagtacttttccaaaacattttagacttttcctgtaacttattatttgtttttaagtagagaaaaacatgtccttgaatttccaacaagaaccctacattcccatataaatattacatcatgatctaaagttgttattattaattaatatatcataaatatcattttggaccatgtattttgcaaatgttattaattgaatcctctacttgttaaaattacaaatagctagaccctgattcatggccggccattaacctgtgcaaacagtgctaatgcacatggcctaaaatttaaaaaagcccaatataatttttcagatttttttttaacccaacattcca

SEQ ID NO: 303913 - DNA, 1104 bp, Cannabis indica
cattttaatttatttttacttccacactattatatatgtattatatatatcgagtttatatatggagttgataatttattcttaaaattatttttttttttattttattttagatggataatagtgaaaaaattatgttatttttattattatatgtgtgaaaataatattgagaaattttaagaaaatattatgtaataactaaaaaaaggtactaattttaaaaaagctatacatgatttttaataaggtaaatttcggcaaaacccctaaaagtttcgcactagttgcaactaacccccaaaacctattttttggtcgttaaaatcttccaaacttgcattctgttagtatttaatcatttccatccaatttttactgttaagtgacatgtgggcatgtccatgtgtacacaggtaattgtctacatggatatagtgtacacatgacacaattttattagtctacttttaaaataaattaatctaaaaaaaataaatcataaaaaagaatgaaaaaaaccctaattccctaaaagttctttttcttcttctcatgctctctctcattgctctaaacctagtcggtgtccaccaccaccattctcttctgtcccaaacatcatcaccatcttacgacccagacctcaccacctgagcaccattcactcccgttcagacccttcactatgacatttaagccaagccactgtcgtgagcgtagaacaatccatcccaatcacgagcctaggtcgatccatccatgtcaaagccgccaatatttcatccttcgagtagcgacccaggtgcgaaaccacttggatgtcatcctcatcgtcggtggtgcaccgtgatcggaaaagtacaactaagtgtggcagagatgagttgttcatggccaaagtggtttaaaatttgatctttaccgattgtccgactctttctttctctgcagatctcgtagctctctatgtctcaccgaatttgcgtcaaagatgtgtcattcatggccaaagttttgcttgccaatgtcgatgaaaaattggactgacttggggcagaagcgatttctcttctcgttaagtctctctcttaatctgcccat

SEQ ID NO: 303914 - DNA, 1424 bp, Cannabis indica
atatttaaaataattttaatattttgaaaacaatcttcaatcaatctattacactaaaaagcacaaattgaacatggttaacccaaatatttactctggaaatttgtggtttttaaatatccttttccatgatctaattccctttttctctttcaatcttctcaatgccttccattaattattcttgccatatttgtctattttggtttcttttgctctttcatgaaaaatattttgaatgatattttaaacaaatcatggcaagaaatcagattatcatagtgattaatccaccattaggcagactgaagctttacaccaatatcacatttgatggaatgaaatgcaagactgattttagtgtaatacgaaaactctaatggagatgtggtgtggctaacatgtcaaaatttttcattggcggtttcaaaccatttcatgtacatttcattaacttttagtggttaattaatagattgcaatcttcacaaattgtggtttttaagtttcattgcattttgtttgatattagtctgtctagtgtccaatttgcaaagagtgcagattaatttcatgtctatgctcttttggtggatataaattgtatttagttggagaatacttccttaatttgtcttattaactatttgttgtattatctctcgtttaaataatagttctataaaaaaataatattgtattgcactcgtacttttttttattatatacgcactgtttgaaacttacttttgttattgtaaattattctaaatttctcaaaatattgtaaggtgtatttctcgagttatcataagcaacataaactcaataattttttttagcagcataatccaatgctaataaaagtgtaactgtcttctattttcttcagtacagattttgttagtgttttaaacaggacacatataaaatgtatatttatttaaattatttatatctggatggaaattagagtttgtaatatttgtgaaattggataaaaattacaattttacaaatattaagtacttatgctgtaaaattaattttttattaaagatatgctaattacaaaattttgggtacttatagctattcagatattgaaaacttaaaagaagtgtatagatttgatacatcttttgaggtgcaacctagaatccctataatatattattgattagtaaataataattagtttttgaataaagtaattgaacaacttgctatacgtaaaacgagttaataattacgaccattaggtgagatggttatttttgggtacagccgcctaatcaggttttatttttttaggttataatatataggaaatttgattcatgcaagttaaatgggtttaaagttaaactttaattcatatgagaaaaaaaatagataatgtttattatgtggacgaagttagg

SEQ ID NO: 303915 - DNA, 1644 bp, Cannabis indica
accatattattgtgaggtagtggatgagtgctacttatgtgaaagtaaagtaagcactgtggaggtgatgaaattccacctaatttgaagtgtaaatcttatatcagattgactattgcagctgaagttgaatgtcgaaacagtttttttttgtagatgtattcattgcaatacaacactatttttgattagaaagaacataaatagttcctatgagtgttctaaatggaagttgtaatgtgaagaatatatttgttatacgtttttacttaaatatgatgaacaattgaatttgttatatttttataagcagcatataattgttggcctataaaatttaatctttgttttgttctcatgatttacttcatttatgttgtgccacagattttcatatcaagagatggaggacataaaaattatgcatccgtttgggctccaggtcaacatgaaggaataaggtagatttcatcatctcctgtaaaagaagtttgaaggatatacattcttattctaactgataaaatataaaatggctcgtgtgtgcttttgttgttttacaggaaagtgggtgatcagggtatatcatcgtgggactggaatcttaatggccagcattccacatatcatgctctatttccaagagcgtggactatatatgatggtattaacatacttctattcttttttgcacagaagttcttcaccctttgcatcctttttgttaattttgttggcttgtattttaggtgaaccggatccagaactgaaaatttcttgtcggcaaatatctccattcataccacataattataaagatagcagtcttcctacttctgttttcgtttatacggtatgttcaatcaacacattcttaatgacaactaaatcgcaaaaatcttttttttttctaataagtaataccaaatgtaagtagagaagtgagtgtcagcccttgctcttttatgttgttcgtactgtttacatattaaattatcatgccttgtattttctcctttgtgaattgaattttgttgttgatttttaaattttgtataattgttacttaaataaactgttttaatatatcagtatgatttagagtatgacattgtagccataaatttacgaatttgacattgttgttataaagttacttagtgacttttgtctttttttcttagttggtgaacacaggaaaggaaagggcaaaagtcagccttctttttacatgggcggtaagcatctttcctaacataattgtgtatttttactcctataaatttaaacctgccaagatcactaaatatcaaccgtttctttgtgtctagaactcaattgggggagtctcacatttgtctggagatcacgtgaatgaaccgtttatgtgagtaattttgcctattctagacttcatgcggtctttagaatttatattattgaagtacttgttgtccttttttttaattaatttctttatatttttttaccagtggcaaagatggagtctctggagttcttctacatcacaagcaagtcatcaaaccttactagctatttttgacggttggtttgcgtatttctcttggtcaacccaatgaaaaaattggttaggagatcttaagagtattacctccttttgga

SEQ ID NO: 303916 - DNA, 3367 bp, Cannabis indica
agagagagagagagagcacctttgcaacctctgcattatgaagatcagccagctgactctgaagagaacaaagggaacacgtgagattgtaaaagaactacttcactacaagagatgtttaattacaaaattctcactttgattctgtaagcctctgaaagctcctcttgaagattcagattctctcttgagcaagcagcaagcttctgttgtaagctctcaatctcctgttccaagccagcgatcctaatagagaattaattttgatgcaaaacatgttcaatattttcttaattgtggcgctcagtaaaaaatcaaaaaagagggaataataccttttaaaatgcattttagtggcaacagcaaggtagccaggcccggcttgttgcatgcatagttgctcaatatccttatgcaactcatcacgctctgtgaaaatctcccagttaaatatgaatctatgatagacactagagaaacaatctaacaagactcaaacattaaaacaaaatttacacaccaatgcaatgtgtttgttaaccatcatcaattacattttcaattatagtagacaaaaaaaaaaaacaagggacaataatcgaagtgacagtttcactacaaaaagagaaggtagagtttcattgtcttcaacattgacattctcagtcttgatagaactccacctttttcaatcaaacagattgattttatcaaaagaaaactaaaacagacaattttggtttgaactcaaaattgtcatgtgttcagagccatacatcaccccccgccattttaggtttcagtgcttgctaggaatactaaatactgaaaagaaagaaaggaatgaatgaagaaatagataccttgctccaagtttcggatgcgaagcttcaaagattcgttctcgttcacagccgcatccatttctgggaaccaaaaaaaaaaaaggagattcacatactcaatcagaagcaattgacctcgtttcctgtaacgatttttagttgaaaacgaaaatcgtaagaacaatccaattgaggttttgtttgattatacctgaaaatggaatgggaatttcgagagaagacgatagcaagagtagagagattggaagaagatgaaaattggttgtgtttgatttaaattttcaagaatagaaaataaaaagagtatattatatatattttttattatgttgtagaaggtttccaatgcaaaattaaaaattattattattattttaatttccaaaaatatatatattgaagtattttcttacaatttttcttttttcttcaatagcaaagtttgtgtttgtttgggaacactcagttgtagatcatttaagatttaagaagttgatgattgttcaaaaagtgttttattgagagaaaatggaaagagaagaaaaaaaaaagtccatagttgtaaacaaaacaaacaaaggaattatcaatagttgatgtaaaattccccaaagacaactcaacaattggcaattatgagagggaataggggagatccacacgttcagggacagtgatctactgcttactactgaaaatctaaaaagaaaaatcattttgctcattctcaagcttttttgaagaaaatgaaaccaatttgtttcaagaagcttttaaggtgcaccaaggaggacccacgtagaagcgaggcgggacagtggtgtccctaaaagaaatcggaaaaaatgtatatacaatttagttagttacgacatctatttataataaaagatgatattgaaaaataatattagttttggtataatagttaaactaaattacatatagataaaagttaagggttaaaatcttgccgacgataatttttttttaagtatatttttgtcttctaccttacaaaaaaaaaaattatgtcctcctcattttaaattatgggttcgtcacttcgaaagatgtactaatgtacttttactatatttcggtattcataagaattttttaattctttttaatggtcgtgtgcttatagttatttaagtattttgaaaatttttgaaaaatttcaaataatttacaatataaaaaataatgtttaaataagtctatttcatatgtgtacatatggtcttgtataaatataaataatttacaataaataaaaagatactataacaaagtgattgaatcttgtttttgagatttttttgtcttaaatactacaaagtacacacaatcattaaaaaaataaattaatttttttttaaatgctgaaacagataaaggtacatcaatatattttttttggagggtacaccatataatttttctttgttttatagagtccacatcaaatctaagaaaaatctacaatatactctcttaaaggaatgattcaatcgacaattcctatttgtttcatcagtaaggacaattttgtctatttttctttcatcgtgtaagttgtagttattttttacatgtaaatttcagaaaatttgaaatactttacaatatttaaattttattatcgttactgtaaattattcgaatttttctaaaaatttacagttgaccttaaataattataacatacacgattataaagaaaaaaaaaaccaaaaaactatccttaatgccgaagtaggtagaaaatctaccaaaatacacattttaggagagggtgtactatagtattttttttcaataatatattgtagagaaatgatgaaggttacttatggtgcatgtctaatatgcttatatgacatataatattgttagggactactttcatggaatgtatttcgtagtacattaaatgggtctcagagtacattaaatgagtgtcagggtacgttactatttttaaccttaattacccctagatcaatctcaaccctcagatcaaataactccatcatctaacggctgccgtacatcacggaataaaagtacaatcacaggacaaaatcatatcccaatattgttattaatacaattcaatattagaatttacttagtctactttaatatagattataaaaaattgtaactaattataaaatatcacttcatactaatagtatgttagacattttacagcataacaatactctatattgtaggattagttaagaacttcatttttctttttgagtgttatattgtaattgttgtaatgttttaatatattcacaataatatatggtagaattaggaaagaacttcattttctttttcagtgttattaacttccgttcccacccttatttattagaaaaaattgcatctaacaactaaaatttgaaattaattgccataatattgttattcaattaatttgcacatataccgtttcttcaattaattttattgtaata

SEQ ID NO: 303917 - DNA, 1588 bp, Cannabis indica
agttcagagagcatgatttagtatatgtcaaaattcaacaatctcaataatatgatatatattatacttccggtttgttttcaattttttttaataatttatgatactgagtttgaaatagtacatcacatatctaattaaatatttaaattttattttcaataaaatatattattaaaaaatttctaaaaataagtgaaatgcatattatatataattacaatgttcacacttataaaaatatttcaatcataatttctcaaagggttaaaaatagatgttcttactaataaggacaaacccttactataaaatatttcttatatgtgtaattgtaaccacgtattaaaatgtttatattttaaagctctgttaatattttatttttcaggattcactaattttaatgaaacttgttgtccaacaacattgattggtttctgtatcccttcaagcactacatgtaagaacagaacctcatacgtattttgggataaagttcatccatctgaaactctaaataaatatactgcgaccagatcttatacttctcttcatgcttcagacaattatcctattgatatcaagcaactggctcagctaagactttaaaatatatccaagaaatgctatagggtttctatattgctatattttagcatataattttttaaaatataatatctataatagtgttgtaatataaatatatgcataatacaaaatctacaataccatgtaaaaatatattataaatggataaatttatcatatttatctatactcatgccatcaataaaaaagagaataattatctattttttgccattttaaatttttgaaacttgatgattttgctccctaaaatatataacttgttaaaaattcttttgaagttttacatttatagaaatttagtcaattatttcatttaaatgttgacgtacatttgtaaattagcaattttatcttctaaactttaacaattatcaatttgtacctcctcaaaataaaaatgagaaagattcatattttcttttgtatatcttaaaaaattaatttataccttaaaaaatcattttgaatgattatcaaaattaaaaaagaaattaaaattttcaaactaattaagcgattaaaaaattaattatcttttatcaaaaaacttgtttagatataaaaaaaaatatattaaaaagccatcccccacaagaaaaaaaattgaatattttcccactataaaaaataattcgtagaataacaatatcaaacaagaagaggtggtgcatctccaatataagaataagattaataagatttgtcgagtttttatatgaaaagatttaactaattttgatgaacaggaaaaatgttgcttggaaagatgtgtgtaagagtaagaaaaatagtggccttgatatccaagatgtggaaacttggaacttagtggctcttgagaactactcttgggctattgaaaataataagaatttgtgggtgaagtggattcactcaatttagctctaccatactgtgacagtcagtagtcccgtgatccgtaaggggaaataccgggtaagctgtgcaa

SEQ ID NO: 303918 - DNA, 1253 bp, Cannabis indica
ctgatcataattataattaaaattcctcaaatatagctgttctgatcatctgatgccgtgaccatgtgcttttttaagattttacttttgctgttattaattactgtccaacatatgttattactatggtaagcataaatatgatgagatttaagagctaaatgcatcgatccttttagcaagttcataacatataattaatatcataagaattaaacatttaccatttgattgatcaaattaattaaattcaggtgttgagttcggccgaagccgaagcgccgacttcaggaccaagcgagttgaacgtaacgactatattgtcaaagcaaggctgcaaatctttcgccgacttgttaatagccactggagccgacgcaacttaccagtccaacactgagtctggcttaacggtgttttgtccaacagacggtgttgtcaaaggtttcatgccaaagtacaaaaacttaacgactgccaaaaaagtatcgttactgttatatcacggcatccccgtttaccaatccatccagatgcttaagcaaaataacggagtcgttaacacgctggctaccgaccgtgccaataaatatgatttcacggtgcaaactgacggtgaagacttgacgttagagactacggtggtaacgtcgaaggttactgggacgttgattgacaaggagccgttagccatttataagctgaataaggttttgttgcctaaggagctgtataagccgactgaagccacttcgcccaaatccagtagcgatgactccgacgacgaagaagccgatgccccagagggtgattctgatgatcagacggctgacgataatggtgccgttggaataaacggtgggagaatggctgtggtctttttgagcttgtgcgtcggatttttgcttatgtgattaatgtttgtacgttagtaattaacgacgtcgttctctaaaatcaaccatgttcataaacacacgagctcttcttgggaggggctttgaatttcttttttttttttcctaatatctttttgtggagaataaatattggtggctcgttccatgtattgagagaatcttttgcttacatataaattaaaaatgtatagactacattttctttgagtaataattgttagaatttattggggtcacaattgtatatataaaatgtgtgttgggtcatcaaataaataagtcaaatttatgtggtcgattttgaaataaagtttatgacttaagggcatgatt

SEQ ID NO: 303919 - DNA, 1533 bp, Cannabis indica
aaaggaatcccaaaacataactagtggtactaccacagttcacacttacttctacgctgctctatctaactgaaccagttaagtatatcaacattgccattcaagcttacaacaccttccatgaccctaattatacttgttaagtttcaagatctacatttatactaacatccctataaagagccaaacaaaaggtttacaatcttcttctaactgtacatggtacaaaaccaaagcttaaatcagagtttacctggtagaattaggagaaagacaaaccagtaagacttgcggctccattcacaattcttagtgccactggagacagcattcgggccacgattggcaatgttgggtaagtaagtgtgccaagtatgaaccagtttaagctcaagagagccacggagtccgaagcaggtttattcttaatggtggaaaaaaattgaaccactgtcttcaatgacattccaaccactgtgaagagcgctacaacaaggggcatacaagggtcttcagctttccaaatgatcattccaaccaaaagtgacaacactgcactgaacagactctgtgtgattgcagctcccctcctatgatcaaaaacatcatttgattcgggttttaagagtttgagcaactcgtactgagtgtttggaaccgggtgtatcatcatcgacgagtcttggaggatgatgccagtttcatcagaactcggagtgccatacttgttatcattatctttaccagtaaagttccaatatccttttccctgaacttccaacagcctaaggttttcatttttcaactcctgtaactgtcaccacacacacacgtcacaacaaaatcaatatagctagttgattaaattgttctctgcaatctatctgaatcaaactagcatcttgccattcttctatatatcaattaaaagttctattactatatttcaaggacaatctaatcatcaacattatagaaaaatctattccactcagaccctttcttatctacagcacccatatcaaacattttgatttgatctaaattttgtttcttttggatcggcttcagtgacattatatgtaagtttatgctaataagtcctagcttaagcctaaccctatactcttaactcagtccctaccagagaagcccaaaggcatgcatacttgtatcagatggctccattatatctcccaaactctcaccttcaagggtttctttggcttagcataaattgatcataaaaatcaactgcgaaggcaatgaaaagaaccatatgggttgtttggtggttggatttttaggctataaaatacagtaaaaaaagggtaaaatgtttacctcatcctgtaaaagtttgaactgtggaaatagctttgtcatgttcatgttcaaggtcatccaataacatttccatcattttgtgttctctaatggccgtctggagatgtaactcaagctgtttcttatcccatacaagattttccaactcacactgcaaatcatggagacgcatttccagctgcccac

SEQ ID NO: 303920 - DNA, 3134 bp, Cannabis indica
aagaacattgagattgaagtcgatgttcactatgttcgagaactaattactacaaacacattggccatttcttacatctcaactgaagaaaaacctacataacttacttaaaaaaacactaactttacctaaattcaatttttctttttgtcacaagctttcttcggaggttcctcccttcagcttgaagggggattttgaatatattgtggaataacaaaaattcggtagttagtggttagtttttttgttaagtctttgttagttatgcaagttgttattttctattttagctcctttgttctctgttcttagctgctacaataaatagtagcttcaattgtaaagttgaagcattcagaaaattcaacaaagaaaatcatattcagatttacactctctcaaccctttttttgaaaaggaaacaaaaaaaaattgatacataataattaaagccaaacgacctcttttcacatgagtatagtcaactacagaaagagactcgtagaggagagaaaaatgtataattacacagtgagtactcggtgccatatgcaatccagggtgtggtgcactggcgcgagtctctaatataggaaaacaaaatataacaatttatctaaaacaaaattggcacattatgtttgattcttccatgaacaagaaaaaagaaaaaacccatgtaaacaatgcaaaatcagaaagatgtgccaatcagataaatgaagatcatatcaattagcaacgtcaatttcaccatggctggaaaacaatgattcagaaccctgctccccaaaaaccttagcaatcctctcaactggtaccaaaggcaagtaggaggaaaccttgtaccctttatctgcagtggaaagcacggtttggttgtacttctcagagcagtaagctgcagtggggaccataacatgagccattttagggaacagaggaagttggttgagcttgcgccaagcagagacggcacactgctcagccttgggctcgtatttggcgtagaactccttagcccttggttcacacttagcatacactgatttagcaactcctgacgcagtgtccacaactccagcccgttgaacctcagtggcaacggctctggccatcactggggccttctgagccgcagacacggcttgggaagagacttgcttgattgttggtggtacacggcgatccagttcagtcacagattcatcaacctgcatttgtttatgaaaaattttaagcaccaagtgagtaagaacgtaatgaccacaattgacacaacaaatcaaaaaatgacccaaaatattggttaaaactataatagatatcaaataatataaacaatatgtattgttggcaattccacccaattgagataagaattttgtataggtaatttttctgcagcccaaaaacaagactaacaaacgcttcacggtgtttcaatgagtaatgtttccacacaaattgacatttttacgtaaaacacgatgggtgaacattttgatttttgaagcgtttaacaaattgagacaaaaaaactaagcaagtatcagaactggctctattagaaaactaagtattcaatcatttctattgctatttcgaaaacccattattaaagaagaagaaaaaaaaacaataatacaaatgattaaccaaccttgcgatcaacgaacttgagcaggccaatagggacgtcatggaatttattataaacaggagcaacaacgttcttgacagttccctcgacggtctcaaccccaggcttcaaagggccagacttgtccttagcatagccgtaaaggtttgagaagcaaaccactgcgtgaatggtcgctatttggacaaactcaaggtacttgagcctattttcctcatccttctcctttcaaaatcgaaatcaaaataacaaaaccatcagatacaaattattaaagaaaaaatacagaaaatcgaaaatcatttgaaaagtcttcttctacccaattcgagcgcatcctaatataaaaaaaatagagttgaaaagaaaaaaaaaagaacataccaacaactgttgttgcaaaccggaatcttgttgagccatatcacaaaagaaattcttgaattcttggttttggtttgggttttgtttggtgcgacagaaagttggatgaaattttggtcataaggggtctgtgtatttataggaaagaaaaagagagagaagaaagcaaataaagaaatgagcgcacgcgtcgattggatttggcgcgtcagttatgaatggcatatttggaaatttgtataacttacttcggagctaaggtaggagaccagaacccgtagctagctattcttgaaacccgcattattagtcggtgaatcgggcaagaatagaagattctagtgacccgcccgactacaacctggtcctgctctacaatacatttataacctctcacacactccccaattttatattaaattgatattttatgtacactttgttggtttcgggaaaccttggctattttatacaagaaaattgaaaggttttgatgggatcttgtcaaaaggaagtttattacaataaaacgcaccttaccaaaaaaagaaaggaaaaaggagtacataaaacgctgcttctcgtattatttgtcttttattaaaattaaagtattatgtttgaccttgcagttactacaaaaaaatgttcattagaatgagagatacatataagcaaccataagtaaataggcactttgccacattaaaaataacaaaattacaagttctatctgcactacaaaataaacaacctacaaggagatatccctttacaaaaggaagagtaattctacactcggttggctttgcccccaacgtaattgatgtagagtttttgtgcacttcagtcaatagctatttagtttttttcttggtaacgctccttagagatagtgttgggataccatttttgtgtgttatgctgtccaagcaaggccgtctcaaggtgttgagaggcataaagaaaaatttgaaacgggacctttttttttacaaaaaattaaaataaatattatttaatttttttttatttttgttttgagatattatttattattaaaattttaacacataattaactc

SEQ ID NO: 303921 - DNA, 4487 bp, Cannabis indica
aaaagaaaattaaatgaataaaactactattcacaaatcttatcgcgagtctcaagtagtaggctatataaatagatgatgatggcgttaaaagaagtactcatatcctcaaataagaatataccatatttattacctaaccacacacacttctcttctctctttctttactcacaaaaaggcctctcactcactcaaattgatgaatataatgtggtcttttcttctcaaaaatggaacaccattgctggtatgtatgaatttatatgtatataagtatttgttaatatagaagatatacttagtggtacatcacttttactttgatcgtgttcattttttattttctggaaaaattatcttatttttaaattagggtaaatactattttagatcttatgttatgttttgtaaaagttattaattagatatttgttttgttaaatgacacaatataccttatattttccaaaataatacaaataggaccctgaactgattttttatcaaaataaaatttaataataatctgatctaaaagtgttatgataaaactgtttatatttttagtatatgttcgtgttaggaattatcttcaatttgattatattaaaaaaaattgtcaaaaagaatcttatttttactattttaaaaaatacaatgtttattttatcatttaaaaaacaaagttgaaaataatatttatttaataaataatttattcaaacggttagttgcatgtttatctattattctatcaagtgattattttatttattttttttttgtaaataattattttaaattttattgttaataccataaagtattataaaatttctaaaaaaaaatggaaaatcactgactggaataactactctatccacacacacgttatataaattgcattttattaatttgtcaagtattaaaaacaaaaaatgctcccagtgatctcgtcccatatatttataattggtaacataatttacgagacataattttgttctgtgattgtactttcatggaagttgagagagttatttaatttaagggttgagattaatttaggagtaattagagttaaaaaatagtaacataccctcacactcatctaatgtaccttgagactcatctaatataccacaaaatacattctgtaaaattacattaggggataaaatcgtatccttataatctacatatatatgttatgtaatatattatgtacggtatttatgactatatataggttgtttttttcgattttatttattattattacttgtacaagattaatcttgatcttctctttctttttgttttctgacaggagtattcagaggcaaactccaataagaattcgcagagcacgtgaagtatattcatggaatactcatttgagcaagataatacaactcacttgtatttttgaaggtcaagaagtttttatggcttcacaacctcgtcttcggaccttcaaattcaactatcctatagatgttttttttattaattacgcaaattaatatattattaaaattaagaagtttaatatttatgtaaacgtatatttagaagattaagtttttcaaaagaaaataaaatagctctactagtgtcttgcccggccaaaaatcatactacggatcattatttacgttaatattatgttatcatagattttttttcaacaatttgagactagttgttggaggtactaaatttaaatctgtatgcattgtaatatataaacatttaattaaaacaaaaaaattattcaataataaaattttatatacatatatataaatcacacaaaatataatatttatctaatattaaaattatatcataaagttacttggtaactaaaatttagttagaaataatgaaatgtaatagaattgaaagaaaacaatctacatcctattttttatttagttggatattaaagtattagaatattatttaaatagaatgtctttttattattttggtaaaataattattttattttgaaatagaaagaaagaccattttaatacataaaaaaatatttaataatttttttttatcaattttaaattgtattctattcttattctcattcttactcttattataattctatgttttcattcttctcacctaaacatcacttaagtgtataaattattaatataattttaaaataaaataaaaatatatattaattatttaggatgggaccatgccactttataataataagagagggggttgaaataaagtagagaaaacaaaagtggtgaaggtacaaaccaaaagaaactatggtggttgagattttgagtatgagagcaagtgtgtgtatatgcatgccaccacccactttaaattgatatgacgtactgatgtgatcatacatatatattaaagtctttgacagctaaaacactcccaattctttacgtaactttttaagttcaaattctttaaattattgaaccattaataaaatattatttttaatatgaattttataggtattaactgtaaaattacttaaatttttattctttttaatacttaattataaaaattaaaattttgacagtaaaatttattaaatttttattttattttgttctttacacttcagtcttttcacttaagtaccatagtacactgactacatatatatttgttcacgggtatcacattttgattgattcacttaatgttaattattaaaattttataaaaaataaataaaaattaaaattaaatattaactaattaatatttttgtccaataaattttgacatgtaacaaatgatactcctaaatttttaaagtagttaaaaatacccctgaacaaattgttggatttaataatttttttctaattttagtaaaaaaatctaacatgaataaaagttaaagagcataatttagtacatgtcaaaatttaagagacatgatttgatagatatcaaagtctgaggagtatggtgtagtacataaacaatcattgaaatagtaaaattgaatgaaattaaacaaaaatctgaccatttttaacgacttaaaaatcctaattagccttaaatattatgtttttcttttttctttttctctttcttcatttctgtctttttctcaaaacttcttctcgagtttatgttggagcccagaatttgaccccggctccgatttgctgcctccgaccaccaatgacccaggtggacctcttctctactcactttgttacacgtaggtcgcttcccaatcgagagccttccctcttcttcgtcttcggtggttcaaagagcttcactgtactccgatttccaaaatctctcacactcgtgccttctcctttctctcagattcaatacttttctccctctattttcctcgaaattaatggctggttgttggcgactttaaacggaacctccaccaaagatggggacgactacgtcgtcattacgaaagagaaggtgaagaggatgatggtgataaatctgatatttgccaatgatccatgtagatttatatttgtttctcatttattttgttggatctgatttgtcattgattttttgggtttcttttgattttggctttaggtgttgatttttttaacttaaaaatgtatatagcagtaatggtagtggcggcagtgatatggcgatggaagtggtgtggttgtagtggttgtttttaatggtattgtagtatggttgtggtggtagtgatggttattattattatcattttctattttctttacaaatctagtggtgggtagtggcaatggaggtggtaatggagttagggtttcaggataagaaaaatgaggaagaaaagaaaaaataaaaggaaaaaatgataatttttgtgattatagaatttaatttcaaaaaatgaaattaaaaatattcttttgaaattaaaaacattctttattattgtttaatttttaatttattttttataaaatttaaatttaaataattaatgttatgtggattactaaaaatgtgttatgtgtacacgtgggcagtttaatgtggcacttaactgaaatttttagatggaagtgtgaagaggaacttgaatttagtagattttgccgtcaaaattttagtttttatgataaagtgttaaaaaatttaaaattcatgtagtttaaccgtcaatatccttattattattattattattatttaacaattacaatcaaaaatattataaatatggcttttttgtaagtggtttagaaatatatggagaaataaagaaattttataaaacctggaaaaatgaataaaaaattcaaaatatggaaataactaattaatatatataatctttctcaactaatgatttggcaagtagagaacccccattttttccattgttttgcttaagccaagattttctcctttgttttttttttttagcaacaatcaaatttttttttattgaaaaaatt

SEQ ID NO: 303922 - DNA, 2721 bp, Cannabis indica
ttcttggtagaggaagaggactaaattccttcatcctcaagttctttatctatttgatggatcaagggagaaataggattagtcacagttgttcgggccattaattatttaggctctttctctgatagagagaatgcttgtggaggagaattatccaagctttattttttctttcccattttagttttttgttgttgttgatttttgtcaagcattcgtctaagtcaaagaagtgagtcttcttatgaagagactgagaaaggtgatgtcggagcagtctttggcatttttgagaactaccatggtactgatgttgtatttgctccaaaaggcgttgaatttcctccaaaaattgttgattgagaccctatcgaatataattctctttgaaaaatttgcctttttagagattcatattgggtttttagggctttcatattagcttcttttgccaagaataatgacagcggaatagaatttaattttatgatggtcatgagttcgtcatgcatttgttgaatcttgtttgtcaactttttaatgataatgtattgtgattgttgttcaaccattgtctctatgagggtgatttggtattctacctattttaagacatggttttaggcaatcatattttctgtttgccaattcaatacttatttcttgcgaagacctttagtagagttccatcagcattgctggttgtaagattttgtattttttgctggtgggaagaggtaccttgctctttagttttttcaaacctcttaagcagaggaaaatgtacatcattatcaatggatgtactaggggtgatcatatttgcgtcaaaagtgatcgaactgatggttgaacaactggtgcagaatatttttctccatgcttctccatctattttgcttgtttttttatgataaggcaagactgtttgtggctgtgaagctattgaagaatcatctgaatcccatttggtgggttctggtgtaggctaattgtagctctttggtgtagagtatttgactacatagttgaattttctagatggttggcctaatagaccgatgtttttgtcgttattttctagcttttgcttgagtcgctttcttagagtgggatgtcgtcagggctcatcatcttttagagaacttttacagatataaacatcccaatatttatgcccatctgaggattcaaaagcgtaaatttactttccttgggaattgaagtacattatctctgcatctgttagttgatgggtgtgatgacatattgggtgcgaaaatagctaggtggttttgtttggcttctgtcaaaaacaattttaacatatccatcttcttttgtatggtaggaaggctcagttgtggtttgaagcagaagttgtggcttgtgaagcttttcataattggtgacccataatttgggtaaaagctttatgagttcgtcaatggtcatttactttgggacatgtgtacaggtaggtacttgtttgcaatccacggagatgagtaaagcatcttatgtttgagggattttaagatcaagagcatgatcttggagccaatatgccatctaataatggagtgtggcaccaagagaagttgggtcttgatccactcctactgtttccacttttatttcaaaagcatcattcagtcaattgtctctaagaggcatgttgaaattgggaagcaaagtgacgaccactgttcttggatttaaagtagtttcaatagtagttgtacttgcatgcatgttgatatttcctcattcgtgtatcaagaagaccaatacaagtgctaactgaaagtcccttcctaccatgaatataaagcaaggcaaatagcaccaaagtggatgtgggtataaccctgtacatctaccgtggagggagtttaggtggaatttcaagagtcacaaattagacttctggtattgagttggcactagctgaatttggaggcttgaatgtattttttttggagctttaaaggatggtttaataagtactttaatggatctagtaaatgagaaatgagtcttaataaaaggttgatatatatttaagggaggaagagaatatgagataatattatttttatatggaaaataagaaaaaaaaaatcaaagtaaatattttaaaatcgaatgacaaagttactcttaatgtaaaagaaaaaagaaaatatatatttacttaaactattcaattttttttactaaggttatagtttagttaaattgaaacattttaattacattttcttgttatttatacgtaataaaataataattctgattgtataatattttatttcctttaattctattatttattcattttgattatagttacaatttactaaatgtgtcattcaaattaaaaaaaaaaataacattaagaaatattaataaaatatattaaaagttataaaactaataatttattaaataaatgtttttttaatatataattaaagattaaaatgataatttgttaggtagatattcttaatataaatattaactgagttagttagcatatttaaaaaaaattaaattagttattttggccaaaaatatacataaagctatatttggcccattttttatagaaataattacataagacactattttttgtaaaaaaattatatttttacatttaattttttttatatatatatttttacggttttcataaaaataacaagaaaacta

SEQ ID NO: 303923 - DNA, 3377 bp, Cannabis indica
cttaattagaaaataatttccataaataaaaatattctaatattaatttaatataaaaaaaaaagtgctaaacacttattataatatggtattggacaccacaacatgtgaaagagcgattctctccaaatataaatcccaaatctttaacatttttctgagagttttcatttatataatttttttttctttaacaatgtagttttcttgtgacattatcgttgtcgtttattaagaaagatgtcgttttttcctaagaaaaacttggattggtggagattatggagtattgttacacgtgccacaaattcagcaaccaatcaaaccacaggcttgatatagctatagtttgtaggataagacagttgagaacttgagataactaatgaataatccttagttagttagacagacccacagaaagaaagaaattattgtaaataataatgaagctcgctctccactacccttcttcattttctacctttattaagactggtaagttttctcatctcttttcattattattattattgttatattcaatctgggagatacttgttgatatgaattatttgaactataattgggtgttttgttttatgtttgagcatttggggaggagaatttagaaggtgggttcttgtgataagagtgattattccagaatacctactcattgtagtcctttatggggaggaaattaaggtttatgttgtaatgggttctcatgtttaaggtcaaaaaaagattggtgttcttatatggagaaacccatttgttgattagtaaattttagttggagggaagagagtaattcacttagatgagtgacattgttaagaggtaatatcattagtttaagggagatgaagaatagaacaatgaggattggttcctagacatagtggaaactaagattccaatacttgtaaaactgtaaagatagaaggtaggaaactctttaacaagttttctgggtatactgtatacactgatcttttgaggatttttaggtgaggctcacaaaatgtagttgaacatttcatttttgagcccacttgataagtcattccaatctattcattgcaaactaaggtttataagagaccaataacagatggtcccttgatgctcattatgttctttcatatcttcaatgataattgaccacaattttcttagggaaaatcacactgcattcactgagagttatttctgtacaaatcttatacaagattgaaccaaggtagtgcttagtaattgaactcctgacctgttcttagtctatatttcattttaaacttcgattaatttgttgtcatttcatttcatgttggtaattctgtttttattttgttgggatacaaataagactgcagatggatttggtaatagtcttagtaaatcagataatcaaccttgtcttagtagactgcagatggatttgattatatttgctatattcatattacttacatacatatctttacatatatgggctaatatatgtgcttggtgagttcttatctagttgatattattattgtgagcttctcaccttgaatgaatgcactgaattctgattttgttcttcagttgatacgaaatcacaagaacaagcgaaaatagtatcaatcagaacatctgctctccccgaaacagcagcttctgttgcaattgctgcgacagtcgttggtgcagcagctacccttcttgtgcagagaaacaaagctgccaaaacaattgaggtttgtactttgattttacaaatgaaagttttgcagagaaaatgaaaatagtaatattaaatacatgcattgatgaaattgttaacacccctatttcattggtgaagaattcattttgagctgcaaagggtatgaaaaaaacagcagtgtttctctttactataaattcatcattatgcttgaaattcatgtgcttcttatatatcaggaagagatagttcaatttttttttttcttgaagaaaatctccttcaacttcacaacattagtatcacattagtactacatcaacaagctttttagaacaatgaatagaatgcaactaatgggaacatttgaaataatttgtatagtccagagaatttttttcaaaagaaaaaaacatttagggacaaaacttagtgcagagtaaacaaaacttatttatcctagtaaataatatggtgtaagagttttggttatgtaaatgagctttagaaagtctcttctcttccctaataagatgtatctgtttagtctggtatggctctttcactgttggagttctaaattttttttgctttttgacaaggctgaagtgcctctgaagacctgtgaagattgtgatggttctggtatatgttctgaatgcaaaggtgaaggatttgtgcttaagaaactatccgacgagagtgcagagaaggcaagactgacagctaaaaatgcagccactcgatatactgcagcgtatgttatcagctcttttcctcttttataccatttcaattcatatcaatttggaattggcttatcaagtaagtcaatagattacttgcaacgaaaggaatggaatgaaaatagtttttctttctcgttctttcccacaacaaaagagagccttgagtttctattccttcctttcctaactcttaacttacttttaaagctgcttttgggattctgaagttccaacaaaacttttgttgctagttaagtaaccaatgaattttaacttttagctggaattgacttttggaaatttgtcgaaaagggcttccattcctaagaagctaaacataatccatgccctctttgataaaatgctataactgagattgtgtaactttcattgtccttcaggcttccaaagaaatggagttactgtacaaaatgctcttctgctcggtcgtgtagtacgtgtggcggtcgtgggaagataagctactagtttgtttgtaatcatccttgtgcagagatctcaacagaggagacaagatctttcatatgagtcgtgaaggtgaggttgcatctgagttttttatgatttcatgcactttagtttcctcattaactctatgtaatatattaggctattagaatgtatacattgttttatccttttaatttttctattgtacctgtttgaattcatcattagaatcaacttttgttttgtttttcaatagcttcatttgatgaggaatgtacatattttgtgttgtaattgtacttttgttatagcaatattattatttattcatataggatcaaccttcttacaatgtttttgtatacataataagatacatttaggaggcctttagttgtgaaaaatgaaaatataagaataggaatgggaatgggaat

SEQ ID NO: 303924 - DNA, 2962 bp, Cannabis indica
gctctctctcctctctctctctctctctctctctctctttactctttagagcttttcctttttatcagtctcccctgcaactgcactacactagtgttttcaggatgatgatgagaaactaatttagtgggttaaattatatagaaaacaaaaccaataaaacaaaaataaatacatgcgcttattatgatcataaccggtcattttcgttttattgcttctttttctttcatgttatgttgggggctttggttttaacattgtgctttgggctttattgtcatgacaataatacttgtcttcttcttacaaattgaatctttttctcagtgagtatgcatatacacacacatatatgtagatagatacctttgaaggtaaaagtaaaaacagagaagagaaaaatacaaagtttctggtgtttggtgtctggtgcatgcatgtcctgtcgttctatcaagactagtcagtgagactgcttcgtttttgtgtcgattctgagaccaaggattctttcttgctcagagaattaaaggaaaagaagagcgagaaagtcggggaaaaagtttttctttataaaagaaaggggaagatttattgggtttactctgtttctgtcaaaaatggaggttactgagctctagcaaggagaaatttttttcaatggaactttttctagggtgtcttgtttgtttacagagtggttgatttccttattattgtaccacaatcgtttcatccatcattatttaacacaagaaatgagtagtaacagtaaaaaaaaatcccaactttggagctcgaaggtgtcatctatggcggtttcaggttgaaaaggcttgactctttttcattccaggtgagtcttgtgaacttttatttaactcgtttgtgaaagttaaatatgctttaactttatttacttaatttcaaggtatgcttaggaagagatctggagtcacaactacagccactaagcaagctctaatggcggattatacagctcaaccttctcctactgaaaattacagaaaacccattttgtctctctttcgttctccaagccttttcactagtttcacttcttcaaaaggctcctctgaaacagaaaccgtattaagcccaacctccatacttgatagcagtaaacccttctcaaataatctaaaaaaccccttttgctccgagtcaaatattagtaaccccaaatatccagaccgcgaaagcaaacgcccctgggacaaaataggctccaaaggaatcggtctcggaattgtggatgctctcaacaacgagaaaccgggtcacaaaccatcgaaacccgagacacgaatggtcctattcgggtcatatctgaagatccaaataccaccttcttcagtactttcccaagctgagtccccgaaatctccaggcgatttcggaatcaagactcggaattcccaactgggttcttctccttttggaaaatcagcaattgggtctacaaattttggggttgaaactcaaaattcgaattcccctcgggtctttactggttctctgcctagtagtacagagatggagctgtcagaggattatacttgtgtaatcacccatggaccaaatcctagaaccacacatatttatgataattgcattgttgaaagccctggtggcactttgggatttacatcaaccaaaaaagatgatcacacaattacctatccttcacagaattttctcagcttttgttatacatgcaagaagaagcttggcccaggaaaagatatttacatgtacaggttggtttttttcctttgattcttcttacctttcatttgtatttttattgaattacgttcgttcaaaggttctatttaattatttatttatttgtttgctttgattttttaggggtgaaaaagcattttgtagtgatgaatgtcgatatgaggagatgatgttggaagaaggagctgagaataaacattatgatagtgtttaagccaatcgcttctaaataaaagctctcttctcttcctctaaatatatatgccatcaaactgattttgcttcaacgagccacgaacctagccaacttggcaacttcttgtcaagctcttataatcgatttatacatatgaaatcaaaggcagattaatatagaagtaaagatggtaatgaacttgaaaaataaaacacacatagagagagagataaggatattttcattttcgtaacctttttggggggccttatgccttaattactttcatcaattctcttcttcaagggtagagaaaaaagggagtaaaaaaaggctgggataatattttgtagagttatttttcttttccttttgaatttgacgagtagtagtagtagtagtccacagtttttgggttttcaagttttgtaatgatcttgactaagcctggcattatcttaagtttattttatagcaaaatacataatagatcatttttttcgtggtattgtattgttattagattatgtcaaaggtgcactctattaaattagtgtgaattatgcaaaactaaaatattattcacctaccaaaaaaatatactccaataatataccaaaatatgatataaatttggtatataatatttattatgatgtcaaatatacattaccataaatataatatttttttaccatacttattattttattaatatatttaactattggtctatattttattattattattattattattaattattattattataaaattaataataaaataatttattttctatatttttgataaaaatattaattaaacattaaaatttcataaaattttgttttgcttttgttgaagcacaataattttttgtgccaaatataatataattttggggaattactctatatattatatttttaacttttttttttcaaatttacgatttgggtctctaaagtggttgcaacgctagtt

SEQ ID NO: 303925 - DNA, 1390 bp, Cannabis indica
agccacaaagaaattcccctctttttttttctttttaaaatttgtccaacaccacaccacgaattttttaccaccactccaatctatccaagatcacaacaataattttaaaactactccaactatttcagcacacttcaccaacttcaaaagtcacccacactcaacccaactactcggatagcacattcccacaaaatatatatattaaaatctatccacacaccaaatcaacacttctaatcacaccaagcttccaatatcacaccaagaatttcaaattcacaccaataattttcaaactacaccaaatccacacaaacaatcacaaccttaatcagcccattgtttaaaaccaaaccaaaaattctaatgtcactccaatgaaacttatacactcggaagccaccattgagtcacactaaaaatcttagaatcatttcaatttgcccaaaaaccccaccatattatcaccaattcaaatttaaagctgtaacacaaattatcaagactccatctgatcacggcacccttcaaccacaccaaagtcacattcaaaacctttcaaacttactccaataattcaatactctcccaacaattccacagtatcaacattactcaaatcaaagtactacactaccaattgaaccacttcaacaattccaaactattaattgctcaccaagaaattcagattattcaaagcaacaagctaagttactcacacatatttcgttgccatagaaaaattaaaatccaaataatggtaaagcttggccaacaaaccagagtggtggagtcaactaggtggttcgcttggtggtggatcgactggagttggtgagttcgggttgaatggaggctcggttgctaactactccggaggctggtggctgggtcgagggtggaagatggtgatgaatgaaatggtgtagggtttgagagtagcttttgggtcacttgactgtttagtgggttgtgagtcaatattttaatggggcccagttatctacaaattgaagccctataaagaaactaactcactttgttgtatctggctttgtttaaatcattttggcatttttgggtacacaagagtccagtgaagtacatcagaccaatactcactcaaaccccaataacaaaactcaattcttggaccgagcaaaaagagttgtacccaatgattgttccattaaaacatttttttccgtgtttctctttatcagaccaacactttatatatataaaaaaaaaaaattcagaaccccaatagcaaacccttgctattaactattatacctgctgccaaatagacttgctaagccattgctatagcaactgggtataacttttccaccccaaacttaatttctttgcccaattt

SEQ ID NO: 303926 - DNA, 515 bp, Cannabis indica
tcgatcaacataaaatataatccgcgagaaaggcttctaatacggacaaatttgaagtgattaatttatgctttattccctaaaaagaaagtttgaccaaaggaaatgccaattaaataatacagtacatgacaatcacatggcttcccccattaattcacatatttccttgatcaaattatctaatcgttagcctctttccactacttattttctttctttctttctttctagtactttttgagagagatacatttccaaaatctgttacgagatggaaagtcttaaaacaaccctgatagaataaataaacaaccaaaatgcctacattaattaatgttattagtgatagtttttgtataaatttacacatatagctataaggcttagccgctataaaactaaaaacaaagtccccccctaatcgataaaatatgcatgtaaaattttatctgtgttgattctaatcgttgttcatatatgtaaagtccttttctggcaagttaggtgacaaa

SEQ ID NO: 303927 - DNA, 1514 bp, Cannabis indica
aaatcacgtaatacgcctaagttagttagggtgttacacctcaacctcttcagaaaaacacgaattagaccagcatgccttctcaggcgtagaaggaagccaatgcctccaagtttgaatttccttcatccccaaaagtccatgtagcatcgaaagggacccgtgcaaaagtaccaatgcccaatagaagggaaaagcgccctagtgatttagtaaactagaacagggggacaaggggacggtgccttgatgatagttggtccacgggggatctcaaaaggcctttagattacaagtaccaaaaagaaaaaagtgagaaggtgaggccatgttgtaatgacctcgggaatcacttgaactagtgatgcaaagaggttagaggaatagatagttgtactgacaaagttagtcaggaagcaaagtggtgccctcactagtttttaggatgagcactcaaagccctttgtatgaaggatcgatgaagctccacgtctagagaacttcaaaataccccagatcgagctttatgatgggcgcactaatcctaaaactcatttggcccagtacaaccagattatgtaggtggcaagagttaatgaggacaacaagtgtttattcttcccctgaccctaaccaaatatgtttaggactagtggaagagattggctccctgatcaatcttctcctagaaggaactacagtcttgcttctagaaatagtttattgctgccagcgattatgacttgcaaatgggctccatcaccagcatcaagcaacaagcgagagaaagcctgaacagttgcatttagtgaatgatggatgcaacaactaaaactaaagtatccaatgacatgaaattggtggccctataatttggacatgccgatggttctctcctatggggagaaatttagaggagaagagccgaaatactttcagaatttatggctaaggcacaaggctttattagttcggaatatgattatcagtaagcttttcgtgtccctctagcactggctccagttgtttccactcccaaatttacccctttagttcttgttcttagaacttgatacaccccgacagtttatagaccatcaacaaccgtacaagcacccacacagacctatttctctaggtacagagtggcacatactggatgtcgtatcgttcccgggtagtcaaaagcagaagttctagaccagaacgtgagtaaatcctagaacaagaggggaggaaagggtctgagacagagtgagaattccgaaaaagccaggaaagattatgaaccaaaatataccatgcactccaatctggtagacacttgagaatatgtatataaagcaaccagtaacatagtctattatagaaagccccctcggacacctcaagggggtaatttcaagagagattagattaagaggtattattatcatagagaagtgggtcagtcctgttggggattattttaccacgatctagatttatgaacatgtatcttgtttaacatccta

SEQ ID NO: 303928 - DNA, 1130 bp, Cannabis indica
ccgcacgaattcagatggtgcaaagacgcttaaaattctgacatggaacctcataattctcatcaagctattgcactacttaataaagataattgttttcaaaaaagattatatgagtttttataacataatttatttatacattttttataatataatattttttgttatatgtactaataaaaaaaatcccactaaacaagggccacaccacattctctgttacattagatatactaaatatttggtatatattcaatcgaacgaaaatttgttctcatacactacgctagctcataggccactattagttgttgataatacatatgtatcatgggccattattagttgctgatacaaacaatggcagcgcgaaagtggcataaaccagtactagttcataaggtcaaaggtgaatgtttatggtgctatttttgaaactcaacaaatatttggtttcggttgtgtggctcgtgaccccaatggaagaatgcttgagaccatctcagctagcatgtgtggtatggttcagcctgaaatagctgaagtaatagaagttaataaggcattgagttggataaaacgtaaaaattggactcatgtaggcacttaacaactcaatttaaatgccttctcaatttggtttgctgatgagaaattgtcgtttacagttgtcttcttttttctttttttgaaaactactgtagtcttctttaaataatgttttgattacttttgttaaaccatttggtaattaataaggccgcttagcttactatattgttaaatggtcttgtttcatgttattgtatttttaacgaattgaatgctcctataaatttaaagaaatggctgagtgtgttgatccatcttttccattaatatatatatctcatctttccttacgtaaaagaataaaaaataaaaaatcatacatatttcctaaaaaaaatagggaaaaaaacaggaatattctaaaaagggaaaaatattacaacaatactgtgggccggcccaatgaacatttgtacagcccaaaatgaaaatattacaaaaataccacttgcccttaccttcagccgcacgtcacaaacagagaggatgaatgaagctccatcgatgcagtcggc

SEQ ID NO: 303929 - DNA, 3992 bp, Cannabis indica
aaacatatttattatttaatgattaaatgtatggtttcatgtaataagttttcaaaatgtataagtttttaaaataatttttttttttgcacattttttataattatgttatttttattgtacatttatgaaaaaagcacaatacaaaaaaggtataataaaattagttagggacaaaatagcaaaacagaaaaatgaatcttccatgactaagcaccattagtaataagacccttgtattagctatgttaattctgtcttaacaaaccctatcatggattatgcggttatatgtccaaagtatttaaatatgaattgcactcgaatttgttttgatatttatacaaaaatatttttcatatgttttggcgaccgcgccgaaatgccctagctacctaagtatataactttagacagaaacatattattgaaacattacctaatatatatttacagaaaagaaaaacggcatataaaattacatcatgttgaaattttaactgtcatttatactctctctctctatatatattatacatttataatttatatattatatggtaaaaacgaaaagcggctgaaatatgcgagagtagttgatgagagcctaattattaattaattaagattagggttgggtattgttttgcgtgcgtggaagaatcccaaaaagggttcgtacgtagtgttgccatgttgtgatattctcctcgcattaccacaataattccttctgcaacttctttatgggaccaaatctgcacatcatgcaaattaatctataataaccccacaaaaaagtcttccatatatttacttctattactactactactactacttgtatatctatatgtgtgtgtatacttcttctctcttatatattaccttagctaacttttaaaagcaaccaaaatcttcttataaaaagtgaagaaagaattgaatatcacctttttaggttgaacaggacatgtcattcctttttatttttctattccatgtggaaagagacacttcctccttcccactctcatttattattataccctttcacactatcccttattggatcttccttttaattatttgttttataggttttatatatattggtcacatataaaatatatttaattatatattatgcacctcatactgtatgcatacatatgcatgtcaagctataaatatatttaaattaagcatctctttatatatgaaccataaatatttatatattattatgcatgcattaatgcaccagaccacatatgcatgtctaggtataagattcgtctaccgcatacttcataaaaatgacccaattaagtaaagtccatcttttttttgttgtaattatccttagtttttgtgtatatatataatatattatatcatcgggaaacgcaatattctatcctacgtaaaatcacctttcttgtaataaagcgtgtgtacgtataattatataatgtatttgttttcatattaatattctttgttttaatatgtttgaattaaaatatatatggatatatatctttgctccagatactaatatataatgtccgtttattgtccgtactagtagttgaaatttcaaaaagcaattgtaattacgtgcaactcatagaattcaatcatatatttaattgtataattttattaggaatgtagagaggtatgttccagaattattacatatacagtatgtatatatgtacatatagtatatagagcgagcaattaataaatgagaaatgctaaagggcaccagtggtggtgcttagcaccttcttatgtgtcaatatcgctattggtacaactaagtatcgggtcccatataatttaatataatagtttttagggagtatcgctagccaatcgcaacgcgacatgtcccaaaggtactaggcaccactggtgcctaatagcaatgctcttaataaatgctggtcatttcaagtacattaggtaaaatttattcttgtcctatcatatcattaatttctgtgttgtctctctttatatttatacgaaataacgatgaagctgcctagttttacatgttggtatataactttatatcatgcacgtccccatgacatgaaccaaaaagataatacgcacgttactctagagagagattagaatttaagagcatataaatatctttatagtatactctataaaattcagaagaaaaagatcgaatcttgaatagaataaagcagtaaaaaaagaaaggctctcttaagtaacaaatctcaaattaaagagaaatgaccatagctaacattgaaaagaaaaaaaaaaattgttggcagatcacaagtgcatttatatgaagattcgatagatattatcgcagtctctccaataattaaaaatctattaacttaagctgtgagtataccccactttccacttccttttttgaattattaataatggttgactatatatatagccagatttatttatactaacaattgaaattaattacttaactgtactataaataataatgatttgaaagtatgaaagccaagccacttctaaaaagtcatcaactatgatttgaggtttaaccttaaaaaaagactcactaacttctatagagagctcgttcgatcgttacactctttagataagttgtatatattatatgaatatgaatgtgtgtatatgtgtgtatgcatggatgattaagatataatgtaaagtcatgcagaaatagggtccatatagcatgggatctcttttgggtgaacgactaataattttgaaaacagttgccgggttccatcgaaactatataggtcttttttttttggttaacaatctaaagctaatttgcttttcatatatttatatcacaatttacaatgaatatctgatcatttgagccggaaagtttgtcccatttgtttgaaatattataaaaagaatatatacatatatttataacttgttgattttttcgaagcaaggaatttagtcaaacagcagttttataataatatgtaattttaggacacacgtactataagtacaaatagcgatacatgtttcataatatagaacttataaattacaagaaaatttgtacatatataaaaccgaagtctagtagtttatatatttgtatacgtttcggtaataggaacgttatatataactttattttactatgtatataaatacacatatatttgtctttttcatgtgtaacgatttatcatatagtatttaatatattaattattggaacgaactagcaaacaaaatctcattgatttttaatcatttccaaaggatcatgaaaagaaagaaaagacaaaaaaaaagtatagattccatggtttgaattataaagagaatttgataagttacagcaattcaagataaaagatataaaatgaaagaaaaacagcttccacatatatatgctgtaggagtacccacaatttataccataaataaaagaaaaatcgctaattagatatatatttgagtgatatatatgatatacaatctacagaaaattaatttcagtcaatcatgtataaacacacatgcatgatttaatatggggaaatgatgaatttatattataatttatgatctcatgatattctttgaattaatttgtttgacaattacatgaaagtaagaatgaaagaacaatttttgttttatttattctttttttttccttaccacaaacttatataaatagactatataaatgagagaaataatcatatatgtatataatatatatctgatttttgaacctaaataaatgatttttttactacacaataagttgacaaccagagcagcacgttttaacaaaagtgtacatgtgttgcaaatttgctcaaactctttggtatttactctgtaaaaagaacaacaaagaagagagatacattatacagacatataaattatatatatatatatatatatatatatatata

SEQ ID NO: 303930 - DNA, 3886 bp, Cannabis indica
tttaaaagtggttgaggtaaatggcttcatgggatcagatcataatacatttgttctactgaaatattttgtgaattttggtgctgtaatggaagaactgaatattaaagtcatgggcgatggtgaatcttctgaagtgggccttcataaggcccaaatgttgcaagccagcgaaaaagcttcgccacttttgcaaatttcaatcgcttaagtttgctatgtgtgagtgtttatacatatatatgctattatttgagtttttgtttatggtattattaagttaatattgtgttgtatggagctggactattgtgaatcttctgaagcgagccctttgcaaggtctagacactgcaaaactactatcaattattttctgtcgtttgaaatattttattgtaactgctgttattgtaatgtttggaagacaaataaattggcttgtttgtgtaatgttactatgtttaatacaagtattttattatattttaactctcatgtttacaaagttatagtttaatcagattgagttaaaagtgaaacattggaagcttaccgatcgatagttttttttttttttcatcttcgatttcaaaagttcagatatcattacctatcttatttttaacacttcttgattattgagcttaataatatataataaaatatatggaaaaattatgaaaatattaatagaaattagttatgaaataataataatttgtaagccatatatgtggaacacctgttttttacaattcatatgtagtcagttgtgttaattaagcacatgccattacggagtcatataccctcaaagacaccacattaactcattaagcacatgccaatactgagtcataatacccacaaagacaccacacagttagaataatatacgtataaacaagagctaagaatgattacgagtgtaattaattaataataataaagaaagcagaggcggaaaatcacatgcaggaggacctttatccatatgaacctgtccttattcaatcgattgaatcactcaaacctaatttattgagtacagaattagtatcaaatcaaatttaccatacatacatataaatatatatatatatatatatatatcaatatattgacattaatattgtctaacatttacatatataatccagacttcctaacaccatttttttttgttttgttagagacttccaacaccaaattaattacatatatataaagatatgtatataatttatgcatgtattaatgtacacttaaattagttagttatttactacaaagtgtagtaagatatgaaatggaaattaaaattagaaagaaaagaaaaaacgaggtttttactaattgatcattatcttgaaaaaactggttcttcagctatagtctccaacaatggcttcttagacctactcagggataccctatgcaggaactccggcgcagagaaatcctctatatcatccaaattcaacttcggcctgggtgccaccgcaacccgttcctcctcttcctcctccttctcatatctcggccagttctcaccggaggactcctccgacggcaaaaccctagtattcttccggccacttccacctccgccgccacggcgcttgctggcaacagagttagcagcgaggaaaatagctcccatgtccgcggcggtgacggcagaattgactctcttcatgggaaacatgatgtagacgctagccagctcgaggtcttcgtcggcattgagcggcgaaaaccgcttgcctagctgcatggagcgcacattgacgacgaagaagcttggcgtctcaagcattagctccgcggcctttactggaccgtcgaagcgtcggatttcgccgccggggaagattactttggcagctttgcatatgtgcctcccaccagggcctgagagagtacatgaggcgtagtttcccatgattaattaactatgcccaataaaataaactgatgactaattaagttgtagagagatagaggagagatttggaatggatttttgggatatatgtggttatatttgaagggattagatgtgtttgatataaacagccagagagatgaaatgatagtattacgtggtggtgataaatagaaatgtatatatcacatatggatggacttggtctctttgcaatattaatatgagatcagatcagctatatatgagatatttttaaagatgcgtttacaactaattacaatggttgttattaaggtggtggtggttgtaaacatttatttatttaaatttcatttttaaaaatagaaaccaactctttgaaaatactataatgtgaaagaatgagtctagttcattgaaaaaagtagtataattaattaataaagagaatttttaattattagagtatacatatggaagattcttatattattatatatacatatataaaattaaggagtactagaaaaggagccagttgtataatatgcattgtggtttgacattttatggttgagttgcgcgtttgtgtttaaaaaaataaataaaggaaaatgtagagaagatgcatgtcattttccagttcatgagtagtaaagtactctatgcatgtcattgaccccacttatttgcttctctcataatttgtcattttcattgtactatttcttttttattaatcctacaagtactataagtttttgagtgtttgggtttatttggtcccttccttgcttctgttttccgtgatcatgtttttcaatttaacaacttaattaaagtctttgttttatatttataagttaccaagtgaatatgttattactaatatatttatgagaaatgtgaaagacttcattaccaccaaatgtatggtattgtgttttttttttcctttctaaaaaatgtatatggtattgttatttattagtgtaatttataaatatttgatgccatataatataatataatttaatatttattatagagtatcattaattattagcaaaacgatatacttgcaccactaatacttaatacaaataaaacaacttcaatataatattcaacactttaaggtgttagataatactaataattaagaataatataaattttacaatggtgtctcatacaatttaatttaagttattcactttactatttaaagatcgtgactagccaccgtaagtaaaattaacctgatcaattttgtggtttattaattgcagtatatagtacaagagcatttgttggtttttaatttattaggcgatattattaagaagtttcttattttattttattttaaaaaaatattattaattaagaccgtactattcgtactaagtttttagatattaaacttacaataattatatataaattaatatacataatacaattcagtataaaaaacttaacattaattatgaactattaattaaaaatatgtatattttagtcgagcaacagaagttttacataattatgataagtacatattagtttaaactttttcataaaagagtagctctatataattatatatatgaataaatttatgcatgtatcacacacatgtaagagtaaggcatgtgagttttgaaattataagcgcgcatgaacagtacagccattttgcgtgaaatgacattaatacatatatactaaattataataacattatgtattcttgtgaagagtggaagacggtggcggtgtcggtcgtatccaatttatatatgtaaagtgtataagctttaaataaaagggcagctcatcattacaacaacgcattgtattcgttgtttgaagaaagaaaaaaagaccatcacaagatagatatcttattcacccttaaccacgctttcaaattttcaatatatatata

SEQ ID NO: 303931 - DNA, 981 bp, Cannabis indica
aaaaaaaaacatattttgaagtataaaaataaaaaaaaaaaatccctataaaatacatccaaaaaataaaacggactaaatccaatgtacaatggatatacatgaatggatattagattgattcggatgactgaaattaattggataaaccttacatccaatataaaattttgtaaaatctaacatttaatattaaatcgaatctgaatatacataaacattagatgtgaattgtagcagatgattagtttacataacctgcaaagtataagaaagaattttattctccttttgcaacaaagtcgattaaagaggaatagtactaaacatctttgtggttggacaacttaagactcttttagtttgatttgttgcagaaagggagattaaaaattttatataatcatgagtcgaactacatcactgccacaaaaaataaaatttcaacacattaaaatgttagaccattgactattattaaggttttttttttattaatttttttatttctaaaagcgttttttgagttacataactagaattcgatcccatgacccactcatactcccaattgactattataaaggttagatattcgtcgaaaatcaaatacaaaggttcatattagactattatatactttgctggtccaaattacgaatagaaggtgggaaagaaggttcgttattcacatgaggccaccaactaatttgttttctatatacaaacacataatttttactaccaacaatcaatttaaaatcaattttttaaacaaaaaagggaacaaacaaacaaaaaaaagcattattttacaaacacgtataattctggattacttcgaagtatttattaatatccaaaacctattcatttgtcctttcgagaaaaccacgtgaacagcaatagatgataacaaaaaaaaaactaatattctaaatctttttagtctaccaagaaaatgaaacaaaaaatactggt

SEQ ID NO: 303932 - DNA, 3452 bp, Cannabis indica
taaatatatattgtaatatttttttataataaattataatattaatattatttaaatttatttattaatgtaaaaatactattattttttttgaatgatgtaaaaatactattattaatataatgaaatggaataatttaagcccaccttttttaaggtgtcaacattaccctcattaaaggtagttataatattaagggaataaataaggtaatatttcatattaccgttctcttgctagcattaactcattccaaacggcccctaatattattttttatttgaacaaataggattaagatgcatgagttctatctcaaaactaattgtcaatgagagaagtaattcataattcaccttatatattgtattatttttccacacattaacagtgtgagattatttctaatacataattctcgtgtgttaggcatgcaaagtgtggtataatgaatgacatttaagagaccacaagatcaacatgatatttttaaaagaatcccacaagatcaaattaggaaaatttatgggtgtacacgacgaaaaatttgtggattttttgaatcaagctaaagaccccaatactagaaatcggcacacattggtcgaaaggtcgcaaatggaggtcaaaggcaaagatatagcagaagtttttaattgctctaataccatgttagaatttggtaaggtgcttgtgattccatctcaaaactaattagactatgtcttatttatgaattttcactaagctaggcttaattgtgaagagaagaggttttagggtctgtttgttaattaagagactttattaagtctaattaataaatacatcaaatgaaaatttaacttgataattaattttaattattaaataaatagttttgacatttagaggttcaaaattagaaaatacggtatttttgaaaagaaaaaaaagggataaatagttgtacaaaatggcaaaaatttcaatttagtggggcccactatgtggctagccacttaaggtaatttttgcccaatttttataatttttttaatgtcatataatttaaatataaccctaaatgaaaaagtataaacagaataagatggtctcattatccaactaatgctcataacctaattaacaaattttcagacaactagagagtttttgagacctccttcttatttcttcttcttctattttgaaatcccttgaatgttcttcaaaaaaattcgtccctcttagtgattgagtacatgcccacacatagcaagttagtactcaatcctagtgtgtaagactgtgaagaatccaacatctgaaagagaatcgggctcggatcttgataatactctacaacagaaaagaacaagggttagacatttgagtggaatgagtcatttaattttgctgcaaccagtataaggtttcttaaactttatatgtgtttaaattctattgttttagaaattcatgtttaggatgttaaacaacatacatggtagtaaatctagattctagtaaaataatccacaacagtcatatcaacaataaattggttaacaacttgatccaacccgttctaggccttaaacttaaaattgagagtttctctatcgataaaaagcatttaacgctctaaatattgagaaaacacctacaaacaagattttaggaaaaagtccctaaaaaacggtaggccgtttcctaaaaacggcaagtcgtttctctgggacattgccaagaaaaatagtagactgtttttggtctaccgtttctgctccataaaacaccagacctcatattctaactcaaaactacccaaacgtcatacaaagctctagatcacctaatatgagtccaataaacgcaatccaaccaaaaatttcatcatcgagcccctaacacaaaatctaccattattgagttaggtttgaccttaaaagctcaaacccaactcaacttaggtttcaaccaccaaaaacaattgaagacaacaacatacaactataattaacttccaaaatcaacataaaatagaaccaaaccataacaacatctctagcaaaggttacactacaattcgagcttaaaacctaacaaaattcaaagagaaaggttagctagagtttaccttgtaatttccttcaaaaacctcttagattcctaattgaaaatgataaaaattatggtggaaacctagaggctatttggttgtattttcactttttagttttcagaattgtgtttttaaaagtaaaaatagaaaatagttttttatcattttaaaaatttaatggtgcttggctcaggtttttaaaactatttttagattttttttactaaaaaaaaaatcaatattctacactacaccatgacatgaacccatccaaccccaaaccgaacctcaaacccaaaaccaaacttggatccaaacccgaactcgaactcgaacccaaaatcaatcccaaaccccaaacccagactcgaacccaggccaggacccacacatgggttgaggtccgagtccagtttcagttttatggtctgagtcagggttcggggtttgagtcctggttcgggtcaggctagggtctaagtctaggtttgggtcgagggtcaggctggggttcaagtctaggtcaagctggggtttgggtccaggttcgagtcaggccagggtctgggtctggtcgggtctaggtttggggttcaggtttgagtttgggttcgagttagggtcaggtctgggttcaggtccgtgtttggggtctgggtctggggtcgaggtctgtggtctgggtctagggtctgggttgaggttcggggttcggggtctaagactgggttcgggttcgggttgggatctagggtccgggaccgggtctaggtcaggtctaagtttgagtccaagtttggggtttgtgtttaggttcagttttgggtctgagtctgggtttggggtcccaggtctaggttgttttttcgttgttgtttttgtgatggagaatgctcattcttcctgctgtgggcaattttctcacgagaaggtcgttgtgggatggtattacgagtagtatcttgactttgggtcatcatcgttcatgccctagacccctcttgacttttgacagggtaacgagtcaagtgaatctcacgaggtcttccccttcttgacgtaccagggtacccacgggctccgcgtcgtggtggtcttcttaggaataatgcctctcttgccactctctattgagtgtgagagtctcatctaagcatcaaaataactaatttttctccatgaacacctcatgaacattagtggttcattataaaaatgggatggtgacgacgaactcccagtgtctcggacctgaacttcgtcgtcgtgcatgggttgtttgcatggatgtcgagaggtctcttaactagtgttaggttatttttagtattaattttagattaa

SEQ ID NO: 303933 - DNA, 5669 bp, Cannabis indica
tagttttagtcacaacaagtattgtgactaaaaatacatttactcacaataaattgtaatttttgtgactaatattttttgcacggactttttagtcacaacataagaataataatttataattagtcacaatttttttatttttagtgacaaatgttgttgtgactaaaagtaaattttttttgtagtgaatacttaaatagaagggacttgaatctcacgagaacaaactatatatttgaccatttgggctactccgactaaagatgtttattggtggtgattgtaggaatggagtcttcaagataatttcaagtgtgtgacagagaaaatgatttttgtgccagatgaaagctcagattactctttctccataaaactcaattactttccttcaaattcaaatattggtaagagtaagaaaatctccattggtgatcagatcgttattgcaatcatcattactctcctatacaaaattttgatgttcttaacatcaaagattttcggagcatagttttgagcatatatattttttttggtggtgaagggtttggttttcatcaatttattttctttttcttactctgaaaattaattttatagaaagggtccccttttgatgtgttggggatctgtgaatggcatggcttgaaggattgaattgagtgaaagtttggttatacacacacacaataaaaaaaaaaaaacttgtacaaatcttcatggacctaaatgtaaaagaaagaaagaaaagttacaaagaaatttgatgtatagggtttggagtttgatttagcaatattggtttctagtgttgtattttcatttttgaaataatgaaagttgtatgtaaacaataattctttaaaataattagcttgaaaaaaattgaaactttcatttctatttgataacaagttcgaacttaatctaaactaggattgaactgaaaagaaaaaaagaaaaaacgtaaagtgtaaattctaaagagaaatttgagtttttatgtttcatataatacttcatgtcaaaaaatatcttacatataatatcgatattttaaaaatttattattattccatcattaccaaaattactcttctcacaactcaattgtcatataattgttattttatttccatcaaatttacacttccatcattaacggtatactattattttatgtaattttaacttttataaaaaatacttttgttatttggttttttgtccaaaccttctaaccatattattaaagagttaactcgctgtttaattgagttgattaaaaatagatcattgttattaagtatttgtagtgctttaagttggtgtcttacacatagttagccacattatattaataatttttaaattaaatgatgtaaaatttaatatttaattatattaattacgatatgtcacattatacttaacaccactactgctaccttttaccattttatttgaaagtatttattggactatatctaatatttgtaggtctatctagatctgatccaattatatattggatgttaaattttatcatttgatttgatcaaatcaattttagtaatccaattgattcaatattcgttagatgttggattgaatcagttttatctattaaatgtatttcacctatagttattggtttagtttgagtttactaaatatattaaacttagtatttttttagatcggatcacatccatttaatattttaagtccagtatatattagattggatcaatccaatccaatctaagaaaaaaaagagtaatagtttaatattaatttttatacatatatatattttacttataaataatataaaatctaaatactcatataaaagtaaataaaaatactaattagttaaatcgattaaatgttagatgtattagatttttgaactcccatttaatatttgagccaattaaatatttaaaaataatatctaatccgatcggattacaattaaatatttaatgtttgacagtcctaattgtattgaattgcaagaaaagagaagatagatagtagatacaaagtagtattatgcatatgcacacagctaatcatttaaatgaaacaataaagagaggatatttttttgctctcatatatctctaaatctgtgactgaattccacaccggcaaacgccgaccaccgccgcatcgtctcccatagtcgcctgaaccaaccctcctccactccctcgccttttcactctcattcatattcatattcaggtttatatatatcactgtttaactatattctttctcaaattgtatctatatttgtgatttctcaagtttatggaaaaagaaaactctactgattatgtgaaaattgtgactggtttctcaaatttctgttgctacttttgggaaggtgttcgatgaaatgcctgagagagatatttcaaagaatttcattaactctcaattatcaaatggaagctagccaaacctaaacaccatttcatttaatatctgaatatttatttttatataaatatcatgctggaatttgggtaaatatagatgagatttcattggaagatcaattttttacatctagtcactgacaccttgattgaatctgctcttgatgattttttatatagaaattttttgggcttaaggtttttcatatgattttaagttggaattgtatgcaatgttatctttgttaaattttaatcttggttgctattacaatttgatgttgtaatggtataagttgtttttttagtatctttgactatgtattattatgatgttacaattttaatggttttgtttgtgcaaaatgttgatattatttggattgtctttatgtcttagatttattattgtagttttcaacttttcagagtttcatcttcaatggctaatgcagattttcttatattatatattacagcagctaaaaatgaatggaagttttgctgaagagctatactcagaaagcttaaagctatcgaaaatagaaatggattctacttcaagtgccaaaaatcaagctttggattttcaaggtatcaaatcttacttttatgtgacagattatgtatcttttctttacagtctcaattgtctaaacttatttcggatgtgataggcatgaattttcccttgccatctcttttttcgcttatgatctgttctagtcacagactcacagctggtgtgaagtctatgagtagttattggggccattaactttagatatagagagcaatgattttttttttaatctttttctacctagacgattctattagcttgttaagagtgagttcatgttagctctgtggtggaaattcttgggggagtgcaagttggtttggtctccaaggaatcgtttagttcgggtttatggtaaagacctagtttttgtggacgtgtgaattgttggctattattttaccagtttaattggagtggaatgatagaagctttcaaaagtccactagagcaaaattatggatgaggatcaagttttcgatagctatgtggtcaaaaaatgaggctaacattttctttttcagttctttaagctctgttttgaacttagattttaacaaggaaaaattttgtgagtggaaagatattgtgttatatttgttagaattcaaataagagaaaatgaaatattttgaaattaatttattttctttctaaaatccaagatccaaaggtgatgtttgttttgttttgtattacaatgccttttggtttcttttcttatttttgagagagtatagagttcttgaataaaatgaaatcaaatataatacaatggaactgaatcttccatttatttatttcagtaacttctttatttacagtttgagataatgcaaaaggaaaagcttctgcagtaaattattttagtaagttgaacttgcaaaactgagttgtaaatttaattttcaattccagattctgacagggatgcttcattgcttgatgatgaatctttatggaatggttctgatgtggaattggataaatcatccgatctggacagggaatggcaacagcgacgtgaccaatttcatacggtaatttttcccctaatctaagtacccaaagaaaaaaggaaagcaaaatcatcacttgtactagtttctttgggtgcttttattataatttgtattgtcttaataaaagaaaaaaaatattagatgggatatcgagatggcgttatagctggaaaagaagctgctgcacaagaggggttcaatattgggtttaaacaatctgtcctcgtcggatacaactggggcgttgttagaggtgttacaaggtaaaacatagcaaaattgttaaatcatgtattcgatttttatgttcaattgtttattagaacaaaaggatggtttcgattcatcattcattttctttcttttcctttttggcgatttgctattctttgtgaagtgctgtggcgttacttccagaaggattgaaggaaaaattgattgaaaccgaagaaaagagaaaccaatttcagaaattgtataaatccgtgcattccctttcgaccaaggatgctcttagactgtttaatgatgctattgtggctgaaagaaatagagaacaggttggaaatgctgagattagttcaacagatgaaattgaaaatcagctagaaagttactatagagagcttcaatcacttgttctgggatctcctttaatcaatctacagttaaaagagcaaggtaccattccatgagatcagatcagatctgtactcttttcctttgtgttctgcatttgaattttcgggttgtactgaaatgtctattaagtttttctcatggatttattttctcatttcattagtttcttttgtatgtaattttcattataatgattgtatagtttatatagttctttagataaaattaattgaacatgaaaagttgttatgaatgttccctaaccataacaccagaaattatgttgggacattcaatttaaatccaaaataattaagtaaaaatactattgcatcatcttcttcactgctagtgctaactaaaatttaagttctctttttatttcaatttttttttttgaatcatgattagttgaaaaacaaagtgacaaaagctaatatgacaaagcttaataaccatcctactatttaagatagataggaatttttacataaaatatctaaaatgattttctttttatatttttacggtataacaatttcagcaataatttctgtgctaaaatatacaaactcttaattatgaatgtgctagacaccagtggagatgatgatactaatttaaatctaaaagcttagttgtgccctaatacgactccttagcctcttcaacaatttcttaagaatgagaaccaaaaaaataaaaatcaaactaaataaataagttttcatcttcatttaacattatttagtttgttattatatattaaaaaatacataatttaacaataattaagtttaatatttgattataaataaatacataagtttaatttttgacagtaataatattaaagttatatttatgaaacttttgtaaatatctgaccattaaatgaaattatcatccacatgttatttttttgctttttttatttttacacttttaaacatttttttt

SEQ ID NO: 303934 - DNA, 1060 bp, Cannabis indica
aagaaaaatctgacatataaatggtatgagatcattcctattttattatttctaaatgaagaggggctaatggagtttccttagatgatgaattagaatataaatgctctcttcttttgtactctcgttttctctactatatatactgggctctacctactcatgaacataaaacaattcctcctgtgtgggcttctaattagcttacgtactcaggatttgataattacagtaaattataatatttatataagaagagaggttattttgtgtatgttaaattagtgaaagaggtgagatttgttatgcctggctccctgtatgccatgaggatcaaatcaaagctattttggtttttgcttgttgcgtgcgaggagccaagcatgcatacctctctttatctccctcctttctctcttttatacatgcatcatttataatcttctttgtttttgtattaacacacatttatacatatataatattggccatataatgcatgatattgaagatgtcatgatataaactctctctctctctatatatgtacttttgtatattgtatatattaatatcctagcctcataatttaggttcattctcacttgtctctaatatctactcgatgagattgacatttcatctcttcgttaagtcatatatttctttataatatttgttattttgtttgtgagttttctctacgatctgttttagattgagttttcttttagattaggatggcagaaaaagaagaatataattaatttcaaacgcgacctaatactttgattagttgtctcaatcaatgtgacctaatatatggattctcaatcaacggtcaccgtatagtattttaattattttatttccataatgtaattacaagaagtttgtgtatatgcgtatagtactgactatggtataaactttgaaaatgttgttactttttagcaactattgtattatttacagttgtcggcattattatatatataagaatattttaattatgaaattaaattttttgtttaaagaaatgattttccatttaaggaaa

SEQ ID NO: 303935 - DNA, 2442 bp, Cannabis indica
aatcaagtgttgtacctttataatccaaatggaaaaacttgtcttgttgtaaaatatcatcacatgcatgtacttttacaatttttgctttatgatgataataataatgatttatatgtttataaaagaaaatagaaaaaacaagcaatttattttggctaatgttagctgttaaatgttaattaaagtaaaacattatacattattagatatggataagaaaaaaaaattgaaagatatttaatacgtggcgctagatataagagaactaaaccagcgtcgaagtttcacttagctcaagggtctaaaaaaaaatttcttttaaaaatacatataaattttttattaattttaaaaatactatatttttttcgaattaaaggctaaatttttttttctggctcaattttaaaatcgaatgtatatatgtagtgcttagtattaacaacaatttgatcatggtggtttcattacttgaaacattgaaaaggtagatttcattaaattataaattatgtgggaatttacattggaatttattatttgtttttagaggctttattattgttatttgaaaatgtatttatataatgtaaaacatcaagggatagtatttattctcaataataataataataataataataataataattaatatgtgtatgaggatgtgactctgaaaattagatggctttagttatgcagtttgtagttgatttatttaatcatttaaaacctatttaattccatattaaatagaatattgtgtgaatatggttctcatctagctacccactcttaaaacattaaatatacatatatacgtaaaataaatagttttcttttttctcaaaaataaaaatgaataggtatatcttatttaaaacaatacactgtcatatctcatttataagatttaataactagtggaatatttttggaaaaatattaaagtccccttttccatttccacatttttggttaaagagatgaaataacaatttgctattataatattagttttccaattatataatgcaaaatatgagaataatgcacaatacataacttgcaagctaagaaagatgtacaatacatgttttaatttttacctttactcacctttctaatttttttttcctcgttgaataaaatttttgagtccgcccctgcatattctaataatatattagagagactgattacattccaaaatcagttaaaaaacatacaataaaaaatacaaaacagttgtatttgttaactagaaattttcaatttgtatacaaatttgtgctcatacatctatgaaattttatctcaatggtcaatttgtgcttattttatgccaatattaaaaggaaatagtttctgttgttgaaaacaagtgaagtctcccatttataattcatctctcatttattttcctttggactttaatgagtgattgagcctatacatttttaaccctaaatatatgagcatttttattagacactttatgatgctcaacactacaacgatgtagcgcataagaagcgattaacaggtttttatattatttattaaatcaaaatgtataagattaaatattgaattacattaataacgatatgctaccttttatagtgcttgacaccttaaagtgatctttaatgtttttctaaataataaagactaattcgtggaacatcagtaagaattatatatatatattaaatgggagtacaattttctctaagaatatacattttttctatctctatgatcgttggattatgattgaattgatctaacccttattaattattcgaagccaaaatacatcaaattgagctaacattcaaccttaatcaaagtacataaaacaaatgttaatagtcagaacgaaatgcatttctttctttcttaaaatacattccctattttataatatgtaaacaatagattttcattttttttggtaaactaataaataaaaatctaattctaggctttatctaactctaagcttagtttaatatactttagctttcaatagttaccaatcattcgatcaactcaactattaacctaacagatgtccacttaaataggccaatcaaaatctacactataaatatataaaggaagttatgttgctttaaaagagtactaactaaaagtgttaacaagactttttgagaatatatgaacttaaagcggtcatcacttttaaaaatatatataaaaaatatttaaaaagagtatcataataagatcaaacccatactgtaatgtgtcatacatttaaccaattaagctatgactattattgtttacaatatacttaattttatttaaataatagcctaaccactggcagaccaataaaggaccagtgtaagcttaagcccatgctgaacaaaaaatatttttttacttcttaactaaaaaaaa

SEQ ID NO: 303936 - DNA, 2050 bp, Cannabis indica
agtcaaaacacttattttattttcttacaattattttcacggataaaaaaaataaaggcaacaaaattaaagaaaagatgagaggggaccattccaatatataaaagtattttcaatatagtgttaatatatatatcaaatctggccgtgctaagatttgagatgtgttgaaacttgaaaattatctcaaatttagcacataatgtatatgtgagctaatattaattaattattttattacttttatatcatttcttattatttttggtatcaacattaaatataaatgtatttatttattttttttatgaggacaataataaaataaaaagaaaatgatttgttttcaagtttttttttttttatatttttaaagttaattaactttaacatgtacaaaatcatattcttttaaatttttcaagttgttaaaattatttccgaactgtaaaattattagatttaaagatttttgtccaattctattccattttgatattgtggcgattgtaaatgtactaaattatggctccgaactttaatatctattaaatcatgtttcctaaactttaacatatattaaattgtgttctttaaattttcacccacctcaaacttttcttaataaaattagataaaaatctttaaatctaacaatctcaatagttcgaaaagaatttttaacgacctgaaaagttcaaggacctaattaaaaaaaggccgaagtttagggagtaaaaatctaaattagcctattttcaataaatatttacatcttatttatttattttttattagtaaatataccttagtttttgtcatttgtagttgagatagtctaaacaaaaagaatagatatgtaaattcttgttgatgaaattgaatgttatggatgaggcaatatagtagggttaatactatgtatgcagttcgtcagccaacaacaaccgcgtgaatgtgattgcccatctttagttttatagtcgtagacttttaaaaattttttgtaaaagtgtaaagactttttttcattctacttttttatttattatttttaaagcggtatgcaattttataccacacaacatctataaagaaaacaacaacaacaacaaaaaataattaattaagcttatgcgtgtgcttgtgcaatgcaactatattccctcttattttatttactttataattaagcttataacaaacaatatgtaaacagttacgtactcaaaaacagaacaataaataaatgcttacctactcaatcaataaactcagaaggcatccctttcgagaaaaagaaaaaagcattaaaagttatatgaaacatatcaatgcgtatttacaaagtaagttccacctttataaatttaagactatagttcattagtttggctaattttatcgttaggagtttggcaattggcagatgaaacaaattttacaagccctgtaagagaaatttatttaacaaatatggctgcagagcttttctttcttcaaagtctacaaaagatggcttttacgaagtacaaattaaacatttggcattaattaaatgaatgaatgaaacagggtagactagtttattcttctagattactccctacttttcaattaagatgggccaaaacccgattttctcacctaattcaacaagttagaggtaaaggaaagaaaagaggcactctttataaaggaaagaaagaaaacaagaataattaatataagagaagaaatcggtgatcagctcagatacatcgtattgtatatacgaataatatctttacttaatttgttactgtatcaaattaagttgcatttaattgtataattatctagttacgaagactgtctccaatccctctgcttggtattattgttaatatttttaagtggtttgcttagtgttaattattgagtgttataaattacatatgggatatggatttgtgcaatatttgagtgtgtgacaaccagagaaagaagaagaaaaaacaacacataaagagtaagaataagaagaaaaaaaaaagaaaatcaatagtac

SEQ ID NO: 303937 - DNA, 2113 bp, Cannabis indica
aatatttatataatatttaagtaatttatgagtaaataaatattgtgataatatgtatataattttggattttttttcgactaaatttatatattttcactacaaaagtatatgataaaaattatttaatttacttcattgttgctctgataagaattatttaatttactttatagatgctctgaaaagtatcatatcatcttttataataattttataggtcactgctttttgtctctaaataatcactcaatattttgtttataatattcttttaattatctcttgtgattacaccagtactattttattctgtaaagaagcttgagttgagtgttaaaggcatagaagcttgttttgatttgagagagctacatgttttgtcttccaaactcaaatcaatagaggtatctctttgtgatgatcatagcccaaaatatttcgtctcacttacaccagagcttttaatgcacacaaatttcttaaatttacaaattacaaattgttgaagactttgctgattaatcgtaccaaaattactacaacgaaggcatttgatgaatacctttcttaatataaattccctttctttataattaagaaacttgaggtattaccatttcctacatgcaccacagacattttttttgttgtattttttccccgtttggaatactggctttaagagcactataaatagacttaaatagtcctaaacccctttcttttttgtggaaaatgtaattcatttcacgttcaaacttttcttccttctattaaaagctttatacattatgcctaaaatgcctaaaatgcctaaaattttaaattaacatcatcatggattgaagatttcatatccatttaaagtaatttaagaatttctgagatataatttttcttgtaaacaaaattttctttcagcaatctaaatgatctaaactaattttcttttttctatattttcagcaagaaaatagaaaataaattgtattttataacaccaagaagagttctaagaaaatgaatagttcaaatttttctagaaaatgagaaagcaacattccttaaaaaagaaaaatggctacagataaataaaaagaaaaattactatttgaaagcagcctctagtaatttattttttgctcgttgcttgatccttctctcttaaagacattgcacaaaccaagtagattgcatcaccagctctctgtccttaatttgcagcttgctcaactctcatatatatacacactatgatatgatatatatatatatatataatttagatttgatattttgatgcttttaccttacgttttccatttaatgatctaaatgtgtaattatatgtgctatattagaattggaatagatttctgtgtattttattgtaatttattgtatccaatcaatatataattgaaaagtcatcaataacatttaatttattttacgccaaatcaaattaaaattgtaaaatcgcacagtaaagagtctggctttagatgtagaaaatcttgttgatcagttgagacttggatccaaattttatgtgatgggattttctatgggtggtcaggccatatggggttgcctcaagtatattcccaataggtatggcagtgccagttataaaataaattgttgtcctgttttaaattggtgatgttttaattctcaattctatcaaaatatataaaatactaggacagatatcttcttctcagcaccggaggtaaggttcattctggcattcttttatcttgttctctctttaataagattagagttaagttctctttagtctttttgtcattttttcatcaatgaaatggtgtaagtttgttctgttctaatcaatgtcaaaatatatgaagaaaatctttaaagttttatatggtgttgttttcttataagatgtaccatcaattttttcttttgcattttaaattttgtatattctgtttttatttttattatttttcttgtataatcttgttttgatagttgtaagaggaaagagtacggatgaaactatgaagttttcttcaaagaatttgttgtccgaaaatttcttgtttctgtaaagttgaattgttataatgggata

SEQ ID NO: 303938 - DNA, 5543 bp, Cannabis indica
gtaatgggttttatttagggcacaaaacccaacaatccctagaactcttctttttgaatttttagtagtttttcattggtttgaacatgcaaattataagaataatttttttccgaacctaggtttattttgggttgatttctaggataaaataaagttatttaaagcttgttttaatttgatgactgattgtagtgttgagcaaaattgagttcaagaactcaaacttagctcaataatattggttttcataatttttcgttacatatgttgctactgcttgggttggttcttaattaggtgttctggagggttgtaaaaagtttggagttgatttgaggtagaaatgagagttggtgtgtttctgcagcaaaaaaacaatagatcgttttttatccttttttctggcagtgacccagaaaaacaatctgtcgtttttacagaaacaacctgccatttttcaagtagtttttcgaagtcttactttttatttttttctcgatatttagggtaatttcatgctatttatcgataagaaaacttctggttttgagtttaagtccccgggaaggttttagcgagttatttatctgtttcacgtaaatggacagggtctctgttcaataagcaaaatttcttttcaggttgatcgacacatttgaatttgaaaataaggtaagaatagtataaaatgtatatatatgtatatgtgtgcgtgtgatatatatatatttttatgttgctagaatagataaattagtatcatagcagcgcacactatagtattgggtccgcagcgcgactatcgtcctggtagtggtcagaatgaataaattagtatcatagcagtgtaaactatagtatcaggccagcaatgcgagtatagtgctagttttgattgatatttaattccataaagtattagttgacactatcatataacgatacaaactatagtacctagtcgacagtacgagtatagtattagttaagagtgatattatggttaatgatacttttaggtatagactgatgctagcggtacaactatcgtgtcgggtccatagcacgattatagtactggtactgactgatataagatcaatcataccaaaggcaagaacgttcttaatttatctattaagccttgtagagaggtgtattggcgcatagatgcgcaagtcggtaatgtgtatctatatatcgggatggttaaccttagaatgtttagtttcaagacaacatgagcttctattttgtaatcgatgtgcgatacttttgagaaaaaagtattttagatacaattgtaaactttaaacaggatcgctgaaattatgtaaagttatatatttatcaaagtttaatttcaaaagttttaatttatcacattttcaaaaaactttttgattagcagaagcatgtaatgtaattaaaaactagtgtagcgtgtagcgtgcctaagcaactaggcattacaaatgtttaaaatgatttatatgttttttgatgtgttcatgtatcgcatgtaatttgatgatattatatgaattttatgtatgtttttttgaaaaatatttttcttaggcttgttttagtctttaaaatgctttagagatagttattggttgaaaaaatgactaaaagcacccattagtgcatgttgtcaagccccttggctagtctttgggtcccgcgcactcgtgctcgatcggtgtctctctcatggtgcaaatggagttgatggtccatatagttattggtaactattgtttttgttaccaactagtaaccaatgccatttttttatttttggttaaaattttgttttttaattaaaaaaattgggtgaaaattttaaaaaactataaaatattaatattttcaatttcaatcctaaatatcatacctcaattaataaaaaataattttttaattatttgttgtttgttgttaattttagatatatatgaaagtggtttaaatttgaatttaattaagctgtgatataatagaattatattcaaatttaaatttgattattttaccatttttaatacatgtttaaataataatatctaaatattagatatttgatacattctaaaacctaaaataacctaaaaaaaatataatctctctctacagccccatcaattgcccataccttttagccaactctgccccaaatccacccacccgcgcaaagaacgaccacagtccgaccccacaatgcctactcgcacgaagaacaaaggacccatttgtacggagatccttctccgtccttcgccgatctttctccttgtatgaaggactcatccaccgacgcaaaagacccatctaagcccgttccttccctgtcagagcctgtctcttgtctgattcgcctcccgtctcattggatctgcctcattctctaaagagaaaggtattattctaaaaaaagaagattgttgttagttatttttttgtggttgatttagagcgaatatatattgtttgtgttgaaatacacttagttttgatgaatttttcttaatttttgataggttttatatgggggttttggtgttttgaactttctaaccgaaaggaaaatgaaaagaatgtatgttctcaattatttcatcaaaagattctcgataagttaaatggtggttatggtattttttgatctggtgctgtgttggttgagaaaaaacagaaccggtcgtgttggttctagaaaaatgaaatatggtgttagtttttatgtggttgttatttgtatttttttagttttgatatattttttgttgaaatcgtgagatctagttttctagtgtattctgtgtgttcgtatttttctcgacactttttcaatacgttcttgacgggttctcgatgcaaatatcccaagattagggaagacctttatcgataatttttcgatagattctcgataggttatggatatgagtgagaattctttttattgttgttatgttagttattcttggttgactattgatagattatcgagtgattattaatttcgatacgttatcgactgattatttcgataagcatttgataagtttttgatagttcaagtttttacaaaaaaaaaaaaaaataggaaatttagttattatcaattgattattgatgggttgttaaaaggttctcgataaaagcgagaattttattttgctgttgttgtattggttattattgcttaattatcgacatattgtcgacaggttctcgatgtaattaagaattagttttttagttgttattttttgtgattgtctattgactatcaattggccctcgacaggtttttgataagatttagtattgcattttttgttgtcaggtattcattttacttttgttattattgtattgtttaacttttttttgatatcattgataagttgtgttttcttccctctattgtcttctatctatttctcgataggttttcgattggttgtcgatatgttttcaatagaattctaacatttgttatgttttctttcttgaatagcaactgattgttatgagagggttatttcctctcccagatgaagaaacgtatgtaaagacaatcacttatgaaactaagatagtgattgagatgggtgtcaatgagacacatccttaatatgatgcccaagaccttgttgttttcaaaagccatgctaaaaagtagtagaacaagttatcaagttaaactttaaaaattgtaataacaatatccggagcctccatatgaaatattattgaaaaaccatcaagaaatcatcatagaatacatttactaaattttataaaagattgcacaaaccatcgacaaagcatcgagaacatatcgatatactatcgttaaattttaaaaattacaatgacagcatctggaaccttcacatagattatcaaaaacccatcgagaacacatcaatttcccattgagaaactattaaaaaatacatttaagctaaatagaaattttatttagcattaaatataacagaaacaatttaagggatcccaagtaacagtaaactatgcctcaaacatgagtttttcatgtagctttgttgtggcctaaaccgccatagttgctgcaatttcgagattgtagtactacttatttatcactaatttcaaatcatactccaatgggacaacctccaattctttatataaaatgttgtgtattttttgtaaagttgtgtcggtttcaaccatcaatatcatattttcttcgcttttatacgcccaattaaatctctcaatactccaaacaccatcatacaatacaaccagaaatgcaggcgatcttgcaattcaatacaaataaaaaacaattgaattagaataacaaataacaaaaattacaataatagaaaatagtgtcaacaaacagtcaagaaccaatcaagaacctgttaaaaaaaaaataactgttgaaaataataaatagtaaatcatcaagaaacaatcgataaccaggtgagaaatcatcgataacatggacaagatacacaccatcaataaaactatcgacaaacaatcgagaacacgtaaataacatgtcaagaatggttgtaaacgcaaaatcattcactattttgacaaataatcaagaatttatcaaaaaactatcgagaaaggttgtccctaaccttgggacaattacatcgagaacccatcgagaacgtatcgaaaaagcgtcgagaaaaatacgaaaatagtacagaatacataagaaaaatagatctcacggtttcagcaaaatatatattaaaaccaaacaaatacaaacaacaattgcatagatctaccgaaaatagagtgaaccgtagtagcttttcctgccaagttatggcatagagtgaaaccgttgtagggtttcctaccagtttatggcttagaatgaaattattgtagggtttcttcctaacgacgtatcaggtgtaggtatgggcgttagtgacatatgataagaactaggcgtaggtaagggctcgtctgattagacaatgcgatatattggtgtcaagttgtggcacgggctcacctgattaggtgatgcaattatgtaccgggtatagatatgggcgcgtctgattatacgatgcgatatattagtgccaggttgtagcataggctcacctggttaggtgatacaattatatgctatatgggtgcaggtttttggcacggactcacctgattaggtgatgcaattatgtgatatgtgggtgccatgccatggcacgggcttgcctaattaggcaatgcaatacaagattatcagattaaagtattgacttgcctgattaggcaatgttatgtaatgaagatggttaccttatgaggtaacatatataatttatattattaaatgaatatgattcctattattggtataataattttgtactactagatatttgtatattgatgcttattcatagctgttaggttataattagcctatgtctcgggtctttaaagttagcattatctcatctattggtgtcttttgg

SEQ ID NO: 303939 - DNA, 3006 bp, Cannabis indica
taaatacataaattagtagtgagtgttattatggagtcatccatgacaattacttcaatcacattaggcaattagacaaaaccttattaatttttaatattatatattacactataaatatatacatatataataaaaaaaaaaaaaaaaaaaaaaaaaaggtaccacatgctcatttgttcgttacctattggccaaattaatgtatatatatagtatcattaatgtaattatttttaaattattttaatagtattatgttagattaaaatctttaatatgtgcctatattttagtagttataagttattgactattaaatatttttaatttattgaaaaactaatatataaactaaagaatagataatatttctaatttattgaaaaactaatatataaactaaagaatttttttttttctttttagaggaaaggacaatttattaaacaactaaacgattacatggaaatggcaagtcacgctcaatcgcgtgacgagcacaagggggagaaatcacaatccacatagcactaactttgtttgtcaaagtgtaattggttaatacatgagcaactacattcgcttcccgaaatacaaaccgcaccccatatggcagagtgatgccgaagtaggctttgaatctccacaatgagaccatcttcttgccgacaacttacctcagctccattaataagacttacagcttgcaagcagtctgatcgaacttcaaacaaggacaatcgacgctgaatggctgctttaatacactctcttatcgccatcagctccgccaccagcggaatgcttgcataacggaccacagtagctgaggcaaagctaacaaccccctctccatctctaatgaccaccccagtcgctgccccctctccttgaagagaaaacccagcatctacataaatagaaaaacatccaacatgtggctgttcccacctctgttccgcccttttactccccaggtttatccccaataccttgctgaaaatcttgaatgtaattctcacaccactctaatatatccccagctctaggaagacactctccatgaatgaaattattccgaatcgaccaaagatgccaagataccaccataataaactcaaaagaggaagaagaacaaaccttttggatctcgtggaaagccatcaacacatcattcggacgacccttttgaatcacgtcccataacccacagcgcttccacacctccttactcttcgggcagccccacaacacatgagttatatcctcaatctaatctcctttacaacgagaacgcgtaggcaccacttgaataccatgcttggataaaataaaattcctaggaagccaactatgacacgccttccacacaaaatgcttgatttttagcgggaccttaatcctccacaaacttttccaccatgcttccataacattatcattcgattggtgagagaccgccctcatatcatgcgccaaccgatacccactactgaccaaatattcaccattctagtataatgccacatcactttatcctccactccccaatcaccactcaacaacctcaaaattaaattagcatccacctcattgaaatgtgcccttatgaaactttcatcccatccaccattcgctaacttcaagtccacaacatacaattgatgggggaactccggcttgtcatacacacgacaagtgaccggccttggtaaccacgggtcctcaggggccctaactgcattcccatcaccaactctccaccgatacgttcaagataagttttttccccacatcatactccgccacatgaaagaagagttactaccacatttagcatcaagaacaccactattaggataataacaagctttaagaacctgagtactaagtaaggttgggcatctcaagcaccgccaaacttgcttagccagcagagcctgattaaataactccattctgttactaccacaattttttgttattgataaatgagataaataaaactacttctaatatatatacctaattattatttattattcttgtgttctatattatataaaatattatatcttggattatttgattttctaacatttgatatcccttagcaacccttttaatatttaaatggtacttttgaaaaataaatgaaacttctttttcttcacaaatttgaaggtttcgatcacatgcacacttatacatatgtatatataaatacaaactaattattaataattgggtcattgtaatattttcacgggttctatatataaaaatatatcctaacattttgtcgttcttttttttttcattaattaataagtttgtatatataaatatatatgtataggacccatacacagaacagaacaaccaaatatctcattttatatctacactttttagtagttctttttttcaaaaataaaagataacatgatcttgaagaaacaaatatagaaatgacaaatataatattttatgtataaagtttttttcaatacatcaaatgtagttatcaagagagaaaaaatcattatgtgtatgtatatgcaaagaaaatatcaagacaaatatccaaattaaagaaaaggagatatatatttaaagacaaaaataaaacaattaaagattagctggccatgatattacataaatgcacgcaaagccaaataattaaatttgagcatatgtcgaaaataataataaaataaaaaaaaagaaagaaaaatttatatgaataacaaaaaaaaaaaaaaaaaaaaacctatataatcaagatgagaattgaaacgtagagaatatattgtgtattgattattgcaatgactaaaaaaaaaaagctctaactaaatttgtgggtgtacaagtattaaaatttaatggtctttcataatcaatttataacaattagagaacattttctttaaaaaaaaataaagaatcaagattcacatctatgggatgaacatgaattttgataatacaaaaaac

SEQ ID NO: 303940 - DNA, 2617 bp, Cannabis indica
gtgaaaccgtatttttgttaatttttttattgtttttgtgtatttgtgaaataatccctttgaaaacacacacacaatgcaaccttttcgtttcaggcccaacacaaatcaagatctcaacaatcaagctttatacactatagtgaaccacaaatggtttggtcagaatctcatacacgaccctaagaagttgagtcaccaaagagtcaaacaagaccctcatctttaatcaaacaagttcggtcaaagcaaaaaagagtcaaaaaacaagactcatcttttcaaaagtggtggtcggacccaacaaaagaaatgcaacgcaaagagacaccaagaaaccctaataagccaaaccctaatatatatatatggtatctttctctaaccctaatacttcggcagtcacaatacttcttcaccaaaaattcaaactttttcaaacttcttctctcttcaatagaaatagaaactagggttttctcttaagggttatgaaaatattctattcttcttctcctatttcttttctccttttacgtccggacctagagttgtaagatttcttcaagctctcttcttcttattctaatgatagcaagatttctaaatgggttttctacgatttcaaaaaattatttttttcttagttatagccacacttcttaatagggttagggttctaagattttccttgttcttctctacatgttctaccaaaaacactaatcctagaaaaatcaagtcttggtctaaacacactaaacccgaaagaaaccaacctagaaatctctccctttaatcttggccaaaactcaccacacaaaaacccaaaaaaccaagagcacaaacacacacaaatatcagaaaaataaagagattaagatgagaaatacaaatagaaatggtaaagatggagacaccaatttaatctcagagttcacctaatgttactggctacttctccgtcaagctacctcggagcttgaatccattcatcaacaacaggttacaacctttttgatttacaacttttgatttctttcttattttctctctttgaaactaacaaatgtctctcttttgtttttccttacatgaacacacaaatgaactatgcaaagctctctaggaggaactctctcaactaaagcactctctcaaaaattggctctctcttttccttaatgaaaagaaaaatgtatcctttgaatagactatgttttgtgactattgatctagggagggcagagccctagtgacttatgttgcatttgttgcaactgtttttgtttctttgatttgatctgtttctgttgtaagaagtgggtaaagttggaattttgtaacccaatcaatacaaaactgttccaatagtaacttttagatactaaaataatactcaaagataatttagttagggcaataaaatacaagctatggaaaaaatagcattcggaaaccaattaattgcatatattttaaaaccaaatactaaatgcacaaactagttactagtatatatatattttttaaattccacatgtcaaagcaatcaccatcatattatatcaagttaaggttcaaggaaaatgtgattttactattaacctacttgccaaaacatgcacatgcagaaagattcaagaagataaaatccaatgtagacataaaataggaattttcgcaaaaagaggaatataaacttatcactatattgttgactactacaaaatagcaataattaaagcaacatatgctacaattatacatcctctacaaaatgaaaatgaatggaaattacctgaaagtttacaaaagattatactaccaccaaaatcatagaatctaataagaagacctaataaaaaaatagagtgccaaaattggtaatgacatgctcaagatgtggatagactgaatacaaagagacaaacaacaaaaataatcatttcaaaaaaaaaaaaacaaagactacatacaattcatagaaactagtcactttgctataatcataattgataaatttcgtttcaactttcttaaaaattaaatactttgtactaatgacatttgatatattttgatacttaaatttaattgcttgttactattatgtagatacatactactacaaaattaccatatggcttcggtgttgataaaattcacaattgaaggcattccaagagaagtaaaaggggttaaaaacaaaaaggcaaaagaaatcttatggtttcgattatttggctaataaccaaagtcagaagaccgtatatgctgatatacatccctatggctttatggcttcagttgttagccaaataactgaagtcattggtaacttttttttatagtttatatatatttttatttacttccagcccaaggaagaatgattaatattgagaaagaaagattgatttaacacaaataactcacaatgatattaacaacccataattatattaacacaaaaaaaattaaaaaaaaataagagaaacccataaacaagaaaaaaaatggtgagatcacagaaaaatacaaagagagagaaatatatatataaatcttctacggtcaccagctgggctaagagacaccgagagagagagagaga

SEQ ID NO: 303941 - DNA, 2539 bp, Cannabis indica
ctcagcccaagaaactggtggaaacttcattattttcttcagtgagctataacagtactaatggccttgtcaaaggaggaggagagtccttaaaacctatagtcataagtgggaaccccccacttatgtttctgctcctggtcgccgaattgttgctggttcgttttaatctttttatttgttcttacagtcatttgtttgtcaagaaataaaaaagaaaaaagtattttcctttcctttgttgggtacttattgaagttggagcaaagctcgtttctgaaatttgtttcttgaattcacaacccagaataattctaatactaattatctattgaagtgttttacatggattctacacagcttgtttatgagccttttatgttttatattatgtatatatatagttggggatttgcatggagaccttgaacaaacaagatgtgcacttgagatggctggagtgttgagtaacgatggtcaagacttgtgggttggtggagaaacggtaattcattgttattaactttttgtatgtgtaaaaaaatgacaacttgaaaattttgtccctttgctttaccttgcttgtttgttcatcaaaagaaaaatgtttatttatgtcaagcttgtaaaataatgttaattgtccttgtaataatctaggtgttggttcagcttggagatatacttgatcgaggtgaagatgaaattgctattttatccttactgcgatctttggatatacaggccaaatctcaaggtggagcagtttttcaggtatttaaaaaatgttcatgttcatggctactacaaattatcataaagtttgaatcattgaattatgagataagaatttgtgcccatgataacaaactttatcatatacttttttctgaacttcatttttacttttgaaaatcaattacatgatgttctttgttattatgatataggtgaatgggaatcatgagactatgaatgtggaaggggattttagatatgttgatccggggtctttcgatgaatgtagtgattttttagaatactcagatgaatatcaagatgattgggaagaagcttttattaattggattggcgtctcctctcggtggaaagaaaaccaaaaaagtacccaaaattattggggtccctggaatatagtgaaggtagttatgtttttgttcaagcaaattattgtctttcatatttcaacgaactgaaactttgttatgacatcaaggggcctttgggagtgttaaaggcctggcatgacattataaagcaatgaattattgaattgtttgttggtgaatttgttatctttctatctaattaattaccattttcaatattttgacatggtcactaactaagttttccaaatattaggacagagacaaaagggagtgattgccagatcaattcttatgaggccaggaggtaaactggcatgtgagttagcgcgacattctatcgttcttaagattaatgattgggtcttttgtcacggcggtcttcttcctcatcatggtaacaacagttttgcagttttagtgcatttattgatccccataatatgctcatgctgttcaagaaaaagttgagtctttacatgcctaataagagtgttggtttttccacagttgaatatggcatagataggatcaaccgggaagtttctctttggatgagaggtctcaatgaaacagatgatggtcctagaattccttttctagctactaggggctatgacagtgttgtttggaaccgcttgtactccagggatagctcggaattggaggactatcaggttgagcaggcaagtaattcttatatggatgctttagaatttgggatgacataactctgattttaattgaaaatttactgtttatctaaccaattttcatctgccttttcattaaaattcttaacttccttggctcattgaaacaataattttcttaaaaaaaattggtcagataaattctattcttgaggagacactacaagcagttgatgccagggcaatggtggttgggcatactcctcaaatggagggagtaaattggtatgaaaccatagtttattgctgctctcagatattagaaagtatgtctataattttgtgaggtccttaaattttggattcttccttgcagtaaatacaattgtaacatatggcgcatcgatgtgggcatgtccagtggggttcttaattcaatgcctgaggtaaatggaaaacattggaaagataagaactttgcatatggtcttcttttgactatgttttggtccttgttcacaccataaaaggttgtttaatttacaatatgactatgttttacaggttctagaaataagagacaataaagccagagttataaagagcaagagcagtgcatatagtgaacttcaggctgctgattatacatagggatgaaaccatgaaactaaccagttatgattagcactgaatagctttatcaacattttgtcatcacttggttttggaatgttaatttacaaacattttatcact

SEQ ID NO: 303942 - DNA, 2379 bp, Cannabis indica
gataagtggtggtggttgtcatttgagcagatgacgactagcgattaactcgagagagcgactacaaagagtgctaggatattaaaatgcgataaacaaaaataataaaaataagacaaattacaactctaaagttacaataactaaaagagattaataaaggatatttacaaaaatatagaaaaaaaaaacactaaatatgatattttttttaaaaaaaaacctgaaaatataaaataaatcaattattaaggataaaaaataccataacaaaaattaaaatcgtgatttttaatagcaactacagaagtctagttttttttttttagttaaaaccaaactacaaaagttaaaacaatacttgaaataattttgttcatgcaataagttaagaaatctatatattcaaaattggtttcttaacgcattccaaaactcatatataaattttacatacttctcagaactctaagactcgaccttcaacccactactaaagttaaaaccaacacagtaaccaaattaaaaccagttacaaacatctatctcgacaatcaaaccactaccaaaacagtcactattcgataagataaaaaaatagaataaaaatatttgctagagttattatcatcatcagaacaatcatcgaaaaattcatcaaaattattgttgttactagaaagtcttcacagttagacattgaagttgtcatagtactaaatcttagaactaattacgtaaaatataataaaagcaataattacatacagaaactagtttcataatacaatcaactaattatatgacacataaaataatgaaaagataaatcaaatgcgaaaattaattacttaaaacaaatatatatatataccatagaataattttaaacaacgacttataaattaaatcacagaaactaaaactaattacatcaaacaacttagtgaaaatctgacagaaaaatcgattacgtaaaataactaaattaaaaattaactcacataaacttgttacctaaataacaactcacatattaatgtaatatgaaaatcatcttaaaaaaaattgatcaaaaaaaaaaataaagtgaaaaaaacaatatccaataaccagtttattaactgaatcattgtagaatattatataaatagcctacaaaaatagttacttacttacgtctaaaaaaatagtaaaatttgatatgtttgagggccttgaggtttgataccatttgatacatcttagtgcctttaaattcccgattccatactttaccaattctttactgatattgaggatgagaagaccacatcctaaagtatttaaaagcttccttccactaggggttaggatacacaataagaatagcaggagtatggataaataggccttcattgaggaaaatagattcaacattactatcaagccaagtttgatttgccaaaattctatctatcttggagtatattctgtcattaccccgtagcttactactccaagtacgaaaattctcactatactttccatcttccagatgacaagatgaagcacagtcctgaaaagatgtgtaggactatatctgactctgttaccaacttgtctcaaaatctctcacaacaatccaaggatcagttgtacttaaatgctgtaattctttccgtaagatttttcttccatcctcatcattaattttatagacaaaaataacaaaaaaattgttcatattatcaacagtagtaacatagagatgcataagctgactagagtaaaaaaaatacttacattgatctctggctttttccctttatcctgaacgatacattcttgtttcctcctttctttcttcttgtaatcacttgttgaatgtcccattcctttacaattactacaaaataatgggttttcattcataagtgattgcaactaatgtaccacaaccaaactcatctcaaaagtatataaatccttttgcagagacttcaataagaatcctaagatagttgagcttatttcttccttttgttacttcatcttccatcaaagatttttcatctgaccaataattttgaaaagagatttttgaccacagtattttaactcaagatcctctaattggacccaaattggaatggtgtaaatatcttcttttttaaaatttgtgttcagatctcaggcattaataatgacatgccttttattaaagaagatataactccatgcaagaacaacatctcttccttccatacaagtaaatcgaattaggaaaaatccacaagaaagcattgttgggttttatgccctaaataaaactcatttcaatataatcagatttacttattcatatagatcggaaataacatttaatgttgcatggtt

SEQ ID NO: 303943 - DNA, 3353 bp, Cannabis indica
tttgagtttgtagtgttaattgggtttgggttaagattttgaacctaaaccggcaaaaatttttacttttgatatttttttgccaagagccctcgaactcattattgatcaacttaagttttgctcttacttgtaccatgaaaacttaggccttgcaatatggacagggaaatttgaatttttatgtttacattaccttaatttttttcctaaacttatacttaccaatatttctaatatgtgacaattttattgttttccccaaaataccttcttccaattacattaactcctctctttccatctctctccctaaacgtaaatcagacccattgagcccaaggcattcggaccaatcaggcccgaagaatcggacccgtcgggtctatcgagctaaggaatcaagcccatcagaccctcctatatcgggccatcgggttgtcatcttcaaccttcagccatgcccccatcggacccgaccatgggacgggcatcgggccttattgggcccgatcaaaaaaatcccattttcgacaaatctcttcctaatcttcctaaatctaaccttaactaacaaattttacacaaaattgcaacatattattatatttcatgaatttaagcaccaaaaattaaaggaaaaaattgaaaaaaaaaataatcttagacattttgggtggtctgggtggtcggcgtgggtggtctgtcgtgggtcatgtaggccggtcggctacatgggtggtctgccgtgggtgggtggtctgcgtgtgtgggtgcggcaccgagcgagagagaaagagaggcgagagagagagagggcatgtttcaaatgggggagggtaatgtgggaattaaataaatgttatcgcattttactaatacccctattttaagtttaggaaaaaaatcatcccacatagaaattcaaatttccctatggaccagtactatgcaatatgtgctagtcctgtcaatattggttaatatcctaatgttgatatctcaagcatcgtcaatgctatacaaagtaacactagctacaacatcaataatgttagaggccaatgctttgatctacagcaccaatattagggtttgttcattgatttatatccaatgtatttaggtttatcaattaaaggatattgaattttgccaacaggaatttcaatcaatcaatccaaatacgaactcatccaaatcaaataaaaacaatagttagttaattggacattgaattgtatttgattttagacaatctattccacaatgaaacctatccaagtgaatctgattggattcaatgataaatctttgattagatggtactacattcaagttttatgaaaggtatcattaagctcaaagaaagacaaactagagcactatatatatatatagagagacgtcaaaacacccgatcccattcgacattgatagaatcgtcttgtgccatatgtacctgagattgttcggaaaacattgtccatgccccaattaatattgacatattcacttttaagtaaaaaaaattccaattataataatgtacttgaatggatacatgtaacattcacaactcacgtgtcacactcactcacttatatacaataaaccaaaatgctaagaaccactttaaagcatcacactattctaataaattattattaatgcaattaaatattaaatcttatatatttatatttaataaattaaatagaaaaccgctaattaatcaatatatcaaaatccatcacatcaatatataacaatattgctctacaaccaataaccactataaccctaattacaatatacatacatatttacaggtacaaaccatacaaatacaatccatcttcttttatatatatataaatatatatatatataggtgttgacggagaagtcgagatgatgagtgtttgtgttgtgagtttgattcaaaagggttagaagagtaagatcagttacagagccatgcatgcatttctcacccttacgtgtcaaaatccatatctctccttccaccacctcatcaaacctatacatacatataacacatatatacatacataatataatcacttacaatataattctcaactctctcatctacatcatatccatcctctctcttccatttccacaaggtaatatatatatatatatatatatatatattatgtaatgcatgcaatgagttattactttatcttctttacataatttgtttgttttttttttgtttaggggagaaaattattattaataatgaaaatgttgaatgaagaagagaaagtagaatcagagtcggaatcaatgaagttagtaagaacatcatcttcatcgatcttcagtctcactctagatgagattcaaaccaagaataatcgaatgaaaagctttggatccatgaacatcgaagatttcatcgccaacatctggaccgtcgataataataataataataatcaaaatgaccaaattacccccgaggttgttacaacaacaaaaacaacttcttcgttgtctttgtctagacaaggctcgttgtctattccgattccgttatgtaaaaaaaccgtagatgagatctggtttcagattcacaaagaccaagatgaaaaagatgaagatcgtgatcgggatcggaatcggaataaggaggattgttctgagcaaactacgcttggggagatgacacttgaggactttttggtaaaagcaggtgtggttagagaaacgacaaatgtggaagaagagggagaattggatgaaacgacgagggttttgatgaaacgacaacagggtacttcttctgatgagaaaacgacgtcgtttgattgtaataatagtgtgtgttatgaagagaagagtcaaagtcaaagtttgaggaagaggggtaagatgatagatgggtgtttggaagtggtggtggagagaaggcaacgccgtatgattaagaatcgagaatccgctgctcggtctcgggctcgaaaacaggtattaactcgggttttggtaattggataaatgttaagtaaaaaaaatataaaactgttttcactttttaattttttaattaagaatttaaatttcgaaataaagaaaaagtcactttcaatttttttttaaataacttttttttcttaattaatgttttggattccgaccagacccgaacttgaatcctcccacgaccttggcgctgaaccccacctttgactcgaatccgactctaaatctaaatctgagttaaataaaataaaaaaatgaaaataaattttacagaacgcacttttattttctatttttaaaattaaaaataaaaatagttacagaacacattt

SEQ ID NO: 303944 - DNA, 3080 bp, Cannabis indica
gcctaatagcaatgctctatttagatgttattttcatgttacttttatgtagtttttttattttttcgtgttatttttactgaaaaccgtaaaaatatataaaaaaaaattgtaaaaatatattttttttacaaaaaaaataatatcttatctaattatcctttttaattttattaatactgatataacatcttaacactataaatatatatttttttttaacatttctcatttattttcttgtaatgaattaatttgtgtttcagttttataatatacgcaatgaaaagcaatattaagaagttaaaaataagctcatatataatatatttatatatatgtatgtcaaccactaatcatggcacaaagatatgttaagatgtgatttgaatttaatttgtgattttgtgttacttagccaaaagtgtctgatgaggtttgtttgaaagagagaaaattcaaatcattagagacaaaagaaaacggaagcacaaacttggaatctctgccaccataatgaaaacacaaagtttaatgggtccctataattataatacatatacatatttataaacatattcagattttttgaaattcaaatgcttagttagtttcactcattgaccacccaaaataacacatttatatttttgtcactattcttaattattcctcctttattttttcctgccttgtaattttcattcatttaccaccaaataactatagtgtcattttttttttgtcactactgttattattccaattttttcgtggtgaaaatagactttattaaaccttatattatgtaaagtctaagggttagagaaatagacagcaaccatatatatatgctttaggtgaaaagctcatctcctctcaaccaaaatataaagatacttttttgactttttattcatatatccatatttgtacgtacaaatctatttatttttattttatttattgcgtgaatgtatgtgtatattttattctttctttgtatcaaaatattctcgaccacttctatatctaatatctttagtagttatgtatcatactctctctatttacatggttatgagtcttcccacgtatatataataataataaataaaaaggatatatagttttatacaaaaacatatactgatatacataataataatgtctgatcaaagaaaatgcataaaaaacaaactacttgcttatcaacaataatatatataaagaaattaaagtgttaggtttcaccatattcagttagatgatttaacttttaacaatcatatacagtacttaattagatgtttttttttaccctatagaaattcaattaatcaatgtcaatgtacattttttagccactaaaatatatgatcataatcatatgttttggttgatcgatataccaatcttgataacgatctttttgaatatttgaaggaaaaaagaaaaagaaagaacaaattaaaacatgatgatcagcttatcttttcttaatcatgaccaccatgttgtatgatcatttcccaatttccatgcatgatgaagaagaaaatactaaagagtctcttagtttttggtaatttattatatgtttcacttattggctcacaattaaaaaaaaaatatttccttatacatataattgaatttaaaagttgaaatagtatcagttgtaattgataattattttatgcgacttactgtagaatgtggagtaattgattaatatggcaaaatgaatctttaccaatagtctttttaataattggtaatcaatgacaataataatgtagcctttaacttttgattattttttattttttaagtaaaatatatttttcattaaataagtaacaacatgtaaaaaaaataatactaaaaagtaattaaaaccctctttagttaaccaaaatgtgactttattttttttatatatacacaaaaaaatgtataaagcaaaagcaaaattgacttgttatttcttagtttacatcttgcaagcctttcctttcccggaaatttagactttttacaatgtcaattcgccagatcgtctgttaaattcaattattatcactaattgtatatattattataaaaatatttatttttgtatcacgtatacatgtatatattaagatgatattgtgtaaaaaataatggctaatggtacactgtatacaatattaatattgtgtttgttgctagactttgaaaattgaaatcttgtattataatcaataattatatatcatcaaataaagatttccttttctggaattgaagttgatgttgcatgcataacattgcacctaattaatcaactcttattatttaaatttattatgaagtgtgagttgtgatttgaacttttgttttacatgagtgagtgataatttttttttaataatattagcatttcaaatatatatcaaaccaaaacaaactaactaacttttccgtttttttttttgttttaaaacataattaaatttaaataaatataattagttgaaaaatgtaatgtttgagttttaggtttcataacgatcattacttaaaaaaaatgagagtgatagagttaatgaaatcaaatacatcttaatgagggtaataaatttattcaatgagttagtgccacgtgattaaaattaatttgtgtgtattttttttactctttaattaatgatgatgatgatgatggtagaaattcggagtgataaatttgaaaatatcgaaaatgccccttaccctcatcatcatgatatattctgtgtcttataaaaatgattattaattacatataacatttttaaattagacccaaaagatttatgagtgtgtatatatcttcatcatgtgactaatatggtttgtcatcactatatttattgatattctctggtttccaaagcaaattgaaactaggctatcatgaccacacgatccttccttccaaattaatactcttcattatacaacttcaacattaataataacagtactaggttactagtccataacattatttacatatatatatatagttaaaagaaaagacatttccaaaa

SEQ ID NO: 303945 - DNA, 1247 bp, Cannabis indica
tgttttattctattttattacttataaatgttgttgttttaattattttaatttttaattgcattgcaacaatgatatatatgtttatagagtattaaacttaaataaaagatattatttaatttttacttatttttcttcatattcataagttaatatgaaaaattagatatataactggatattcaattaaaaaaccgatctaatctaagaagtaattgaattggattagattttgagatgtaataggatttgatcggatgatatttttttaaatccaattattattggattgaatcggttgatcattgaatttattactcaagtttaatagctaagaactcaaagacaatagaagaaacatattcaaaaaatacattgcaacacaataacctctcccaaaggattcctaacaacccaacttgtactacaacaccctacaacctatcaaccacagcatctacattaatcatcaccgcacccatcacaagaggctggcacttacttctcggcctaacctcatacataagtccatcatgcttcctatcccaaaactaaacaaataatcagctacccaatcttaaacccgatctacgacaagaacaaaagtgtatgcaacacacaattttgcatatactaaatctctatagctaatacaataaaaaagaaaaacctatcttttggtaccagtctatcactagacatgctttacgttgaaatcgacgattaagctattttaaatttaatgtaatcaaagagaataattgcaccagctactttccctgtaatataattttattcaaactttgcaccataatcatcacacctaattataatctgttatgttcggattgtgtattaggtcatattgtattatattatattaaattagattatatatcatatttttatttaatattatgttaaactttaatttatactaaaatattatatatttaggtatgcataaaaattaataccatatataattttttcataaaaaaaaaatactaacatataattttatataaaaatatggcttaaaatacaatataatataatactatacaatacaatacgatataatacagcatacaaagaaactttaatgaattatggaaaaaatcaccacctatatatatactaggtgattgttacgtgccaagccacgtagtgttagttttatttaatattttagttttatattttaattaataattaaaatagtataattatttgaacgattt

SEQ ID NO: 303946 - DNA, 3200 bp, Cannabis indica
atttacggcacaaaacccaacatgaacacccctaactagtactaataattcgttcattcacaaaaaactacaactttactttgctctccattttcccttacttctttttaactaaccttatttttacaaaataaatatttagttctattttgttcttaaagtatgtaattattactaaaatcggttgcaaattttagttagtagaatcgtgtatggaaacgagttgttcattaaaaactcgtttagtacgtcgtgtaatattatattgtattgttttgtataatattatattggattgtattgtatcatattaatattatttaatataatattatatttagtatatattgacttttattaataccccgaccctagctcagacccaggggccggatccaagtctgggctcagaatctaagtccgggtctgtgcccagagtctaagtccgggttcgagtctaggttcaggtttgggtctgagtttgggtcctcgtttaggttcaggttcgaggtcgggtcctgagctggggttcggggttagatttggggctagggttcacatttgagtccggggtctaggtctgtagggctaggttcaggtccgagttcaggattcagggtcgagttcgggactaagtatggggtcggggtttttaattccgaaccctttgtaaatattatattacaagctaatacgaatcatttattatgtattaattaatacgattcatattgtattaaaatttatggtcataataattaatacaatacaatgtttatccaaatgtagtgttacttgttatttaatacaatacgactcttatacgacctaccaaacgagtcctaaaagtcaacttaaaatcaactactaggaagaagttacatgaaagttaatactacactctcaataagaaggggtgaagttcagtctgttatggtcagattttaccaattgtataactgatctgtaaccgaccgttgagaaattataattgtacggttttagcgttcttcacaatttttttaatttttggtggttttggtagttttggtggttttacggtttaaccaatattttttttcaaaaaccaaaatcaagcgccatgttaaaaagctgtaaccgaaactaaccaccacattctataatgccctaatccctaagaacactacatgtgtacttttaaaaattaggttataataataagctaatatttaatcaaatatgtgatttaaataaaactttactaatgaattaaaataaaccaaacataacgttataaaatttcaaacttcagggatcccttttaaattttacaaaagttaccacccgacattacatttaaagtataactttgagatctcaaaagttacataaaactatgtcccgacaacttggctctgctagtcggataaactgctatgtacatttgccattgaagaccccaactcatggctgatctaacttgttctttcccttacatgcaccacaaagtacctgtgggtcacaaaaactagacaagaaaagtaatattataaatattatataccattatagaagtagaactaaataattacatacttcaatccatatgaaaacacgctacacatcacaaaacatacattattaataaatatttatctaataggacaatctttcactattaatttataaagtaaccatttcaatgtcgttgtctaatgagacaaccattatacatataaaacttacaatggttttatgtagagttagaagcttagtggtgagggaggagtggaaaaaagagaaagggcatgagttcgaatccaagacacttaaattattaattgatatgtaataccattatattacaaaaaattgtattgaattgtttctaaagaaattatataatgtatgtattttatatacatgttaataataatatgttaacaatatgggaagtaagaataaataagaaatgagaataatttatatgaatattctcttaaatttaattatatgactcgggctttgtaaatacatgagttgttcgtatatatatatataaaaaaattatattgtaaaactagtatttttgtaatttataatgcagtgcaatttaaaacacgattattaaatttaaaactgcaaactgtactgcgtagttcaatgaaaatacaaactgtgctgcaaaaatttcaaactatatttttttatgcagtatagtacggtggcatagtgcgaacagtttgtgcaatgtggtggacagtttgatgaaaacccttaactagtacaaatgattcattcattcacaaaaaattacaactttactttgcttcaatttttcctacttttttttaactaaccttatttttacaaaagaaataattagttccattttgtttttaaaatatgcaattattactaaaatcggttgcatattttggttagtacaatcgtgtatgaaaacaagttattcattaaggactcgtttggtacgacgtgttatattaaattgtattgtgttagattgtattgtattatattagtattatttaatacaatactatatttggtattgacttgtattaatagcttgtgtaaaactatattatctttactataaactcgaccccaaccccacctcaactcagacccagggtccagattcgggtctgagatcgaggtccaggtttgggtctgggtccaaggtctgagttcgagtttgggttcgagcctaggtccgattctgggattggggtttcggtcctgagtcagggtttgaggtttgtgtccaggtctaggtctgtagggtcaggtctaggttcggtaccaggttcagagtacagggtcgaggccggggtacagggtcagggcacaggtctacggtcgggtccaagtcttggtctgagtccagttgaaggtccggatctaggtctgggtcggggtcggggtccccaactccgaactatttgtaaatattatattacaagctaatacatattatttgttatgtattaattaatacaattcacattgtatttgaatttatggttgtaataattaatacaatataatattttatccaaacgtagtgttacttgttatttaatacaatacgacctaccaaacagccttaaaagtcaacgtaaaatctattgggtatatattaccagaatctagatttactaacaagtatgttgaattaacatcctaaatatgaa

SEQ ID NO: 303947 - DNA, 1461 bp, Cannabis indica
taattaaaagtaaaattttaattaatcacgcttttccataaacctcgttgattagcaacgagctgcacagtatgtttaaaactcacgtaatacgcctatggtcactctctccttttatacttggtatttatctctccattgtatttttgtaaaaaagaaactttataaatattatttttataattagtaaaagtataaatgtttatttttcttaaggatagtataaatgttttttttgggagtaattttaacctaaaattaaaaaatcccatcaaattacctgtgcaactgcaagtatattggaaccaaaattttcatgaatcttaaataaagaagtatatgagaaagtttataattactaatgatgatgcataaatagtacaatcaacaaggcattatatatattttataattaataatgggtagtgagacgtaatatgtaggaccattttgccatgcatgcaacacgtgtgcccccgatcgcgagtggtcgttttgttggcttcaaaaaaaataaataaataaataaataaagaagcctaattgatatgatattgcatatatacgatgtaatatagaatgctacttctactcatcatcatgatcatgataatgaacattatttcatgatcaactgtacatagcatttttactccaaattaattagtgtcatatatattatagccactaaacgtacaacaccattattatcagacattaaataatacactataacaaatatccgttaaacaatcatcaatgaaaacaaggccccgcaaaatacacgttcattaaaagttatatatatatataatatatataaaggtgatcaaattaagaccccgccagcctctgtttctgactttgttcgtttcaaacatttaccaagctgtcatttctataattatatatatattataataataattacaatatatacatgtagaattaataatgagttagctatactgtatgagacatctttttgcataaaagaagcgaacacaaaaaatgcatatattaatttttttctattaggggtgtcattttcctttcatagaaaaaaaggcactggcctttaatttgatttgtgcagtagggtaaaattgtgtggtagacaagacaagctactttctctgtgaattctttatttaggttttttttttttttttttttttttttaccatttgaatatcttataggtcattttatatatgatagtgacattcgaccagtttcgaataatttatggtgggaaaaataaaatttagatatttaattgtgtatgcacttatgcatataataaactaagtaaactattttgaacttaattttcttatgaagagttttattccattactaaaaatttgtaggatgcctatatctattctatataaagtgtgcctatataaccgaattcttagtttttgagaaattcatagtgtgcctatataaccgaat

SEQ ID NO: 303948 - DNA, 2961 bp, Cannabis indica
aataaatataaaattagaggtaaatttgattaattgatgaataaaagaggcatttttcaacttaccccttttaaatatatatgatttattttattttttctcatttttctgagaaagaatttattatattattttttttgagagagagaagttttattgaattaaaaaaatgtttaaatatacccgtgatgtctagtactattttatatgttaatattattattagttcaattaaatataaagacccatataatctaatgtaataacttttagagagtgtcgctagccaatcgcaagacgacatatcaagaggtgttaagttctactggtggccaatagcaatgctcttaagtttattatgctgtgaaatgctaggcaaaattgatgtaataccaaatatgcaaaggggggttttggtgagcatgtcttaaaaagctatggcagtttgttcttttttaactatttttaactccttttatcaagtttttttttttcaatttatttgtcagttattgatcctcttatcttctctttgtttgtttctcacttcgtgtatggtccattactggttctctttcaatggatcgaagaccaccctccactaggtctgttatatcttttactgatcttgaaaaagaagttcaagagctctgctcatgatgacaacactctcttcgccagagtattatccttcaaggaaattaatcgaaaaacttttcaaattaagataagtggccattggcaaggtcgctatccggttaccatcactaatcatcactctggtttgttcatggttacttttggttgtgtaggagataaaaagatggcacttattatggagctttggcactttcaaaatcaccacattgtcttatgctcacccattggtttgtaaaatgtcacagttgattcgttacaccattctcccttttggatccaatttcaacacttaccttttttaagtaaattcaaagccatggatgtatgggctaaaaatattgtgggtacttacttagaagtggatgaagactcccttaacagaggttggggacctttcttacgatttcatgccacagttgatgtatctaaacctctattacgaggtagaatagccaggatacatgattctaggtaagagtgtacatcagtcagtttgatcaggttatagtgtatttttaccaatccaatataaatttcgggttgtaaatatctaacggtaacccgtccaatgaaaaagtagaaaatgtgtaacctacccaataattttcgtcgatttggtcggattaacccgtttaaatcgatctatatttttattttttttcattattgttagtttttagtgttcaaataattaatttaacaaaataaatatataatataggtctttcaagattaaaatggttatagtttaaattaaatattaaaaaataaatataaactgaataaacattctagtattaaatagtatttttttaaaaaaaaatagaataagaaaatatattaatatgtaaattctaaatttcagctttaatattcatatacaatcaaaattatcaactataaatttcaaattaaacactataaaatacatagtttaaatgtaaaatattttaactattaaatgtaatttatatattatattatagaaaattttagtaaaaaatatgtaaatcagtttattcggattatttgggcaggttagaataatattcatctcatcccgcccagtatattcattaggcggtttgaattctttgtaaagttactcgggttgtattttttgtcaatttattcagtttagtttggacggtttatttgagttgggcagtttgtaaatttatttaaacagccctaactcaaggaggaattttgggtgaaatttcgttatgagcgtctcccgaattgttgttttgaatgtggaatcataggccacccttttgaaagttgtcctgtcttccttgcccaaatttacaatggtttagaatcatctttatcctatggacctgaaatgatgggtttcccacttctcacttcgggttatgatcgctacgggcttgatttttctaaagggaatgtctagcttctcatgacacgattgacaaaactattttcatggaggtggttcgatggttgtgggttgagctagtttttgggatctagcttggggttcagctagtttggggatctagagagtccgagtccaatgttgggctttgggcacgagcttggtgtctagtcgtaggtcgggctttatggttctgtggcataattccttcttggtattctctgttcaagggtgtggtgactatcggttcaggggttccttaggagttttgtgatgttcgacagaagtttgatgcttggtttgtttttgttgtgccccttgtgcttagttttaattgattcaattgttttggtttttcttttaatgctaatttatgtttgttaaattattataataatggtgtttcgtcactgctctgctagattagtagagattaatatgattttggtgaatgtagtagagttttctctttattggtgcgtcgatgtttcattgattggatcaattcgcctcaacaagagtgatatctttctatttctcagctagatctgtctattggtcctgtatattgtggtattcaatttttttggatggagcgtcatagttggtgattatgtcatatgttcatttggtttaaaaacttagttttcttcatatctttttgatacttgattattagaggtttattgaatctttagttgaggttgttagagttttctttatttttattttaaatggtttcgtaaatctattattgttgattctgctttatgagatatatgtttatctaatgaattttgtccaatttacttattaataaaaatttatatttttctcaaataagtgaattatatatatatataaaaggttatttcatttttacacttcaaaatagt

SEQ ID NO: 303949 - DNA, 3486 bp, Cannabis indica
agggcataaaacccaacacaagaagggtagggtagagaccaaagagaaggttctgcaactggcagcttcaaggaggcaagcaactgattctcgatcccagaagggatcaacttcttccgatggcggaaggccagcaaggtgaagcattcagacgtctcgagacaatcaggaccttcatctgccacccccatcacctaaggcgattccagccatctcaactaaactgtcaaggtaaaggactgagttgcctcccctacctttggcacctttcatgcttcctgacaggcctgtgtagttgacagaaggggaggaaaaccgactggaagcggtgaatcaattttaccaccagaggcacaattgtgaggttgagaagatgaagaaactgtccactagcatctcttctaggtgcaacactgggttcactgactatgacaagtggaatgaggctgcccctcttatcatgaatagggttgaactggcagagagactccgtcatcgcgttgggaccaatttgtcacctgcaaatctattggaacaaagtgctaccacaagttgtaggctcggtgctgacagatttttcatgatggcaattagggacccgatgtacgtagctgactccgtaaggaccgaggctaatgctataagtttaacacttctctggcacaaatgaattttaatgttttttttgttatttgatttgctcattcttcgtcctttgcagattggtctgatggcaaaaaagaactcttctctcatcatccaattggattatgacctggaggtgctgaaagcggagcatcccaacgttgaccgaaggagagaagaagctgagagagccttagctgaggccactataaaacagagggtatccaaatctctagataagtccttggcccgagagaagaaattagccaaaatggagaaggagcacaaagacaagtacaaagacatgcactctaaggcccttactcgtatcaaagaattggaagccaaagtgtaccaggataagctcgatgtgtggtaggtcaagctcaatgttgaagagaaggagacaaagatcaccaccttgtctcaagactgcgataagcaagctaagattatcaaaaacaagttcatcaatgagactaatctggagaagaaggtgaagctctatctcgacctgcaatagaaggtagaggcagctaaaatagaggccgctaatacggctaaggaggtggagagcgaatttgctgtagagacgaaggttcatgaagaatcccaacagagaatccttgacctaggggcaaaagctccactttgaagggacatcttcaaaagcaggaggctcgacatgtcaaagctttggagtaagccttcgtccattcaatatacactctctggcagcataacaaagccatgataaatctcttgaatgctaaagtcaggtaggaactttttccccaactactgacgctagaggaggtggacaagtcaaggagcgcaccttagggatcaagagtagtcaatcctggaaccaccatccttgtaggtgagaacatggacaactctgcccctccagcctctgaggtacctgtttcaatcgagtctgcgatcccggagggccaaactcaagatgctccaacactagacggttctgctcagccttaacttgtctaaacttttctttattttatttttcttttatttggggaacaagggttcccctttttacatgtgcggagacaatttacacccttagtgcagggctttcttagtacttggtaccacttgttaattcattggatattttcattttatatcttagaatttagttattatttagtgcttctagcctcgtcaggttctagttccaaaggcctaaacctttgatttttgtttttactaaatacttacacttaaatatatattttttttgtgaaaaagtgcttttgcagaagggtttatttaaaactctcaataattaattaacttgaaataattaattttttgagaattttccctttcctgacattcatcacttatcttcaggaattcttcaaacttaacttttaattgaccttaatcaatcgatttaaataacctgaattttacggtatcgttaacctgaattaaccattaggcatgaacctttattttaagttaacctggatttaccattttaatttcaaatatgttaagatgatgacttactttcagttctccgagcctccaaattttaagtcatattctgttttctcacatttggttgtgttaaataatcttcaaatataataaggcaatggcttacttctagtttcttaaggctctagtttcaggcaatagttcctactcttatatttgagcatttaacttagctattttctggcagaaagagaatataaatatcttgcatagtaacatacatgctccccctaaagtgattaatagtttagagttttgatcacttgttatatgatagaactttaaaagaccaaatatgaaatggtgatctttttttattcagatggttcctgccttgaggcgtaaatggaaaataataaaaaggccaagcaaaaattagaaatgaacttgaccaccattattttactgatagtatcgacgcaggtggttagcgttccaggctcttggaattcttgttccatctagtctcttcatatgataagtttcatcatcaatggaaaatacgataaataacaattttatttgataattaattataattattaaataattagttttgaaatttatagtattaaaattagaaaatatggcattactgaaagaaaagataaattgttgaaataaaatggcaaaattgtaactagtgaggcccacatgtgtggccagccactttgtatattttttgcccattattttatcatttttaatccatataattaaatcctaaaccctagttaaaatactattgcaggaatgctctcattctcatccaaccttcaatcaaactaaacctagtttcctaactcagttagacaactagtcgatgagagactcctttcatagtgatttcaaatacttattattgttcttcatcacaatcttcaagcctttaatgatagagtaccatgcccactcatagcaagtcaagtacttaactatagtgcggaagacggtagttaaccaaactgaaggagagaagatccaggttcagatcttgacaatgctttgcaaccgaaaggaaacaagggatagagatctgagcgaaagaagtcaaattattccgctgccaccaatgtaaggttttctaaactttatatgtgtttatttcattattttagagaattcatatttagggtgttaatcaaacatacatgttagtaaatctagatcttggtaaaataaattctagcaactgccctcaaagccatgataatgatttactttcatgaaatatgaatttaaaatgatgaattcgatgacttggatgtgttcatgttagtttatgtgtgaattgatgaatgtttg

SEQ ID NO: 303950 - DNA, 1947 bp, Cannabis indica
aagccaaaagagatttcaaccattttaactcacatgtagtagtggccatagattgatactcggcttccgctgaagatcgggaaacagttggatattttttcgttttccaagagataggagaagaacttaataaaataaagtaaccagtcaatgatttacgagtcagagggcaacttgcccaatcgctatcagaaaaggcatagagttggaaatcactatccccacacagcagaattccttgtccaggacaaccttttaaataccacaaaaatctcaaagctgcatcccaatgttccacacgaggatttctcataaattgagctaaaatatgcacagaataacacagttcaggtcgtgtaattgttgagtagattagacgcccaacaagtcatcgatacttctctggatcctcaaagacaacaccattgatggtggcaagatggtggttctgttccatgggtgtagaaacaggtcgagctccaagtaaaccgacttcacttataatgtcaagaatgtatttgcattgtgaaagaaacaaaccatcctccccacgtaccacttcgataccgagaaaatacttgaggatgcccaagtctttcatatgaaatctctcactcagttgttgcttgaattttgtgattgccaaagaagaagaaccggtgattataatgtcatccacatacacaagaacatgtaaagcaccatcacccttggaatagctaaacaatgagtaatcagcataagattgttgaaaaccaatattcttcaaagcaattgaaagcttagcaaaccaattccgaggtgcttgtcgtagtccatacaatgacttacgtaatcgacacacctttcctgaagcattagaattgaaaccagtatgtagttgcatgaatacttcttcatcaaggtctccgtgtagaaaggcattatgcacatccatttgatgtaggtcccactttcgtgctattgctatagctaaaaatgtgcgaatagtgaccattttagctacaggggcaaatgtttcattgaagtcaataccgacaacttgtcgattcccatacactactaggcgtgccttaaatcgttcaaccgtaccattagattgatacttgattttatagacccacttacacccaatagctctcttcccctggggtaggtactctaaatccaggttttgttacgctcaagtgcatctatttcttccttcattgcttttcgccaacgggggtccttaacaacttctttaaaagaggtggattctgtggctacagtaattgctgccaaaaattgggtgtgtcttgcagaaaacttatcacaatttacataataagaaataataaaaggagtacctgaggactgtgacggagcattggtaggtgatgtgacagtttattactcgaacagtgttggtgatgaagtccttgagtttactagatggtttcttgattcgatgtccacgaccatcctgtggaacaatatcttcattaatcacaacctccccaatagctgaagtggtaccaatcacatcctcactacctacacttgtaagaggtgggattagttgttcattgccagcgtcaatattgtgaccccaagtgaatgttcctcactcccccttggaagggaagtctcttcatacggagtgacatggtcataatactccttactttgaaatacatcattatgggtattatgtaaagagatgtcactagcaaaaggaaattgttattcgcaaaaaacaacatcacgagagatataaaacaccttctgttctaagtcatacaaacgccactgttgtcgagtgaatttcacaacaccagattgtgtaatgttattagtaacaaaaaagaaatttacgtgaagaacaagtgcgagtattcaacctagaatggcgagtactcaaactgggaatgagaaaatattgaacaaaaaattggaaataacaat

SEQ ID NO: 303951 - DNA, 1203 bp, Cannabis indica
taacaaaacagagggtccaatctgtaacttttgcaaaatacagggtccaaaatagtatttacccttaatttgaagcttgaaactatttttacttaggtcttcatggaattgatacagttattttgcttggggagaaaggaatgaagattaggagcagaggtagtcgaatacacattagatgtccaactttttttaatgagattgaaaaaataagctccaacagccagtggttttcaaagaataatctgcggttatttttattggtaataatataagtatgatagatcatattagtagcccggtgatccgacccataaaagggaatatgaacaatgttagcagtgggatagagatccgaccaagcttgattagcaataccccaatcaagtcgttcaagaagaacatcatatctccaagtgaaacagttaccagtgaaatgcaaaagagacatatcgtatttgccaagaaaatgttggaaattattgaaccctgagtaattattgaaattgcctaaaataaagccagggagagagggggcgagcatcaaaaaggacgattcaacaaagtacaaaagttatgtttagatagaattagattgggcaagatgctgagacataagttttgtgtgtaataacaataataaaactcaatactcttgtttttgttttagtttcgtcctgattatgtaattattttctaacaatattttatctgtattgcaaataaggttttatcttatgtatatatccaaaagatagaataagtttaaatttaggcagggagagtatttaataaatgcagctcaatttgatagctgcaaggtatttcatttatatagtagtaggatatagagagaagagccaaacaactctatatagctggatacaattacagaagaaatattctaacaatcctgattttataatgattacacaatcataaagcataataaaatttgtacaggccagcattccttgataaagaaataaagcacgtgctggtgttgaataggttgttggtacagggtgttaggcagagaatcacagtaggtgattggttgataatttgctattccttaacaagagtttagtctaggaaaattataatacataaattttaaaaatattgaccaatcaatgtaaattattgctgcaaaagaaatattaacagtaaaaatatattattaaaataatataaaatata

SEQ ID NO: 303952 - DNA, 2304 bp, Cannabis indica
cggagatagaggacataaatgagaaacgagaatgaaattgagaggtacattactcgtttattatccacccaatttccatctctagcaacattatcaattttaataataataaaaaaaataccataaactcattaattaaagaaattcaataaacaaaacaacgggaataccgtgaaaattttggaaggttcatagtgggatccattttttaatgcatgaagctcataagtttgcctagacttttaacattttgggagactcacaaaaataataaattgtttaaatttacttataattagatgtttgacacttgtaatttcataacccaaatatttatgttttaaataaataaagaaccgtttggaacaaacttttataaatattaaaaataatataaagggatagaaatggattcaatagaatcactattataatacattgtaataatatttttacaatgcaattaatcaccattatactattcatatatgaatgaagattaaactttacacctctatatgtaatcacaattacactattatattatttacgtgcatttttttttaaagatttatagacccacatacaatatttaactgtttcaattttgattttgaaaattttaaataatttttttttttttttaaattgtgtgagtggactttgtaattcatccttaagttagaaagaaaaaaaataacaaacttaattaatgtatcgatataccgaaaatattaatgagcattgttattgggcatcagtggcgtctaacacctttaaattatcgtcttgcgattagtgatattccctaaaagttattatattaaactatatgaaactcgatatttaattggaccaatatcgatatttatacatagaaaggtattaggcaccactagtgccttttaacatttctcaatattaatagataaagagcattgttattaaacattattggtatctagatgcacttcatgtgtccccttttgattccctaaaagttatttcattaagttatatgagatctgatacaattgacatgtaaaagggtgttaggcactactaatgccttttagcatttctcatagattaaaaaataattactataatgatgtaagaataattttaaggaaactgcaattaggtgggttgaagttgcatttcactacaaaaaataactatttttagtgacaaattttaagtaacaatataaattttttgtgattaaatataactattagtcacaataaaaaatttattgtgactagaacataatatttagatacaaattgtcattaatttagttttagtcacaacaagtattgtaattaaaaatatatttattctcaacaaactctaatgtgactaatacttttagcaatggactttttggtcacaacataataatggtgatttataattagccacaattttttacttttagtcacgagttttgttgtgactaaaagtaagtttttttgtagtatttgtcttcaaggagacttcaattacctcatcaaatttatcgtgtgactacagtacacaacatatatatgttgtggcactatagcaatgtcattcatttttttaaaaatatatatttatattattatttgtatttataaaattaatatttaattaatcgcgtgtaaatgaaaatgtactcttatctatttcgatattttcttagtttaataattttttttttcatgttcatgtacattataattttctaagacaactaaaattttgaaaatttttgtaaaaatataacacatcggaaataaagttcaaactgtcaattgcatgtgtgatcactctttcttatcatattaataaataaataataataataaagaatatttttttagtgtaatttttgatattgtaacttgagtgaaaataatttttgacattaaatttaataatggcgtgacactaaacttagtgtatagattggagatcctataattaaagcccttcaaaataaattattacaagtgtaatttagactatatatatagcttgtgccaaactaataagtagtagagaaaaacattaattattacagaaaaccaaagttgtccatggcaaaggaaatgatgatcacttcactctcttaccaaaaataaaataaaatgatattcactaaatcacacactctattaggaatttttatcaaatagttaaccaagtagggaaagtgataagataagaacatatatatagggcaagactatggtaggacctagcaaaagttccctaccggtagggaacttttcttgaccattgattttaaatcct

SEQ ID NO: 303953 - DNA, 1204 bp, Cannabis indica
gttcccgattacccccaccccccctcccccccacccccccccccaaccccacccaaacataagattatacacaccttgaactaacaaatttagcgctgaactaagaggagcacttggtctcaacatagctaatggccgtccatttgattctccaatttggggaacccatgtaccgacaggaattgcaccaattggtagttggagtatgggcaatgaactagaacaatgcttaaaatacctgcaaatacctgaaaactaataccatttgtaaaaacaactacatagctattgtaactttaaaggcacaatcaaaacagcatacattttagtattccagaaagtgaagcaagatgtaacagttggggaaaagaaccgtcttcagtcgatgaattgataattggaacagtagcaacctcattctgtataatcttcagagcaacatctttcaaattatcatatggtccaccctgcataagaaataacacaaaagaattgttgaatagttttctccgtaccactggtagctctgaggacgtaatatcaaatgttgaaaaatgagacgaaaaattaattaaagaaccgtggaaacaaattatcaaactcattttttttctacactttaacctacaaatcacccaaactcatagcaggcccaagttggttactagcagaatgacttaatattttctcataaaaaactttactcacgtgagattgaaattgcaagacaatattacctagtgacctagttctgcgctcagcaacgtttctagagcactaaagtctgcacttatcgtgcaacacaccaaggcacaacaataatcttcataattaagcctactgaataagcatagtaaaattcaagaagcaaaattctcacatggacaagaagtcttggcaatgctcttccatgctcgtcaacttgtccgttcaaatatgcttttccctctttccaagcagatatagtatgtgtttcaagctcttcttctgtcagattagaaccatgattcccaagctaaaagtaacagtcaagttagtatataatataattacaaactcagaaataattttggaaacatacatgtcacggtattattaaatttaatttttaacaaacaaacaaaaaatctgaacaatttcacccatcaaacaaattgatggaataattaaaacaaaaaaaataatcaggtgaaaaatcaattgc

SEQ ID NO: 303954 - DNA, 4582 bp, Cannabis indica
atatatatatatatatagacgatcaacacagctatatcacaaacctcacaacctatcttactacagaaagaacaaacaaaattgactaagttcaaatcaaaacttacccaatagcagttgatggatacactagtactggatcaatttagtcctccaaaataataatctgagagaactaaaatagcaaattacagagacatagaaagagaaagattaagatatgtgtcaattaataacaaattttctaatatacacctcttacccttcaattattaacattgattaataaaatatgtgcaaggagactatagtccaccaaatattgtggtagagaaaaatatatgattataggccacaaagtcaatatcttgaactcttgaaaatcatgtcaccttagacagatcgttatctagtcagtttctgtattaggctcatgttaatttatatataaaaatatatatatatatatttatattataaccaccaattatcaaacaggggaagaaataagagaaaagagaaaatcaaacaaccaaccaataagtgtaaagtaggcatcatcacaagggacagtcaaaattgactagaaatataagacttagtcttatgggaaccacaaagtgggaccaaaacagcattatgatacactacattagaatattatttgttctagttcagttctagaaagaattagaatttagaacataggcatttcattgatatcaaagagaacatttcaaggttccaaactcttcaagatagtttggtatctcagtaatgagtttatatatactcagttactaactaaaaaataagggttaatatcattttagactatatgttttacaaagttactgaatgaaccctctgtttagttaaatgacaaaaaagactgtttttcaaaatagtacaaataagactctaaactcaattttagataatatttttttttaatgtaatcaacttgaagacaattcctaccacgaatagatacagaaaacgaaactatttttgtcacaacacaattgggttactattaagttttattttgacaaaaaatcagttcaagatactatttttgaaaatactaaatccaacttatcatttaacaaacagatggtcaaagcagggtcaaaaatagtatttaccgaaaaaacaataacagtattctaactaacaaaacaactgatcctataggaactaagctgaactaatttgtaacctgaattagaattaaacaaatataggtataaattggtatatattttggtattagatactgttaaaaaaaattattattgaaaaaatctcaaaagaacaaacaaaacttcatcaaatggcttttaccagtaatcaccacatgagcaggttccattcctaaaacgatggaaccgatttgcatctctcaacacaatttctcgttgagaaacctttgaaatatgtttgatagcattatggcaatctccacagactctaagatttttaatcactgttatggtggttgaaggaggacaccttaggagtccataagcaattgctagcttctcactatggtaatacaaagctcgttctttttcctcttcttccacatcaaccaacacgaaatccgtatcggggacatacccttcttctcgaattcttctgattaagtcctcaaccttgtcataaatcaaatcactttcaggatgcgatttatcatcaaccacaaacaaatgcatcttgttcttcacatcaatccagctgaaacccgggtcctttttcacatttttactcttcatctgttttcgagcattactagcctcatcccaacgatttgcagctgcatacatgttagatagaagaacatacgcggctgaatcagatggctccaaaaccaagagctgttctgccactcgttttccagtttcagtgtccccttgaactctacaagcaccgagcagggctctatacattgatgctgaagctttaaaaggcattgatgagatcagattttctgcctctcttacacgtccagatcggccaagggcatcaacaagacaagcataatgctcaatctctggttcgatgccataatctttatgcattgaagagaaatatccataagcttctgaaattaaaccagaatggctacaagctgaaagcaccccaacaaatgtaactctatcgggttcgatattattaccaaccatacatttgaaaagattaagagcttctttggcatctccatgttgagctaaaccaaccaacaaagcattccacaaggcgacatttttaacgtccatccttttgaacaagcaataggcactttctatattcccgcacttggcatacatgtcaactaacgatgtcccaacaaaaggatcggaagcacaatccaactttatcacattagcatgaatttgtctcccttgttccaatgctgtaaggcatgagctagctttgactaaggtagcaaaggtatattcatcaggttggattccggccagcctcatctgatgatatatagaaagagcacgatcctcatcgccattttcaacacatcctgatatcattgttgtccaagcaacatcatcaggtgtagggatatcagcaaacactgtgttagcacttaccatatctccacattttatatacatatctaagatcccactaatgacacacaaatccccatcaaaccctgtttttgaaacatggccatgaatttgcttgccttgttccagtgctaccaaggaaccggaagctttcgtggcagcagctaaagtaatctcatcagccctctctccaagtttatgcataagactcaaaagttccaatgctttgtgactcttattaccaatgatgtacccgaacatcattgcgttccaagaagccaagtcaaattcaactttcttgtgtaaaacaacctcagcatctcccatctttccacttcttgaataaacatcaataagtgctgttgaaacaaatttatcagctattttaccaagcttaactacatgaacatgtacctgtctagcaatgggtaacccttctttaagtgaagaacaagccctcaaaatacttgctagcgtaaattgatcgggtactacaccagtatccaataaatctctaaataggttcacagattcctcctctaaaccactctgactacaactcgaaatcattgagttccaagaaatcaagtccaactcttccatgtatttaaacacttttcgagcaaaataaacagaacctaactttgaatacatattgattagactattagcaatagaaacttcagaatcaaaacctgatttcacagcaacacaatgaatctgtttccccaactccaaatcatgtgtacccaaaactgcacttaagataactactaaagtaacaacatcaaacttcaccattgatctaatcatattaacaaagcaactaatagcaagccttttctcaccaacttgaagatattcagagagtgtcttgttccatacatacacatccgaatcatctctatacaaagataatttagttgagtaagcttgaacctggtccaagtacctaccacatttatcagaaccaagtttgttaatcccagaaataacacaacgcatagtaacatcatcaggtcgtaacccactctgatgaaactcattaaagagataaactacttctttttcaagacccatttccaagtacaccttaagcattacattccacaacacaacatctctttcaggcatcaaatcaaacaaaccacgagcctctttaattctcccgaatttcgaataaatattgacaagagcaccagaaacaaacacatcccattcaagtccaatcttaacagcataacaatgaacagcctcagaagcccaaacataaccagataataaacaaagcttaagcaatggtgccaaagtaagtctactagttgatacaaaatactcacgaagattacgaaaaacatcaaaaccctcttgaatattctcaattttagagtcagcagattgagcaatggcagctaaaatagagttccaagtaacaaggtctctgtcaggacttttatcgaacaggtatcgtgcatataaaagagacccacatttagagtacattgtaatgagattgttcgtcagaaaacgatctgggtcttgcccagttcttatgataagagcgtgagctcgctttccgagtgataagtcggcggtggcgacggcggaacggagaacagaaaaccatggcgaagtggaagaagaggagaatgggagagagtgagaagtgggagtagagagggaagtgaagagagagcgaagagagtatacagatgggttttttatagaggtgataatggctgccaccggcctgaggtcggattggaatggcatttccggtagagcattcttcggacggaggagctttaatataacggctattcttcaaaataataagaataattatgatttttgcccacaaattttgatatatatcaaattatgtcttttaatttttaaagccgctaaaaaactctcatgaactatcgagattattgaatttaaaatttttgtccaattttagtaaaaaaagtctaacatggatgaatgtt

SEQ ID NO: 303955 - DNA, 1873 bp, Cannabis indica
cattaacattttactttttttttgttcttagattggacagatccaatctaattcaatacatactagacctaaaatattagatgaattcgatcctatctaaaaatactagatctaaaatattggataaacacaaattaaactaataaatatatatgaaatacattcaatgaatagaactgatccaatctaacatatcaattagatgttggattgaggatgattgaaattaatcggttcagataataaaatctaacatcgaatatataattggatcgaatctagataggcctaaaaatattggatgtgatccaatgaacacccctaaattatgcgagtactcaaatttcttaaaagtattgttatctatgttttcagataggcaatgtgtgacctctcacaaaggcctaataggcatcatgtcctcaacgggcctaagaaaattaagatggtagtttttcttgattataagggcgaatctggataggggttgttcagattaagtccaacactctgaatctatggcaccagatacgacaaatgtacacttttcaaaagatcaatcagactaactagaatctcaaattagacggaagtgccctcaggggtcatttggaaatggaagctggaaaggtacttgagactgtctatggtcccgggaactgcttatgtgtcacatctatgacacaatcttgaaaattctggggacttgccccctttaccaacctttggaaaggcatacgacaaaaatgagattacctttttgagcatcgcacctcacttctgatattccctttccaaacaacgactcacgaccttgcttgttactgtcaacagtactcttatctatacgactgaatgctttcaagaatcgagcctcacctactcggcccaataagtcaaataatgctcaaatatgtataccaccctattagctagtgggctattttctacaccccaaaacccctagttaggcccaaattcgttcgacccatctatcatgattatctataaataaagtcattatctcctccatacaaagggttcacaaccttgagaaatcacaaaaaagtactagctagagctgtaaaaactccattactaaaaatttataaaattatctcatggactaagactcattaatgtatgaaccacattaaacccgtgtgttatttttctttctaatttcttttcttttctttagcttaaatctcttaaaatttcattcaaaaaaaaaaaatactcttaaaatatttattagtttttaaaaatttcgataaacaaatataattcacataaaatttatatttatttaataaaacttatagcaaatttattaattggattaaatgaggagtttcattatattatatataaattgaattgaatgagcaccttacatacaactgacaaatatgcttcaaatccgattcacatattataactctagagcatagagttatcaaaggcacttaatttagactaatatatacatgatttgtgtagttggatgatttgtgttatttgtctattttgtatttatttttatcttatttgtgagtagtaattttatcaactttggtgtttatttttgttggaaatagattaaatatggtccatatatatacatgaaaatgatcttgtggatgtaagaattcaaaatgctcactttggttaagtagaaagactccataatggacttcacatcatttctttgagttggatggttggtggcttataagtgatatatgaggtgacctttttttttaggatatatgacaactgattttcattaatccacatcatatttgggtctccggcccatacgtgcatctccaaaaaaacttaggagaagttgaaaaatatccaatttttt

SEQ ID NO: 303956 - DNA, 2659 bp, Cannabis indica
taactctagtctctaggtttctcttgaagaagaatgaagcttagagagtattttagcagagcttcgactatgtaaatttttgtatcccccttttgtgaagaaataaaggggattatataggctaaagtacgggtatggacatacccatgacctgcctacagttttcagtaaaaagccacccactactcaggtaaatacataagaataatctattaggcccctaagaaggttcttcctggtggggcaaaaggtccatacagttgggaccactttttgtgcaggacgcctgttgggcggagattgcacttagtaataaaaacccttagaggagccgttagtcagaaaggtgtgttcagaggttatatgtgcactaccattgtctaacacaggggataagatttgatcttgtgtcaggaaagtatagttgtcacaagagtcattcggctctagcttcatgacaatctccaattttccttctacaattagcatctgccttctactcttaatatggctcacaggttttaccctgtaaacacagttggttttgtctttcctgggtcccagaggaatgaaaaggcttctgaatcttggatggtgattttcctttggatgaaccttcaagcttaaccctaattaggacctctcccgagtttgtttagtttgcccgcgactttctccaattaacgggacataattggttgttacctcactcccaaaaatagctacttttagtgacaactttttaggtacaacataatttttttgtgacaaaatgtgggttttagtcacaacaaaaagtttcttgtgactaaaatatagtatttagctacaagttgtcacttatttagttttagtcacaacaagtattgtgcctaaaaaaacattgattcacgagaaattgtaatttttgtgactaatatttttattcatggactttttagtcacgacatacgagtgatgatttataattagtcacaacttcattaattttagtcacaagttttgtgtgataaaagtaaatttttttgtagtgcctggatcattaccttccatattttgtcacgtgtccttcatccgaaaatacgaataacaaacgtttatgagagacaatgaatatttatattcattgcatttcatcacaattaattggttaatattctatatatggttagattacgatttaccaaataatttatttccccatttaattttctgaattaattgtcaaaatatttttacaattaatgtggatcaaatactgatcgagtatcacctataaatatagggtctcgatccccgagctcctcactcattttgtgcaaacaacaaattctatctaaagagattagagagagcttggaagcccaattactaaatttgaagctacactgggtatttaagctgaaagatcaattgatggaagtattacaatctctttcatagtttgcatgtatgttagatttgtttatattactcgaattttatatcaattcttgatgttttaggtttatttaataatgtctagcagggattaattttctgctcctttgtgtgtgtgcgaattgtgcaaatcagttggtatttggaagtctcacgttgtggagctccaacagtgacacaacacgttggtcggatggttgcttaggtgtggctacagttgacaacttttgatcctctagattagcttcaaaagagaggaagaacttaaaaatataaaactaaatatgggatttaaaaaaacatttacaataatatggtatacctaaacctataaaaaagcacaaaaacaataaaattccattaaaaattagacaaaattgaatgtgagatatttaattaaaagttttagaaagtaggagtattaagtgtaaatcctacctaattctatgactaaaataacaaagttctcatcaacttgctttttaataaaacaattaaaacgttaagagttttttgcggctaaaccctcccaactctcattttactggcatttaaccctccaatctcaaattttggtggtaacaccttttaaacgactcatcagttaaaaaatttaaggtgtcatccatttagcacagttaagtcccaacatggattggttatgtgtatatttttgtacacgtgtcccatttatattgatccacctaacattattatttaaacattataaaaattattataaaatttattttaaattaataaaacattaaaaattaaattaaattaaattaaaccaaaaattataaaactcataacccaaaacacccccttatcttcctcaaacccaccaccatcgaaacaaccacactactacaaaaaggggttttcgcatcggtcaacgcgtctggtcaaacttattgattgacgcaaaagtcaaccaataatcttttacttcatttatccacacacgtaaataatatttaattagcatcgattatctattcgacgctaaaacaataaacgaagcaaaagatgaaatataaaaatatatgtatacactattagcggcggtctacaaccgatgcaaaaagccattgtatacactattagcgtcggtctacaattgaagcaagaaggcattaaaaaaaaattagttatgggctttggcccatctttaaaaaatcctacttataaatatcacaacttaacctaattccat

SEQ ID NO: 303957 - DNA, 2419 bp, Cannabis indica
aaaaagttatccatgaatttctcataaacgcaagaattcagttatataggcacactttatatagaatagatagatatattatgatgatttgatattccaattctatatatgacgtggcattcgaaaaccctagctctaattacgtatccccacatatagtccacctcagaattcttttcatgaaaattaagtaattatattcctttcattattattattattattaattaatactattattatttcattttattataacagttttgattatataattaattgttagttataacaattattattaatctagaaacttgtcggttagcatatcaatttaattagtataattataaagaccagcttaactaattgtaactatatatatgcttaattatatatatcttgtaattaattaaatcatgtaattaattattagttctaaacatatagctacacttgactagctagggattttccttcgattaattaatttcttgttcaagtatatttatataaattaatttatatgtagatatataggttggggaccatacaaatatacataggtatgttacttgtaatatatttatatatatatttatgttatatatattatgacctacaatttgtaatttaattgaggaataattctttctaaaattcgaaaagttccatggaaaagttggccaaactggtaggtactcagtttgaaaatatatctcattgtgttgaatatcattaattacataatgatataatatttaatataattaagagtgttattaataaataattaattatctttggaataattaatagagactgataataataataattcaaaactatgagaggcttatatattgttgcatatatatctattgatattcaagtgatgagaagacattatttatttattttgtttattgtaataataatgataataataatagataataattaatatttgggatgaatactgctttggatttattcaaataattgcaagtaacttgctggtgaggggtcacttaatgttgccatcgaactcaactgagtttggccatgtatgatcttattgcttctcctttgaaattaccctttttattaatttatttattataatatttttaccacacttttatctcatcataaacaatattaattactaactattttatgatgtcacatcaacatagcatcaaggtaaataagaagattcctcagtgacaacatctctttatttatatatatatatagtattgttattagtatatcagtgggtgcttaactacttatattagcacttacacgataaggcacaattctgagcttaagcgggttaggcttatgtctaaagcccacctagcccaaggaaaaaaattttcttttaaaatattatagaatatcgctaacaaattatagagtgatattttatcgtagtgttaggcactatgagtgcatcatagtaatgttcttttgaaaaatatcaattttttaaaaaataatggctctaattttttttttcttgtagtactctattaaatttcaatattgtcaatttttttttatgattgattagtaatattttttcaaaaaattattattttaaaaaattatataaaattcgataatgataaaaaaatgttattaggcacaagtaaaataatattccataaaagaagggtttggatatatattacattagataaagctaagtagttttcctttgtggggtaagttaaaagtggaattattaatttgattgaataagctagctagggtttggatatatattaatactactatatacatatttatacatgtttttttatatatagatgtattgggttctaaagctaacacgatacccaatcaagatgtggttttggagtgtcctagacacaaattattggaagcttatattttaattacttttagacttaattataattattattattattataattatgttaatgatgtggacgagagctagggacactcaaaaaaaaaaaatcatagaatcttataagactgatagatagagagatcaatcgatcatcagacattgatttacacattaaatttatataaatgtacacctaatagaaataataattgacaaaaataattgatggaaataatttttctaaaaattaatttctttaaccaacattacaaaaaactactacttttagtgataactttttaaccacaacataaattttttgtgactaaatgtgacttttagtcacaacaaaaaattatttgtgactaaaacatagcatttagacacaagttgtcactaatttagttttagctagtcacaacaagtattgtgattaaaaatacatttagtcacaacaaattataatttttgtgactaatacttttagtcacggactttttagtcaca

SEQ ID NO: 303958 - DNA, 1359 bp, Cannabis indica
agccagatgaatcccgcactccaaggcgccggggtagaccaaggaaaattgcttcccctctctctgctatcagtcctacccagaatcgcaagggaaaagagccctctgcctcgactaaactctcctccactcctaagaaatttaaaccgagagcagcaaaggctaagggtgagttcttctccacaatcagaaatcaatggcatgggaaagactttgatttgaaaattgatcttaacaaccactttgtggtgatcgagaaaccacaaaaaccatcttcctcatgccaaattcatgaactcccagaagaacttagcactaatgctatagattttcgttttggggcctcggagacttgcccgcaaaagtctccacagtcgccatgaaaatcctagcttggaactgtcgtggtctcgggagttccacgacagttcggcaactggcggcccttgtccgtcaacaccaacccgaaatgcttctaatttctgaagctcgtatctcactaagtaagttctctgctatctgtaacaaattgaatttctctggtttccactacgttccaccagttggtctatccgggggtattggtctctgttggttacaaggagtccattgtaaaatactttctgcaaataaatttgtcattgttggggaagttagttctgatcccataggagataaatggctcattcttggcacctatggaccccctcatggatcggataaggcagaattttggcactcaataggggacatggtcctccttgcaacaaacccaattctcattctcggtgacttaaatggtactttgcaagactcggaatgcattaactatgtcaatagcagcaactcctcccgttatgcctttgatttcagaagaatggtgaaccgcactggccttatcgatttgggttttgaaggtcctggctacacttggtccagaagaaacaatgagactccgggtgcaggggctatcaaacgagccaggctagatagaggtctggcaaccacggattggagaattctattcccagcggccattatcaatcacctatcttcttctgcatcagaccaccgtcccattattctggatacaaatgggggagtcatgtgtaaaggcaggctctttaaatatgaaaacatgtggaaccgggaccctagatgtttctgggtggtcagagaagcttggatgaagaggctgcactccaaccctctgataaatttccatcgcaagaccaagaatactagccgcaagttgagacgctggaacaaaactcatttcaaaaatcttaagttgcaaatccttgaagccacttcttctctaaaagacttggaactgagggacccggataacgtaactca

SEQ ID NO: 303959 - DNA, 2866 bp, Cannabis indica
aggcaggatagactactaggtgggcaggaccagccactggtgccactcccaggtgctgatgatctgaatggagcaacatttgcatctgcggatgcaaatgttgcagaagactacgatgttgatgagcaatctgactcggagtaagttgatgcaactttaactttgtccatgtggttcatgttattaccttgactatatcccttgacattttatcttaattgaattctagtaaaatttatgggaacatcttttcctttcataactatagttcttgcatccatggttcaatgaattagtcgaattcattgttgattctaatcttatcggaatatagatttgttaatattcatttccattccgtaccatttcagaaggtacagctttgttcttcgcattgtcctcttgctggtggtggcatggatgactctacttgtcttcaactctgccttgatagttgtaccagtttcacttggaaggacaatttttaacactattcctgttcttccaataacacatggaattaaatgcaatggtaaattgattacaacttaatatatgattgctttgtttcataccactttgccactggatttttaattttttctttaatttttttgttagatctatatgctttcatcattggaagctatgtcatttggactgctatagctggagtcagatattccattgagcatgttaagacaaaaagaattgcagttctgtgtggtcagatctggaagtggtgtggcattgttactaagagctttgcacttctatcaatctgggtatgcatcatcagtgttttttccccttcacaattcagattttgctgtcttaattgttttttaacattgtcatcataatctgtcatgctgcagatatttgtcattccagtattaattgggttactgtttgagcttctggtgattgtaccaatgcgagtgcctgtggatgaaagcccagttttccttttgtatcaggactgggcactaggtcttatttttcttaagatctggactagactggtgagttttttttagcaattatttaatgtagccaggataataacttttcacacacaatgattctaaaacttaaaaaagttagtttagctgcagttaagagatagaacatctttctttgtaattgagtatgtgttctgtaagaaatttgcattattctttcaatggttctgaaacttaaaagaattagtttagctgcacttaatagatataagacctttttctttttagctgaatattgttttctgtaagaaatttactttatccttacttggctttgtctttaactttgtgatgacccctttttaattaactaatactattagaaactgtggaaaggatgaatattgacatggattggtaattgctggttaggtaatgctggatcacatgatgccactggtagatgaaagttggagaataaaatttgaaagagtgagagaagatggtttctcgaggcttcaaggtctatgggtgctacgtgagattgttttcccgattgtcatgaagttgttgactgccctttgtgtcccatatgttctcgccaggggggtgtttcctgtgctcgggtacccattagttgttaattctgcagtctatcggtttgcctggttaggatgcctgtgtttgagcgtcttttgcttttgtgcaaagcgattccatgtctggtttaccaacctgcacaattcaattcgcgatgaccgctatttgattggccgtcggcttcataacttcggggaagaccatgaattaaggagaactgaagctgaagctgaaacctcaactgaaatggaaaactttgatatgcaacaaggtatggctctgattcaagacggtgggctgcgatttagacacgctatccaacatgaagcttaataattagggcgtttatataggaaaggaggtttttgtgtttgatcttaggttgtgaatcgttgggatgtgtaattgtgtatacaccatggactgtatacatatatatatatactcccttacgagtgggtgtataataggggtcgcctgaatactcttctaactttgagtttatggcttgtgcatttttaaagtagtaatttaaagctaatgaaatcaagttcccacaaaagctgtacgacttgctgtacttttcttagcgttcaacatttttttttatccttaataattttgaaaattcaattgaataggttttttattctaatgatgtttcttgtaattattatttgacaaggacgtgtgttacatgtatttaaaaatagtaagtgttattttgttctctactcttccattctttgcactttctaatactgtttttattcttctttaaaggcaaaaacttggttaacaaggattacaatacagatcaaatacgctatcgctccaagtcacaaattgcgccaagaatagtgatgatacaaattaatcctgaataagacaactaatcaaatcttgtcgcaaacactgccatagaaaataaaagaggaacaatattactgaataaaatttttaagttgagttgaggactggtttttcagatttttggcgacactgtttaagaatgtgcaagcagtcggataaatgtcggtcgtcttcagaatagaatagcccattcgtacattctctaataatatcactgctaaaaaattatatcggatgggaaaactgatagtaaaaaaggatgtatttctcccgctagttttgatgcagtataaaaaaatgcacagaaaaataaatcgagaaaaaattcgttctaaatggtaggaaagttggatcgtgactaaaatttagaggagaaaacacctgtttaccaactaattaaatacgtttaaaaatatttttaattaaac

SEQ ID NO: 303960 - DNA, 2551 bp, Cannabis indica
ccaatcaaccccatttttgacatcttgaagataatataccaatttagcttgggagccaagtacaaagggatcatccttgtaacattcatccttgacaaacacacttgtaaaactatcatcttccttagtcttactagtgttgaaccatttacacttgaatagtacaacgcaataacccattaaatacttgaattcaataattccttgcagttctccataataattatctccttcctcatttggaaccattacactgttattttgagtctttaacttttcatcacgttcatggatgataaatttgaccccattaacaatcatccatggatagtaaattactgtagaacttggtttgttttcaagaacatacaattcgtcaaatattgttgttggagaagactcacgtaaatggttgatctacaatgtcaatgtacttaagtcagattaagagcgagtacaaataacgtgttatgtaattaatttaagtgttttatggattcatagtcgagttttaaaccattgagggaattcaacttcttatctatgcttaagatttgaactatcactttgtcttttcaactcatccatgtgctcactatgattaagaagacaagtcaattaataataaaaacatgaatgataaataaaagttgaaggtaggaaattaatatcaaacatgcatgtaaggtagttggatatttcagcacagttgttcaagatgtaccactctgctctttgcttcaattgtgaatgtagcagattagttgtttttcccaagtagacaaccaatgaccttgaacattgaaaactcctgtctaggtcgagattcaactcgatcattattccttttaggtcgattaaatcgagtttcaacaccccaaaagttcattgaacaaaatgttaatgcctcattaaccatgtaagcttcagtaatcgaaccttcaggataagaacaattctaacatattatttgtacaccgccatacaacgttcaatatgatacatccatctaaagtacactggaccaccaagtattgcctcgtttggaagatggataaccaaatgcaacataatatcaaaaaatgcaggagggaaaattatttccaatttgcataaaatagttatgatgtctttatgcatcttcttaatatctttcacatttaaagtttgcgagcaaagttgcttgaacaataagcatagctcagtaagtgtctttcgaacatctatcctcaaaactgatctaattccaacaggaaaagacagttgaatcaacacatggcaatcatgggattttagcctagaaatcttgtcatcctgaaaattctatgttaaattggctgcaaaagagtttttgtgcttgcagctctctcgagctggcgccatggctgaaacaagggcaaaaactcaatccaagatccaggctactgctaagaagaagaagaaacgaggtccgaactcttcagctgatgtgaagaaaactaagactatggaagaaattttaggggctgaacccctagaattctctgatgatgaaggtcattcgattggggaggaaacgaaactagatgaagatgatgaaagaataatagatgtgtttatgcctccgctatcccctaagacttctttgaagacaattcagaggcaagatgctattaaagaagatttcgcaatgttcatggcagcaaatcagaggtgcacctctgtcgttagtcaaggtatggatgcagtaccacctgttcttcaatcgggaggtgttattcgaaatcttgaatcagcatatgcaacacagagtaaagtgaagatcacagctgatgacattcaggaggaggtggacttttggaattcctcgatggtatgctataatctaggagctaatccccctctgacaattctagaaggatttgcaaggagaatttggaaggacaaaatcgataaagtatatatgatttcttatggcatcttccttattagattttttaacattgaagaaaggaattctgtgttgaatggaggttatacgttctttaacaagcgtcttgtcattatgaaaccttgggatccaaatgtgaactttaagagggaagacgtactgtaccaatttggattcaattagaagatctagaacttaaatacagggcgcagaaactattgttcaagattgtagggcagattgggaaaccattaatggtggatgcagtgaccaaagagagggataaactgaatttcccacgagtgctgattgaagtatctatgacacaagaattctctgagttagttgattttgaaaatgagtttggttccaatgtaacagtggctatcaattatgagtggaaacctatcacttgtgctcattgcaaagggatgggtcatacagccatggattgcaggaagaaagaagggaagaaacaggaatgggtagtcaagaaagatgcgaggaaaattgaagagaaacaatcgagtcctgaagtgttccaaacagtagtgagaggttggaaggtgaaacctactgtcgatgttggaaattattttagcaggatcttagatctactca

SEQ ID NO: 303961 - DNA, 2778 bp, Cannabis indica
ttgatttatgtcttccaaacgcaaggcatggattaaatgaaaggaagaattacctcttctagacgtactcgctcctggagtaccttaatttggtgcaaccaccttgaatcagacttcaagttcctgtttttcacttagaggttctgaatgaagtcgaacctagttttccaaccattattagtcttttctaatggccttctgcgcttcatcagcaataatcttcacaatcactcctttaagccctagagggctacctaaagtagatcattagtagagtctttggcatgaaaggcatcaatgctctgatgaggagccagcaaaccaacttgcctatggttggtcgtagtgataagcttttccgcctccaagtcctcagatgaaaaaatttggtatagaatttgtctaacctccatgaaaggagtctttgctggacgagtgatgtatctagaaaaaaaggatagaaacgtcctaattaaaacctaaatgtggaatatgaataaagaattgaagtagagagatttgatttcacttacttgcaatactaagattcaaagaaaggattggaaccctattcaacgggaaacccgtggtgaagaaccaatatttattaaaatcgttactatgttgcaccgagttgacttgacaaatcaaggacctagaatacctctcaagacggtagaagcctgtcttactcttattctttggcataggatgaggtttgacttaataacaatagaggagttatttcagggtaggaacgtctattttcttcacgttgtaaagcaagtaccatcccgcaagaagtttatatacttgtggaatgaattggaagggggctatccctactaccacgcagaaatatgcgaagtatatcttgagtagaagatgcactccaatttccatgtgggcccagctccagatgataaaaccaccatccgtgtatttgttgggtgattctcctcggatggagagcctattccagaataagcttagaacactttcgaggccacaattcggctcatacgtctagaggttgctgtaattctggaacttgttttggtactggtcaatctcttagtgggaagcattttatactaccccatgggctgcaacttcctcctctacaactttaatttcctcatgttggtcttactccgccatgatagagtagaaaagattaagaaagaaaatcaccaagcagtaagatacccatactaaagaagatagcagggacaaagagagtcctcccctataactacttggagaggtccccaacggaccctttatcctggataaaaaacactcaaagagtatcaattctggacgatcagatcgaaaacatagaaggccaattgaaaggaaaatcaaatatcatctggaaccataagtgtcccaaacaggggcaacaaatttagccaatcttactgctaaaatttggctatttttactagaaatcagaaagggcctatttttcacactcagaatctactcagtattacaaacacaatgtgcaaaagctccatattctacaagagaatcagtactactccaaggcctaaattttatttattgacagcatacaaaaaacatgcaatcttcaataacagaacaccagtttcaaacattaaccaatattcaaaaaatgagaaatgaataaacatactttgttaagaactaggtaatgatgaagaatttgaaggaaatagaggccttagagatcaaacactgatgtcaaaggagggattaaagaaatctcaaatatggatggtcgatcaagacaagcaacccttggttgaagggcatgaacttggctgataagtttttcaatctcagcattgatatacagtatcctcgatgatggagaagaatcaacaatcagaattgggggtggcactcctagattctttgcttgcaaatctgatgaagaagataaatacaatgatcgatgtaacgctccaaagctgttttatttatcctcgccttctccttgcaggttcgagcttaatttgaaatttgggtagaagtgataaacaaacctattcgccccatatttatacatacaaattgtgatccgcgtgattccaaatcaacgactaggattaacacaaccaattgctatttcatcagacctcgccacatgcaccttctcagtgaaagttatctccatgttttgataacgcaataccacatgttgtactatttcaaaaaatggagacttgttaataacacacagtatcaatatgaaattcctaaaggtcccacccttagcttccacttgtccatctgaatggaaacgagcaagctttcataaccccttgagttctgaaagcttggggctaaatgctatctgtatttctaaattggtaaatatggaattttgtgaataattacaatgtatacattctaggcccaatagtggtcccaaatgaaatattgggccgaacccataagtagtcagtccttctggataagtagacaactcgtccaggtgagtgatccatccaacatggcctacatccagaagatattagacagtgcatccgagagaagtgaacatagtgtatctggaagtcaagcacaaaagcatcctagctcattacttacaagatcctaagatatcgtaaattagttcccaaggatcttgtctgaagatcgtatcatccttaatatgtgaagatagtaattagcaatcaagcatttaatgtataggtttttctccatgaagataggacatgattttaggcaaatatcaacatgatgtggcatccacataagcat

SEQ ID NO: 303962 - DNA, 1615 bp, Cannabis indica
cttggatttggaagctcaaggctagggtataaccactcttctcttctctcttcctttctgaccagtgttctgtgttagatcttaggttatttgctttagtttccagtttttataatgttgtagagtcggttgatcaaaggttttaggagttagttacaatttcagttgtaactaactactaaatcttgatccactagaggcgaagccacctaggatcgagtcaacttgttttgtttctgttgtatgttgctgatgtggatatttatgtgtataagggactggttataagtagaatttattcaacagatgactattattatcagatgatttttttgatttatctaacaacatgcacggtctcaaatatatgttcacgaaagtgggatgacgtgtcatgaagtagacgatatcagataaaataaaatagagaaatgctagagggcattagtggtgtctagaatcctcttatgtgtcaatatcattattggtccaactaagtattgggtcccatataatttaatataatagcttttagggagtatcgctggccaatcgtaatacgacatgtcaagaaagtgttaggcaccactggtgcttaatagcaatactcaataaaatattctgacttttagagatatgcaagaagatcagtgaccaagataaaatctagtcgcatgggattagaaatatgcgatgtaataaggaaggtaagaaaatagagacaactaacatagttgcgacatataaccttatataaagacaacgtacgtccttgtatcatcattctaaatgactatttagtatgcgacaaattctatgttatcggtatataaatacccaatatgcaatcaccatactcgcaagcattctatttaacttaaatccaaatggtaaaaccattcgtaatttgtttacaattaatatatttatttcatttaatattattagtataaaaacggtcacctaatgatcggttatgtaaccaaaaagacatgtcttctatatatataaaaggatgatccaatacataatgaacttaatcacaacttttaaagaatagtggactcactacaagaaacttttaacaacacaaatttacgttggcaatactaggcacaatgcaccagtaatacagacccaaatactcagtttgtaaaatagttttcactgacgcaattgccaactgcgccaaccaaactgagttatactaacgagtttaagcgctgacaaaaattagatcgtcagtgttaagtgttcgctaaatttgcccattggaattggatcgtcagtgttaagtgttggctaaatttgtccattggcaagtaaaatgagttttgccagcataattctgcgtcggcaaaaagttggtgcgtttttccaattgacgggtaatatagttttaccagagtaaatatgtgtcgtcaaaactattacccactaattttaatttggcgggaaatagatatgtcaccacacttttgcgccagcaaaactcttacttaccatattttattgttggttgggttagttattttgtcgacgcaattgtgcgctggtaaaatcttacttaattaatttttttttaagaaatgatagttttgttgggttttatgcc

SEQ ID NO: 303963 - DNA, 889 bp, Cannabis indica
cttcaagtaaaaaaaggaaaagggaaaaaaaactaggaaccatgtcctactatttgtattagttaaactagtttaagaagacttagaagagaggtatatccgtaaattgtattttgtttttttattagttttattaaagaaataaatgttatttacttctttttttaattttaaatatttaataagtatttatattgaatatacaagcaaatcactaacctattgacattaatagttttaatagactaatatagtaacagaaatacaaagtgttaaatccatcaaggaaaaaaaatatagtatatatgaactcgaaaatattaagtatttatattgtaaataaaatttaacaaaataagagagctaatccgtcaaaaaagaacatttgatatataatacaaaattaaaaatataagatatttataaacataataaaatacaatttgtaatttaatcactttaatctttcatattatttcttggatgggaattattgcttgatgtttcaaaaatgtcaaacaaagacaaaaaaacatcaagagagagaaatcaataatggtacttaattatccaatatctgcaaatccaaacacttagaacatttagaaaagaccacctttgtttttttttcccaaagaaaaaaactttaaaagagaaatattatttattcctgcttaaagagtaacatgggtaaagagacctttactaattcttgtttaatcatgttaactgaaacaaatttgagttgggatttgtagggttgcacttgcacccaattgaagaacagtgtaaagtgtactatttatgagagagagagagagagagagagagagagagagagagagagagtagtgcatacaactactactattacagaacagagagtgag

SEQ ID NO: 303964 - DNA, 1786 bp, Cannabis indica
aatacaataataatttagttagtttttagtatgtgatgcccagctgatacttttaatttacaaaaaaaaaaaagtaaatataaaagagttttgtcaaaaaaaaataaaaaatttaaagttaaaaaaaaaaattaaaatataaagaaattttgttgcaaataatttttattattttattattattattattattattattattttggtgaaggtggaaagaaaataattaataaaataaagaaaagaaaagagaaacgtgtgttgtatctcttcacacatttgtgagttatataagtggtgatgctgcctttgtcttggattctctccccctttcaagattcataattttgacttcattaaccaaattatgaacaaaaacaattactttatttattattatatataatatatcttatcttacacaataataataataataataaaaaaatcatatcatcaattatctactttttcataaacatccatcatcaattatgtactattacttttgagaaaaatcatgcatttgtcaattatgaaaaagttgagttttatatatgaacaaatgttacaactccctcttacacatatataagcttaaattaagttgtctaatttgtaagtattgtttgataatctagattaataatttggcaatcaatatttctatagttgaaacacacattatattttaagaggttaattatgatttttgtccctcaaattttgacacgtattaaattatgtttattgaacttttaaggttgttaaaaattcttcctaaactattaaaattgttatattttaagatttttatctaattttagtaagaaaagtttaacatggatgaaagttcaaagatcatgatttggtaaatgcatggtacatgtcaaagttcgagagaaataatttagtagatatcaaagattgtggagcatgatttactacataaataatcactgaattagtaaaattaaatataattggactaaagtctttaaatctaacaatttcaataatttaggagaaatttttaacgactaaaaaagttcaagagatatgatttaatacatgttaaaatttaagacacaaaaatcataatcagtcattttaaaatatagtataattattaacatgtccttattttaaattttcttcttcaatctcaatcataattaataataagttttgtttgattagtgataataatggtagtagctagtaataattaataagcttatctctacttataaattataaccacataatatgcttagaaatgggattagattggcatccttcctttatctttttttggtacaacaaaaatcagaccatacaaaatcctgtttggttatgttgttcaagttaattttgtcgatttggacatattaggtgtcttagtttaaaaaaatcaaaaataaaattaatttagatatcgtttgataatatttttatgttttaattttttaatcacaaaaataaaattaaaatttatgttttttgaaattttgtttttaaaaaataaaaatgtgttctataattacttttgttttttaattttaaaaacaaaaaatagaagtgtgctctataacttttaatttttattttttttatttaatttaagtcgggtccaggttcgggtctggagctggagccgtggtttgagtctaggactaggactgcgactggggctagagtctgggttacaaagtccaagttggggtagaagtccaaaatattgattaagaaaaaaaaaactatttaaaaaaaattagtgaaagcg

SEQ ID NO: 303965 - DNA, 968 bp, Cannabis indica
accgcaccgcacttatttttgcggtgcgggtttttatttttgcggtgcgggtgcagtttggaaaatttgaaaaacgcgggttggttgaaaaaaatgttaaaaaaatataccacccccactgcgaatacccctatcaattactataaagtcggccatcgacttggtggtaacaggtgtcgtccctaacattattggtaactttattattccttttaactcaattatatcttcggtaaaactgtagatacttgatgtaactggtcttaggtcttttttatgtaaccccatatgcttgaaggcttgcggattcaaaaggttgatagaagttccattgtcaacaagtatttgatgtacattgtcgccaccaatattgtcaaccaccaccaaagcatcggcatgtggatggtgtacccatctcacatcactttccatgaatgtgatgtcatcacactccttaaacaatttctctagtcgttcacttatattattcacatttgtcaggagttttttcttagcctcctttatgtagcgctcttgtgctttcttggagtctccaccaacgtgtggacccccctataatagttaaaatgttgtgaggggctctggtaccactcacatctcctaaattgttcgcctcatcggcttggggattggcttctccattttttaaaactttcctcatttgactaattcatttgatctcatcttggaggaaccaacatttaaggatagtgtggctaatgtctttgtggtacttgtagaacttcttagggtccccttttgtcacaattcccttagtattgtggtagttttctaaaaacatcattgtgctactcaaatcgcactatatattaggggtgtacatcaaactgcttcaaactgctcaaaccgcccacactgcaaaaaaaatacggtttgaaattcttcgcggtgcggctgcagtttgaatttttcccaaaccgcgcggt

SEQ ID NO: 303966 - DNA, 3928 bp, Cannabis indica
atactttgaaaaacattttttcttgcattttttatagaattctacatagaaattcttattgcaactagcactgcaatttaaattacaacaaaaaattgtatcaaacccttattgtaactagcgctgcaaccattttagaaacccaaactagtaaaatttaaaaaaaaaaaaaaaacagtatattgaatatttttcctttagttaattacactatagaagtttcaaatcttaattttagacatttttatatgtaatttttaaaattttatttttttggaaaagtagttttaggatttgaactcgtacttatatttagtgctttaatcatttaaactaacaattttattcttataaaatactattaattttaatatattatattaggtagaaaattaaattgcatccctcctacatacgaaaaaaaagtttgctccctccaacacttattattattattattatttgtaactagttaaaagtcagaaaaggaaaataagtgaaagtgagagagttctaatacaaaatatatagaatttacaaaaaaattagtccttttcggaagcagcttcgtggaaagctggtgccgtggatttcaaccatagaaggagtgtttgaaaacaagttcactatattttttaataattccatttggttatgtgattttaataatgcatttggtctcttttcttagtatatattaaactttatcatctcacacttaatcttcttaattattaactattattaaggctaattggaagcatattcgcttctatgttaatctcaacttgttgtatattcaattagtgcttataaatttggatttattaaccttctttttgtctatggcatctctaaacagtatctttatatattctcttcacacttgaaatttcattcatttaataattctactatttctctttctctttttgcttcaatccaagtacttattatagtgacataacacaactaactaataatttgtattaaatctttacacgtgatattcaaagtaagattggttattttaaaagtacatattactatgtaaaaatttagtacattgtgttattgttttctttgtgattgtgttatttatttaaaacaactctaaaattaaacaaaataaaaatgtaattattgagctttcaacccatgacaaatgatcaaggttgaaatataagtgatgaatttaaggtaaatagggtcatttgtttaatcaaaaggtttaggtatgagaacaaacccaaccaatgattacatgccacatgttaatcaacaacatcataaaaaaaaatcatggttaatttacaaaatgattcattgctatttgctaatgtcactgtccagaacttttcattgatgtgagctcttttaattttgtttaatgaatacacctcaaatttcacatccttaacttcaacaagaaacatttagtcaaacctctggcttggtcttctcttcttttctctttggacctcttcatccattttcatggtttctcttactaaatttataccttaaatcacactttcttcctctgaggaaacacaaactattttttactcatattcttgtagatttaagtattcaaaataaattcataccaacccttttagcagcacagaaagatttgattctatggggaggaacactgaagaggaagttcctgaacaagtagaatccaaggtgagtgactatacatatatatataatcattccaagaccatgttcttactatggtattaattatatgtgtcatattatgattcttaatgttggttttgggaaaaaattaggccatgaagcaaggtcataaaaagtctcttttgcttcaattcacaaaccatcaacagaagatagtaggccaagaagcatggttattaaggtaaaacaaacttcttttcttctttcttattagtttgttaagctcttgaatatagctctgtatctgatcagaattttgattggttggcgaataacaacagaaagcgaatactgtaattccatctcatatcatagctgaagcaatatcaacattacatgatgatggccttggtcttaggtggtcaggtccaattacaccaacagaaatggaatatgttgagcaatatgtcttagcaaagtatccacaatatgcagggcttgttgaaggcgaaaaatttgacctgtctagtatttgcatcaacgatgagtctgctaccgatcatgttgcagatgacaagaggaaatctccaaggggagcatctagagagcccaccacaccctcctctggtggcaaccttcccgagctagataggacacagttagcaccatcaagattgctcgatatcctcacaactaaatcctcctttcctggtagtttcatctcaatccccgagatacaagctcgaaacaaggttttgaaacactgcggtttgcctgatgaagagtacctagttctcttcacaccaaactatgttgattccatgaagttagtaggtgagagctatccgttcttcaagaataatacctacatgaccattttgggagaggaagaagaagattgcataaaagaatatgcaagtttcaaagaatcaagagtgatttcggcaccagtgacttggttggatttgaggataaaagggtcacagcttagccagtacttcaggaagaaaagcaagtacaagcaaaaggggttgttctcttatcctgctgttgtaaatgggactcattattcattgcattgggtctcagaagctcacagaaattcatggcatgttcttcttgatgctactgaacttgtaattggcaaagaccacttgaatctagtcctccacaggcctgactttgtgttatgcagtcttgacaatacacctgcaattccttcaagaataacttgcctcatggtcaggaagaagtcttttgataccaatccagcttcatctcaagtcattgagtaaacagtacctgtaaatgtagactttgttttctttagtccaattagcaaccaagtgtgaaattgggctaaaggcatgctaatagtactgttgagtaagctaaaaaaaaagacattttgtttctgattaccattttaaaaaagatagcatggaaagatctcaggtttgcagtcccaaaattcagtctttttactctatatggctgcaaagttacatttcactaaaaaacacaaaaatccatagctcccaaaatggcaagcatttccattttggactatccttaccaatctaaaaaatcataattgctggctgtatcctttttatttatttcattcaaagaaaaaaaaaggttgatttgagtttgctgtaatatgtaataagagaattattcccaaatgttatagggtctattaaggtgagcaaagtattcacttaaccacagaaactacctaacttaactaccattttatatatatatatatataaatattttttttttttttgtaatatttactactttgtaatatgatgaaatactttctatttctaatattattatttttgtgtattttatatatttataagaattatttttctatgtattttttaacacactaatccaataggtgccatttgtggctaatctcaaatggtattatccaacaacattagacttttcaaaatatactcctaccttaagctaaaataggaagtaaatcttcaaaaaggagcttcaactactattataaaaatgaaaaatctctctaaaataggaaatagataagaggctctacattatagattagaaaaggaaacgttaccttttcaattactctacatttaacaaattcaaaattatatatatatatataaaaaagaaataattacataaacaccatttttataaataattactattttacgttctaaagatatatttttttttactatttttacgtatttttcaaaaatttaaacaacgaaaa

SEQ ID NO: 303967 - DNA, 4029 bp, Cannabis indica
ctaaatattggggtccacaattaaataaattcataaataataataaaataacagaaattagtgctaattgcctttactaatctaaattactaaagcggtcattacaagatcatcatatatggacactgtaccactatgattaaccaacatatattcattatttagaagtattagtttggtagaactgaaagggataacagattgaaacatcttaatagtagaatatatatgtcttgtagcaattgaatctagaatccaagaatgtaattttggtagaagagaattgcaagatgacacaataccgatgttacctcctgatgtgttaggattagtggcaggagaccagtatgttgtgttgtaaggagatttagaaattgttggtactgagtgcttgagagttgggaagcaaagtattttgtccattgatgttgtgcattttttactgtgagtttccacttgattgactggagcatcctttaatttccctgacttgttataccttagaggatacccgtgtatcttgtaacacttttctatggtgtggccatgtatgttgcagtgggtacaaaagggtttattcctttttagtggatgagttcttggagcttgagaatctggtttgttgtttggaggtttgctgccttggaacacaaacgccagattgggaataggatcaatggttgagtttagattccctctttggttttcttcttaagaaatgagatggaaaagtttgttcaccttaggtaaatgatccatgagaaggacactggttttgacttgagaatagaaatcagagaaccccataagaaatgacataatgtattccatatgatggtattcttgcagctttttaacacctccacatgtacacccgttacaagtacatatgggtctgtaattcaaaagttgatcccttatagttttcagccttgtgaaatacatgctcatgctttgattatcttacttcaaattcattaattctttccttagattaaagatgtgaggaccatttctttgatgaaaatgtactttcaagtcattccaaatagctacaacagattcatcatacaatatacaagaggaaatttcttttgaaactgaatttaaaatccaagaaattacaatgttgttattttgtatccaagcactatataaaatttgatgagaaggaaggggtttaggaatagaacaatccatgaaaccaagcttgttcttaattgaaatggcaagttgcatagctcgactccaataaatgtagttgtcttgacctataaatggctgtgaaactagcacatttcctagattatctccatggtgcagatagtagggattcgtagggcctttaagggatttcttggttccataacttgtaatccatggttctgggcacctggattctatgaattgtcaatggcaacttgagctagaacattgtctctagtgtgtgctagttgatctcctgaagacattgctggaagagaaatagattataaaaaagagtaatcgaaaaagtaataggggagaaagaatatgaaggaggtacaactcatttgttattcatcttgagaacacaagatctggaagaacgttgctggagaggagagcacggtgagaatggaagagagagttatgattgaaagaaaggatgactttccactctgataccatattgctaaagagagaaaaagtaaaagattgtattgaattaatttaagaaaatacagagtagtgagatgtttatatagagatcagctcaaggaaaaaataaaaaataagctaaccaatattttgttagcaatactgataggctaactaacaagaataacggttataaccaactaatcaattaaactaactaaaaaaactgatactaaatatactaaatcttactaaatatttttaaatgttatgtaatatgttaaagcatagtctttccaaacattacaagtgagtgtccacattgataaaaaaaaaaaagagagagagttaatcactttaacaacattcaacaagaaacttggtattgcggaagtgaaaactcgaagcttcaaattgcatactcaatgatccaggagctaaagcgtatttggatgccaaatgataattctagttttctgcgtaagttgtggcaactcgaaattcttccgaaagtgaatgattttcaagttgcttgcctacacgtactcaacttcgtataaagtattttcatgtagatactcgatgcccatggtgtaattctaccacaaaatccatattacatacacttgtgtcatgccaagtgactcaagggtgctagcgaagaactagggtgagaattgaagattcatctgctatattttttgtttttccagcctggtttcaacatggtttggtcacttgggatgatgctacacaagtaggaatgatatcatggtctttatggaagcataaaaatgagaaggtatggaatgccaaggcccaaacaatagataaaggttgtgtcataagcaaaacttttatctcaatttccacacggggtaatgtagcatctatctgagtgacacgtgaagaatgttttataaactagacgggaaatatgctccataatgtaccgtccaaagtgatttattactcatgaaaaatttatttgaagaaggagttggaatatctggacagagtatattacatcgtgcaaccatcatcaacctcacaaccagctcgcatacgttggccagagtaaatgcagctagaatatcttcaaggatactttaaatgttcaatcgtttaaacatcaatcaaatccctaattttttggaatagatatgcactgacaagaaagaagaggaaacctacctagtttccttttttttctctagatttaggaaagaaaataagtttctcattgatttcttaattattttgggaaattaaactaatgtaaatttttcctataaatagtagagccatttcacaattcaggaatccaaaatcttatcattcaatagagcacttatactgataaacctttgtaaaagcttccgaggaagatcaaaaacttcttgcttcttttcttacaagttaatagaagaaaaaggaaattagggtaataccattatcacggggacaaacctctctaggaaattcgtgttcttattgcttaattatttttatttattatttctaatcactttaaatgactcattatcgttggctaaaattgaggtcaatattttagtgctttcattaagagcaaaaagaacacgattgtgttatgattctctttaagtcacaagaagatgggaataactacaaggaggggaaatcctaatgagacaacggatccgataattacgaatcccaatgtgtaaactccagcaaatcgaagagatctagtgaggacagatcctgatccaaccactactcaacctctaatagatccctaatcagtagggcatggcgtgacaaccccactaactagattcactctgggcatgcaagaagctagaactactagtacgcatgctgagaagactggctcatgtactaaaaatctatctattggaaatcctcaagtggtgattggcaatgataccgagctgcgaaatttgtgagatgctttagggcagatgcaagagcatacaaacacttttcaccacaatcagcacaatacccgagcaactgtgaatttttccttcgagcagtaaaaacaccaattctaggagtggatggatcaacaaatagagatcatgcgagcccaacaagaagcaattgacaatcgctcaaggcaggcaaccgtgcttatcaggcgagcttattagctaactagaaagaaaccagtaggaaatactctgattatcaaggatccaaacataagaacagacatcaatatgttgggttttatgccctaaataaaactctatttcaatgtaatctagattattcaatatcaataaagtaacagaagtgtttttcactcatttgtgtatgttttcgttcaccttatcaattgtttgtctatttgatttataaattcattcaaaccctttt

SEQ ID NO: 303968 - DNA, 1219 bp, Cannabis indica
aaactaatttataattgtagagcgtggagaagaagcatagaaagagagggtgggtctaattacttctgactaaaatgttgaagccaactcagcaaaataggaatagattgatagatagattcgtatttttaagaaatatcatcacccacccattacatcattatcatcatcatcatcatcatcatcattatacattacaaaaccatacatacatacataggcataatatacacaatgtatacattatatattgatgaactgtttaagttaaaatggcagttggaagagatgtgtgtcagataggaacagacacatacatactctagaggcaacagtgaaggcccaccatgaggggttaaaaaagtgggcccctttattaccgcaccagacaaaatcccagaccaggcccaattatcaatcccagcccatcttctaattggtctaaataaatccttaaacacattcaacaaaaataccattacagctttataaagtaaataataataatgttaactgatgatgatgataaaaattaatcgaaaatattcctataaatggaaatggaacgaaggtgtagatagaatacgttgctttcctcaagtggaaggaaaggaaacagtgaccttcctcctagtgggcctccaccttttccctccatagcttcaattattcaaagcccaggcccacatactactctatctatcactgggatgtacctgttgctcaggcccactttccttaacttgatttcgtctttccctattttccaacctaacctctcatactctctgtttatgttttaataattagttgctatcatataaaaactttattgaaatttctatttcttcttttttgataactaaattcccatttattcatttgttaggattcttacctccaaattaatatcactaacaatttgtatctcttaaactttttgctagtttaaaatttccccaaactatcacaatgctaaaatataaattttttattaagttttatctcatgtgacatttaaataaaatattaatttaaaatttaaaaacctcaatttcttatcaaccatcaatatacatttttttaaaaaaattagttcattttttttattttctgataattaatataatatttttaaattaatatggcaatgatattagaatatttctaattaaggaaataaaataatattattgattctgataaatgaatattttat

SEQ ID NO: 303969 - DNA, 2406 bp, Cannabis indica
agagagagagagtggtgcacgagagagagggaagagagagagaaagaccaattttattttattttttttaaaaaaaagggtaaaatgggaagttcatgtaatcaatagactaaatttgtacaaattaaaggagggtatcaattttgatatggcttgtattattaaggccaaaaagtgaaattttcctttttaatttttgtcttttgacatatgatttttaaattaaatgtaattataaaggaaaattttaaaatagatttagtgttattaattttgaaacaacttttaatatatttttctgaagataaaaactcaaaatggcaaagataattaatcatcaatactcaagttatttgcgacataaacataaatacttaagtttaacttctagttgtaaataaaaatttatgtttaattttttacagtaataattcctaagttatattttgaaatactttaggtacctgatcgttaaatgttaaattattatctacatgtaatttttttattggtatatttaaactatttttgtttttaaataaaaatttagtgacttgaaccaatcaggaattaccacgtgacaatttacttaacacttaacatctaagtagctaccacgtaaaaaaaacatccaagtagctacagaagttattgaattataatttaagtattataaccgttaaaaattaaacttatatatttatttacagttaaattaaatttaagtactcttaaacttaaaaatttatgtcgaaaaattatttttttaaaaaaaaaaaaccaaatgagtccacgccgtatactattgagttactcctggagttgtattttttgcaagagacaaaaacctattcatttataataatcaaatttttattaattatcaaaattaataataataattaaaattatatatataaataatttggatgagtcttgttttccaggtttgactaaaaacagagagagtctctgtatgtgcagctttcggcgctctttctttccctttccataattttagccaaaactatctctctctcttaaatcttaataatatttatattataacatttttaacttaaatgtccttattttattcattatttaccaaattagtccctagtaaagagagtatttttgctaattaaatcttacataactcaccttcttgaaaaatactagggtgagcaaaaaatccaagaaactgatcaaattgagttcaccgaccgtccaaacacgaaaaaaccgacattgaaaaaattaaaaactgaaaaatccaccttcggttaaaatcgcatttgacagttggttttagtgttaatggtaaaccgaccgattaaccaagaaccgaccaaacatatatatatatattatatactatacatatataatataattatttttgtacatatttaatatacaattttattaaactagttttagttgttatttttttaatttaaaatctcaattattcattgctttattttattataatttgatgtatttacgtattatatacacacattcatataataatacaagtttttaatatctcattaccaactagtagcacaaaataatttgagcaaatctaaaaaaaattattttacattatttatttaactaaaaaattatgttcttaaattatatgatatttgatacaatactataatttttgtagtttttaaataattatagcaaatttaaaaacttaaatttttttttaaaaaaaagaagctcgatttggtcggtttaaaccgaccaaactataaattaaaacaatcaattttttttacatttataaaatggtcagtcgattttcggattataaccataaaaatcaaaaaccgaatttttgaatttttttgtgtaaataatctaccaataaattgtaaaaaagtattacataaaaagaataaaaagtcagtggctagatatagataagaggacatcgaatacatatgatgagctataacaatggttaaagagcccaacatagcaagttaagagataattgaacatgccatgacgttgttaggatcttatataggcttttatggccctgaccagtaaatggacctttatgaaatatttctaccattttgtaccaacaaaccaaacccaaaccaaaccaaaaaaatacaattatattagaatgacaatttaaataaaaattatatataaatttaaaatttaacacacaatccagttataattataattatttgattacatttatgttaatttttttgtcaagacatttatgttactttgtataaggttatagttgtatatttccaattaattactaaacatataaggtaaaaaaggtgtcaaaaattgttacatcaattattattattattattatttttttttgaatgggaatggatgatattatta

SEQ ID NO: 303970 - DNA, 4670 bp, Cannabis indica
acttttactgggtttacaacttaacttagtttataacgtttatctttattgttgaagttgaactagaaaactaaattttgttcaagaaaacaatcttgctacaataaattcatgttatattgcatgctaatattatttattgttaatcaaaatgtatacgtgaaatattagactatttcatgacacaaacactttggtgattactattctagctagatagttataattttcaatcgacaaagtattgattaatttttttcaagaaacttctcaaaagatggaagagtgtaaaaaatttcttggcagattttactgtttaatacttcgtttaattgtttaaagcatacaaaatctgttgtaaaataccataaaagagttatacagacaagtcaatgacactacaataaccaaactattgaatgtactaacatactacttgctgatcccattgtaattttagtttatttcctttctgatgtgtcttctattataattattttgttaaagggaaagaattcatccgaacagtaaattcaatcaatcagaatttcaatggagtcactttctttcataatcataggccagcctgccgtctacatcatatttctgataatctggatttccagaaaagccaaatgaaaccttccaaaacagtgcactgcttttttatttttcattatggcgtttaacagtggtattaatgatttgacagagataaccaattcaataattttgatcatagaagtagatagaaaaccccatttgtgatgtttaggggcaactctgatatcggtgttgttttcctacttgtacacaccaacacattgcgcaatcaaacattaaaaacaggatttcaatcaaagagcattaaaaaaatacaccaaagataatgctatctggtataagatacaatattttttactgttatacattacattgaattgaacttaaagtactctgggctttgtttactatagaatagttacacaaatcaaatgttaacccatattttttctctattattaaacaattattttactgaatttgattgtgttttgataaacaggagtaacctctcagtttcaaacttttacttaccaaatccatttatgctgtctttctctccattgaacagatttctggaggcaggtagaccaagatcaaagggtcccaatgattcactctgcatggaagcatcgaatatttatataaatttatatgaaccatatatgggactcaactagctatttaaataattaagaaattcaacatacccaattgatgcctccgaacccaaggctgctttcatcaatatacttctgcgaggaaggcaagacatctgtctgagattcttgatatgcatgatcttttggaacttcaacttgaacattggtctgtaacaaacattagagaaaaaaaacacaacattaatagtttagaaaaaggtgtacactattttaactctcaataaatactccctctcaaatgacaattttataacaaataaatagaaatagtttccttcatcctgcagatgtcaaattcagaatagacagcaaaggtgggtaaaataacaaaagatcaatgtagaaattgagcaaataatatcaaaagttcagaagcagcttaatcctaatttttcatatgatttgattttagatattcatatgatttttattttttatgatattcatatgattttccacttcaagcgcaacaattttttctaagaccaccgtaagcactaaattcttgttaatccgtgagcaactagatacctatagccatcactcatccagcactggtgtcatggttataatctctagagcataattcaaaacatgctggaaaagaacttttgcgaagccttctccaatgtccatgtttctaatcttaaattacaacttcaggtcttaaattaagagaaagggaaaaaaaaaattgaaatttgcagttgccaacatagtgtacattagaaattttaaacaaacctcgtcaacttttggaaatctgaatgatctggagccactatcctggctgctgcctccagaactgccactaaaagctgaaacccttttgcttgaggaagagaatttttggacagggaatgcatgacatgtctcttcagcatccaaaatagacgagtgtgaatcatgagcaggtggcctaggaccttgaggacaaatatgttgagcagagataaaagcatcaagtgagtcagaaatcatttgagttggctgaaagtctgcattgctcacaatagctttttcagtattattactgaattttccctgtaaggatacttcggataggaggcctccaatgcttatattggttagaccatcatcccaagatggcagtgatctagggaagtactctgtttggactggctgcactccattatttttctctgtcaagtttgattcatggctaccgaacttaccctgtaaagatgcttctgataaaaggcctccaatgcttatattagttatatcatcaacccaccgtgcagcaaaatttccgggtttactgtcggtcctctgttcatcatgcacacaccaaaaaaaaaagacagtttaggtaggcgtgcaatttaagtccaattaactataccgtagatctccagcagcatattactcacatcaaattacaaagccacaacaattaatcagttaaccatttcatccgtaaatatgtttagtgaaacaaggtagataaagatgtacttgtaaaatatattaataaacaaaaagccatcaaggaacttcattggacttcaatcttctaaaatgcatcttaatattttataatctataacagaccaaaaaaatctattacagccaaaatttgctaatttaaaatgcatcttgattctcagttggaatcaagtcgttctttaacttacattgatcagtttaaaatcttcacttgataccacaacttgtctgtcctccgtatctgttttttttcccaacggcactgcaaagtctctgttcattttcagattgcaaattaacattgcaaggagttgatggtttacgaagctcttcagatgttttagaatcagaagttgagaaccaaccgtaccttataagttgataaaataaataatgagagatcatgtcagttgcttaaaataatctcattcacacacctttgaataaaattagaccttataccttaactgaaaatttgcaggacttccaataaatgcatagatttctcctgctttgatgtcaatatctttctttgtccaccttctgcaactagacatactaccatgtacatcatagggaaaaagcaccggttcaccaatagcaatttttgagctgccccactttttattgaggtgctcgagcacagaagaaatcttctttctagcttttaaggtgagttccaaatagggataaagcccatcctaaatgcacaaccaaacagtaaaataacagcacgaaatgaatgatatctaaacgcatatgaaattcaaaatgctttttaaaagagattcaggagtttacttgttctaaacccctgcgagtgacttcatctatggggaaaagttgcaacttgatcttcgcatcaggaagaaatgtctttccttgacaaagattaggtgcagacaagtcctgtgtccctttagtttcatcgaaaggcttcactaacagtacttcagctttactcgatggtaacggatgctcgtcttgttttactgaagaacattcagcttgccctccagaattaaaataagcagaatgccacaagacattattagtccaaaaaaaaaattgttaacttagtccacagattctaagttctaagttaaaaacacttcaacagtaataacttagtgaactgaaagacctgatcccttacctgttcttttggaattttgcccgctagtttttctaaatttgctggctccagttttacttatacctgatcttctctctctcggaacagtggttgcttttttgctcttctctgtagcagctttcatagtgatttggctctcctgcaacttaagccattagtattttcaccatcccacctccccatattcaaaacccagatctcaatccctgtatatataaacaaatcaactaacaaaaacctagaattcaagacactacagatttgggcatcagaggcaacgcacacaattattcaaacaattaattaaagaatcatttcgcttaaatttctcgagacaaatatcgaaatcgagatcctaacccttactgcattaatttgctaactccctcgaaagagaaaactaaaattcgcgcctcccaaatctcaaaaccgattggcttggtttcaccaaaatcaagaaagagatttgaggaacaagcgggaaatctaaagtaaaaaaagaaaacactgatcgaatttctcaacaatactgataaacactgaaaaattgtgaaagaagcgtacctgaatcgaagccaagagggaggagtgttgagattttggagaaagagattatggcgggagctctctgaaattcagtctgccttgcttaaaaagttttacagctttgccgccacatatcattttgaaacttttttttagtgggcttaggcccggatctaccttggggaattcagattgttttagggaaatttacacccattactgttttttcccaatttattacttttatactg

SEQ ID NO: 303971 - DNA, 2203 bp, Cannabis indica
atatttttgtcaattaaatatgccaaaaatggaattaacaaaattgttgccttataattagttaactattttttataatatttattaaaataaaataagtgagactccaataataatttacaccaataataatattacaccttaaaagtgtagcatttctatgttttaaagcatttcatgtgagtgctcatacttctaaaagtactccaataataattactcttgaaatttgctctaatattcattattatttaatacatcatttattttaataccatttcatgccaagttttggtattgacttggcatcaatattaatttttagtttggcacccaacatgtcaaatggttagcttcttctaagtattttgccacatgtactttctccaagcaccactattagaaatgggaatgctttaaagaatgttggatgagatgaaaatattttggatattttttaataaatgcttatcagagaataaaaaaaaattgacattctttatatgatctctttcctatttcttattattattttttcataaaataagaaaatttaattatttaatatgtatattaaataataatatccgataaaataaaagattatatttttaagtaatttaaaaatttttaacactcttaaaaaataccaccaccattatcttcaccgatgtgaattcgccaacataagtgaagattggaagatttttccacataaaataggataaaaaattaagtgttacaaaagataaataataaagggttttgcagcaattaactaaagtttctatagtttgccagtgtttacaaacttaattcacaattagaactcctactaaaacacattattttacacttatctttggcataattttgaagtaaaagaagaacctaagtgtgtcaaagtttgcaagtcaaattgaaggaaaatcaagatcttattatcaaataaatgcccaataattacagaataaatttcagatataaataaggttgcagatctgttcatcatgcagccaaagcctcattcccggtcgcaacattttcatcgacaagtacttggtactgaagatcagcgtttccattctccaaagacggtaaaggatgagaatctctttcactagacaaacagaaaatgaagcttcagaagtaatggcaaaactccataaacaaacagctttctaatgataaaataacttttataggtgccaactgccaacatacatttgagtctcaacaatgaccaaaattagtagagctcaactcactacaagatgaatttgttacttatattttaatttccttcatcatctttatcatgcaaaagtttaagttactttttctagtcaatttttaatactcgattcgcttaaaaagtggaaactttagaatcatggctttaggaagataatatttcaatctgttatgtcaaaccaggtaaaacagttttacctgtctaaatacaagttttaattattgtatataaaattttcgaggaaggttagaacatacgttactgagtatatgatgagcccaataactacaattgcgaaagatagatagtataaccaatcaacctgcaaagtaagaaaaatataattttggttaggtttgacacaactggcaatgcagattataagctaataagattgatgatatgattggtacctgttgatgatagaaaaaaatgcgaaaaagaactgcccacatgtcagcggtgagaatagagagattaaacattgtagaaccacttaactgcatcagaggaaatggttagagcaagtatttctagttaatgactttattctaaggttcatatatttttagtggatatttattttggccaattttgattgcattaaaacatagtattttcaataaagaaacaatcaatctgtataataatctagttctgagaattgatgagctactgcattggttaatcacagcaatttttattgcaatcaaccccaaaattctcataattatgtaaagctagtttcttttatattcttatgaaaaaacggaccttgagaacatatggagcgactgcgtagagaataaagccagaaagagtatagacaacaaaagctaatacctgaagacaaaatcaaataataaagaataggcgaaattaaggaaagtgtgttctgagaaatgaaaaacattttcactggttttaggcacaatcttaggaaatcat

SEQ ID NO: 303972 - DNA, 3183 bp, Cannabis indica
aaagtacaataacggaacaaaattatatccctatatatatataaaatgttattataaaatgttattttaagtattttatgtaattcgtaattcatccccaaaaaaaaaaagtgtaaagacaatttattggcttaagaaattttacacttttttattacccaatgaattttttctttacacttttttttatttcaaaatgaataatttagtagtgtaaaaaatttaaagaacaaaaatactaattgttcaaacaaaaatatttcaatttgaaaaatttcctacatatagttgatttatagttgttatcaagttgatttctcattatttttagatgtttgcttactttttgctaaaaaaagtgtatttttgtaattttaaaattttaaatcgtaaaattgtaaataaaacataaaaaataatatttttaaaaaaatttattttttaataaattttaaattttattctatttcattcctattcatttttaattcttattaatattcttatgttatcattcttctcaactaaacacaatcttagagtagtgaaaataaaatttaaccaataaggtgacttagttatacatgtgtttatttttctttaataagtgtggaactagatattttgaactttttttgcaacattctaaattattagaaatttcttcaaaattagtgggatgcctaatataaaaacaatcaacacatcatatgaaaaaatgagttctaatttgtcaagctatgaaacttaaaaagattaaaataccttagttgagccatttggggtttaacatgcttgaaagctcaattcataaatggaaataattatagcttccaagaaactacacaacaacccattaacttaagagccgcccatgtttataaacatcataacattttccaataattcttgaaagttaagccttcatcattattcaagtccaaattaagcagccatagaagtttgaataatcattcctacaaaacttttgaaaaagattttgccaaacttatggataacaaactcaatccaataagcaataataagtcttctttttcatcacctatatatataggcaacctcttcctcactctgcaatcatcaacaacaacaacaacaatctcatcaaaaacaaaatcatgggtgtcacaagctttacacaagagatgtcatgcccagttgcggcggctcgaatgtttaaggctttgattgtagattccaacaacttgataccaaagcttttgccccaattcatagcaagtgtggatgtgattcaaggaaatggagggcctggtaccattgaacaagttaacttcactgaaggtatcacaattttttttcatttaattaataaaaaagaatttataaaacactcaaccataaccccaaatcttaattgtgttactaaaactactttaatatataataaaaaaaaaatctcactaaatgcgagagaatatgagagcttgtgtttcttagagatcaataccttcagtaaatgaattataatggggtatattataataagtgtatatatgtgcccgtgaaagataaatttcacaattgtttatcattatatagtaaataaaagatattgtttttgttggtatgttataatattatgcagctagtcagttcaaatatgtgaagcaccaacttaaagagctggattgtgataactttctgtgcaagtattctatgattgaaggagatccattgggtgacaagcttgaatctattgattatgaagttaagtttgaggctaatacttctgatggaggttgtgtgtgtaagatgaaaagtagttacaacacaatcggcgaaatcgccgtcagtgaggagaaaatcaaagaaggcaaagaaaatgctgtggcaatttacaaagttgtggaaacttaccttatggagaaccctcaagtgtatgcttaattagtttgtgtcttgttcatatttggagctaaagataatttatttgattggatttttatataaagataataatgatattctttgtaccataattttagtgtgcttggtacaagaatgacttataatatatatagaagagtaatggtttggtgtgtttaaataccaagcagaaagaactatatatcttactattggaatttcatttgattttatttttctaagtgttacagtgaatataaaatcaaagattacatttgtgagtaatatttagtggaataaaacttgagctatgaattcattgaatgatttttttcttgtgtggtaggtggctaggtaggacaaaagaaagggcattacttcattttggaatagattctagaataaaaattattcttctcttataaaattcatagcacaaaacaatccatgattgacaatatcaaatttcatatctttctctaaagaaataactttcttttaactttacacttgctatttattcttgccaacaaaaataacaatattggtatcctaagaatctagaccaactaaaaagtgacataaaataaagaattggtttgttaatttgatttgaaaaccatatagaataagaaactattatcattaattccttcaatctgtcattcatgaagaatatcataacaaagctttcatgaagtagaaattgaaagatttagtctatgtttcagaaaggaaaaaaagtaccttaataatgttctggttttgtgcttttaatatagattaacgcatgatcccatactttaagttgtttgcataacttgttatatgatatatgttatgtttggctggcaactcgatttttccccccaaataatatcattgttttttccaatatgcactttatacatttcaatttctatatatctagatttcttttagagagaaaaatggaaatttctattagacaaatcaagcaatagtctattgtatgattgttgattcaaaatataacctaagtatcaggtagcaaattcttgggtatggaattacaaatttacccttattgaaaaacagagattacaataagaaaaatagttacaaaaagaagctcaaaaaccagattcaaaaatagacagttaaaacagttacaacaacaacaaagttattagggctcaaacagttacagtcctagatcagtagttcacaaatactaatctatataaaaaaccgagtttttgcaaatgtcagttgtatataagaaaatataaaaac

SEQ ID NO: 303973 - DNA, 6048 bp, Cannabis indica
taaattaatttttttcaaaaaaataaaaatttaatgacttggatcaatcaggaattgccacgtggcaatttacttaacacttaacagtcaggtacctacaaaagttccagaattataacctaggtattattaccgccaaaaattaaacttcggtatttaattgtaactgggagttaagcttaggtatttatgcggcaaattactctaattttcatttgctttgttggatggccaaaattactgtaattatattttttaatgcaatcttaccttgctttatttgagttatgaatgtttttgaatattgtattttcgcccacaagtaaacaaaacatctttctcaatttaagttaggatatattgcgaccttaaatatccttgcgtaattaaatatattttgatggatttatgtatgagcagttagtattttaccatattatgtgcgaccagttaatattctaccataatttattttttttagagaactttaaatattttgaacagtttttaaaactgctttaaatacttcttgatttcttgtatatgaatagttaattctctactcatactttagcttgcgtattattattcaagacacacttgacactagggtatctcgtttataatacatgctataatatgcaagctgttatttattcagattgcatttagctttgtgttgtttatgagacttagaagtctctcttacaactgctatttttatatttctactttaagaaaggtttcaaagtattcgactttatgatgctcaggaccagcttataatcaaacacctttttttttgtaaaaaaaattattttctatgtcttagcgagcctagttattttagcatacacttctaggtaatacatagctattgtatatgtatatgccccccaagtaatttttaagaaatgagattgtatgattacttaaaacattcaactttattaaaataaagaacattatatacaagcatcatcttaatacaataaaataaaatacttgtaataagaccttagatgttcattgttctagtttttttttattagtaagccattaagccatgctaattgataaactccagttccaaccacagcttcaaaacaaacgggccttcccaatttggcttaaatactcttgctgatggatctcgcgtatttgcaaatatgcatcttaacaccaaatcacctactttaaaaaagtcttttttgaacccttttattaaagtatctcatgatgcaatgttgataaccagggtggtaatttgtgactcaatgcacttttcttcaagtagatccaaggacatattgaggagttcctggttttgttcttgattgtagaatccgtgcctatgggtagtaatgttcacttctaccataaacattgcttctgagccaaaatgccaatgaaaacaaagtatgtcccatttctactttttctattattctatgggcacagatcactagtggtagctcgtcaacccatatgcctttggctacattttacttctcttttatagtgtcctttaaggttttgttaatagcttcaacttgtctgttggcttgtggtcccgacactgacaagaagcttttaataattttattcctttcatagaactcaatgaataagttttcgtcaaacggagtacccttatcggacactattttaataggaatgccaaacctgcaaattatgttcttgatgaaaaaatcaagaacttttttgggggatggataccaaaggttttgcttctgtccattttgtaaagaagtcaactgcaatgacaacatattttgtgccacctcgactcgttggtaaagacccaatcaagtcaatcacccttatttcgaatgggtatggcgaggtcatcattctcagctcagtgggtggtatccttggtatatatgagaaatgttggcacttgtcagaccttttaacaaatttatgtgtgtccttgttgatggttggccaataatagccttgacagattattttcttagacaaattttaccaccctgcgtgatctctatagaggccttcatgaatctctctgataacttcgttagcttcaattggtagtacacattgtagtagaggcataaaatatccccttttttataattttccatcaactattgtatatcatggaactaagtataggagctttcgtaccttggttatatctgttggaagttctccatctagcaagtatttaacgataggggtcgtccatatagggctcgcatctatcatgtcaatctcttgattctctttcttgcatatacttggcttgtccagtaactccactgggaccaagtttaatctattgagatcaaagtaagatgccaattttgctaaggcctctgcattagagtttttttctctttgaatttgttttattttaaagtaatccaactattccaagttcttctgaactttctctaaacatttgaccattcccgtgccttttgcttggtattctcccagaacttgattcacgaccaactatgaattactgaaatattggacattttttactttcaatgtttcatcgatacttagtccagttaacaaagcttcatattctgcttcgttgttagaagttttgaattaaaacttgagtgcataatgaaatttgaagttttcaggcaacaccattatcaccctacccctgagccattcttgttaaaagccccatcaacaaacaatttccatgtttttatttcatttcctgttgtggaggcttctcctaaatttatcccttctatgaagaagtcagccaaagcatagcctttgatggatattctcgggtggtaggttatctcaaactatccaagtttaatcgaccatttaataaatcttcccgatgcatcaagttttgacaatacttgtcgcaatggttgatctgttaggactttaacagggtgtgcttgaaagtatggtcgcagctttccggatgcatgtaccaagcaatgtgtgtgtttctcgagtggtgggtatctttattttgcccctagtaacctttacttatatagtaaattggttactagttctaccttcttttaacactaatgctacacttgtagcgttttttaagatagccaaataaatgaaaagtgtttcttcagtatttagtttgtccaaaactagaggtgtggatagatgcttcttcatctcctggaattccttttagcactcttcgttacactcaaactttttatttcctcgcaggatgttgaagaaaggggaggcatttatcagttgattttgagatgaatctgttgagtggcgccatccttctagttaaagactgtacttcttttagttttattggcaagaccatctcaacgattgcttttatcttatcggggttggctttaattcctctcgcattcacaatgaaacttaggaatttccccaaggataccccaaaagcacatttattggggttcaaacataccattcacaaggcattggtatgttgctccagcattattcaacctgaatggcatgactttatagtaatatagtcccatatttgttacgaaactcgtatgctcctgatctgggacatgtattttaatctggttataaccagaatatgcatccatgaacgtcattagttcatgtcctcttgttgcatctaccaattggttgatccttggtaatggaaaacaatcattagggcatgctttatttaagttgcagaaatctatggaggttctccacgtcccatttggttttcgaacaagaacagggttagatatccacaaggggtataatgcttctcgtatgaagtgattagtcaacaattcttcaacctcttcttttagtgcattctatctctcaggatctaaaggtcatcatttttgacgttttgaaggataagctaggtcaatgttgatgtgatagtatatcatgttcgggttgatcctaaccatatataaatggctccaagcgaactgatcttagtttgccttcaaaaaagtgattagttgatattttagttcttcctccaaaccttgcccaatgttgacaaacttagtaggattgtttggatctaaattaacctcttccaattctttgataggcctgagttggttattttcatcatggattctaggatctagatcttacatatcttcctctttttcttctgtcaaaattaccatcaattgatgattttcccttctattttttaactccacactatagcattgtcgagctaataactagtcgcctttaacagtccctactcctgaatgagtggagaatttcagagttaagtgtttgattaagcttattgcccccgttcctattaatgttgggcaacccatcagtatgttgtaaacagaagagatgtcgaaaaccagatactcttgcatctgagtcatggataatggcggttctcccaagataagagggagttcaattgtgcctaaactcgcgacatttttgcctgtgaatcaacataggctaatcatgcatggttttaaccttgtttctcctaagtcgatcttctttaaggcctcttagtaaagaatgctgatagaacttctgttatccatgagaaccctctttaccctcttattatcaagctgcattgttattactagaggatttgtgttaggaaactgtacgtgcaatgcgccttcattagtaaaggtgatgggaggttcatcagatttggcctattttaggggttctagaacgaaggctgatttctcgtttttcactttatttatatacctttttttagcattattgttgtttcttgcgaggtgtggccctccaaatttgactaatatgttctcgccctcaactaggggaggttgtatctatgattattctagttattaggtagattttgttcgtttccttgaggccttacatattgccttaggttacctcgagagatgagattttcaatcttgtctttcacctgacagcattcaacaatggtatgcccaatgtctctatggaaatgacaatacttgttagtatttcacttatttcttacatgcctcattggatcgggtctacgaaatgcgacccagttttcattcgcgagatagatattttcacgagtttcattcaattatgtatatcatgagtatattggaatatatttctcgtgcttcttctatttcttttttatcttttgacgagtctctcgaatcatcatttctcttagaatttgagccagtcggatgtgaatttttggatttggttgtcacagtgctcgctgttgcggtgcttgtgctgggttcgtctcccgagttggactttagcagcttcatctcattttttgcttcttccttctacataaaaatttgtgctctttcatttaactcgttaatgtttctaacaggatgacctcgcaaattatccgataactcacccctatagttgacaagtcatttgttattccagcttgaagagctgttaactgaatactatcattcagatcctaactttggatgtagccatactaaaatggcttaagtacgcttttaggaattctcctagttgcttcttaacattggttagcaaagattcctttggtcgctgatctcttgcagattgaagtcctttaataattgttcccaagaagtaatggaatagctggtgaatttgtcaaacaaactgcttacggctcctatcagagaagtcaggaataaaatgcatcgcaagttgtttaaagcattgcttgctcgcattatggtattgaaattgtttaggtgtgccacaagattagttgtacaatcatacttagcaacatgtggctttttgaatccttgaggaaattgagaattcaaaatatcaggatggaatggttctgtttctttgtctgagtcgtatcccgataatttctcataatctccatcctggtattttctaaacttatcttctaattgtattactcgcaattggattggaggatgaagaagaacatggcatcattgttcgacttcatcaatgatattgactgataaaccaccaatgaatccatatatttcatcaacatcatattatatcctctac

SEQ ID NO: 303974 - DNA, 1227 bp, Cannabis indica
tattattattaaaaaaaatttgataaaaaaaattttgacatataatttcaggctttgagattgattaagaaattattattaacactcctctaaaattatatatatttgtaatatattttttaggagttaatttgtacaaaccgttggttgttttgatggccaaaatgctgtctgatatgttctccaagaccctaataataaaaaatcaaatattacatgtattaaaaaaacgttaaaagagattaaacaagcttaattagtagtaattaatatattataattagttgataattatatatatacatattttgatttattgtaaaaatacttattaagtttaatttttgactgtaataatatatttaagttataattctactttctaaaactccgtaggtacttgattattaagtgtcaagtcattatttacgtgtcattttcttattagtatatttaaactgataatttaaaaaaatataaaaatttaatgactttgtccaatcaaaaattaccacatgacaatttacttaacatttaaaatcaaagtacctacataaattttaaacttatatcttaaatataattactcttaaaaattaaatttatatatttatttacaattagaaattaaatatttatattattgtatatatttataaatacacacgtacccgccactactgtaagggtctttgagtccattggagaatattatgttgctaccaaagctctttagtattagttttatatcctgcattatcatataattaagtattatatattaatattttcatgaaaatactaaaatttatatattttacgaatgttataattatatgattaattgtgtttaagggtctctaagaaaagacataaatactataaaaaatactaaatgacatcaatagtgtgtatcatacatggctaatggtttgttttgtaatggaaatggtgaaataattatataaatataaattaattaaaaaatatatataaatataaataacatacatggcctccatagtaagtagttgcccaatggggacgaggtgaaattccatagtagtctttacaatcattgatgtaatcttgtagatcgaacggctgagattcaaacatcgtattgttcccaatgcctattggaaacaccatctcactacaagtcttttacatatatcaatatcaataattatttattcttacaaaaaatatcatatatatatatat

SEQ ID NO: 303975 - DNA, 1861 bp, Cannabis indica
cttgtccaaaaacagggctacaaatccacctctctgcatcttcccactttagagggaagtgttcttccactgttgaaactcattaaagcagcagttgatgacgatgaaccaatctgcaaaccacctccgattggaggtaatctctctgaggcccaacccttttgacaatttcctgtatttccacggtattgtggagctcctgggcttggatatgtacctagatcatgggaaacagagcgttttttcatgcctttttattatgtttgtatcttcttctctcttctaaataactccaccacttcaagtagttttttttttcccttgaggtgttaataataaaaatatatataaatatatttatatataaataagtatatctttgtactactagtaccacgtgtatattaattattatttcactttcagtgtcaaaatctgttcttggaagcttatttcactcgttttcccctctcttaatcttatatatatacagctgtaattttgttagaatttggtctagccaaatatatagaatatatatgtatacgtatatatttatataagtttaagtatgtcactttgattgaattggaccactcagaaggatcattaaggtgttttagcttagttgtgcttgctgccaaatttaaatatcaaacagaagattttttttggaacttaatgaagaagacaaattatagaccattttacctttcaaccatatttgtttctacataattttctgttcctattaactgtttgtactttgttattatttaattactgttattttcatcaacaaaaaagtaaataaatagaaataatttagataaatgaatataaaaatgtggcttggattagtcaagggttcagacttcagagttcagtgttcagaccttttaattcgtacagctcaatatttggcttaggttatcccaaatcaatgttttgcttttttttaacctttgaacggtagaaaaatactttttttttttcactgatcacaaaatagtgataatggtagattgtatagtagatatattaacagagtggagttatgcgacagttatggtacacgtgcacacatgcatatacaataaactaggtgtacttctttcttctttttgggtggagttaattgacaattactattcatgaaattaggttgtataaacataaaaccttaagtatggtgtttctgattactgtttaagacttaatgttagctgtagagtcatgtgattttcttgaatgttatagatataactagggctgcacatcatacaggtttcaccgagtttaggtttttttcgggtgtttttactaaacatcatcccaaacttgctcgttttgtggccaagttttttgggcttaggtgcgagtgtgggcgtgtttgggcgggtagagacaggtgaaactaaaaacgatattgataaattaaaaaaaaaactcatattaaaatctcaaactcaaaacaccattctagatccagttgaaaccattataggaagagactgttggaccacaggtagggtcgaactgcaaggatgacctaaattgaaagagagagaaggagaagatgaaagaattagagagaaagagagttgaaggagaaaatgaaacaagaaaaaagaaaaaccttgttgctcttgctgatgtgttcgtgggtggttggtgtgtgttgtcttgctgcatagggtctggccggaggcgtgtgtgcatggtggccgaaggcgtttggtgtgggttaggggggcttcgggggttagggcaaaagagaagagcttattcgggagttaggtaggaaagaaagaaagggtttttttttttttttgtagtgtagcgtaatggtttttacaat

SEQ ID NO: 303976 - DNA, 1857 bp, Cannabis indica
tttaaaatttaaactaattataattctatatatttaataaaatattttataaggcgattttaatatttataaatatttttcttttttatcaaaaaaatttataaaaaaataaaataatatagatacaattagattataagtaatttattaattatttttaattaattataatagtttaataataatccaacaattaaaaactcgtcagatggttacataaatgtaactattcaaatttctctcattggatataggatggacaatatagaagatatataaagtaataaaaccagttaataggcactaagtcatgatcacaaaatcaatcaagattcagttattaataatagggccccaaatttggatatgatcatgtgcatggagcaaaaatgttattttattttgataatataatttagtagtggtgaaaataacaggctataattaatttataatatctttagtgttatatgatgataataataaaaagcttaaaagtgttagatgaagttttagttgaagtagttaggtagaaaagaaagtgacacatgacaatgcaaaataagtgaatagatatatagatagataggtttttaggagttttttcatttttatattttaaaacagtttttttttgtattcgtataaggttttatgtaacaatttacatggtaaccagtggaacaatttaaatcacattctaaatctacatagcaactactggagcaagttaaatcgtaaaaattaaaaaatatatatatataatatatgaagtgattctccaaatttatattcaactaaacagaattcgtgggattgtaatgggtggggtcccttactcttagtttgttctatattaaaaatttagagtatatcctgggattattctggcaaacattcacaaacggagtaacgatgcacatacatttgcacacaaacttgacatatatttgtgtgaaatataatttcaaccaattatttttatttaaaggagtctcacatatcaaaagtatcttgttacatgtgtgtcatgtttgtgtgtgatttatatgtgcatatattactcttttaagttttatatatatcactagtttcaatgtccccagtaccatgatgtaacatattactattaaaatacatgagatttgtgttaatatctaataataccaataacaagacgatccgataaaaaacactattgacattctttagcttttatcgtataaattaaaaaaaaatgttaaaaggcacctacatcacaaaaaatgacatatcgctattggtacaatttaatattaaatttttacaattttatttaaataataatatagagaaccattaaccactactaatgcaccacaatagtataagacaccttaaggtgctcaccaataacaatgctcataaacaaaagggtacagatctctccactatgcatgattttcataagcaatcttatgattgcacgcttgtaatctttacatgttcattttggttttttttttatattagtagtactagtagttgattcgtcactaaaaaagagaagagagagcttattatatttattaatctcaagaaaaagctataaagttgagataattacatgaatcgaccttcgtatcatatcatgtacttgattcatattcatatttgtaaccatacaatttgattgctatttgtaattgaccatatttattaatttacttgagattttgtacaagttttcctacttttgtcgagcataataaggagggagaaaattttgaaaaagaattaaaggaaatgaaaaaaaaaaaaagtaaaaagtaattcttttaaatttctaaaatatgctttgactaattaaagtttttc

SEQ ID NO: 303977 - DNA, 3793 bp, Cannabis indica
tagtggcccgaactatgatagatgacgaagcctcctcagacatcctattcaagaacacctatgagaagatggcgctcaaccttaaagatctaatcccctgtacccagcctgtatatggtttctccggccagagtattgcacctctagggaaaatttgtctatccaacactgttggacaagctctgaggagcataactgtgatggcacaatttttgataattgatgtcccatcacctttcaatgtcatgttaggtcgactaaccttatatgacttgaaagctgccacgtcagttttccatttgtgcgtcaagttcctaacaaagaatggggaagggtgccttggagggaaccaaagaatagcacgggaatgctataaccttgccctaactaaattcaaaaagcaaagtacctccagccagagttcgggcaagggaaaaagtattgaccaataggaagtcgcccaaggcaaggacaaggacatagatccccaacttgggaaatttaacacaaatgtagggccgatggaagaactagaagaggtcgaaatcaacctaaatatcccgaccctgaaactcaaaattggttagggtttgttgctcgaaataaaattaccattaataaaagtttttaagagcaaatgtagatgttttttgcctggtcacatgaggatatggtcggtattgacccttctataatgtctcacgccctaaaaactgactcaaacttttgtgtcgtctagtaaaagagaagactactggacaaagaacgggctgggtgcaagcaatgaaagaagaggtagaaagactgcacaaaaacgagttcatcatcgaagctttcaacccaacttgggtatctaacctcgtactggtacccaagcctaataaaaaatggtgagtttgtattgattttactgacctcaacaaggtgtgccccaaggactattttaccgacctcaggatacaacagccgagcacaaaatcctaaatttcatggatgcctattcgaggtataatcaaatcaaaatgcatccacgaggccaagaggttacaagttttcgaacagatataggtctttactattacaaagttaagtcgttcggtcttaagaatgcttgagctacctaccagaggctggtaaataaaatgtttgaagactagatcggacgaaatatggatgtatatgtggatgatatgctcgtccaatctaggaaggttgggggcgcatagaggatctagacgaatgcttcaaaattctcataatatacaacatgaaacttaatcccttaaagtgctcccttagagtcagttgtggtcagtttcttggtttcattgttaatgcttagggcatagaagccaatctagcgaaaatacaagcccttggacatgaaatcgccaacaaaaattaaggaagtccaaaacttaacttgtcaggttgccgcactcagtagatttgtttcaaattcaacggaaaaatgtgttcctttcttcaacatccttcgagataacaaaaagtttgaatggacagaggaatgcgagaacgctttccaggaattaaaatgacaacttgcaaaacctctcgtactctaaaaaccttgggatggagaagagttaggaaaatacttagctgtcatagaatatgttgtgagcactctgctgataagagaatagaacgacatccaacatcgagtctattatataagcaaacgtctcattgaacctgaaggatggtatcttttgatagagaagctcacttactgcctaatcttagcaacaaggaagttaaggccttatttctaggctcaccatgtttgggcatacgctggccaatacgccaagtattgcaaaaacccaacacctctagacgttactaaaatgggcaatagagtcgggtcaatgtgaaataatcttccaaacccaaatagcagtcaagagacaaactttagaagactttatagtcgagtgcataggcaaagaagaaagtaacataagagacaacccggagccagtacaaaaacccctgccagatagtaggaaagacagacctacctggaaattgcacgtagacaggtcggctacagaccaactttctggtgtaggagttgctctcgtcacaactagggtgtaacatctgcacaaagtagtcaaatttgggatcaaagcctctaacaacgaagcagggtatgaagccctcattgctagactaaaatttgctcggcagttgcatgctgaatatatcgaggtctatagtgattcacagttagtagtgaatcatgtttcaggagagtacaaggcccgtggagaaaaaatgatggcttatctaatggtaatgatagccaagctgaagtaagtttcttttctttggtattcttactagaaatttaggttttcatgaaattttttgtgttttacagttctttataaattggattgagtagagaatgtttccttaggttgttttaaagttctttatgtagttacatactagatttttagggtaatacagatgttgaatttggttttagcttttgatctcaaacttaactctttaattgtggatttgttttttgagctttgtggttgcatttacaagtttttatgtctcttatgtcttgtttaggtgttttggaaagttatagaaagtttcacatagaatttaggatttggtaaagtgttttgtgttttctatagaatagtgaaccgattattcttgcgaaaccccaaaaaactgtaaaccgtttagcgctttggttaattagattttttagattttagagcttagtttttccagttttatcaatatttagggaatttacatgctatttagcgataaggaaatattttgttttggtataagtccctgaaaattgattttacggggtcattcactagtttagataatttgtgacatagggctattaatcgtcaagtagcattttcaactcaggttgaccaacacacctgaatttagaattaaggtaagactagtacaaatatatacatgcatacatgttagttgatcggttaaagtaccaaagttgtttgctagagtaccaattatatcggctagagtaccaagcatatcggctacagtaccaagaatattggctagagtacaaggaaagcattgtgcttaggtgtatgagcaccttgttgcagtcaagaatcatgattatgtttatgcttttcttactgactttgtcgacttacaaatattttttacatgtgtagataagggcaaggaaaaaggtgagtagctgtgagtttgggctggatgaagattgtacatatagatatgattaagcatatagtgttcagactatcgggacagttgacccttattttgtaaatagatgtaactttaaaaaatgggatcatgtagtatgtatttgtatatatttatttacgttaaatttattgacaaatgtcttaattattgacatattttaaataaactctttgattagcaaagaattgcaaagtaattaagaaagcaccatagtgtgcctaaacatgtaaggtgttacagtctgagcttgactgctcttgccccccagcattaatctcttagtaacttgggtgtaaaacttttaagtgtgtatgttgaagttatttgttgtgagagagatagaccactattaaggtgtagttggttatttcttgtgtgcttggtgctcaagcatgagttcactttattatcatatgtgagatgaatcaatgtcaaagagtagtgcggaaaaatcccccagatcttctttataggggcaaaatcacaggttgttgaagaacctggtttg

SEQ ID NO: 303978 - DNA, 3128 bp, Cannabis indica
atatttgttgaaaaaaattagtacagatattatgtgatcgtatatttaattatactaataataatatatatattaaaattattttttataaatcaaactatatagtttaattcggttaattcttccatttttatcataataattttaaatgattgggacgatcaattttcccactttataattaattaggtgtgttatattatatatattttatgttatattatatattgatcaggtagattttacctgaatttgtatagatatttgtgaatgcattaattaattataggtgaaatgctttgcttggaaggaggattcattattatttaggatactcatatgtactattaattttaagtttgttttgagaaattagcgacaaatttgtcacttactgatcacgtgtgaaaacgtatattatatgctgatgtgtatactgtatacaagtacacatttatgtataacaatacatataatctctattttcgagaagacctttttttttaaaaaaaaaagaaagaaaagaaagatataattgattaagataaatctactcgtaagtcaagtcaagaagcactcaaaaattgtggacaagtttctatttaaatacactcttttaaattagtaatagagattgtaagtatgtgttcgccaatcacaaaatgacattataagaaccactattaataacagctaataaagaataaatatctaataaaattgactgaaaacttaaatttatgtgaatcttattaattaaactaattgctactgtaaaatcactattaatattggagatattgaaatcataacgatactcgatatcagacttagatgaatggtaagcagctctgccacattaactgaataattgccccacaccaaatgaccaagccaaccaaaccacacttgtagcatcctgtatcactcccctcaatccaacaaagcccctccctggaaccaaggttccacaatttagataggtgcaattggatgttcaaggatcatctcgtaggaatacaggaaatctaaatggacaaccaaacaatcgttcaactcttcctcctcacccaccacggggtccttagaggacgagggacaaaatgtacacttatttgagcaaaaattgtgtggcaaatatctttgagaggcgaagaccaactcgaggagattctcgagggttcgaatcaaaaacggcaataagtgggtcaaggagaactcaggggcaaagttagtcatctaagtcgcgcacaagggaaaatccacgacaaagggaaaggagtccttctcgaaattatcaaggtaaataagaaagtattaataatttacaaagttacaagtctgatagcatctcacctacgagatcggtgagtaattatactataagataagaataatgtcatgatactcaagataaactagacattcgagaataactaaatcaaaggtgattggatttgcatgagcaaacatatcaaaatgttttggatctctaagaaaggctaaaccaaaacacacccaatttgtgagagcaagttaatcaaccaatggatgactcaattctattaagagtcatacaattagaagataagtatagaaggtaccaagacgggtaatacaaaaaattacctggatatgactcctacgaggagactgagccattccatccagatgtttcctaaggggatttaaatatacccatgtgactccttatgatgaaactactgatctagtggcacatttgaacagttttaacactataatgagagtaagaaatataaagaatatcttgcagtgtatattattcccgacctccttaacaggagcagcgagcagttagtttaataaatttaccaaatatttaataacctcatgggaacaactatcacaaaaaaacaatttttcgtggcaagaagtaggagaccccaatctttgccattaactaacataaagtagcaacctaacaagtcactgaaggattttttaagttgcttcaacatagcgacagaaaaagtcaggaatttggatgacaatatccaattaactgctttacaggctaggataattgtagagggagagttatgggatgtatactaggttgccccataagaacaataaacgagttcaattatggggcattaatatatgttcgaaaattaaagaagaggctcatttagagctcaaactactaaagggtggctcagaaaactaaccaagaacgagtaacacaaaaactagcattgcaacaataaatgcaaattcgaacaaggggaatgagcccctacataaaaaggaaaaatccaaagaatcagctaaagataaaaagaaacagaaaaagcatgaaaaatatgtaccgatatactctattaaatagagttgaatgaaactctagaaaatatatttctcgtgcatgaaaatagggtcgccttctgaaagctcgaacccatgaggaacgcgagtagtaaacatgatcaaaataaatattgtcggttccacaaagatattaggcatacaaccaaggaatttcatcaccttaaggacgagattgagagccttatttctcgtggttactttcagattacgtgagaatagggggaatgagaaaaattcaccagataactagaaccaaaatcaaaatatccaacaaccacctattgatggcggggatattctagtaatttttggggggtccatctcgtagggaccagtagtaatgcatagaaacgatgcataaaccaagtaagaaatcaaaactcaaaatttgcacctaaattacttaaaaggaacctcccattgttttcaccgaggaagacgcattacatgttcaatttctacatactgacccattgtgataatagtccagctcataaataaaaaatataaaacatgtcttggccgataataacaccttaatcaatatcatgtataaagagacattaagaaaaatggggtcaaactaaaactatgcatggtgaacttgtgtgaattcacagaggatagcgtcacaagcttaggaacaataaaacttccatttagggttgagcataaaattcagaaaaaaaaaaaaaaaaattgttcaaactgacctaccaaacactgttggaatcgaaaccgatggaacccaaaat

SEQ ID NO: 303979 - DNA, 1725 bp, Cannabis indica
aaaaagcacattattattacatataactaaaaagtcaagtgtccagtaaaaagtgtcatactattattaatactatttttagtgtttgatcatatataatggtattaaacaatgataagagctgacagttgtacattttctgttttgttagttatccaactaattaactttctgttagttagttgttagctttcggtttcaactaatcttactttagttgctgtatgtaattcttgtataaattttgtataactgtattcaataatgattgagctctttcatgatatctttcatcttcttccttcttttcttttctctcttttctctacttttagatttcctttactgttattgttgtttgttcattcttgagcttcaatgtctaggagatttaactctcgtcacatggtatcagagtcgtggcctccattggtggcacatatggcgaactctgatcctggaacagcctacaaatggtggatcagctactaacactgtccatgttggaaatcaaatcaacaaccgaagtcaaaacagagaaccagatgagaattcacctgtgtactttaatcactcgatttcaataaagcttaatgatcacaactttcttctttggaaacaacaggtcctagctgccattcgtggaaatcgattgctaaaattcattcaaaatgttgctcctccacaatttctcaatgatgtagatcaaatcaatggcgtgttcaatcctgcctttgtcgaatgggttgttcaagatcaactattcgtttcatggcttctctcatcaatgacagaaaatttgttgacaagaatggtaggatgcaacacagccaaacagatctggaattctttggaaaaatacttactcttcgagtgtcatccaagattctagagtttcacaccaaattttaaaatcttcgaaaaggttttatgtccttgaatgaatatctgttgaaggttaaacagactatagatcttctataaaatacattatatattagggcaaccgtccaatttgagttctatatggcttcacccatgcccttaatccattctaaaaatgattatgtcatatattcaagttcgatcttagttcaactagtacatgtttctcataatactaatttgtaataattcatatcgaattcgtatcgtgttatcgtatgttttgtgaccttaattatatcgatacatataaaataaacaaaaaaatacaaaacaaattgaacctggtcaatataatttgtataatgaatgtggtcggtaattaggaccagataaaacttagatctatgttttgtctaatctgtacgtacccctatagatgatcattatcaatttcgaactcatctaattaattaatcaatctaaactttttattgtgcactaatacatttaattataattaattaacttgtgttgataagttgataaccaatggaatgcacttttttttttcttcattgaattttatatatggtgtgatgttatgatatatataattatgtgtaccacatcatatagcacaataatttattaataaatagagtggttttcttagtaattaatacttattatatttgtgagtattgttataaaatatcagtgtctaacactattttggctcgtttggaacgctgtattaggtcgtattgtattgtattgtattatattgaattggattatatattatatttttatataatactatgttaaactttaatt

SEQ ID NO: 303980 - DNA, 2469 bp, Cannabis indica
cttgtttttcggtagcccatcacgaaagaactccatagttaagcgtgcttgacctggaataatttcaggatgggtgacctcctgggaaatttttccaagaagcgtgcgagtgaggacaaagtacaatgaaaacactcgtgttggtctgtatggtcagtcatcagtccatgaagcaactagagtgacgtactcgtgtataagagctatgagtccgtgggtgtaaggacccaatggaagcttgaagcaggaacgttacagtagaggcttcacatggaagcccaaaaaattgaggaaatagtatattaatatatatagtaaatagtatatccaaaccgagttgcatatgtatgccgcctgacttcagtttattggtacatgattgccaaattgttttatcttctttgagtcatgttgttcaatttgttgaacgacttgtgaacaaagttgcctattatttggcgcgtagctcttattttttcccaagtcgtactttttaggattagcagttaagtcttgaattgtgtaatattgtagtggttgatttttttaattaatgaaagttaatctttattcaaaaaatatatgtacttgagtttcccaacttcataaatggccttgtctttaatgatacctaaccaaaaaaaatcattttttaaagttactatttgttttgttggtctcgctgttccaccatattgggtcaccacctcactttaactcttacattaatatgatattatcaattttggaactaaatatttatagttttatttttagacattttcctcaaagacctcatactaataaaataagtaaaatacttatatccaacgtaactcttactcatttttttgatgtaggacttagactgataccctaagtactactcaaagaagagaattttgtggacttaaaagttgatccacaaagatcaatgttaagagattgataaaatgtattttttttttctttgtttaattgacaataaagtaggttgggaaagttaatgagccaaaccacccaccaactaaaattaaatgaaagagaaaaataaattccaaccttttttttttcttaaccacaatcgatctaactcaactcagctttcttgtaaaaaataatgctttaatctcaattttaaaacaaaagaccaacttcaaaacatagtcaaattaataaactaaacatttaattgtgacattctacaatattaaaatatagcaggcaaaacctgcctggtattgattgttttaataaatactgtatatataaatatatgatatgatattataatgtaatccaaagtcatcacactcatcagtgtgacccattcctatataaatgcaaacatgcatgtgtgaccaaattagcatcatcaataatcctaaacaactttcttatcgagcattgttattggacatcaaggtcgacttaactataaggcaacttaggcaatcgcctaaggtctcacaaaatttaaggtctacattttaatggtaatatacattatctttttataatatgggtgatatacattaaaaaatatatttcatatattttcagaaaaaaaaaattcttcatgaacattaatattggctactaattgattgtcaacattacaattaaattaatttcaaatctaaaattttagaactattaattaataattaatgattttttcttaaaaaaaattatatataaaacaagtttaaataataccataatattttcttatatttatacttattttattgtgatcaattttttgactattaatttaattttttattaaagatttttataaatgaattaaagttcgaagaaaaaaattatagtttgatgatcattaatataaaaagtaaaaaaaaaaatcttaataataagaatttagaattagtttttctgaaaaaataaaatttcaataaatcttgagaaaattaataattttgtcaaaaatgactaatttaattttcactaaggccttgtttaagcttcgcctaagaccttgtacaagtttgagatggccttgttgggcaccaatcgtgcccagcaccttttataggtagtgttctaagattggttatcgatatttcttaaaaagtattttcttatgttatatgagacacaatacttaattacataaatatcaatatgacactaagaatgttactaagcatatctctatgtctctctctctatctactactgttgagtgtttaaaagcttcatgctcatatctcacaaaagcttacacacactctcattatataatattattatagtagttttgtatctcataaatattatattctctctttatttcttcactctagtctttatttatatgaaaattttttatagtgttgaattttttgtactaaaaatacgagtacaatctcgtaaaaagttgacgcgttccgaatggaaaagaatgatgtgtcaataatatggatcttgtaaaaagtctga

SEQ ID NO: 303981 - DNA, 2055 bp, Cannabis indica
aatagatgtatattaccaacatctttggacatgtcatttactatattggcttcaggattatttattcctctttggcagtctatagtccactgacttgtgaccagacttattgaagttaagtacttaccaagtgattagaattgttttttttggtgacaccaccttttggttctaactttacccttatattattgtgtttgaagttcttcttttccttggagattggaccttgtttcgttacattggctttagtcatatctttactataacttttcttatcagaatttttgttgtcttctttgatacaaaatctaataattaaatctacaatagtcatctgttttcgtttgtgtttaaggtagcttttgtactccttccatgaacgggtagcttctcaatcatagcaactatttggatggtctcactaagcattattccctcaaaatgtatctcacgcaaaattaactggattttctgaacctgactgatcacagttttagaatctaccattttaaaatcaagaaatcgaccaaccacaaatttatttgagccagattttatagttttgattcaaagacttccacagttccataactatattctttttaagatacacttcatataaattactttttaaactattcataatataatttacgaagaaaaaaaaattaactttcttctaagctttaacaacattgataattttagtgtctttctcatcttctttgagctcttattcttcattattgactaactttgcaagattctttgtgataagattagatgaacttcttctgctgccacttctagaaatttgatcctatgaatttgtttgagctactagatcttgagtttctgccatcacatcatcatctccaccatcttggttcattttagtaatcattttatctaaaatcaagtaaccaatagtgctaagttttctcataacaaatttttaaatttatactctaaagataatttaaagaaaaaacctagaagggtttgaaactaactatttcgtagcttgacctcttgtcgaatatttctttaaatttgttcaatttcctagccaagtacgaaggttttcaaggcattactcatcctacacttattttgaactctctgagattcttagacaagtaatagagaatattctatcacaaattttaaagttaatttttctagacggaaatcacaatccttaaaatttaccataatatcttataaattaattgatatattcatatcatcaaaaattagatatattcagcattatgatgatacataaatcacggaaatatatctaactttaaatattatatcaaagtaaaacacgttttaaaattgttgtaaatataatgagactaatataatatttaaaacaaacgtaatgataaattaaaattaatatacatctattaatatattaatcatactctacacattataataacaaacatataaagagaaaattaattgtgagtgtaattttaattgacaaatatatgaagtgtgacagtttgtggtcctgtaatttataaggagaaatactagtaaattgtacaatctcacatcgcttaaagaatgttaagtgtcatggttctgagactatgtaggtatgggactacacagttaaagatgacttaaatagatttatgagtactacttatatcaacaaggtgtattttattttttggtgactcgttacttaagaatttcaaaattaagtgtgtttgacctgaagtaatcttaggatgggtgacctcttggaaagttttttcgaaaagcgtgtgagtggtgacaaagcacgctggaaatactcatgttagttttagggtcagtcgtcattttagaaagcaactagattgacgtactcgtgtgtaagagcatatatttgtaagagaaggtctaatagaagcttgaaatgaatgttagactatatatatagtgtatataatatagcatatacaatgatatgaaaatgcggaaaatataatgaaatcatatcaataatatatgcaatgaaaggatcgatgtacctccagccattga

SEQ ID NO: 303982 - DNA, 2758 bp, Cannabis indica
ttttctagttatgatgccaaacacactaactctttaatttttcatgcttatgaattatgaatgtcattcatcaaattttatcggaatgtaagtcttaagtgtgataaattaatatatgaaactgatctttattattattattattattattgatcaaatatattatagataaaattaaattaatgtaaaattttgtaagtagtgtttgattggaggtaataataaaattgaataaaatagaaaaaaaaaaatacaactttttttttatttttttattttttttgtttggttacattttaaattattaaaattcacttttttattattttgttaaaatgacaatttaattttaaaatgaacaagaaaaatcattagaaaaaatttaattaattttatgttaatttttctatatgtgtttttatttttattcccattacatatgtacggtcatgtttgtaattttaaaaaataataaataaataaataaaatatatgtaacatgtatacttttgcattttctcaaaagaaaaaaaaaagtgtatacttattatacttttggaggaaacaaattaaatataaaaggaaaaatttaatatcaggaaacaggaaaattaatttatataatctataagtgccatcacagcatggctgatcagatatacttttcaatcaaacaattagttggaagactcttatccttccagccgccatagttttattttcataaatatatttattttgggtacatatattgttcatttcatttatttttgttctttctgctccaaattaaaaaagggaaaaaaaaatataaaataatacaattagaatcctactttgttcttaagataaagatttctttaatgttacagccgcattaactccaataaatatattcgaataaaatcacttaaattaacaaaaaaaaaaaaaacataaaaagctcaactacataacaattatttcaagctttaaacgagaatttataactaaatcacaaatcaaacaaatatctttttttcagaaaaagaaaagaaaaatcaaattttatttcgtttgggaaccaagaaaattgagaaacatgatcatatacaatcttgaactgggggacctaatagaaagatcctctctaatattccaagactgaatttgagatattacgtaacaatttccatctctatctatttttttttcctttttcaatttttacacattaaaaaaaataaacgaaagtgacaagaaaatcgactctctctatcggaaaactgacgagtatatatgtatgtatgtatatgatacaaaccggagccgagaaagaagattctagtcgaagcgtttagaaggggtaatcttgataacaaggccagggaagacatcatccgggtcatggatatgcgggttacgctccacaataaatgggtcgctgcacttgtcgctgatggtgtggagcgtttccccttctccaacgacataaatctcatcgcagggtcgatccaagaatctgttccctctgaatgaatcgtcagaattagagctctggcggaccgaggccaccaagattaggcttagtaaaaccactgcacagtaccacgaggctcggtcagctaccgtccctatcggcgacgaagaagacgaagacaacgtcgttgctcttcttgtggttattttaacagaagtagtatcggaagccatattggaagtgaatgatatctggtgaaacacgaggaatctaaggaagtatttatgggaagagggaagtaatatttgcgtgtgtatgtatatatatatatatatcttattagaaagagagaggtatttggccgtttgcgttgggagaaatttgggttcaagtcaagaacatggacttgggtttaaactaaaacggcttaacctttcatattttatttacctagctagagactttggaaaatattattatattattattaatttcttggagggtaaagttcgggggtaattgattagctaatttctttttcaaagatgattaggtttaatattaattcgtgaaaatattaataaaaggtgaattaattagtgttgggtttgttgttgtggtggagtggagagagagagtcattgttttgacacgtgtgtttaccacgtagtccgaaatggttgcatccaaaatgttgagtttgttaatcaacttgtatttaatttagtaacataataatcataataataataatattgaaatagtgcaatggaatgggatgttgggtgtttggtgagacaagcgactggctacaatatgacatgtatatcatataattaataattaatccatgagttttcttgttagatagttcttaactaatatggaaataaaaaattgttataagttataaaatttataggtaccccaaatttctttctttgtattatttgattgaaatatatagcttagtttatattcataatagtagaatctctattcaagaatatacttggaccaagaaaataatattctaattgagaggttacaactaaataaagttacacaaaaagatcaaaatatcaaaaaatatcaatgtaacaaaaatacctatcaatgtaacaaaaataccaataaacaattcttaatattatattatattagaattattttcgagaagatataatatttatatatgtactataatttgaaatataattattaattctacctaaataaatttataaaatatatgtatatattttttttaagatgtagttattcttatatagaggtata

SEQ ID NO: 303983 - DNA, 1835 bp, Cannabis indica
atgactaattgttttagtttcacttttatattcaaaattaatttatgatatatggaaaaataatcataaactttttcggatggtccgtacgtagactgaaaatattattaaaatatcaaaacgatatttctatcaaaattttgggaataatataagtaaataaattctcatgtatatatattattgtacataaaggatcacgtcacattgatcaaatgaaacttcttaagcaagtttatttaataaattagaataaaaaatccattcaaataaaaatctatatcgttgttaccttattatatatgtatacatatgatatatattcttttggtatatatactaattaaagaatcatataatggttttgtactgatcaggaaggaatactgaaagctgcaaataagtatctccaagataaggtaacaattaagaaatatataaatatttggataacattgatctgttaaataaagaaagatatatatatattcttgttcctcattttttttttaaaaaacaagaaaatatatatataatgtacaaacacatatgattacagtaaataaataattaattaattaagaaaaaattgttgtgcagatagaagagaacactactactgcaagtgatcttgattttgtaccaatgatgacgactaacaatccatatcccttaaccatattacagaatgggatatttcagttctaacacacaggctatatatgtctttgacgttgttagaaaaaattactatatattatatatatgtataatatcgtttgatatatcgacatatatatatgtacgtatatttataatagtattgttgttgtgtaatattctactactgtttattaattggcgtgtttgctaaattgaaaacaattaaggtatgctttgaattatcaagtgggtgcatgtagccacttgtatcaattataatatatatataataataataatccatgtactataggttgctgagattataaataagaacggcattaatatatatgctgtttcatacatttctacagtttgtttaataataatattctatgtatttgggtttatataaatgatcagcttgtaacttttcattataattttaattgttgttgtataataagtactatatagattatatatgcatgagtgagtttttggggatgttttatgacttacgtacgtacttaacttttttatcaataattgtttgtgaaaagggtatatatatattataaaatgatggggatcgtacagctaattactagtagagatttttatgttttttgaaattttgtattttataaacattaatttattatttaattaattaaatacagaatgataaaattcgtattgaaatagggtgtaaaaactaaaatttgtattgaaattttatacttggtatcaacaatttttaaagattgttactagtatatactatgggatcacgtctaaaaataagatttattaataatataactattgactaaatgagatcatcgagacaaaggggcaattgttatacctaaatttcgaccagcaataaaaagctaacatgtgtattaaggttggaattatatgaactagctcaaactgtgcattataaaatacacttaaatgacacgtctcgggaaatatagttaatagaaatattcgaactccctgccatataaaaatgaatacaaataattcatagggtgacatgtatcagttaaaatggagcaacaattttttttagcaaaaagtcagtacacaatataaaatatagccagtaaaaatataataaataacgttacaacagtaaaaatgaaataaaagtgggaaac

SEQ ID NO: 303984 - DNA, 799 bp, Cannabis indica
cagcctcatgccggggtttggggggcattgcttctcgcgtgtagaatacacaacaatgttgagctcggggaaatcgcagctaggaattgcctcaagttacagcccgagaaggcgggctattcgtctctcctcgccaacatttatgcctcggccgagcggtggaatgatgctgggagattgagaaatgttttggacagcaaaattcctgggtgcagctgggtggaatcatgttaaacttagtcttttttcgagttttaagatcaagcttggactaagaaatggcaactgaaaaccaaattgattattatttgtatttgttggatgatgtatacaaaatgattacatattactttaatctcaagtgtagttcttacattaatcaataaaataaaaatggaaataaaggttaagaaaaagcttgagccttttcttcttctttaatttcctttatcttttttgttgtatcttatttattcaatcatttatttctttcacaatccacaagctaatctagatttgatttacaatttctactatagtttttgcatttttactcaattggaacacttcaaattttaatctcttggaagaatttaacttgtgagatgcccacaatatttctcaatctcccaagttaaagggaaaattatgctttctatatatataaatttatatatatctattctatataaagtgtgcctatataaccgaattcttggtttatgagaaattcgtgggagactttttatttatattaaaaataaaatgatttattattaaaaataaaataatttatgag

SEQ ID NO: 303985 - DNA, 1049 bp, Cannabis indica
attttgtgactaaatgtatttttttagtcacgatacttgttctaactaaaattaaattagtgacaatttatatataaatattatattttattcacaaataattttttattgtgactacaaattaaatttagtaaaaaatttatactatgattaaaaaattatggaaactttgtttgtggtgttatttttgtaaatagtgtttctttcattattattacataatgttgagtattttcttaccgaaacctagctccctaataaaaatataaattaatttgctttggatattttgtgtattaaaataattaaatttattatgtgtaataatcactacaaaaaaaatcttatttttagtcacaaggaaatttgtgactaaaagtgaaaaaattacgactacttacaaattatgattcttatgttgtgacaaaaagatccgtggctaaaaatattagtcataaaaattacaatttattgtgactaaatgtatttttagtcacaataattgttgtgattaaaacttaattagtgacaacttgtaactaaatattatattttagtcacaagtaatattttgttgtgactaaaagttatatttaattatagaaaaaatatattgtgactaaaaaattatcggtaaaaataacagtttttttgtaatgataattagcaaaggaaatatacatataataaagttaggagttgggacaagtttaaagaagagaacaaaatatataggttagatgtggacccctccaagaaatgtgagtaaaaacatgaagatatattattcaagactataaaatggatatgtatgtatgcattgacataaaaatccaaatgaagaaaatacaaacaataataaagaagaaaaagaaaaagacccaatgaaaacaagagttgatgtatatatataaatatagtgatgggccactcaaaattttctatgttggacgcattactcacaagacaacagcttttgttggcccaaaaagctctaattaatttctttattagtttctagtgtccttttatttgtcttcttttttagg

SEQ ID NO: 303986 - DNA, 2168 bp, Cannabis indica
aaaaagtattataaaattaaaagcattattgttaaactaaaattataattaacaacaaattttaaaaattaattaatttttattattataaataacacttaaattaaatatttttaataataataatgttattaataaataacataagaaaaaactaataatacaactataaatatacagattcaatgtatatcagtaaacttttaaatctgaacataatataatttttttttattataaatgacattttatgttatttaaaatttataagataattaaaatttataattttaataaattataataaacgtgtcacacatgcacgttgcttaattattttaattaactagttttctattttaacaaaaaacttttagttaatattacaagtatttattaaaacatttgatgaattcatgtgttcatttcggggcaattaatgatgaggataatgattcatgaactttataattaataaattacttgaagagaatgtaaaaacatgcaacgctttaacatagaagaaatctaaccctaccaaattgaaaaagaaaaagaattagaaaggagaaaaaagacaaagaaacctttaatgaaagcatttacttgaaatctcttacatgtcaaagaaagtttgcatccttgaatcgaagctttcatctgtgatttgatcccaaaacttccgtagctcagctttgtctattgaagaaacattttcacttctttttctagcgattaatgcatcaaacaactccatcgcgaacctactcctcggattcttatcttcctcatcatccatccctgtaaatttttttttataaacttatctaaagacatatcatatgtacgtataaacttttatattttttttagttttttttttctattttctcacgaatcaattgtgttaagttacgagcgtacgtacctcatttacaaaaaaaaaaaaagttacgagcgtacctatgcatttaccgaaaagcgatctatggagtagtccatcatcaatattagcatatttatggaatcttttctcgatgtcatcccagccttgtttctcattactaatgaatctgagcccattgtaggaacttttagtggatgtaagtctcttaagctcctccgacacttggctgaggctaagtggaatgtcagacgaagaggaaggcaaagaattattattattcatgtggctcccaccgccaccgccactgccgactaagccatcaatttgaccgttgcagtatctgtaccggccaattccaccactgctgcggctgatcgtgcttcccatctccggatgtgatcgatagttattagtatggtactcttcaatctccatttttaatcaatcttcctctgaatgaaatcaacttttactactatatatctaattatatatgtgtattaataatattataatcaattacgcaaaaatcatattatgttaataattatggtttttttcttcagcaaatatactataagtgacttgctaaccatatataggagatcaatgaataatattaattaaaggttaataccattaaaaagttatttgattgttttgtcaaatgttaaaataaatttggtattgtaatgagttattataaaattttatttgataataaaaaattaatttagctactatttaagaaaatacataatctaatttattatttaagaaaataaataatcaaattaataatttttataattgccaatgtgaataaaaatgccaatagatgaatatttgtgtttttgactttgtatctattttatatatatttgaatgttttatttttagagaaaacatattatattttagtttttaattgttgccagttcaacttcaactgctggaggaatgaaatatctatatgttattccttaattattaatagaaaatagcactgctgaggatagacagacgtcggatcaaacaacagggtgcatgtagcgagatgaacatgaatattaataataagagtagtgctaattatcataataactactacttattacaacttttcatatggccatattcatcaagtctcaaaatcatatatataagatgattttttttttcaatttctatatttattatagttatagtatcagttttgtaatttttttttttaaaagaataatagtttacaataacaaaa

SEQ ID NO: 303987 - DNA, 6199 bp, Cannabis indica
cgggccgggcttgacccgctaggccaaaaaaaggaatcgggccgggccgggccaaagtgatgtcgggccgggctgggtttgtggcgggccgggcccggcccggcccgactgacattcctattggggttggacagtcgggggtggacggcttgggccagacggtaggggttctattcttgaggggtttaatttctggaaaaaaaaacgaagaagaataggaagaagaaaaagaaagaaaaaaaaaaggaacaagaagaagaaaaaatatatattaaactattttttaatatataaattattaaaagaaaattctgatattttaattttttgtaaaattttataattattttttaaaactaatattacgtggaccactaaaaattttccacgtggacagtccaccgtggcacttaactgtaatttttggatagaggtgtgcagagcaaaacggaaccagggtttaggtagtttagccgccaaaaattcggtttttgtggttaagtgttacaaaccgtaaagttcaggtagtttagccgccaatatcccttataaatattgtgtgccgtttattattcttattttaccattaatttctctacaattactatcgctttaatagactcagtgccgctgtcccaaaaggaaggtcaatattttggtactttcactaagagtgtgaaatattttctagttctcatcaacctacgatcttcaatccacttttgaatcaaaaaccatgattttgataagaagatccttatcgaatgaatcgaacgatcctatggcgacaaacccaagcttcgaagcacctactgacccagaggtggacaacctcaacactcgactcccacctcaaggaaaccaacctacggtccctacaaatactaaccccagagctactgggattacaacccctttcattggagtcacatccggtgtctaggaaatagggactctcagtcagacatatgctaaagagactaggcttggcattagtcagccatccataggagaatcctaagttaacccgggggataactatgatttggaaaatcttaaggatgcattaggaaaagtctagacacataccaacccactctaccataactaggaggaaacctgtgccactgtgaactttgtgttcgaatagtagcgtcatgaattccaagagtagatggactgtgaggctcaatctatgctttcctagcaataaaaacaaaccaccgtttcagagaagctatcgacttgatcatgcgatttactcagcagattggggttgtaaaggcaggaggatgagtcatccagacgagatgccaaccaaggaaaaggtcgctacatctcgggcggaggacaagagtacgtgttggaggaatgtttaaccaactatgtccaaacccctatacgggacaaaccgtccagctttaggccccaaaaccaaactatcgattgacccgtggacgatcaagtttttcctagtaacaaccaaaataatttttgacccagactttaggggaggaaagatgatatacctccacaaccagcaggaggatctcgaggacaagtgaacttgtacaatcaggacagaagagtctaggtctatggttagaatcaatatgccaaccaacaacctcgacaaggtcattcaagatcttgaagttgggcagtaattttctaacaagaatgacaacgtagatgatagtagaccccgtgatgacaatctttgccaaaggcatgataacaatcaagccaatccacccaataattaaaataaggacaatgccctgaatgacgacaatcctcccaggctggtgaggtgtaatagccaaaactcgcaaaggatgagacctaggcctagaaatgacaatcaggatgaattaaaccaaaggtgaggcaatcgggatggacattttgtcccccgcctaacattcaaccgattaatgtggagaactatgtcccataaaatagagacaattatgtacccttcgaggctctaaggggtcaacaagtgacacaagtcagtcaatagacatgcaatgttgatgtaggggtgcaagcccaattggttcaacttaggatcctaatacaaagcttgaccgaccaaaaactcactgacctaaaggttgattggataggaggctcatcatttgctgcttgaatcaattcccttgatctttcgatcaagttcaaaatgccaactaggaagatgtacacagggagagaacatccattgtcttacattaagtactttgcgatacaaaaaaacttgcaaggagtaaaaggtgacgtcaggtatcgaatcttcctgacaacattagtagaggccacctagcagtgttacataaagttgacacctaggacgtttgactcgttgaacacctttgctttagaattttatgcataattcttctctttgtggcaactcccagctcatctagaggacctactagaagtgaaacaaataccaggagagcctctgaaggactacaaaagtcatttcatgactgaggcaaaaaaaagtgaaggggcttactaaagaaggaaggttagctatagtgctaggaggtatcgagcctaaaggtgagttgtagaaagacatcaagagactcacagttgattcaatgggagaatttttagaccgagtagatgagtttataaagctgaaagaagcatccagacgagtagacatggttggccagggtaaaatcgaccttagtcacactccctcctcggctatagctaatacattcgtctagcctatccaggccttccaacctcagatcagtaacaaaaaaatcgtggtataaggcccaataatgggaataatcgagggaacagaaagaaaggaaaaataaataactcctatcagcaacatccttgagagaaggctttaaagttcattgccttcactattctcaccgcagctcgagaaaccatctctatggcaaccaagtcagttgtaccatacatgtcctttcgatcaagaaagaaatgaggaagagggataccaccaagtattgtcgattccaccaagactatgaccatgacaccaacgagtgtaataacttgaaggaagaaatcaaattcatcatcaggagaaataatccgcacatgcctttgtagatagaggtctaccaagaacaaagggccacccaagtagataataataaaaaatacttgatgcccccactagtggataggcacttgcaaatgattattgggggcccacactttgctggagattcaaataaagacaaagaaaggtatgctcagacactccagtatgaacaaaaggatgaagaagtattggtcatggaagagagaaagccaaagaaaccgtgcagagaggaagtcttcttctcattcaacgaggaagatgccaatcatgtaatctatccccacacaagtcctctgatcgtcgaagtgaaaatttccaataagacagtagcttggcaatgatcataatgaggtttcctccaacattcttttcaaaatgacatatgcgttgacctcaaaatttagcgaactaacaacagagtcttatttaatgctgatgcttacaacgtgttacataataagaataataaagtaaataagatactggattttatataggttgggcctctttagttagcaagtaaagacaaagtccccttttggttgtattgataccgagagataatactactcagatcactatagtgataggatctgaagtagctctcttaagattagaatatatgaataagtaggcaagtgtcatgagagagagatagagccttggaggcatgtgagagagaggaagagagcccttggggcgtgtagcagagaggagaagagagaattagggttttcagacttagagttgagagcttagggagttttgaggcttaatgacttagggttttaaagataggctaatgcactttatatggtagagaatacatgtctaatatccttaaaaataggtaaatattatatatatctaattaataaatacaaatgattgaattgccccttgaaaatagatatcttccctctatttttgtgggttgttaaggcctaatccgttgcttgacttgctgtccacgaatgagagctgcacatcaaaatcttgccaagccaaaggctggccggtcatgcacctgcatgatgcaggttgggcggccatacagtgcctgcaggttgaggtttgcccgatcatgctcttgccagcgtctggctggccatgtgcctgctaggctctggctggccatgtgcttgccaagatcttgcaggtcatattcctaccaactttggcaagtagaggctagccttttcaggtggaggccaacctttgtaggtggaggccagcctttgtataccatttccaagcagaggtcaggcttccttagtcgaacggaccctcccttggtttgaaagtcaccttttggccagccagcttgttctcaaaccctggccggccatacaagctcatcttgactgacctatagattccccttggctggccaaaaatggtggcatagttccttgacggattgattaactccatttggttaatgcttgatggttttgccataccttgtaaggagactttctcttgctattggcaaggctgtattctacatgtactctatcttggcttgcgtgaacatgccatgtcaggtagaaaaaaattgggataataatatgaaaagatgggacttcttctcaaagatcttgtcctttgcacacagctagtgtatggtttctacgtacagagcattgctccattgggagacatttgtctccctcttattgtgggaaaatctctgaccaccaacatggtgatggccaaattcctactaattgatgtcccttcttcttttaatgtcatgataggctcaccgaccctatattatttgaaagcaataacttcaatatgtcagtgcataaagttcatgactaggagtggagttggatgtttgaaaggagattagaggatggtgcaccaatgctataacattgccttaactacgaccaataaagaagaatcgaacgaccaaggatcaaaggctgaacagagcccaagaaaataggaatttacccaaagcgagaacgatgaaatagatcctcgctttggggatcacattacatatatcagactagtggaggaattagaagaagtggagatcgatcccactatgcctaccagaaaagtcaaaataggctaaggtttgttgctcgaaaaaaaatcctctcagatcaattttttaagagaagacctcaacatttttccctagtcgcatgaagatatggtcgggactaacccatcaataatttcctatgccttgaacattgatcctaaagtctgaccgatccaaaaaaaagtaatgttagacaaagagagggcacaagcactaaaggaagaagtagaacagatttgaattaaaagatttatcattgagcccttctaccccatctgggtagctaaccctattttagtaccgaagcccaataaaaagtggtgcgtatgcatagatttcaccgagcttaataaggcatgtcaaaaagactgtttcccacttccaaggatcgaccaccttagtagatgctattgctagtcatgagatcctaagcttcatagattcctactcagggtataatcagataaaatgcatctgcccaacaaagagcacacaaccttctagactgatgttggcttataatattgcaaggttatgttgttcggattgaagagtgtcaaagccacctaccaacaattggtcaactagatgttcaaagataagatcggacataacatggaggtatatgtggatggcaagctcatcaaatccaaaaggtatggggcacatagaagacctggaggagtgcttcaaaatcctatgaagatacaatataaagctcaaccccctcaagtattccttcggatttaggtggggaaaatttataagctttattgtcaatgcaggaggaattgaatccaacttagagaaatttcaagccattctggacatgaagtcgccaacaaaaatcaaggaagtgcaaagcctcactagttggatagcctccttgagcaaatctgtttcaaagtctactggcaagtgtgtttccttttttaatatccttataagttattgttgaccgagattttcggcaactaataaaatatgattatactattgagctgtaagaaagtgag

SEQ ID NO: 303988 - DNA, 1870 bp, Cannabis indica
aaaagtgttatatttaaaaaaaaaaatataaaaatagaggtaaaaattaaaacaagtaaagtaaaaggggtatacaatataatttcctcaaataaaatgaaaaatttacattcacgcaatttatttacatacatcttgttgtccaatttgatataaaatactaacattttgctatgtcgtttgtattttaattgttttcctttacatacatgcatagtaagtgttgacatcatcatcatcatgtactattaagtataacagtttgagaaaaagtaaggtaaagtcaataaaaggatggtcttctactaactctcttctcagtttttttatctcactcctttcttcttgttgcctttttgcttcattatagctcttttttttttttgtctttgtgccgccgtccttcgtgttcctttgttggttgtttagcgtctgtttccgtttcttcctttttgtaggtgtctccccttgttgtggtgtatcttctgttttgtcttgttggtcccaggtgtttggtcatttcttgtattgctctttttcctggtctagtcgtaggattagttggcgttggttgtgtctattgttaggtatggaggttgttaaagctgccaaaatggggagatgtatatcatttattgatgttattgtatccttggccccttgtgcgtctactattcaaacattaaccaccctttgccttttggggaaaattgtaactcccaaacttgtggaggaagctgcagtcaaggagttcgtgcgctctgtctggaaaagacctacctctgtaactattttccttgatgtcactacaaaatcaacaatgtataagtttggctttaagaaagaggaagacatgcggtgggtgttggaaaatggctcgtggtgtgtgaaagtttataatatgatcctacatgaatgaggtccgagttctacaagtgccatggcgtgtggagtgatttttttttgggttcaaatccatcagttgccccacgaatatttctcagtggctaatggtaatgaattgggtgttctagcaggttcgattgtgaaggtggatttggatgaaaagaaacctgctagttggtctcaatggctaagagtgcgtatagatcatgatgtggagaagcctctgtattctggatatttcatcaacctgtcaaatggtactaaaaaatggatccaatacaagtatgagaaacttggcattttctgctttcattgtggctgtttgggacatcaatggaggggttgaagtctttcttcttctgacattatccagaacgttagtggggatccctttcctatctattggccttggatggtgactatgtccaggtatgttgattgtttttctagtaagatgagtgttgctaatcatggtgtgtctcggcttgggccacagtcttcttctccggcccaggctccagcaattatggagatttgtcacagcggagctgctgctaacgggaaggcttgaatggcgcctcattctgttgagctttgtgccataaataaaactctatttcaatgtaatctttatcatttaattatcaataaagagacagaagtattttcatcacttatttagtgtgtcatttggttcatgttatcatttatatgtttatttgatttataaattcatccaaactcctatcacattgatattcttgtttatgtgtcgtcagcacagtggaaagtaatcaagattatgtgattaaatgtattcctagatttatcagtacacagggtttaactgatatgataatctacaacatagtttacttgcaccttagataagtgctatgtcctttccagggcattggttaaagtaagcttaggttggatgcatggagtatgcattggaagagac

SEQ ID NO: 303989 - DNA, 2246 bp, Cannabis indica
tatgccgcttacaaatataaaattttggatacttataccgctatttgaataagacaaataatcctacgtgccccaatctcgttacacctatgcagttcttttgtgttttcaacatttaattttgagtataatttaaataaaattacataggttagctattttattttgtgtgtatgaaactatatatatttttataattattttatatattattttttaatttatcgtgtagttgtttagtaatttttatgtagattgttatataaattttagctacaatttaaattttgattgcaatttagatttaagttaatatgttagttgctatgtgaatttttataaaaatataaaaaaaaaattatttgtttttatatgataaattactttgaaaatcaatttttcaaaatttactgtaatatacaagaaattgaccatctatatctaccgaattccatttctccttcaataaattcccgccaatttctatatattaaaattaaagagcaagaatcccctccaatttaccatcccaatagtttataaacaaatcgaaaatcaaaatcaaaacctcccaaggcacggcagccatggaagttgcaggtttacccatctcaccgtcgcagcgaggcaaactcatatcagctggctatactactatatcctcccttacttccctctctccccatcaccttgctcgaggtaacctcctcttccctttcataccatcgacgcaccaagtgttcgatgaatttactatgtgagatctcaactttaatagttttcttcgatatgccaacaattccacacctgggtctgtactgctaatcctaatttttaaactaaatgagttactattgaaaatgtcgaatgccatagccccgcctaatcctatccattgatccacggtccaccctatccctagtcaataatggtccataatttatttattttttcttcattacatgagctttagcctttctggtcccggctttttaatttaccgttttaatgatacatacttttttttagcagaccttaatattcctgaggaagaagctgttcaaattctgggggcagcagcatcacataatagtagattagacactagtgatggaggccactctatagttaatggtagttactttctttggacctcatttagttctatcacgaccattattggttggaaaacttaagtaatgtttagaaaatggatttatcttagtttagttattatagcaagagcatttgaacaagtagtctccatttagagtttagtattgactattgtcaagttctataggcagggcagagccagaaattttgatcggggcaaaaaactgtattttcgtttttgtttatatgaattgcaataatagtcttccatgtatatttatgctttgcattatgggctaatatatttgctagtaagcttcttttttttggatcaattatttgctagaaaggttataaggctattaattaagcctatcctatttataggactttgataattttttccccatagttttagccccaacttgccttattcgtcctccgaccctacttataggtagtagttattccttcatgcatatttcgtgctatgaaaattgatgtgacaaatggctcggcatgatttgaattcttatatctcctcattgtgttgcttcaaatagtgtacaattttagtgtaaaagtgttttggggtttaatattacacttaagatgatacttaaatggtgtgaagccttcatttttcattctctcttaatagacactagatcctttaccgtcaactacaagcattcacaaaaactggggtataaatttctgtcactgttttatgctactaggtttgctccattatctcaatgaaactaaatggactttggtgtaaagtttgggacatatgaggtatgctaaaaagatttatgttctggcttctgggttgcaggtgcacagactgcatgggacatgtttcgggaggaacagtcttctctgcgcgttactacttcttgtgcagattttgataacatccttggtggaggaataaactgcaaagaagtaactgaaattggttagttactgttgtctgcttcttttacaattataaatgttccacaatttgttttcatgaatggagaatctttattagatatgtttgtcgtaaatacttataggtggagtaccgggcattggtaaaacacagttggggtatgaatttttttgtttatttgttttta

SEQ ID NO: 303990 - DNA, 1305 bp, Cannabis indica
aatgtcacaaattttaaaaatacaataaaaaaaaatgtaagatgccacctagactcctttgtgctttcctttatatttatatatagataggacttgcagtatcgaaagaacttcgcagtattgactgaaagagatctcgctatatcaaggaaaacacacctcacatatttgataaaactgcagtatcaataggaaaagatttgaacaaatcgatcaatggaaattaacagtcaaatatatttaagggtcattaaagcgaacgttatatttattttttaattgttgtaatcaatacaattaatatgtaaattattattgtaacttgtaacggtctcattatgaccgaactattgtaaccgctatctaatacttataagtatggacttccctttgcattcaattacaatacagagcaatagatcactttcaacaacaatagactaggcacaccaaactttcttgaattattatatttttttccgtttattctatattatttacatactcatataattatatagtgagtactctctatttttggtgttgtctaaattcctctaataacatttaacgctagaaagagggtgtatttcagtactattcctgtaattattgtaggagaatcatggctcgacaaataacaaatgcacaaaatcagctttggttctacgacacaccaataaagaaaaatacataaacaatatatacacaaaataaagtcatccccaacatcaagacatcaatcaaaacgagcacacatttttcgtagaaaatttcagcaaagctctggttgaggaaattgttgtgataaatccaacacgcaagtatacgtaccgttttaataagtaatactcaagtaagtgagatcgttcccacggggactgcagttaagtaccaatcaattaaattcttgtttttatttggcaatcgaataaattaattttgaactaaataaactaagcaaaattaaataaaacaaataaataaaatgtttaacaatggatgtaaacttagggagatttcaattgctttgattacccaattgttaacactaattaaccattcttttttctcttatgtgatgacagattataaattaacctaaactcttttcaaatcataaaggtcctaaattgcatgcaaactactgcatctctgagatagaacaacatacgattcacaataagcaataatctaaaagtcacataaactacgtgaatactctcgtttcacatcaaaacctatgtctattcatttagagcattctcaatactcactttttagattttgtattgagatcatgaa

SEQ ID NO: 303991 - DNA, 1659 bp, Cannabis indica
aaaaaaaaaaaaaactttactttttcattcacgataaaattaaattttgaacgattgtttgatatatgtgcccaattgccaatgcatgaaaatttccagtgtaaaataaaaattatacctttaataattttgtaagaaaagagaaaggaaaattgaaaaaacacagtataattttgttattattattggaactcgacttggattggaagcgaaatggaacaagttgaaaagtgagctgttttcacttatagccgacaaaacaataaagcaagccgttatggaagggtatggaggtggtatctatttaatattttcttattaaattaaacaaagtcattaactcttaaacacgagttagtgtctctgttagcacagtaagacattcccactagaccaaccgttggatgttttttttttctttctatatgatactattggagggaatctcgaggccaatcggacggtggaaaagttacacaagacttaaaaacgccttgactaagcgtaagcgaccacttactacagaaaggccctccaagaacgaatttttatctgatcctattaaggtcagagttgagttcagacttgagacgtaccccacaccaaaaaatgaagaagaaagccaaaaattatgccttccttttgctttttttctgggtaatctattcttttatgtaatcagtattgctttgcaaaaaaagattggaccaatcaaaccaagggttttattttgtttttttttttcagactttgtactattttttatgcctaagctaaattaagtatttggtgggcatagacattggtcgtgatgtcaatgaatggaaatttgaaaattgcaactgaaatattaattaaaaaaaataaaacaatgtttttttaaaggccttctcttttttggtcccaattatggatttttgtggtcaaattgtgaatgaatatgggcaatgagaaatgagcttaccttcttttttatttccaaaaaaaaaaaaaaccaaatagataagttctcttaattctttaagaaaaataattttcaaagtcagtttagttgttgggtgatcttagattttgcctatcacattgtaatgtgctcactcacctacttcattcttgaactaattcttttgacactatccacattgtattatccacattgtatgttggttatgattttttttttttttttttttgataatatgatttgaaacctaacaaaagactgaatatggaggccagggagattagattggtcattcgatttagttaagattaacgcttttacaatataattctcaactatttgtttacaactaataagacatcaatgtatttatctacttttattaaaaaaaaattgtacttttttctgagaattcaataatatttattcctttagtgatctcacaattttgatggaactcaataatattatgtttttttgctaacaacccaaatatagtatgttgtttttggtttaaaaattatcgacatgtcaaaatttctattatttaatatgagtgtgtttaatatagggaattttctatatttatatatacttaatattttatccctaaactaatatatatcactattgaaaatatatgactactttatctaaaacccaaaaatacccctctcaaatttcccatacttttt

SEQ ID NO: 303992 - DNA, 4998 bp, Cannabis indica
ttaaacaaatcaaagctgccactgataactttgatcccgcgaacaaaattggagaaggcggatttggatcagtctacaaggtatctaaacaactcattacttttcataactataagaaacttgatatgtcataacagaatgaaatacacaactggtttttattgcagggtgtgctattagatggaactattattgcagttaagcaactttcatccaaatcgaagcaagggaatcgagaatttataaacgaaataggcatgatttcagctttacaacacccgaatcttgtcaaactccatggatgttgcattgaaggaaagcaattgttgctggtttatgagtacatggaaaacaatagccttgcaaatatcttatttggtaccgaaaaaagtgaagcgaaactagattggaacacaaggcaaagaatatgcataggcattgcaagaggtcttgctttcttgcatgaggaatcagctattaaaattgtacatagagatatcaaagccacaaatatacttctagataaagaccttaatccgaaaatatcagacttcggtttggccaaactaaatgaagaggaaaacacccacattagcactagagttgctggaactatgtgagtttgttaagctctttttaagttgcaacattgtgattagttgattatcatggcaatgatactaattaattgttgttgttgcagaggatatatggcaccagaatatgcattgtggggttacttaactgataaagctgatgtatacagttttggtgtcatggcactagaaattgtggctggtaaaaacacatgagatttcgcccgaatgaaaactttgtgtgccttctagattgggtaacacacaactttcacaacttttttctttcttttttctatttcagtttggtactgatgtaatctttttctatgtttgttgaaggccattttcttacaacaaaagggagatgtaatggagctagtggatccgaatttggggtcaaaattcaagaaagaagaggcgaaaagaatgattaaggtagctttattgtgcacaaatccatcaccttcacttcgccccgccatgtcaacagtagtgagcatgcttgaaggtcggacaaccatccccgaattggtcatggattcaagtagtcatggcgatccattcaagttcaccgggttgcgtgacaagcttgatcagatttcacaacaaagctcaagtgaaccaacaacatggagtgaatcttcctccaaataatctttctatttgcttagtgagagttaacattagatatgtagctatgtttatatcatttgcatttaaaattagttatgtttgttagtattcttggttataatctgttaactatgattattgttgtaaatgaaatgaaaaataaaaacaacacaattgatataagtataaactaatattatgtggttgtttaaggtccagaaaacaaacattctgatcaccacacaaaaggactctaaaatctaatcttacttagtaaagccacacaaaaggttaattaacaaagctaatacaaaagcacaaaacacagcttcaatcttacaaatgataaaagagatcatgcagaggcataatcaatccatgatgatgagttggatgactcagcaagaatatattgagcttcattggaggattgttgtgaagtttgatcaagcttgtctcgcaaaccggtgaacttgaatggatcatcatgattacttgaattcatgatcagttcagggatggtagtcttgccttcaagcatgctcacaactttagacatggtggggcgaaccgaaggagatggatttatgcacaatagagctaccttaatcactctatttgcctcttctttcttgaattttgacccaaaatttggatccactagctctgatatatctccattttgttgtaagaaagtagccttgatgaacaaccataaataagatttttacatcattaccaatatgcaacacaacaaaaaaataaataaattgtatatgaagttttgcatacccaatctagaaggcacacaaagttttcattcgggcgaaatctcgtgttgtttttaccagccacaatttccaatgccatgacaccgaaactgtatacatcagctttatcagttaagtaaccccacattgcatactctggtgccatatatcctctgcaacaacaagaagaagaagaattcattagtatcattgccatgataattaactaattacaatgttgcagcttaaaaagagcttaacaaactcacatagttccagcaactctagtgctaatgtgggtgttttcctcttcatttagtttggccaaaccgaagtctgatattttcggattaaggtctttatctagaagtatgtttgtggctttgatatctctatgtacaattttaatagctgattcctcatgcaggaaagcaagacctcttgcaatgcctatgcatattctttgccttgtattccagtctaatttcactcgaccttcttcagaacctaatcaatgaataatcaaagtaaaaaattttgcagccttagtaaagggacaaacatagaaaatagagttaccaaataaagaatgtgcaaggctattgttctccatgtattcgtaaaccaacaacaattgctttccttcaatacaacatccatgcaatttgacaaggtttgggtggtgtaaagctgaaatcatgcctatctcatttatgaattcgcgattcccttggttcgatttggatgaaagttgcttaactgcgataatagtgccatctaataacacaccctgcaataaaaacatgacatttcattttgttatgacatatcaaacctttagctacggactttttagtcacaacataagaatgatgatttataattagtcacagcttgttgtaactaaagtaaaattttttgtagtgtttataatcatgaaaactaacaagtgttagataccttgtagactgatccaaatccaccttctccgattttgtttgcagcatcaaagttgttagtggcagctttgatttgtttaaaggtaaagaaaccagtttgcagatcaagtcctctaagaactgtacaaagcaataaaattagacaaatttgaattcattggttttggtaagtaaaattatgtgtagcaatgtataatgaaccaaattgtaccttccttccttgaatcattgcttccaaaataatatttccaccaaagaatggctaaagctatgagaagaaggcaaaaagatgaaaccgctccaacgataatcaactttgtgttggattttctactctctatctctttttcctgatttggaggtttgttatctaaaagtaaaacaaaatacaaaaataaattctacttttcattatgaacaatgttagtttctatgtttctatggaatatcatgtacttacatggctccactgagatagctgatattagagaaccatatgatcctatctttggaacattcctcgtacctttccccgtccattggaggcgaatctctagtgtcttatcactcacaacaactggcttaactaccttgacagtttccttatcaactccactagcattcttttcaatgttgaaatctttaaactccaattttccctataatgacaacttattaactcaatcaaactcacaataagttgcatcaatcttactttaccaaagtcaaaaggaaaaaagacatgactacctgaacataaacatcaaatattcgccttcctaaactgaaataggatttgttgtctctaaatattatctctgaaaaatgcagcttaacagtgtagcttccatttgctaagcaacgaccgaaataagttagcgaaagaggcgagatgcgtgcagttttggaagacgaatatttgatgtttatgttcaggtatacactcttgatttgcttatgtggtcatatcgccacatttgatgtttatgtggaacttatgtttggctctaaattacattatagggaaaattggagttgaaagatttcaacatagaagaggaagctaatggagttgataaggcagttattagagtagttaagccagttgttgtgagtcataatacactcgagattcgcctccaatggacgggaaaagggacaaggaatattccaaagcgaggaatatatggttctctaatttcagcaatctcaatagattctggtaataactaaattttgaatatgtatgtcaatgtcatcatgaaaaaactagctttttcatagtgtttttctttttgtagatttcaagcctccacacaaaaacaaagcaaaaaatatcattatcggagtagtttcagctctttgtcttcttttcatagctttgggccttctttgttggaaatgctatactggaagaaaggaatcaagggatgaaggtaaaagaatgagcattgttatcaggcactaacactgcaccactatgaaatggtgccttataaatgactaccgatatttcataataataattaaattaaatcacgtgggacatgatacttaattctactaatactcatatatgacacatccaatagtgctagatatcactggtgtctttcagcatttctaaaaaaatatactcatgccatcaaatttgtcatttaaaaaactaaaatttgcatgatatattttgcctgtgttttgctccacataattttaccaaaataaattaataagaaattgatattttctcatgtagttctaaaaggattagacttgaaaactggtttctttacctttaaacaaatcaaagctgccactgacaacttcaatgctgcaaataaaattggagaaggcggattcggatcagtctacaaggtatttaaaactcattactttccatgactaaaaacataacatgtcacaacagaatgaagacacaactgaatgcatgtaacacttttattgcagggtgtgttattagatggcactattattgcagttaaagcaactttcatccaaatcgaaccaagggaatcg

SEQ ID NO: 303993 - DNA, 4194 bp, Cannabis indica
tcaaaatatttttaattatattttatcataacattccttcatattattaataacaattgtctataattaaactatttaattttaaatcaattattataacgacggcgcgaatacagtagaattatagaaaaaagaagagagaatttaaagatttgctgactagtcttggaggagcaaggttaactgcatttggtctttgatggtttttgataaatcatggttgatgatgtaatttgcatcgtattttgttaaaacagaaaggaagggataacatctttctagtaaggttttgttcccatgatgatggatgagtaattattctacatttaaataagtaatgtaatttgtcagacacagatagtagactttttcattaaaatccaccctgatgaaggaagaattgaatcgtggtgaaatgctagccaaatcgtcttacactgcaaatttgcaatccttaagagtacatgagaaaagaatgtgaaatataaatatatataaaaaataaaaattatagaataaaacgctgttcttcccagacgcaaaactttccactgcaaaagcaaatccaaggatggggactgaagagcgcttagcaaaccccagcttccaacttttttattatatctggtgtaaccatttgccgtagcacctggaactttttcaaagaatacactattcggcaagaatgtctcaagcaacaaaacggttctaagttaaacataacaggtagaaaattaaatgcaaaattgtatgtgaccaatcacaataaggtacaagagagagcacaacaaaccattcacatttccaaccccgagagctgctgcagtatcccaggctagaatgtccccaaaatatactttacaaataagtttctaggtggtatgaaacagttggctagcaagggtagaccactagacccacaattctgttactcatgctttctttatctctttacaaattgaaaaaatggtactaccaacctattatagtagatccaagagggagggctgctctggttgtgatttgacttgagtaggccgaaaggctgaagtgatcccccttcctcttcctcttcctcttcctctacccacagcagttgacgggggaggagcaagccttagagcagtatgctcatttttgctggaagtaaatatcgatccaagatctgttgctttcttctcagtataagtatttgatgcagcaatgccctgattctgtttaataaaaccaagggaactctgagagttaagacttcctaaactgctagtcacagaattgccctgactttgagcattaaagggccagtcactgttgttgttctggaaattcatggtgttcgatagatttgagatagtactagaaccataagtggtcgatgatggtgctaaaatgctgttagaagttccaacaccagtcactgagccactaggccgtgggggccagttagcaaaaggatccatatcatcaatacttgaatcggatgatgtgcctatgttcaactgcttctcagtattgccaaattggggattaactttagaagatgagcgtggaggccactctatatcaacaggagggcaagatgtggctgtttgatgattggaaactgtgggaaacggcaaggattgcgattgtgacgaagttgcaaggattggttcatgtccaacaggctttgtggaggagctgttaatgctgtttgcagtactttggacagaagaggcagatttgtttgtagttggaccccaatcttcatcccacgcaggacttttcttagctgtagaattaacagtttcagttgttctgcttgatgctttaggctggagtccattggcatgaccagctggctttgcctctgggattccagagtctgtcacagtaactcctctcttttcttcaattttcctgtcatcacgccagacatataatataattatggaaactaacagtcccataaatctatgagttgaaaactgcaagtgcatgaatgggagacacaaatgatcataaccattcacaggttgaacactttatattgatacctgaggatatctttaacaaagagcatatatttggcaaactgctgaacatttagttgttgggcagtgagaagaggtgtgagtagtggtagaacatgctccgcagtaaattccactccgtactgtatgagatttccaactataataaccactagacaagatctaattaaaaggttctgttaccattagaaacctacctgcttaagaattgagcttgcaaccccaagggtgcacataagggtaggagcagaacgatcaacagctgtacaacgatgaatagtttgcaagacctccagaacagcatgtttatcaagcgtagtaaccaaatcccccaagcacagcaaagcattaactctgacctggcagcagaaggtagctccaattaaaatcttacatcaggtgaaaccaccaatggaattatgcaagaaaatcctctatagttcttcaagaaaattttgagtgagtcactaaattttgtgcaataagctcatctagctgtgcagcccataccagtcttgcataataagctacacattatagttgtaaatttgtgtgcatacgtaagagaaaaaaacaattgccactacagccaatcagatacaacattttaaaccaagaaaactcaggagtgatactttaccatcattaataagcttaaaaaacatagcaaaatgtaaccaagggtgaaagaagaaagaatagaaagatagcacagaattaaatatagtttatagagattgaaaagatttgaaggaatttagaaagagaacattcatcattaactaattattcttgacaaatcaagcgaataataaaagataactaagcctaactatgtaagcatataaaaataggaaactaaacacagtcatgaaattagatacatctgaaaaactagaagaattttatactttaaaactctagttacctaatatatgtgacacctagagtagtattactaaataaaacaaaaaattattaccatcatctgcatgaatagcactagataagtttccactaaatctcaataaaaaaaaccaattcttcaataacatgtaacatgccattttggtgaaacagatgtctacgacgcaatcactagtgatgattataacaagacaaacaagtaaaaaaatgaaaacaggaaaggtttgttaaacaaacataccgctgctacggttgtcttaagagccaagccatggacacgaggcaaaagtgcttgctttactagctagagaggagagaaataaaaatatcagaaaagaaaaatatgaggcctctcgtttatgctggtaagtcagaaaaggaacacttccagtaaaatgtaaatcgcagttacctgaacatcaagttgcttggcaagaaaagcagatttttttaaaacttcctcctgaatgcgagcatcattatcatcataagcccgaacaatcatgggtaggacatgtgataccaagtgctcctgactagtctacataattgataacggaaaataagtgtcgataaaatacaagaacagtcaatgaacataaaaccagcttattgctcgctttaccttgtttactataagatctgcatgcttaacaagcagcaacagtgtctcacccactgcagtactcaggacaggaacaagagctggcagtgttgatagctcaaaatcatttttttcctacagtgagtttaagacataataagaaatgtgaaaacatttaactgccaagcttatatcaaactagagtaattatgatatgaaatgtacaaaataagtgcataacacagaattcctagttcttgtgttaatcaatactgaaggaattaatacctgagcctccgctatagtgagaaccattggcagaatcattggttgcattaccatattcctaagctctgcacaaagaggcggaagtacctacacaataaaacaaagaaaatgttaaataaaataattcaatcatcaaactttgacaaaaaaaacgatcataatggaaatttgtgcatttggctcaacaaataacaattaagaaaaaaaaaaccttaaagacaaaatatactatcagatattccagcaattaataaaagtaaaaacaaggtaatatgtgcatttggctcaacaaataacaattaagaaaataaaaccataaagactaagtgcatgtttggcatc

SEQ ID NO: 303994 - DNA, 2707 bp, Cannabis indica
ccccccccctaaaaaaaaaaaaaaacgaaaaaagtgagccttcatcatgagaaaaaaaaagctttgattacaattatgatgacaatgttaccacaggttagcaagaaatcattgcagaacacttgggaaaaagacaactattggatttggctctaaattatcccagtaaagtgttattgtctggttttctttcctacttttatttttcgagtaattctcttttacatttttaattgaattataattactcattaataaaaaaaagttgtttcttatcaaaagaaaattaatataaaatcaaagtacggtgttcaaaattgttcaagatacaagatttaattttcatgaacaaggttaacaatattcagtttgacgtaattggatacatagtgcttagaaatttataagtaaacaactccaaatatcaatgacaatcaactcggtcgcatacaagacattgaaacagattcaaagaaatttcaaacatttcgagcaaagatgaatcatcactcaccaagtttctttagaaggtggcaaagcgcgctgacaaacgaagccaggtagttacactgatcaaaatccaagttgtcgccatttttttcgtcctagcaacgacaattaaagaatattacatttatcacaaatgaaaaatgagcataaaaaagagctccagcttaaaggaaattgaccaaaacaaatgagcatgcgttcagaatacatgatttgcgtgaatttcaacaaaaatggagacctcttcatcattgttcaatttgcgttttttaacagctaaacagagcaatccagttagtatagaagaggtaatacaatgaaatgtagtaatcaccttatcgatatctggagaattgtcaataagagcagcgaaaagagacgacggagataacccagtagaagcgagaacacaatccagaactgccggaacagcagccggaggtacttggcgtaagctattacatagagaattaattagagaaacggtggcaatgttgtcgtttatcgccataatctgagcttccttctctgagtgttctggtcaatgagcgggaaagcaataaccgtgtttgtttttcagacaagactcttaaaccctaaatcatgcataaaccctcaaagttattttcctttatttttttatttttataaatatagatagattatttttaatcaataatatacatttaattacacaaaatatagatttactcatttctaattttaattatggcattactttattacttttattagtttttctctttaaaaaaattattgtattacatttgtaactgttattaattattaaaaacaagtacattaaatctttaaatacactacataatagaatagtcactatagttttaatccataagagagtgacatcatcatctctagccactcactcaaggccttagcaaaaggggaacaggttgcatatgattttgacccacccgggccaaaatggcaaaataaccagctttctaggactctgctgatgctgctacaagaggaactaaacatgcctccagttgtggagatgatggaggtggtgtaacatctaaatatttaggcttcttccatccgctcttctaactgttctgcaagcttttttgcttgactacgaagagcttcctctgttagctgtccatcttcgccaatcactagttcgtccaagttgacaaacaatggcgcctcacctccactcacggtcctcaaaaactcttcttcgtgggatcaggcacgtaagatagattacactatcaagtgttaatgaaaacaaaaatattattataatgaatgaaattaaaaaagaaatgtagtacaatcaaaaaaataaaccaagatcaaggagtaaaaaacttacatttttgttgaataaatttataacatgctccttgttgatgtctatatttttcttactctcccagttaatcattattgggaagtcatgtgcttttctgacagcctttctgacagtaaaaccatcagtaatctctaatgtggaatcaaaagcccaatactataatgctgcaacacacccatatgtggagtacttcacctccttgtgctaagaggaatcctttgaaatcttcttatccaaattctttttcatttatgcaaagtctttattacaagttttcatcaatttgttgaacggaatattctcccatggatactcgtagaagaagttcaagtcctccaccactctaatcataaatggaggaacgattgtcttctcatcacaaccagtcaaaatgccagtaacaaacatagaaagcctcaacttgtaaacatcatccactatcggacaactttcaaacactctacatagttgaccataagcgatggatgaattaccgttgaagtactcaactatcaatcggtttgaggttgctttctcttggatctccttcttagttggcacaggtaagaaatttaactcaatcaccaaagaaaactcagcacgactgaatctgcattatttccttacaatgtagaaatggatttcgtttgccttatctgattagatcttgtgcaggaacaattgatagatcaatgtacccgatatatttaatggatccctctcgaagaaatatttgaaaggggattcattcaccctttccaataaaccgaactccacaaatttaggtgccgtttggtaacacttttgttttttaattttttaatcaca

SEQ ID NO: 303995 - DNA, 1736 bp, Cannabis indica
gacatcatagcttctaggaaatcccattccaccctatcataagccttggacatatcgagtttcaaagccattttagaaccgttaccacaccgcccttttctcatgctatgaagactttcaaaatccaaggatggcattatcatgtatgattctacctcctaaaaaggcactttgattttgagaaatagcagagtttagaatcatcttcattcggttagctaagcatttcgaaatgactttgtaaataatagaacaaagactaatgggtcgaaactcagtcatcttggtgggatttcgtacctttggaataagacataaaagggtctcattgaataagccacaatccgagttgctattaagtaccttcaaacaagctgctgtaacatcttggccaaccagatcccaatatttttggaagaataggcctggaagaccatctttaccaggagcttttagagggtgaatttggaaaagagctgtttttatttcttcagccgagaatggttccaacatgcttctgttttcagcaaggctaatacggttcgggacacaacgagttagaatactcttaatattaatgcctcggtttgatgaagaataaaggtgacgaaaataattaattgctatctttgtgatgtcctcagcagtggtacaccattgtgatttctcatttaacagcccagtaacagtgttctttttccttcggtgcgaggctttgtaatgaaagtactttgtattacgatccccgtgctttaaccaaagagcccggctcctttgcttccaatagatttccctcttttcctcaacacaatttagatcatgttcaagtctttggagagtagtccactcatcttggcctactgatttagatagtacttcaatcttcgcctttagatcttttgttcgagcagtaagttctttcttttgtcgaagattccatcccgagagctcttttccacagctagaaatatatggaagagagattgaataggattttctgaaatattacagctccaaacgtctttaataatcttgtgacattcttctttttcggcccaagcttgctcaaaatggaaccgagatccccacttccgattcgtatcattgttcttattccccaactgagcagataaaatcaagggtctgtggtcagaattccaccaatttaacaggacaactttacttgctttaaattttttcaaccaatccgagttgcaaaaagctctatccagctttttgaaaaccagttgctttggtcttttattgcaccaggtgaactccccgccttcagcaactatttcacgtaacaaacaacttgaaattgtagcacggaaattacgcatcaaatattcaggtttaggacctccacccttcttttcagagtgtttagtaatttcattaaagtctcctccgcatacccaagctccattaaacataggttgtaatctttgcaagagtttccaactttctgagcgacctcccgggtccggactcccataaaaaccagtgaaccgccaaataaaacccatatcattttcgaccagagcatcaatatgcgaaaccgtaaaagattgaattcgaacattgaatttgtcattccaaaggagagccaaaccaccgcttttgcctttagcatccactgtaaaacaaccatcataacccaacttcacacgaacaacctccatagcagcactagacaatcgagtttccgacagaaaatcatctcgggatgataa

SEQ ID NO: 303996 - DNA, 4200 bp, Cannabis indica
gccctggctccagcttgacctaaacaaatccgcaacagttaggtaaaaattccgcgaaagacaaaaaagtaacaacagatgacatggttagcgggtgtaattacctcttgagtgtccctgctgtttgtcacgggtttgttctcgttgttgtcgagggtaatgtgcttcaacaaactgttgggtacgtctttaacgatgtgccactttacagggaagcagccgttccatttgtcttgttgccaatactcgaggttcttgttgaaatcaactggtccggtcatctcagctaaaccaacaaattgcccgctagtattgacctataaaaagttcagagaaaaacagttaattagacagaaatacatagtaatattgagaaaccgaacaaataagcatacagatcgcatttgctcaccgagaaaaagaggaatacagggcagctgccaggcttctcctgagcctccatgtatgcagcatgaagcttcttgttaccattaggagtacttgcccaaacactatacttgatactcttgtgaacatcatcctcactgtaagactttataatgaaacacttggcatcagcatattcctctgagaaatctgccttgttgtattgttcacggtcaggaacaccaacagtcttgtccttctccttgtcatttgtagctgttgttggcaagttttgacccttaactgcaagagtaggaggtgcagcaaactccttttggttcttggaacccttggctctaggccctctgttcaattcatttaagccgtccatgttctcgttaccatatccatagtagccaccatttcgcccccttggcttgtacttaccatcaacagctaaccatgttcgttggtttggtcgtgaatcgtatccatatccaaatcccatgccagatctaatggcgttgctatactgaccgtatagcttgtttggataaagtctgttaatgtaccccggactcatagcagacaacggtctagggtgatgcactccctgaaaaacaaatgatacataattaaacattaacactgaaacaaagatactaaaaatattttatgaatattataaatcgagcaaccataccatgaactgtgaattcgggcgataattttgattccttgatggattgttgccatttgatattgatgaagttatagttgagcttgtcaccggcctcggctgccaatctgaaaaaaagtggtgcatctaaacatggaattccagaacgtaaaccatcaaaaccaaatctcggatcctgataaccaggagtagaaacacgacctggcaaaggaccccttccgtacgaaccattcgagttaaaagatgagttctggtacgatgctggtttaagaggagccgccgaaccattactattattattccccttcatgttgttggcagtgtttacaatgccattagcattcccattagctgtttcaacaggcagaggcttctgatcagcagcaactgaagtagaaacctcgctttgtgaaactgcaggattaggtgtaaatggcgcactatttggagtaagcggctggaaataaggcgggtactggtagtgctgtggtccatacagctgaccatcatttcccatggtgggaactggtgatgcagctggtgaatatggaccataaggcgcatagccgtaaccgtgatgatacaacaaagacccattatccccataaactccctaataaaaaacacaaaaacaaacaattattagctacagaattattatattctagatttaacaaaatagaatcaacatagaaaaccactcacagtgttcatatccactccatctggattcacatatcttgagtaatcatcccattcattactggtaccatcataggctgcaagagacaacaaacacaaaggttcataacttcaaacaataaacatattaaaacacaaaaggaacaaatcacaatcaaaatcaaggtaagcaatcaaaattacctcctccaaagtagtaagaaggataagcagcatttgggacatagcacattgaaggatccatgaaatccggtagaactggagtcattgaccgctctgctgatgggatctgaccattaggagcattgccagagtcaactgaaccaaactggttagcagttggctgccatagtcaaattaacaatcccacaattgtcagcaaaaccaaattcaaaaacaaagcgggaacacaaaacaagagagaattacaagagctataatactgagacaaatagtaattataccttcttggttggctcaggaatatccaaagctttggtttgagtatctaatgtcaacttctgaagcaaatcagtagctgtttctattgacagaataaagtaaaggaaaaaaaaacatacacaatcctctataatttcaaatccaattcaattaagatcataaaaaactctatcttaaacagcacaactacagatacagatacaagtaagctccatacatatacgaattaacagccaattcaaaacatacgaattacccaaacaaaacagctctcaaaacacaaactccatacatatacatatacagatacaaaactacagagcacagtaactttgagctttaaacctaaaacatcatttcaaaaccacttcaacaaacaaaaaagaaaagctttacaccgatctacacactacaaaacagaacaaagcattcacagatcgaaagagacccagataacaaaacacgaaaaaaaacaaaacccataagtgaaaaaccagacttttaaggatacgatccgcaggtgaaacggtagccatgaccagatttaaagatccctttatctctttaataaatcttcactcttcttcaataataaaccctaaaacaacacacaaacagagaattggataattggggttttaggaaaccctaagagaaagattttgctagtgagagaaagagatgagaagagagagagagagagtagagtgatggagcaacaacgggtctcacagccgccaagggtttgggtttttggaaagaaagggttttgatgatccaaaagcggtgattcaaatagcaccacctctccccttaatacaaacctctgataatctcaccttactgtcacttttgatgacatcattgctcttttttaattggtccacgtctgcaatccaccacgtgtcgatttcgtctttaactttgcttcttttcttattggttgcttatctcacccgcgggtgaggaaagtctcctcattttcgctattactacaaattgaaaaatctgactagttgtacctttgtggaagagaatggaaaccctaatgtatgtgtccccatcgtttgaatggaattacgattttacccctggtgtttgtttttattttttttttaaattagctttatcaataaaagaaatggtaaataatattgggtaatgcgctctctatctgtttcggcatttggaagaattttttaattcaattttgatattcaacaaaattttgaaaaatttaaaataatttataatatagaaagcagtgttcaaaccgtctgtttcacacacgtataaaataaaatagtactcatgtgtgtaatacattgtttgaatcttgttttcagcatattggattttctaaaattttacaggatgtgttaaataattataacgtacatcaccataagaaaaaaatttgactaaaaaattatttcggataccaaaatagataagggtgcatcggtgcatcatattaagggggtgcattgaaaatttttctaatactattttagactatgtctttaaaagttactgattggaccttctgttttgctatatgataaattatatatttttcaaaatggtataaaataaaagttaataataacttaatttaaagttgttatgataaaattatattcatttttctgtatctttccgtactatgttggttatattaaaaaaatatcaatatttgagctcaatgtattattttgtatcattttagaaatacaaggtttaatttgtaattttacaaaacagaaagttcaatcagtaattctacaaaatacaaggtccaaaatagtattaaccctaaaagaaaacttaaacctcacgatcattacagataatatctattgaaatagttgacacattaaccataccagttaagttctgagcataaactcatttagtcattatggaccgtaaaaattcaaaaaaaaaaa

SEQ ID NO: 303997 - DNA, 2963 bp, Cannabis indica
tgttctaacactcttccaacagccaatcccaagagttgatttggatgacttttccatcataatattataaattaatatatctatttatataaatatatacgtacgtacgtacatacatacatatatacattctccctaattcataatcatatcatgctgccattttttgagctagctatgatatcactaatcatgaatgtaaatattttataagggtaaatgaggtattataggaaagtaaatgatcattttaattaacatttgtttttcaagtactgtttatggataggatccaagtggcaatcaagaaatatatctttgtttattataagatagtgactttaaaatgttagtcaaatacacaattattcaaacaaagaaaacgttttgtactatttgaatcaattaagaaattttatttccacccaataaatttttattttttcaatttatactaactttttttcttcttttttacatttttaaaaaattaaatatataaaataaaatatactctagatattgacacaaaaagaaaattaaaactatttaaaatcttatcagaagaaatataaaaatatgaaaataaaattaaaataattgttgaaattaatacaaaataatattataaaaatattaaaaattaatttaagttaaattttttaatattaaagtatatttataattttataaggtacaaatttttataaggttacaaataattttttttctaatattaaagttttattatctaattttaccgagatatttcatgtccattgtaattacctttgttattttaacattttattaatttaaccctacaaaaaaaatatatttatctgtttaaaaaaaataattatttcaatattagagtacatttatttatagttttgtgaggtacaaaattaaactccccatttaaaaaatgagagtgaaactaatattcaattgaataattcttgcccttttaagttgtttttctatcttaattggaggaaattaattggatgtttcttcaacaaacttctcaatctcacatatttatataaatactagaaaataaagcaaagtcagtccccttttgtctacaccaaaaacacttcaaattttctcctcttttcttctctaaaactcacaatatatgataagaagtactgaaataacttgagaatggcttatttaacatcttgttggtttattgttgagacagtcataatcccagatggattaattaagaagtggttttgtttaagcttttttatccatcctttaatccttttcttttgccaaatttttctctggctcaaacttctaatacaaacccttttatgtgtattactattcccttttagagccatttatgttatttgtttgtgtatatttagagtttttaaaaaatgtattattgtctgtcttttttcattgacaagattatttaaaagtgttgaagttgatgaagacttggttgatcatgaatattattatgaaactcaaccaagttttgacttttataaccatgaaatggattatttttctacctccatgaaatgttgcaaggtgaaacttattgagtttgaagaagatcatgtatttgaagacaccatagattatgcagatgatgatgtaattgttaataatagtagtaataataacaatggagagagtctattttatctatgtgatgtttcaactaggaattataaggagaagtacttgtttttggggtccaacacagatgaaaattcaagtcagattcaggggaatcatgaaaacatgttctatccaagtcaagagaacttgatttgtggtggctcaaactcacaagacagagcagattcatcaccatcctctgattttcgagtactacaagtcgaaagacaagatgataattcatcagatggattattctacaagatttatgctgagagaatgagatggtttgatgtactaaactatgagagaacttgtggaatgagtatgtatagttagctgctaatatagtctttaatttaattactatatgatgatatattatataacacttggctattttttgttatatataggtgcaataatgcagaacaaggagattgttgattgtggagtgaacaaaattagtaaaacaaggcttttgagaagtatagagaatgactttgaaatggtttatgtagctcaatcatgcttgtcatgggagattcttaatcatcaatacaaaaaggtcaaagaagtagtaatcaatatgggtggtggtggtgattatgatcataacaacatgtattgtagtaatgtggcaactgaattccaaaagtttcaagttgttttggagagatttatggaagatgaacagtgtgaaggaaaaagagttgggaattttgttagagcaagattttctcttaaaagtcttctccaagtcccagccgtttcaggtactcaaaagttcactttttctttttgtttttgttgttggggtaatgattttctattcattgatttgattaaggaatcttgttttagtgaataaaatatactctcttaatcaaacactcaacagggtcaagtcaaccataacaattagttaattactgtgttagtggttatcctaacactttatgataccttttacatttttttgttcagtattgagtgttcgtggtgtctaatattattacgagatatactttaacttaaatacgtgtcacttcatattgaattgcacccttgtataggataattttatattatacgtgtactaatggtattttttaaggatggtaattttatcgaaaactcgtttatttgtaagtaccctaattatccattgaattgagattcaaggtagggtaagtgtataaaaatatatacttgatacgagtataggataaggtatgggtatacgcaggcccagccctgggcatagacagactaggcctgtgcctagggcccacccagctcaggggccc

SEQ ID NO: 303998 - DNA, 2703 bp, Cannabis indica
ataattttcataaataatcataattaactgctaatttccaaattaactaagcgggctttacagcttagactcagttttaaatgatgattaccttatggttatgccacgtgtctatcttccagaaacaaggataacaacgatgttttatgaaaataatacgaaaactacaagaaacctacataaaaataacatctaaataacaatagaataataacaaataataacatacaaataataaaaaatcaataataaattaacaagagtacaacataaaaataaatcaaaagaccatattttttgtaaataaaattataaaaatcgtaacaatatttaaaattcggtacaattgcattttataatttttttttgttatttttgtgtatttgtgaaatatttctattattaaaaggtgtgtttagcacatgccaaacattataccaaatgtagtatcaccgggatgctagcaaacaatgataagtcgaatgtctattttgcagaagtagaagacagtgagaaacagaatattcgagctatcttgccatttagggagggtttatttcctagggtgaacttgtgtcctaaaaaatggaaggaggatgattgtaacttaattctcaagaaaattagaatgaaacttcatacatgggaaaaccactatcttacctttggaggtcgagcactactcattaaatctatgttggtgggagttcgaagttactggatgagtatctttttacttccttaaaaaggttaccaaggagatagataagctatgtaggaagtttcttcaaggtgaaagaggcaataacagcaaaatccatgtggcttcatgggacttagtttgtaaacctagaaagtttggaggattaattggggtttagagaagatcacattggaattgagcttcaatggctaagtatctttaggttttgttgacaagatgtcttttggtttaaatggattaataacatttacttaagggatcaagatgtttggcttcatgaggtaagagttgatgtgagttggtattggtaagaactcatgaaactaaaagaggttttctcccgagcagagatcctaagggctgaatgtaaaggaaaattaaaaataagcaaagtctatgaaaagttcttgcaaggggatactccatgtacctatggaagtttggtttggtgcaaattatctacaacaaaatatagattcatcttgtggcaagtagtgcattcccatttgctctcgagagaaaatctaattcaaaaacaggtacatattgattcacctctctatcgtgtttgtgaaatgggaaatcaaagtcatgaacatctcttcttcttatgtgcattctcatggcgtgttctgcatcaaattgggagcaagcaaggccgtcacctatggttgtctgactatacagagctgctgcaatggataaaataagagtaggtcaaagaatctgcttactaatctatataatgatgcactagcaggggccattgaagacatgtggaggaaccgaaacttatgcatatttgagagaaagtgtatgtctcttgcttatattaacagagttgtaaaagaaagtataaaagctagaattcaaattgtaaatgtgaaaaaaaaatcaccaggcatgctcgttatggattttgtacaaaggctaaagcatatactgaattgtgtattagaaaaattaaaatgaaaaagagagtaacaatattattgattgaatgaattggatacaatggcataggactattgttaacgcaggcttttgttaacaaaatttgagcctcatgaatatgattcaacacagaaaaactatagaaaaatatataaaaaaaaaatgaacaccgaatttttacgtagttttgcagttaaaattctacatagtccacgaatcaatcttattcagatttctgagtctgtttttctttttttgtcccccctttttgatcttatcttccactatgcatagtggcagttaattacaaagctgaccaaaatacatttacggctattatccctaaaatcatgggatttgattacaaatcaagccaaataaataaagtttttacacagctattaatatcctgcctttattgggccgagatgagcgcctaattaaaaatatatggtaagccatatgtcatagggatacctcaccgaggagggagccaagatcacttagatagcgagcagttgctagccattttagcttctcgagactaatattatcttaaccctgagggttatactttttggggttgagaagatcttcctcgcatgcaaaacatcttttagcgggataaacgtctcgctgtttgttatcttgactcgccatactatctctacttagtttgtatatcgaataatatacgctaagtatatttagtgttgtcgctttctctttcacgcaactaggttgaggtcttgtcataagcgtatgcattcacatggtttctcgtcaatacattaattagcaattcgtatgtttctgtctcgcagaaggctattcagccagccgagttataaacctaccctgcaaattatatttccaacgagttgttccatgctaagcgtacttatcgtttgtgtgtttgagttcttcccagcttgacacgtgtcctcctctgatgtgcttaccgatcttcgggtataacaattgccccttaaaaagttctttttaatgattaccaagggtatttt

SEQ ID NO: 303999 - DNA, 1694 bp, Cannabis indica
ggtgctctactgtgcaggaaagggtcaggctttagctgatcagccatgattttaggagctgggtgaagaatgtacatgtccgggccatatcagaccaagcgggttaaaggtctaccggtgttgaatttttgaaactctattttgccgcttaggctggctaactgaaagagacttgtaataaagtttgtaaatatttttagggatcccaactgttgtaaattttaaattattacaagttatattttcatttcgtttattgtaaaagtttaatttctatgctattttgattagtaatctcgtttaggggattagggtttcgtaaataacttggctagcgtgcctaattatttagggcgttacaggtgtagtgtaggatttagatgcatccatattggttattgtttaggatatctagagcatattgcgactgggatagtagaatcttgtcccctgttctatgtgcttgaaaaccaaggaagtagttgattgtcctaagagttttcaaggaaaacttggactgaagatcagtgataactttgtgaatgttgaatttgcatctataattaatctatcatctacatataccaagattagtagaagctatccatttttgttggtgaaaaatagactgccatcaaaaaatgaattgataaaactccatgataatagagttgtttttagctgggcataccaagcactgggtgcatgttttaggccatacaaggctttcttaagttggcacacataggtggggtagttgggatcttcaaagccttcgggttgttgcatataaacaacttgatccaagtaactatttaggagagtattattaatgtctatatgttgtatttcccagccataggttaccgccaatgtgaacataattcgaatggtattagctttgataactggattgaaagtatcaaagtaatctgccccagcagtttgttgaaatcctttcgtaagtaagcgagcttttaatctctcaatagtatcatctgcttttattttgattctatagactcgtttgttttctataacattcattccatgatggtaaggaactagaatccatgtgttgtttctttttaaggcatgatattcttcacccattgccctgttccaaagatgattatttaaggctatttttagagatcttggttctttaagataacattcatattgtaattcagctgcaagtgatattggcttgtatatgcctgatttggatctagttgtcatgctatgagatgattgtggtgcagtgttttagttttgtgagggcagagtagttgagacatgattgatttgggatctggtttgttggggtgcagagtgtataggatttaagttctgaactggtttagaattgtggtgacagccacttgctattggtaaatgtctatgtgaaagagggatttggatggtgggaggctgttgtgagggttctagtgtggaattggcttgaggttaataagcagtagtgattgttgttgctggattggggcaataaattgcaccagttggtataggcatttgctgtaaggaagggagagtaggtggtgagacagattttggggaaaatagctgagagtgtgggaaacaggcttcatcaaatgtaacacttctggaaatgtagattttgttgggttttatgcccaaaataaaacttatttcaatataatcagattcac

SEQ ID NO: 304000 - DNA, 1258 bp, Cannabis indica
gccatccaacaaagcaaaagttttacaaaacatgacacgaggggtaaaccgttgtctttgccaaaaggccattgttcagaaatttaaataataaaaactaaatctacatagccggagatttagttgggtcttcctcttcctcaatttcttcttcattgacatcttcatccttttttgttttcttacagtaagccagcatctcctcgacaccatatcctaggaaacttaaatccatattggggttggccaaccaagctctataaattgaatgcttggcgatagcattacaccgatccttagcattggccttggccccctcgagtttaagattggtttcattatattcctcttgatttttttgatgagcctcgtggagatatttggcttcctttgtagcaccatcgagttcaaatttatgatatctctttagctcctcagcttccttcattaatcgagcaacctccactcgagaatcgttccattgcctcgcagcaacttcacattattcaatggttgtgcgaagcttggatttcatttgctttattttatgaaggcctctttggtgagccaagtgagaaaatagagatgtctgtaaaaacaaacaattcaggaaaaggatgacaaaggaagagtacgaaatttaagtatgagatgaagataaagacttaccgagaaagtgagatttaaactcctctcagataagctcttgaagtctccattattgacaacatcccagtcatcctactggaaagatcggtaatgacaccaataggaagtagcaagctacgagtaagcttgcaagcctgtaatgcctttatgacttggtagggtgcaggacggctccaaaaacaccatctcaggttgtgaacctgacaacttaacctgatgaactgatcctaggacttgttcctcggtgttcgtagcaggtgggactgaggaggttatttggggattagtcggctcgataaccatctgattcgaggaacgtttcttatttgatgtggtctttctcaatctcttcaagggttttgggtttgtccccaaagaagtctctgaagtagcaacttgcttcttgcctttcttacctgagctagaaagaagattctcaaaatccatatctacgaggcaaaagatagggtcaacatttatgcaaaataaataaaggaaatgtggaaagataatctcttgttggaaattattttaccaggatcttagatctactcacaagtatgtttactaacaccctaaatatgaactt

SEQ ID NO: 304001 - DNA, 861 bp, Cannabis indica
tacattttaaatttattctatttcatttttatttatattcttatttctatttttattcttatatttccatttatctcaattaaacgaaagttaaaataaataatgaaaaaccaacaaaataattaatcatcatatataaagaagtttgtgcaaaccacaagctcgataagttgacacaacagttaaatggaaagtggccaataattgcaatgaattcgatctcacaaaaccggaaaacatacgcgtgttgttaataatagttgagaaaggagcgttactatatcattttagttcaatgattcatagttccattaaacagatttatagacatgatgttctcatagcaatagcaaacgcacttaaaatatataaaaaaattatacaaaaaagacgtggtaatttcttctaactaataacattatattatcttcaataaaaattgtgtcatatatatttcaacaaaaaaaaaaaaaaattaactttatataatatatttacatcaaattttagtattgatctcctaccaaatgtaaaatgaattgtaatgtggagttataaagtgagtagatgaaaataagaaccttataaattgatgctagttaaagttgtaatcctcttctccaaaactagtataaatgagttatggtcaaagatttttttgttgtttgagatttagagtgagtttagtataattgcactgtgggaaaaagttgtaggtgttataaaataatataaaataatataaagtagaagagaagaaagaagaagaaaatgaagagagaaagaaaaagtgaataagaatttgtcagttgtttattccaatggggtgaaccccttttatacaaatacaagagtgaaata

SEQ ID NO: 304002 - DNA, 2843 bp, Cannabis indica
aataaaactaacactacgtgacttggcacgtaacaatcacctagtatatatatatatatatatgagtgtgcattatgggtcgtactgaatagatattactgttatgagttaggtatcactcaagtggaaatgtaactaagcaatctatcatttataatcgtaagtcatgctgcagagtcgtaagtcgtgctgattcttgtgagaacattgcttaaagttgtctttaattttgatgatgcttaacttatagcaggaaccctaatggtatagaaaaattgtataaaaataagttaataatgttaactcattgcttgatttgttttttggtaagctaaattgatagtgagttagtgagatacggtgatgacaacagatgataaataatgatgagaataattttaaataattaagatataaaaaagagtgttatatggatcatgtcggactaatttcataataaaaaaaagattttgtacttacatgtcaagctaacatgtttgtacacttaatttttcatattattcaaataaaaattatataaaaattagtattgcgaattgcgttaactagtttatatatatttgaaagaaatgaataattcaaacgaggtgatgccattcactagttagtttcgttactccagaagaaaagtcccataattcactctataaaaagtgcttccaacacaaccagttcttttcaccaaacacaagcacaagcagtactctgcacacatataactatctagctagcttgctgtaaaactatgttcaccaacgtagtaaactattttgggcttcacctctttgacatcttcattcttctctttgtagcagctttcaccttgatatggttccaatggataaccaagaagttatcatcagtaccattggcacccctaccaccaggccctcgaggcttgcccatagttggatactttccttatctgagccaaaaccttcacatagacctaacagctttgggtgaggtttatggtccaatttacaagttttggatgggaaccaaactatgtgtagtcatcaattcgccacagctagtcgcccaagtgggtcgtgaacaagacataatattttccaaccgtgatgttggtgtctctgcctcaatcatcagtcaagggggccttaacatttctttccaaccgtatggtacagattggaagaagctgcgaaagatcttagttcgcgaaatgttaaataattctgtgcttgataatctaacagagctgaggagacaagaggtgagaaaatcagtgaagtgtatctatgaaaagagggaaagccctgttaatatagcactctttacgtaccaaacgaccattaattgtgttataggcatgacgattggtacttcattagaagaaaatgagtcggtcagccatgttgatggttctaagtttaagaaggcagtagaggaactctttgagttgctagcgaaacctaatatctctgatatttttccgatgcttaagtggtttgatatacagaaaattggaagagatacagagaggattaatcaagtgttcgaaatggtatttgatgatgctattgctaagaagaagaagaaggccatgaaaactaatggtaattatagtcccatcctcaaggaatccaccaccaaggacattctacaatcccttgtcgagcttcatcttcaacctcaagataaggatacttatattaccatacccgaaatcaaagcaatacttatggtacgtacataatcaactatatgcgaaatttcaattatttatgtgtctaaaattacattttatgtttaagctatgaaaacaatatatatatattctcaaaatcaattaatttggaatagtaaaagaggagaatttgtcatgacatttcataatatttattttattaatttatatatgttttaactttttgggtaaaattgtttaaaatatgtattgttatatccttcaagatattaatttatgataaatatataaacactacaaaaaataattacttttagtaataatcttttagtcacaacataaattttttgttactaaatgtaatttttcgtcacaacaaaaaattatttgtgattgtgactaaaatatagcatttaaatacaagttgtcactaatttaaagttttagtcacaacaaatatggtgattacaaacacatttaatcacaacaaattataatttttatgattaatactttagccgcgaactttataattacaaaaaatgttgtttcgtaattatttattcacaattttttaattttaatcacaaattttaatgccactaaaactaataacttttgaagtgatatatataattgtggtaatactacttaattattcaatttattgcacttgaccccacaaattgaaattttaacagcgaaaccctcctaacttcaattatgtgatagtattcactgttccatctaaacaaattctattaaataattaaaataaaaaagaactaataaaaaataacaaaaactacttggaaaatctaatcaagcgattttctttctccaaaaactctggccgccctgaaaaattccttctctttttctgggtttgtttcctaaaaaaattccttaaattgtaaactgttaataaaacctcaaattcctaaaactaccatccaggtctgaaaaaaaaaatcttccagatctagatccatcaaaaagagagggaagaaatttgagagtgagcccgagaaagagggggttttgcgtagtgcagctgggtcgcctttctgggcactaaaccacctcactgtccttgttaatctcttgctgtgagccattgaaaatggaattgaaaaaaaaaaaaaagaaa

SEQ ID NO: 304003 - DNA, 1204 bp, Cannabis indica
cgatcttgtccgccatttccttcgccaaccgtaaatggaaactcaaggacttattactctttcgtagcgcgtcggaaggtcgagcttcttcagtgagcgagtctttccggaagtacgccgttctgtcaaaaaaagccggcgacggcgccggcgccggcgacggcaccggaggatgtgaggaattcgagttttcgatcgacggacagtgtgggttcggtgagttcgaggcggcgagggccggcggtttcggctcacgagttgcattatacggtgaatcgggcggtgtcggaggaaatgaagaagaaaactttcttgccatacaagcaaggtctgttgggttgtttagggtttaatccaggtgttcatgagatttctaggagctttggttctttatcacgtgcatgaaatatatatatatatatatttatatgtatatatccagattatcttaatctgggttttaatttaattgttttgtttattatcatgatcatcatcatacaattttcaaatttatatacattaattaattatatatatttatatgtgtttttttggtttttttttcttctaatgactttataattggatcatcttggtctaattaattataattcgttttatatgtaaagagatttaattagttagtatagggattaatggaaaagggtgtttattaatattaattcggttgcttttgatcatgagtttattgatgtcttacttttgtaaattactataaaaattgaaatgttaacaacttctattaatttaatgatttttatatgtggaatattgtactaattaattaatactttatttatatattaacacttctcgccaccaaatttgattagaagaagaataacaagattatagagaattttggttgcattattaatggtatgaaagtgaaataaaaaagaaagagaagacataaaaacaaaagagtaaataaagttgtctaacatggcacgagtagttgtagtttcatatatatatcaattttttttttctcaaccacgtgttgtgtggtttaggggtaaagactttttttattggtatctttttttaacaaaaaaaaaattaatctttcattaattgtttatgtattaaattaagtttctcaaattttgatatctaccaaattatatgctcctaaattttcatctatgttagatttttttaataaaattagaaaaaa

SEQ ID NO: 304004 - DNA, 4681 bp, Cannabis indica
ataatatagttccacaagcacataaataaattaatcttattattttttccttctcggatcaaaattactaaaatacccatggctcaccaacgggtcttaacatgtcataaatcatatagattctcatatattaaattatataataatataattcacaataatacataattatctagttagggttttgctaatccattttcataattctagggtattacaggaaggctctcgcatgtcgaatgaaagacatgaagtgcactgtgtcctgttctaactttccttgcacttttgtagatatggacagaccacgccactcgagcaagcctagcacgcctcttccaactcgcgacccatcactcccatatgggatggccgacgtcaagagtatcataacacaatccgatattaagaggatagtcaacgaatatgccatggagcggggtttcgaacccctatcgaaggaccgtgccaacttgccacctgtgaacatggtggcttttagtgagtctattctcgaggcaggtgtggcctggctgctccaccctttctttgtagagatcttggactattttggcatagctccccttcagttgacgccaaacgggtggatcatactgacttgcttttacatagccttcaaggaggctgctggcagggcccccacggccagagaggtgctctatgtgtacagtttctagcataactcctcgttcagggattgctattactttcataagaaagttacttttgatgcgtcggtagtaggtgtcctctctaatacggggaagcattggaaagagaacttcttcttcgtgtcaaagaaagatggagtacaggaggtcttccagatgcccagtaagtgattcgtttactaatatcctcattaattgtctaacattgagcttcttacaatgtccccttaactcctcgtttttttcttttgtagcggcacgtcccccccatccttacataagaggagtattcctctggcctgctgaagttgttcagggcagactacaacaagaagctctaccatcatcttctaactttacctcacctcataaaaaatttaggtatgtgacaagttgaaggtagacaggttgtactctgtaccacttccccctagtgaggttgaagaggcagctcgggacgacgttgggtccggccatgcctcttcacaagcgcttgagggagacacgccagcggaaggggcagctgtagatgttgtgaataatgttgctgcgggtcgtctatagtcctgagctatgggtgagtcctcgggtggtcgctcctcgggtgagaggttagtcgcgccgatggtccatcaaccggagcccatccgccctggaccttcacctaagggtctgttggccaagaccaagaatattcttaagaacattggtggacagccttgagctagctcgtcctcagggcgaccttcccatacagaagaaaagttagctcatgaccttggagttctaggccctttggcccaccccctgacatgtctcaagcgggtgccagtagcaatctcacacccatcaccaccactccaactcaatctcccactcattcggggttgcctatgcgcccaactcattcagggagggtggattccttggtgccccctcctcttgatgaagtggctgatacctagaccgcgatgcccgaaaagaagagagggggcatctcgggcgattgagtcatcgagttccctctcctcaagtggtccaggtcaaccccaacacacctgtctgtcttgagaatgctccttcatccactttcactgagatagggggcgaccaccttatggaggaggatccccgagtaatttactctcatcaccagggttccccctaatccacgagcagcaggggtattatgaccctcccattttcttgtcaggcaaccatgcgcctgtggcctcctatctgccttctgacgctaacactcatgatctttactctaatcagacttctgccttcgctgagcgtggtttgggcatgacaccttcatttgcgccagagaacctgtcttgggagcagtcttatgcctcccattatattggtgcgatccaacaatgtatgccccaatattcgagggaagattgggagggcatccgaggggttcccccactaggcctctacgagcatctattctgttcctctgtatgggtgatttttcttccttccattcttttgggtgtcattgtgttgatgtccttacattttttttgacctctttccttgcttgactgcccttttttatagatggccgcagcatcttaggagatgttttcacaaggtggagctcctagattttcttccaactaccaaatgctctgggcaagttggagtccgctaaggaggagagggatcgattgtctgccctattggcctctcacgaggcttgcattcaagagttggaaggtgagcttgtcgcgacaggggaggctcaaaagcaagcagctgaggctctcgctgctcatggtgattataaagtagcattcgaactgtcgctcgaggaagtcataagggagcacgacgatgcatgtacatagctttctgtagctactgacgagaggcacaaaaaggcaccctaacttaaaagtgctcgcaaaaaaaagagactcgagtgtgccaagtcagtgaaatacaatctcgcgttcgagaactgaaggaggaagtgaaggtggttcgttaagggtcaacggagcatgatagtgctgtagtagatcaagctctttataacgtatgccatgccaatcccaataccgacttcagcttctttggtcatgtagttgttaagtgggttgttgaatggaaggcttactttgaccaatctggaggggctgttgctgaattgactttctcattgccattaccattttttactggttttgttatctcgacaccctctagccatgttataatgggtgtttgttgtttttttagatgaatgtaattgacttgtttatttttacctcttctcctttttttttcttttgaacttagtagctagcgcattaaggggggtgttaccctacctttttgctagttgctcctaccttgtttgccactcttcattatcgaatttttccacttaggctccttaattttacaacatggtttttcctcttttttttttttgtgagagagggtttgggcactttgtaatgtgctctttgtcctcactctcttgttgtttttaagggagatgatggttccatgaactgattccaccttctgcatccgtttattatttattgtttttaagggaaatgatggttctgtaaaccgactcgaacttttgcatgtattcattatttatcttcttacgcgcatttttgaggcttgggtattctgaggagtatgtgtatttcttgcatgcctttactaggttctctcttttcttagattaatgggctagctaatccccataatcttaaggaggaacttttggctttttatatgtgtacttacctttatctccccccatgcatatgctggcattgatgctagtagacatttgaggggtgttgctcttttgtttgaatgttttacacaattatctcaatgaaacttatcataccatgtattacaataaagctcgaaactacattgtactcaagttacatgggaatggaggacatttcaaatgtcccccttgattgaaaactagttaattaaataaaacagatttcttacttcattttagacgatggtctccatcctcctactggtagtacttcttcaggtgtttagcgttccatgcatgtggcactacagtgtcatccatgtgggccaacttgtacgttccaggagggactacttatgcgatacggtaagacccctctcagttttcccccagcactcttgtcgtgagatccctagtgttcgggaggactttcctcaacactaagtccccaactcggaaggcacgtatccacaccctcaagatgtagtatcaggtcactctttgttggtatactgcgaccctcatttgcgcttcttctctcttctcttctaacaggtctaagaatcctaccaacacctcctcattctgcgttctctctaaactttgcgcctggtagggtagaaggcttccagtatgaagcagtgtaggtcgagtttgtctacctcttccttcaatgttgtatattccaccgagtcgacgacccaccttttctaccttataggtctcgcccttggatctatgttcaagtggtgcgacattactgtgggacttatccccactatgccttcatgtccccaagcgaagacatctgctgtccctttgagatattgttttaactcacgtttgagggccttgtagagtcctctctcaattttaagcactttctgcgggtgttcggatatcaccacttcttcaatttcttcgttaggttctacacggacctcctccttcaccgttgggtccaagtccgccccgtccctttgctggtgggcctcctcgtaacatacaactatggccatggactcgtggggtcttgtggctatcatgagggacatgttataacactctcttgttagcccaagatatgtttccaagagggggggagaattggaaaattaaactaatttcggtaaattaaaacttttaacacaaaattatgcaattagtcaattaatcaaataaaagcaagtagtatggcaagcaa

SEQ ID NO: 304005 - DNA, 1550 bp, Cannabis indica
tgttttttcttcttttttttcaaaggagaagaaatgtgtgaatatttgatctgatattttgattaatgggagaagaattttagactatttataggtgagcttttgacgtgtgacgctggataagactcgtgactatggtttttccaaaaagaaaatctatgacttattgatgaattaaacgaggctttttgcttagagaaaggctaaagggtaccaatggtgcctagcatccttctatgtgtcagtatcgctattggtccaactaaatatcgggtctcacatagtttaatataatagcttttaggaagtattgctagtcaatcgcaacgtgacatatcgagaaagtactaggcaccactagtgcctaatagctatgctcttttgtttattatacataactgctacatatttaagtgagacactttctaatggcaattattttgttgattcaacaacattaattaatttgactctaaatcaagctcaataatttaagggagggtttacttgaatagtggttagtgggtgtgggtctaatcttttgtgcagtgttttgtgtgtgttggtcactcaataatttaaggggtataatagaatagtaatagtaattgattgtaataggaataataataagaatcatattatgatatattatgatgtttggttcattttttgaatggtgatgagaatgagtggtgtattgagaaaaatatattactaaatttttttttttttgcttgaatatattaattttttttaataatgagaggatataaattaaagatacaaggcaaattatgttttatataaatgatgtaatggtgattatatagttgtagacttataatcattttttatataaatagtgtaatcatatgaataatgtatgatgattatatagtaaaggcattacaatattttcaaaatcaaaccaaataatagaatagtaatattattttgggtgaatgttattttttaagttggttatattaaaaaaaatatcaaaaaattgagctcaggtactattttataccattttaaaaaaatacaatgtcatcttacaaaacagtgaatttaatcaataatttttgcacaacagtcaaaaataatattaaccttatcatttccctaaaaactcatttaaaaaaaaaaataataaacaaaccatataaactcaagggtccaaaggagaaactgtacaaacattagcaaaaaatcactattaatatatattttgttaggatggattcacattgttcctaaatggtctcgagtcttcccaaaaaaatcttccaaaaactaaagggcagtttatttatggcaaaattcgttttaattatttacacttaaccttcttattttttttgtgaaaaaaaatcccttatgtttactttctctttacaaatttgaagtgtcaattagatatcaccgttatatatcaattgaattattattatattagcttcgaagttttactttcacgtgtacactagtgtagttagcatttaacagtgatatttaattgacgcctcaaatttataaaaaaaaaa

SEQ ID NO: 304006 - DNA, 1315 bp, Cannabis indica
aaaaaaaagaggcatatatatgtctctaagcaatgaatgtagttttggtatgaagggagagttaaaattattattatttaactattaaatatttattaggacagagacatgcatatgtaaatataaagtatatataatatatatgatgatatgaaatgagacaaggatggcctaattaatgaggatttcatatacaaattttgcacgccctctctgttagctagaaatgactttttcttctctcaaaagattataaaaaattctccaaagatttttgtctgctgcacgtgtatttgtcccatcattaattttatcatcaatcatcatcaaatatatattatatgtatataaagaacattgttattataaatatcaattgtgctaagtacattctaaatatgtcgtgttgcgattagctagtgatacttcttaaaattattatgttaaactatatagaaattggaacccgatactttaatttgaccacataaaaaaatactagacacaactaatactcttttaacatttttactaatataaatatattcgttttctttctttatttcatttttgtcactgcttttttattaatttcttttaaaaaagttatcaataattatatatatatatatgtagtttctattcaatgtttcttccatcttgttcttatatatgtttctacttgaataattaatttgtactaaattaggaaagtgaaagcttttatggattgtcagtatatatgctcgtgtaataaagaaaatctttgtaataatttcagttttggattcatagctttgaaatgtgatcttatctttttcagtattctgcagtgcattaattatatctatatcacttattaattttggtacatttgccactgttttgcatgcatgtgatatatcttcatcttttaattatgttttcaagaaactatatatatatatattatatatattggatgttaattataacaaaattaagtcattgtataatgatcaatcaatatttcacttaattaatattattacaagtgagtaattatttaatcattttcctttacttttgctatatatatatcatttatttaatagttatgaaaatttgaaccataattataacctactaaatgaaattcattaaatgttatttttatcaaaaaaaataaaaattattagggcactctcaagtcctaataatttctctactttattattattattttttggttaattagtaatttttctcctcgaactttgacatgtactaaatcgtgccccctgaatttttttggccgttaaaaattcccctcgaa

SEQ ID NO: 304007 - DNA, 827 bp, Cannabis indica
aaaaattagtcaaagctaatttttcatcatgatgaaaatttacctcttgaccacaaatagagctctcgttagaattagtagtaatggccggcccatgttccaagttaccaattatgctattgcatttagaactgtttatggccctacaaagaggcccatttgcatcctggcccacatttattgctccatctgtcccttcttcttggtcattatagaaattcaaaaggccgaccccaccaataaccttctcttgtaacttgcacggcccagtactaacacccaaacgcttgggatctttcttggagacattagtcggcccagaggaagaaaaggcaagcccaatatcctctctgataagcccatcaacttgggctgattcattagtcaacatcaaaggctggtcaatgtgatttaaattataagatggaaaattgagggtaacctttttgcccatcatcttctccaacgttaaactctttacccagataggaaaccccaggctgtcgattgattgcaggtttcttgggcacccacactttctgctcagccagccgacccgttacagacttctaacctgtcactttcaccatttgcttcgaaccgcgccccaccatggtcggacgatacaagctcctcctaccaccagacatggccgacggcaaagacaacctccggttcgcaccacgaccaatctgtgaggaagaaaccagggacgaggaaaacgagtttgcaccagcgaacacatcgagatatgatgaagccacagatagccatgggccaaacaagggatacgggataccaacatcattagccacggtaacagggga

SEQ ID NO: 304008 - DNA, 3896 bp, Cannabis indica
attttcatcattttgacgaaatatacggccaaaattctttcttcgtcctctaactgcccttttgtagatattgcttttcgtccagttaaaagttcggctagaactactccaaaactgtaaacatcactcttatctgtaaattgacgagattcaaagtattctggatccagataaacagatgtatcgtgcaaatgattttttatatccaaggaaatcgttcttgttgtaccaaaggttgcaagttttgccctcaaattttcgtgaaggagtatgtttgtagagtttacatcccaatgaaaatttttaaaagaaggaattgcatgtaagtaggaaagagctgttgcaacatcaattgcaatttgtaatcgcatattccatgaaaaagaaaaccctgcctttctctcgtgaatgtactcagaaagcgttccatttgatatgaattcataaacaagaagtggaacatcattctccaaacaacatccaaacaacttgacaatatttctatgattgattcgtgaaagaatcacaacctccttgatgaattcttcgagtttggcttcatcaattaatatgaacttttttacaccaacaatccttccatcttccaacattcctttgtacacagaaccttgatttccttggcgaaaaattcgtacactaaaacgattagttgccttctccaactcttctaactcgaacaacttattatcaactacatcacttgaatttttttcttcatttccctcctccaaattattcggatcaacaatattatcttcacttgaattattttttgttcttcatcataatcttccaccaaagaaagatcattattatcagttgaatttatttggtgttcccacaaaagaccaccattccgtttgaagaacctactcttgcctttaatatcttgtattttccttacatgtctcattagtctccatgcaccaaaaacttgagctattgctccaagaccactcccaatacctgtttcatataagtaaacatggatttatataaatatatatgtcacttttttccaatgaagattttttccaatgaaaattatgcaggttgtgtttatgtgtttgtgttttataaattcaacacatgatacgaaaattatgcaagttgttgttataaatttttacgtgtcaactatgtaactaaaataaatttaaaaactccacacaacatactaactggaattgccatccctaaataaactagatatgggatagtgtaccaaaacaaaacacaagaaaaaaagatttaattaataattattaggtacgtacctataaagaaaaacttggctttagtacgtccgagcttgttgctgtctttacagacaaagcccccgacagtattcacgcaacgccctttgggaggactacatctttttggtgtctccttgcattcatcaatgtctgtaaatttaataattttaattataattaattcattgattagctagctagaacattattattaacatataattaatttaaatattacctacctttacagccatccacaatataaggatttcctctatatcctttttggcagtgacaaataaatgggagatcagaagtggaatccttacagtaaaatgtattacttgactttgttggcataatatcttgtttgaatatatcaaaaagggaatggttaagacgccaacttattcgaacaggaactatattattattatcattataatattttcctgtataattattatctacgaggaatgcatatttgcatgtccccgctgccatggataaatcgttattattatccatggagatgttgatggtggtggtagcagaattggaagagaagagagtagtacaacaatcaacttcattattactacaattaatcatcttaatatcaatattggatgataatgaattggtacatgtagatccattgctgctgcttgtgcatccaaaaaaggtattatcacctgtaattaataaccaaaccatgttaataataaattttatagatttttatacatcttactataaaaaaaaaaaaaatacttatgtgactaaaagtaaaaaagttatgactaattataaattaccattcttatgttgtgagtaaaacatctgtggctaaaagtattagtcataaaattacaatttgttgtgactaagtgtgtttttagttacaatacgtgttgtgactaaaactaaattagtgacaatttgtaattaaatgctatgtcttagatacaagtaattttttgttgtgactaaaagtcacatttagtcgcaaaaaaattatattgtgattgaaaaattatcacttaatgtaactgtttttttattgtctctctaaaaatactttttatggaatatttaaaaaataaaataaaatattatggaggtgtttgttaagagtttaaattagtgggttttagttgaggggttgaaatattagaggaaattatattacatattttttttaacttgatgcttttaatttttaccctcttttttaaaatatattatatttacctctttttttaattattttaccaattttactcctatttacgatagttttcctctctaatcaaattccatctcaattttttcacaaatctacacatccatctacaaagaacacaagtttatgatatttaaaattaagtcttaattatgtgagtgtgtgaatattattactacgtacaaaattgaactaaatatgtatatacctgcatttgtttccaacttggcaagaacaccacaacttactgcaacaaatttattcccagaactatagtaaaagggggttcccgacaaattcggtggatttgcattggtttccttgttcgaacaattatcgaagaaactaatggggcttgtaacccgaacccattggccttgatctccatcatcgtcgaataatgagaaattaagtacttgtaatctactagtactactaatgttgagaaaaggagtaatcccattctcacaagagatttgaaagcttttgtcaatataacattttgatgacgatcccattccgaaaggatatggaatcgttacatccccacacttttcttcacaaccatctctcgcaaacgatgacgatgatggtgacgataatgatgatactattgatgacaatccattaattactacaaacaagtagtaatagtatttgaccatacacactaccatgttttctgcatgtccaacatataaaaaacaaacaaattcattaattattatttatatatattaattataacaaacaagttataaatacgtaccagaattcagaggatggatcgttttaattagttataactattaaggaaacttaattaggaaaactatagggtatcttgtaaaaataattggaagatatatgtatgtatatatatagtgtcctgacctttctatatatatatatatatatatttaattatatattataagcaattatagggtacgtacagcatgtgaggagatcactttaatgttttcctacctaacattatttaagttaaagttatagaagatattctcacgtgacgtaagtagtcttacgtcacatcaataatatattaattaacgagaaatttaagtcacaatttaagatgttaagtattataaaatgtagaatattgttattaatatattttaataataaaaaatatctaattaattatatcgttatattataatgtaataaggacaacgactttttaaatattggtcgtccattacttcaaattaataatatataacattggaatctgttgctcctggttttgtccaatatacgtggaccaaccgaacagggacacgtgaatcagaacgtattaaggcttgaattatttgctaagtctttgtgatataaggtagcat

SEQ ID NO: 304009 - DNA, 2335 bp, Cannabis indica
tttttcatacaatttttcttttctttaccaaacatgagaaagtaaattttttttcctttaccacaccttcttctttctctatcttttccttccctttttatttcactaccaaattccaagttccaaacacagggaaatttttcaatgaaactagtacactcgatggagataccaaagtcaatcttagaaagtatatcactgagtgcatatatattgatggtgatagaagaatgaacccatgttttggatcagttgacttattaacaacagcaagtaaagctatcagattcaaaatacttttcttaagcaaatgctagtgaattcaatgagacgatgaatatactttacatccacagcaagtaaagttaaattttcatttagcatatagattcaaaactatatgaaaacatgaaactagcaattttttgaagggtgcaaaatattgcagagccttcactctcattaaacatattgggtacccaaacatattagatatgtttaaaaatgaattgactttaaatcattgcccttaaactaaaaacaaaacatgaaaaaaataagcagagaaagaaacttcatagctgtccaacattgtatgcatttagtgaaattaaagtctgtgaaagataggacaagagatagtatcattcattgacatgataacacatatccttaaatcaaaaaattaagaaacacatttataagaataatgacatcttataaagaataagaatgaactcacaaggttcttaattcagtaaggccctaatttcaccttcaagtctccctctgagtcccattgttgacaatcccctgaaaactatgagcagatcatgatatagaagacatataatgaagtgatcgattgatcaatcatactaatggtcttgtaaacttactttattttctaaaggatattagaaacaacactgagcactcacaatgcagtcaatcttgggtttttagagctcacaccttccaaaggaactccccagatatcttcaaattctgtccagcttggaggcatattttgtttgaaggtatttcaccatgaagatatattagcttcctgacattagattgaaaagaaaacatactaaagtcatttcaccataaaccacactgtctcagagattattaaagctcttcataatatgtttgggatgcttattctatgaaaaagggtaaacataacctttcagacttagtccacttagcaagtctctcaagcatggagtaaacaatttcttcattcgcaatgacatcatttcttatcaacagcaagaaaagactactaattaaaccctaacctttttttcaaaaaaaaaaaagaagaagaaagaatatatattggaaaaacacaaacaataaatatatatgtacatttagcctattaattcactcaattgaacctaaactataaacacaacgcaaatcaatgaaaaaataaaaataaacagatgatcaagcaaaaaaaaaataataaacagatgtaaatgaaattggagtataaaatcagattatttttgaaaataataaccactggagagccgaaatctgaacctttccttctcgataggtaagggctgagctccttgtgtgttaaacatcatcgtctaggatttgaaccaaataatactatattgatctgaatatgtatttaaatttgtaaactaggaattatgatttccactaaataatcaaaggaagacaatgaagtaacttggtccaggggtggtcgaaatgtttggatttgtagggaatgataacctctggtagatcaaattattggtatcaaaaaaaaaaatatattaaattgtcgttgaaataatatataaatactaaaaattaatttataatttattttaaaaggttaaatactataaatagtgtattcttagaagattataatatttttgtaatctccaacaataacttcacgttagtgctttcacttattttattattatcttttttttatttaataaaaattctataaaatatgatttaaagttttttatattaaaatacttttaaaaatataattaatctattattatttatatttttggagtattttattaatcctaacaagtagtataggaccacattttttaaattaattaaagatttgaattcataaaatttgaagatttgtaagattaagatttttttatcttcatatttatatatattcgaattgtaagttttagcatatgtggtttatatatatatatatatatatttatatatattagatagatgttacgtgccaagtcacgtatgttaattttattttagtttagtttttaattttttttaatatcataatttt

SEQ ID NO: 304010 - DNA, 1757 bp, Cannabis indica
ccgtcgacagctgaatgtttcgatctggttcgattcatggtcgcatctgcaaacgttttcccgtgccacactcacagcgatatagcaccacactcgcagtgatatagcaccacagcgatatggtgaagccacttaagtagtcttaagctccttgaggtgtcaccaacactatagatggtcttatatatctcaaaatattacttgtcaacttctggaaccttcattgttgttgctgctcttggttgattttttttattgataaaataaattgaaaaaacaaatcggtactttgaccaaatgggataatcatgtatgtgtaattgttctatcctcttaaaacgtaatcattttaaatcaaatttaagtattttgttaccacactaatcagtcatgttcgaaattgcttatccttcttagtttgaagtgatcatgatgcttatccaagatgttgtgggttggatgtcaacaaatcggtctcttttatgtaaattattcacaaagaatgttgaatgtcttgtgagtgttttcgagttcgtttattgataagctttgtcgttatgagatcatgtaaaaagcaccaccacaatgtgtaactgaatatcgaattaacttcgtaagccatatatcactggtgtctaataataatgctgaataaaactctgtcatgaccgctaattaatttctttatctatattccaaaaaacgaataggtaacaatttaccaactaagaaatacactaatttaacattaacatacatacatacaaaatacaaagatatacctacccagtatagttctaactatcagcattggcaatcaaaatttacaagtagcatgcaactaaattttttagccaatcacatatatttaaactggggtgtataatgtttgggtgcatttatcatctcaaagaatactgatactacctgatatatccaacatgtcaggcatctatcggttgtttccggtgtataccaatgccgcgtgttccatcgtgccgatgtaatcgaatttcaatgtgctaaatgccctggataatgacattatcgattctacaacgtgtagatcggcttcacttatcaatcaaacaagagagcccaggtagaatcccgcaacctagttgtatctgacccttggtcactttttgcttgccctctaaaggattctgttaaaaataatacaattcaaatcattttacttttcagtaccaagagaacgaaaagcacttgctttttaataaaagagatacataccgattctctcttttatgaatgcagcataatcagcaccaccagttctccgagcataagaggatatgtcaagatacatgctacttgaaggttgaattcctgcatcctccatccattgaagtacctgcacgtaaaattcgactgagtatctaaactagagaggctaaagagacagagactgcatgacagggaaaagatttatcattgtttaatatacaattttcaacattggttgaggctttcttggtggtccctacagaatcaatgtcatgtgcaccttatttgaaactcatttttgcacttgtattttttaaccagacaccaaaagatacaacactaaagaaaatgactgatatgttacctcaatatattttctccagtttccagcagacaaaagatttttcaacaaaattgaataagtatcgatattgatttcagcaccggatgctactatcttgtagaacaactgcatataagagaagagaaataaaataagaggaaatctt

SEQ ID NO: 304011 - DNA, 3386 bp, Cannabis indica
tcctctctaatctgaacagaaatcacaaacaagtttaagaaagtcccaacaatggcggtgtgacaaacaacaactcggtttatattacctacatgaaatcagacaacaacagcatatcgggggcttcactcatggagatggagacctactaccatttggttcatctgggtagcgatttggacttcggctaaggcttctctttgggcttcggcttctgcttcgactatggcttggacttctagctccacttggacccctagctgggcttcgacttgggctccttgatccattatatggtggagaacgagagtacgacctgtctcggctgtaccttctctcctgtggagacacagatctggcccgaagagggagtacgaaaattaatgtttaaacattgaaatatattaaatgcatgttttctcctattgctaaagatcccacatttttaatgccgactagagaagttgaaaagatatacttggaagagaatataaacacgaattaccttgagtaattcctccttttaggtggagaataatagtctcggctatgagatcgtgatcctgctagacgtggaggtggagatcgagaatagcgaggaggagaacgtcttcgatcacgatagtttccacggctgctgcatgacagaaaagcaacttaaaaacattcaattacacaaaaaaaaatgtgatactaacaattaaagcatggaaatggatcagaaacattcttaagcttcatcaggttttcagtatcattgcttaatttcaaatgagcttcaggctttacagaatgtatcacaaatatttcaaacatatagtaatgtaaatgtaataatactttgcacataagcacaaatctaattaccacatacagtaataattactaaaaattgaaaggaaatcatgataaagtaactattttgttgtgatgaaagaaaactacgaaagaattcataaaatttatcaagaactagattgaagtacaattagattcccacaataaattagtaacaagctctagatatcgaacaagtatcatgaatatcacacagtacagagaatagagcatttaacacatgcataaatggaagagaattcatttagtgaaaatataataaataacggagaaaatacatgcaatagttaccttcctcgctcccgtgccctcatatcagatggcttcttcctattctcctcagcaaacacaacagtaacctcccgaccaagaagaatctggccatccatatgatatttagcctcagcagcatcttgcggatctacaaattggacaaaaccaaatccacgcggttgcctggagaaaaatattataaaacaaaacaaaataattgtcagttcttgacattgtaggacaagagctacaatgaaggacaaaatcgtgagttcttgataaagtcctttgcataccatagaccttttactagaaaaatatatttccccaataatttggacgctcatgataaaagagcaagcactaggctgctgaccttgcaagtgtcagttttaagatgacttgaaattcttcaagacttgggaacatcttcacattgtaatcaaatcaacttccttcatatcttcactatcattaacatcatctccaaaagaactctaattacttgattgttgtcttcaaaactttaaattcactgttaaacctcaacaacttcaataaacgcacccagctaatgataacaaaaagagtagaaaataaaaggaaaaagatccctatattagaaaagattctatagaagaagcacaacaaaacctgtgtggtcatatctcacatattgcttcttcaaagtttttattttctggtttgtcaaaaaagaaaaaatagaaaaaatcaaaaagaccctatgtatggaatattatgattgtctaaggctggctatcccttattcttcataactaaaatcaagacaatctgactgtggctcgtgcatataaacggtatgaatttcattaaggacatcaaaccaaagctgccccagaaacacaaatacaaatttaaatgtccttcccctcgacaaagatgaaattcaaaccaatatggcacgactacacaaaaatacatgaatctaactattaattcttcataaaattagtacatcaacgaaaatttgatcatcaaaaatattcaacacacataatcactgataacatgctattgctcacccagtatgataatcttttggcaaatagatatccttaagaggaccaaactgtccaaatggcctgcgaagatcatcttgcctgcaaaatagcacatgttaataatagtaagaaagggatactataacactcatgcattggtacatacacagcattctgttaaataaaacaacagaacagaatgttaaccaaatatttttgctatttagtgttacaaaattggagttagacgtgtgcctacctacagtcatggcgaagattacggactagaagactagtaggaagatctctgctacgacccccatagcgaccccttgggcttggacttcgtcctcttcgactgtaaccccttggtggcgatggagtgtagctccttcccctcatatttcacagaattgtgtcctgttcaggttcaatttgttacaaacccaaagaaaaacaagcagtaacacaatataatagcatgaataatgaaaatacactttccttagtgtcctttgtccatagtattacctttgaacacaacttgatcaaaataaataaataagataacacaacttttgaacacaatgtacacattctaacttactgaataatgctgatactagttgttacatcatatacaatagaaaatgtaagaccaactttcacagctataaatacaacatatcaacttttgttaaatcaaaacccatatcaactttgattaactcattttatgaagaaaaaaaaacatcaaagaagaatctctagtgatatatgtacaaagattatgctgttcattcatgccaaaaataaaaattcaattttctttagtgttatatagaaatagataatccaaacaagaaattggaattttttttctttcttacgggaaaatcattcgaacatttaaaaaacccaattagctaaaatctcatcaacaaacaaaatatgttataggtttatagaatcaccgcaaatctgaaaatcaagcgagaacgacggccagcgcgtggtggaacgacgatcggcgatgaagatggtgcggaagagagagagaatgaagctaagtgcggcgaggagagagaaaggaccaaaatgaagagaggaagaagatgggaatactttctagggtttctgaaatctatattcgatatcaatacgacgtcgtttttgaacttcctttgaattgtttttttttctagaaaaatt

SEQ ID NO: 304012 - DNA, 3618 bp, Cannabis indica
aggtattattaccgtcaaaaattaaacttagttatttatctgtaaccgagagttaaacttagctatttacgccacaaattacccaaaaaaaaatcagtgcacaactaatacttaactaaagaaatctaattaaacccttccttttacatttatccaagactttctttgaaaatgtgatcagattcaaacaaataacaaaaacctaagaaaaaactagcattgcatcattatgatgacatagatacactaaacaaattaaatatcaaccaaactaaggagaatttgaattcaacctgtgataacaacgcggcatcaattccaatgtcaaaaaattgcaagaatatggtgattgtcctagtcacgggatcaactgaaccagcctgtaagaagaactttcaattatttgtacaaacaatatagcattgagaatgaaaattcgaagataaaattcgatagggtacatgaaactatgaatatgaataagtggaatagtggagtttgaaaaaatatacctccttaaaaacaacactttgcaaagactgcacggaaaaacagatcaatcagggaacatacttccactttgttaccaaaattaggatcaagatactagcatcaaaagacaatcttcaatagatatataagtgcatacctttatcatcttataaacacaataaaccgaacatgcatatccgagtaaattttgcatgtgacccctccaagttcgagaataagcagcagcctcctgccaaaattaaaaaaataaaataaaacagagataattttatatcatactccttttgacactggcacagcagtttccagtgaagaatgcagcaaaaagaaatcataatacaactcttctattaggcctatcacattgataacaaaatagctcctgcaacacatgcttcaagtaatacattaactatgcatggtcatagtaaactacaatgcctttaccaaaacattaacaatagcccatcgtaacaaaaagaacgtaagaacaacaataacaaacctttgcttggcgaagctcgtagatttccaagaagagttgctttgaaagctcttccaacgattgtacctctgcttccatacctttaatatctatagacaaataaaaaaggatatacttattagctaaaaaaaaaggattgtgtacatgtgagtaatattttctaaaaaattattaaatgccaaggataatttatgatgaaaaccttgctccttctggtcatcttgcacagatcggacaacagtaccaacaattcgtttgaagaaggatctagcttttaatttctgccacatattaaaatgagttagagcaggagaatatgtcctattactgaacctaacattatccgatatgaatatatgctcgtatctggatcaaaataatcatcataaacataggcagaaaagctgatgagaaaaatagctaactagaaaagtagtacaacacttagtttaagactccgcaacttactaattagagatattttgtataaagttgaacaaaaacatttatcggtaagtatacctcttcagagccctgaatacgctccatctccattttaccaagaacgattctctttttctttgcaatgcaagtctcaattgattgcattagttgtctttccaatgccttaatatctgattcttcaatctctctacaagcacagatttagtaattactactacattgaagaatacaaaatcagcattctagagtgcactatgaatttaggtggcgtttggttggaaggaataaaaaaataagaataagaatgagaacatgaatagaaatggaatggaaacaaaatttaaattgcattaaaaaaatcgataaaaaaattattaaattttgtctttgcattggaacggtatttcctttcatttaaaaatggaatagtcattccaccaaaatgatgcaaaagttattacattgattgggatgacattccaatactttaacactacatttggtagggaggaaagaagggtggatggagagagatggagggaaagagatgtaagggagaggaaaatcttatgtttggtaagaggaagaggatagatggagagaggctttctccctctaaattcaagtttcttaatccctctaaatgtgaagcgatcaaagaaaatgacaaaaacaatatataaaatatacatatttagtttcttaaatttttttataaataattatgttttcaaaaaataatattgtaatattgacaattaatttcttctacatccttttcattccactcctaataccaaacatgaaggagagccactttcatctccatctttcctatcctctccatccatcttacttcccatcattcctaccaaacatagcctaaaatcaaaccaaacatagaaatgtaatgaaaaattgttttctattcattccattccttagggtattctatactattatgagcatagaagagaatgtaaatttacctaatgaagagagatagataactgtagggtaaattaacagctccaaaaccagacaaaacagccataactgtaacaccaatgaccccaattctactgaccaattgaggaatggtaaagaaacctgagaatgaaatgtgaatgaataaatatgaatccagataaatgtatgtatacatatatacttgaagagaaagaaaaaggggaaacctttatcaggagaaggcataggaaagtgaatgcccatacgccaaaatgcataaagaaaagcaaacaaaaacaatatagcaccaagagcagccctttcctttctcactcctaaaatcaaaattaatcaattcaaaagaaatcatcacaacaatcaacaaaatctaaaagagagagtgagtagtacacaatacacaccgttgttgcagagcatcaagtaacaatggtaataaggcaacatgaagaccaacaagagtatcaaacaaaaaagatcgatcttccaattcaaccatcgagccctaagattttaagaacataataagtagacaataaaattaggattcaagattcgagatttaagagttaagcttactcttttgatagaattggaatgatttcgaagagaacaagctggagaagattacaggagaaagcgaaaacaacgctgaagatgatctgaaccaatacacgcttttcttcgtactctttgtaaagtctttggttcaagaaccagagaccagcccaaccgagtagccatagggaacctaagcttactactccttcgtatatggtccatccccaacccattcttcttcaatctgaaatcatcaactttcttcttcttcttcttcttcagatgcagaagaacagaactcagtgcctgtaacaactgatatgatggtgatgatgagagcccttatacgacaccgtttttgtaaataaatagatttaaaaataggaagaaaatgttgatatttctatttaaaaaaaatgaaaattattaggacaacctcctttactaaaaaattatatttttgggtaaattgtggcataaatatttaaatttaattttttataataataaaaaggataaatactattttggaccctgtgttttcttaaatgacaaaatggacactgtattttctaaaatagtaaaaa

SEQ ID NO: 304013 - DNA, 1196 bp, Cannabis indica
tagaatttcaaatttccctttaaaaaattaaatttgtttttggggagaacgaaaaatgaagttcagtttccatctccaaaactagtgaaaaaaaaattattatacaatttttggatggttaccaccatcttgaataggtcattatatgttggttctgagttttgttcttttgaaccatgttttctcaattaagtggctaagtgattttttagagagtggttcctaatttaaacaaaaataattggtatatttcaagtttgtgtaaattgtatgtataccattactatttatatatagaaactttactttttgtaggttggttctatgcatgtaaataattcttgtttgacaagtgattaagattgaaaaaggatatcagtagatccgcggagagattctattagatatacgttgtcctccaaatctttgtttttttaaaagataccatgtcatgacacatgattgtgtctgggccgaccaacccgccaacccaatcgggaaatgggccgaaaagatcgaatgatggtgggccgagcaggtggaatgtgactcgtggaacccggaaagtgtccacaccgcaggataaggaaacccgtccgaattgggttcaaatatacagtataaggaaatttgttttggacccgaaaacccggccacatccgaattcattaaaaaaatcccattcttaattctaaaaaaccctaaaatcccccctctcagattctctccctcctctcgatctctctctctgtccctcaggttcggccgccgacggctcttatccgattccgacgacagccgacgacagcgtcggctcccctcccgtccatccccgacgaaggtttgttcttttattatttttgtttgcctcattcggtcattctctcactgaccttgattcgtatttagtggtcgatttactattatagtttctcattcaaattcaatgcgaatcggctgcataagttggtcacttttaggttctgttccatgtgtgatttagttaaaatattcaaagcatcttgtgaattttttctagtcatctcttccatttggaaaagtaatctgttttctttccttttgacttggaagtaataggagttttgtggtgaagattaaaagcaattgaatttgagagaacagatcagttcaatgttaatttttaggaaaatttaggttcatcaacattgttaact

SEQ ID NO: 304014 - DNA, 1666 bp, Cannabis indica
tttggttttgctgcagttctggaggcgtggtgctggcttcccgagatggaaagattgtatttgagaacacccttgatgcaagattggatgttgtattccgtaaaaagcttccagaggtaattttacgcaacaacaaaacatattatatatctttttaacatatgtttgtttgctttcctgtctttagtaaaaggtgcaaaagaatacataaaacagataatagaacaattcattgatgttcaatagtggaaacctaaataaggaaatggaaaatagtaggaaaaactaacaaaattatcataggaaagtgatagattgcagtccttagcttttaatttctcttgcttatgttaccatggttgaactttcatgcttaggtatgatatatcatgtaccgagtgtgaactcagagagagtgagatgtttgttttgtaataaaaatcgagccaagttaagtttcttgtttactttttttttccttcagatccgcaagctgctctgcggtcagattgctgcataatgggatggagtttgttttgcatgttgatcgaagaatatttaagatcgaaaacttggttgtgaactgaccatgcggtgtatttttttatttaaattacctatctgtggtattccgatttttattgactctgaataacttatttgccaattaggtctgtatcttggtttggctctctgtcataatatcgtctgcgtttatactcattcttagtattgatgatataaataaaaatttgccagcttgagaattagcattttgctgtgaaatttgaagttcattatattttagaataaccaacaaacttaaatatcattatggtgatatgatatgatgtttggttgcttaaataaccatttaataacttttaggctcttagaatgacatttttgtgattttggtaaagaaccaatatattggttaaggaatttctactactttaaaatgcaagttattaatattttgctaatctaactgaacagaagatggaactcatgaatgttagggtgttcacatattgatttggtttggatttttaattttttcaaaccaaatcagtattacggtattttaaaaccaattaaatgatcaaatcagataaaatcaatccactcaaaaatggattagtttggttcaaaattagaatttgtattttgtagttattttaatttttttttacaataattgttcattttttgataattttttttttcatttataatacgtaaataattattatcataataatattaagtcaatgtcaatattctacctaaagttgtttttaaatatcaacatttcgttaaaaagatatatataaataattataaggatttggttttgactgctactgagattttaaaaatcgtgaccgaaccagagaatttgagcggttcggattgaccaaatcattcactccagcttcatttggttcatctcaattgatttgatccacatcattagcacacttaagaaaaactactactctaagaccatctctaatgggagatgtaaaaatgagaattttgattttatatacttacaaattaaaaaattttattattataccaaaaattaaccctaaaaaactataccttttttttctaaaccccaaaatacccccctcacaattctctctctgcatcatct

SEQ ID NO: 304015 - DNA, 2738 bp, Cannabis indica
tgcattttaatttttattccgttctattcctattccaattctcattctcatattcctattcctatattttcattcctcctaaccaaacgtcatctactttctgttactaatcctttgagttttcttctctattaagatcatgaattacaagctattgagtgcaccctagagaacaatattacagactgaacctctgaaactcagctcgagtttcagctccaaaaatactaatcttggtttagatttcccaactctatctgttttctctctttctttgtctctctctcactcgatcacactctttctcaattgatcagtatgaattattttttacattaatgactaattctttaaaaaaaaggcaaaagtaagacataacaaactatatcaggtgcacttaactaactgaacaaaatgctacaacataacattacaaccaatgttgtagcttttaactaacttaatagttgttatagttaaaactgttataatcccattttatttgttctatgaattaccaaacaacacatgtttttttaaatggatgcatgtcttattaattaattaatgtaacatttcaaaatacttacttttgttgttgaaaataaaaaacttattatttaataactacaccctttttaaactaccattactaacattcactactgtaaatatttcctcctgtaaaaaatctagattcattttcactttgtctatatacttgagacaattaacatcatatagtacaaaccaaccatttagtacaacgaatcaaattatccctaccgatcgaaaaatctaattatttggctgctagagttacaagaagttaaaaacaaaaggaaaaaagaaacaaagaatctaattaaagattcgttgaaacttttgaacatggcagattacataataatataatagaatagaatgaatggccagcaacaacatgacataaaatccacactttggcatacactttaaatggggccttggtgacttgtgttaaatattatatatttgtccgaactgagtctgcatatactctttatttaccgatgactcaattaagagagactgaaatatgagtatcttatagctaacatgtaattttgagaattgtttaaatacgaccgaaaaagtagggaaaaaatcagtactacgtgatccttttttttttttattcttagcgaaaaagaaaagtatgcatgtgtccgaattgttttgccctatttaacaagtgttaagtaatctagtaagttataatacaaagtctcctttttattatatggtaaaaaaacctaattttttgattctagaaaggacacaccgaccactaataaagaaatcaaagtgttttaattcattaattttgcagtgataatgtggaattatggcaaagatataatatggggccaattctcttatacatgttataatgttcatttggtgcttcttctatattgtggaatacacactcatttatcaatgaaaaagaaactacccaaaggccaatcattcaacatgtgtccaattttagggatcaaaattaagggcggtgaaaaggagaatataaatattaaagaaaaaaaaaacaaaaccctaacactttccatggcgatcataactaagtaaatcattgattttgatatcgacgcactataaaaaaactactacttttagtgataacgttttagtcataataaattttttttgtatctaattgtgatttttagtcacaataaaatattacttgtgattaaaagatagtctttagatacaagttgtcactaatttagttttaatcgcaacaagtattgtgactaaaaacacatttagtcgcaacaaattgtaatttttgtgactaataccttttgtcacggatcttttagtcatgacatgagaataataatttataattagtcacaacttttttacttttagtttacaagtttggttgtgactaaaagtaagattttttgtagtgacgtgtgataataatcatggagttccatttcaaaattaattggtgatgagtagagtaatccaatttcttatctcaagtcgtgtcatctttctcgctttattttgttcgaatctcaagcgtttttgcaccatctgaatctcatccatctagatgtggatcgaaagcctgttaccatgataataatatggttttatctcaaaatcaattactggtggtcatgagaggagtagctcatattcttgtatatgactcaatactttttacatttaatgctctcaagtgtatgtatttgattggttggacatggattgaggattagccaatgagaatttggcaagtgggtgccacgttgattatgatcatgatcataatcaatatcatgcaatgcaatttgatataaaagaaatgtgggttagaagggttggtagggtacaaaattgatttaggatgctattgatgtatatatttataaaccctagctagttatatatataagatttataattataatgaaatttttatttattcttatcatgttccctatctcacttttattccactttaatcactgtcttcttgtccctaattcccattccctcacataaatatttacagctagaatcttacttactcattttgtcctcaatagtttgttaatgatataatatctttatatattaaaagtgtctatttaacggcatttcttggtttaacattcttagtttaacagaatatacttaaaaataaaagaatattc

SEQ ID NO: 304016 - DNA, 1491 bp, Cannabis indica
gtagagccattattgtacccccggaagttactaagtgtcgtaccacatgcacgacgtaccccttggtactcgtgttggtaacactgtaactattttaacacctacactatactaacacccttaaaatcacataaacaattagtgttagtagtgtaaatagtttgaacaagcatacattcatatatacattattatgctatcttacctcgttccgtgctcaggtgtgccagttagcctgagtggaaatgcagctcgacgctttacagggccctaaaccataacgttcaaaattcgatgagagacacgctaaaacacttatcggggatttaaaatcaaaactaaggataaccctatcgataaaaaggatgctaacaccttaaataacacaaatatggagaaaattagggttctggaaaaacccccaaccggcagaccggttcccaatcggaagcctgattcctgggtaccaaccggtcgaccggttctatgggtcccccagaaccggtcgaccggttctgtgttgggaacccgaaaaattctccccacaactcaaatcaaacccaaactgtgcaataacttctagaatacatgtaatcatcatactaagcccaaatcaagcaataaatctcagttttaaaccctgattttcaattcaccattataggtcaaagtttgagttctcaatctcaaactttgccaaaacaacaccacaatcatgataccaatcataattcagcaaaaacaaacccactttaacctcagaacacatcttcaaacctaaactaaccatatagcaacataaccccaaaatcaagcaatataccacttaaacttaactaaaacttgaattaaattactaggggtttataccttgattgaagtgtcaaaatcttgctagaactctgaaaattacagcaaggaaattcttcttttcttgctatgtttggtggttcgaaggacagtgagagagagaggtgtagagaatgataacttgcttctaggtttttgctttctcactatttctttttccttaaattaattaatacctatctacttcaaagaattcaccttttagaattctctaaaagccaaataaacaattaaaggaaaagacctatttgccctttaatttaaaccaaggttttaaacaattgaagggtagtttagtcattccaaaccccgagaattctaacacctccaatcccttgcaataataacccgactacaatattctaaaacatataaaatgggattctctaaaggtccaacgtcgttttccacagcttccgaacacaaccttagaatttacgaaatttacatactaagcatatattaacttaaataaatttccacaatatgcatattataaataatatttaaatctcatgaataaaccttaattatttaataatccaaaatagtaatcgtgtgcggtctttacagataaagaatcacaaaatgattatttgaattattttgacatgatcaatc

SEQ ID NO: 304017 - DNA, 2661 bp, Cannabis indica
attattattattaatgcatagtcaaattaactataaatcaaaaagaaaagttacatgatttatcaattatataatctttcttacctcatcattattttaaaaataaaatagatattacacaatagatatgtaatatatattaatttatagtattattatagtaatattttacaaattgtagtatgcaaataaaaaaagcccaaaagaaaattgtgtgcattacaaatgaactatttattactcttaaagtaagtgtacagaatttgagcttgacatgaaattttgaattggacataagaacaaggattaccctccaccctcaaggaatgtgttatgtgattcaatcaataatattctttatatttcatttagtacaatgtaactatatgtaaacatgaatccaaaacttagttttacagaattctcaccagaaaacatgaaacctacttattccacaattcaaatcctaaggattacctttaaacaggagaataacccgtgttcttaaatcctaggctaataccatcttctttgaagtatgttcccagttggagatgataggcgagaaatatgtgcattgttctgcatttttattgtcagtagcggtggtcttgcgagcttgatgtactaaccgaaaaaattgcacagctcatgagaaatgttctcttgaaacagtagacattggaactctgatccttcaacaacagaatgtatcaggaggcgcttcttcgggaatctagcaaacaaagaagcaaaagttttaactcaaaacacaagtgacatatcaaataactaattctcttttaacaataaatagcttggaatataacctctccaggagcccaactgtttttcaaccatacacttgcatccacactagatggaacatcgctttgtgtggaattcctgtaagatttgcaaaacaagttattttgaaagcatagtaatgaatataacacgaaacaacaagaatcattcccctaggctagtattaaatgttatggtttccaaacccaagttcaagaagtgaaatcgagagacttacgcctgctgaaaccctgtactacttggtccattggatcctgtagatgtggttattgggttgctcgtgaagctagtattgctgaagggagcagtagcgaaagggcttcctgttgaaataggaatatgtcattttagaaatcaaataaaaaaagaacaccataaataaaaatatctctgaaattttaccttgactttgagatgacaaattactagttccaaatgcacttgaagtctggctagaaactccaaaagaatttttctgactaaaagcattgcttaaaggtgcagaaggcctgacaaacaatagctcaactaattaagaagcaaagagaagaacaagaaaacaagatttttatttatttgtgttgatagacaggggctacttcatttcttgtatttatacatttaaaagtatgagttcttaaacctcatactttttgagccatttatgtttctgatattcattacactcttgtaactgaacatatttcagacctattaactgatagagatttcctatcaatttagtattacagtagcatatatagaaaaatagtgaattgtatattgatgtagatgaagaggataacaatgttgctgggtattcgagagacccagtgctctcccaagagctactgctcattctcgccctcaaccctttccaatgcactcttacatatactacttcaataccccattacaatgacccgtttaccctcattatttaatatcctaaggcctaacattaacatcacattatagatgggttagatgtttttcggctacaaccttctataagtacacctcattccatgccaaagttgaccaacaatcaccaagtatctattccaacttttgagctcacaaacctatgacatgctatctggagtctaaattacctacaattgtaatatcttagagatggccactacagccttgcataatctgacaatcgtttctgtgttgaacaggtttacagctttttactagcagaggaatcaatgacggccacccagttaggtaggtctacccgaaaactatgctaagctaccatctttccacctttgtattatttgcttttattttgtatttcttccttgttgtctgtcaaactaggctataatgagtatttattaattctcttgcctgtaaaggctaagttgccaatttaatctgcagtcaacgatttgattaacagactttgcaccaagattcacagtaccttaaaacaggaaattgagtattacatacaggtcaactaaagatcatttttctttaataaaatttatttaattgtgtgcctaatatgcccaaacagtagaggtgatttcagccatgagcagaaattccaacatcataattaactaagaataaattttaacgattgaaacttacctctgcccattgagtgatgctcccagttgactaaagcttgaaactgaagtaggggcaccattttgagcattttgtgaaaatgcatttggaccttgagcattttgtgcaaatgcatttgaaaattgagcgttttgtgaaaatgcatttggaacttgagcgttttgtgcaaatgcatttggaacttgagcgttttgtgaaaatgcatttggaccttgggctttt

SEQ ID NO: 304018 - DNA, 2775 bp, Cannabis indica
gctactatatctacattttacatcaacgctaatctgatcaattttgcattcagcaaaaaaaaaaaaaaaactagatcaatttttcttctttttttttttttgtttttttttactaggttgagcattttcttggaataaagcggaaacctgaggctaccagttcaggaaccccgaagaaggggaaaccctaaatagattttgaagatgattgcatacaatgcttgtgcgtcggtttggcagattaacaatttggctcctgtaagtagcgcaagtcacatcgggtttggcatattctatactatttttggtgcttgaagcattattgtttctgctgttgactgtaaattcactttccaatttgagaaagagaagagctgtggaaaaaccttttgggtaaagtttttgtcctattgatttatcaaacctataatattcctgccaatagaaaaagaaaaaaaaaaaatgacacctttaggctttatctttgtgtgctgagcaggatgttctatccctctcttatctatattcagtttccaactaagatttgatgaagcataaaaaaaataattgccataaattgggagtaatacacaccatgcataagaaagtaatcatctttcagattcagccaaaaaaaaaaaattgaatcttattctttagttttacaagtgagatcataggactcttattgtacatctcttctatttctgtctcgatttattcatctttcttttctttctctgattataactcaacattcacttattgtgaatgagacagttaaattcgctactctattcagggctcgtcaattaggctttcagcttcccttttcaccgattcaaacagtaccgaagacaggtacttttctccaaaactagcaaaaattacctgcattaacatgtttatctatgaatttaataagttccaattagcctaaggtaagtttcaactaaaatacctttattatgtatataaacacgagatatcaaacttacgacaatgagcttcgttgcgttttctggtctctttgctacgttaattgcagccgcagctgtggccccctgatgatattcatacctgtaaacatataacaattcccacaattaaacctattatgggaaagaaactatatggtgattgttaacttctgtagtataaagaagtctgagttcaaggttttctttaaaaaaaataagtattagttattttggtttgtagagtagataaatataccagtaaaccttctttcagtgcaatgagcttttgcagtgtcaatcgctttgtcgcttgatatctgcgtaaaatcagatattgttatatgtttaaaattatcttaggcttaattcacaagaactttgtgaaagcatcagatgatgaaggttaattcagcaatttaggaactaggtagcaatatctgacacaaaccaatgttatgagttcctttaaatggaagatctaaactatggaatatttgaggcttacttgaattatatctcatccataagattgagttcaagaacacaaggagtaaaaccaacccccattccttggatcttgtgtggacctatatgtgcagaatgctcacacaaaatggtcaaaaacatattgaaagctcacgaaaaagttccatttcaatcttaaatattgagaaagttatcacaagttaaaaatggcgaattcttgttgggtgagaataatttgatagaatatgtaatgattacaaagaatcattagttcactaaccaggattcccaccagacagaacaagactttcgagtggtttttataagaaagcaaatgagaagaaataactgattaaactgaacaagcctataatgctttttataaaactactttatgttggggttttcctctttaagaaactttcctggacctgttatcgtatcacctgtaccgatcccagcaaccaaaacatctgctttctctccagtacctctccaaatctctggtccagtagtttcatagtgtaccttcatcaataaaaacacattatcaaaatcaaacttcaactctattcatttcatgaagtaataatcttattacctttgggttggcaggatttttaaattgctgaagcatataggcattaggagtcttggccaatatctgttcagcctttgcaacagctcctctcatgccctttgcaggatcagtaagaaccaactcagctccgaaagctcggtaaatccataccagtgttgccactcgttggctcaattaggacactttttttgaaacataaaccaaccaaaccagcaatcaagatcaaagaacttgtttctttcattgtattagaaatatacaatcataatgtgtgcaaaatatttagcaaatctgttcaggtgtgatgaggcccttagcctttgcaactacaatcttgctataaccaatcctgaaaattcaaaggcaataaaaagaacatcataagacacaaaaatagacactagagcaaggttacgtggtttctaatttttcagcaattcgagcaacacaaccatcgatgacattgtttagatatactaatgggctgttaccaatcaattaccacaaataaaatcaaaattaattgacgaaattacacttatactcactttttatttcttattttaatttttactttattaatactctgtaaggtatattcaattttataggttttagccctatgtgcgttgataattctaattttaataagttatgtaagattatatttggtactttaagtataaaaaaatgtattgtatcaattaa

SEQ ID NO: 304019 - DNA, 1841 bp, Cannabis indica
aaaaaaaaaaaaaaattaatgccccccctcacttcaaattctagatccgccactatttacaaggttacaagaatcttcacaaacttcttagaaattacgaaaagaagtttctctctctagtttaaactctctctcaaccttacactatcacgatttttactcaagcaataataatggtctgattcacaccgattacaagtattgatagtaatttatagatttacattgttcactaaattagctctgagaatatcgtcgctcatttacacagccttaaatgatctaactcatctctaacaataataatccttgtgagctttgataacacgctttcaatataaacaatttaaaagatttaatatggacaaactattcagagacattacatacaagcgctctttcccgaatgaacaaaccaagactgacattagctattcagaagtgtatctcaagactaataacaagctatctaaagggacagtacatacgtggtataagcttatcaggatacaccctccgatttttacaaagtcatttgcacaagacttttcaaattctaaccaagcttctcgtatttactctccaaattcacaacctctctcccggatgttaaaatttgtaaccataatcaatacaaatgttaaatggtctaatgttgtggttaaaattaagtgtcacagatttatgtaataacttagctaaaattggtgttgggtggttattggtgatgacttaggtttcattcttgcttgcttttggtacttggacgaggaatagtttttttttctcttgatgtagttgaagcgttgagtatcttcttttgtctcttgcttgctattcggcttggttatcaaatggtggagttagaatatgattgtcttattgttattgatgctcttattaataatgagattgattatctttacttattgtactaatttaaatgatatttatttttaatattgtcttaggattgctaacagtattgcatattctttagcaaagttagctctcactttgactgatcattatgttcggtggcttggtcaccctgattatatcactgctattttgcaagcaggctcttatgactaatgatattgtttgccgctctttctttttttgagatttttcccactcaatttattcttaaagttttagtgagaccctttttctcaaaaaataaaaattaaaaaaataacaattcccctacttaaaatcattctatttcaactatattttttcaatcatattccatttcgcattcttaaagtttctacaactttttttctcctcgcttagataacaaacataaaagaaaaatgataaatacttgatgaaaaaagtaaattaaaaattatcgaacgtaaaaataaaaaacaaaaataattacaataaaatttaagaaagttttattcctactttaaaaatatataaagacactttattttaataattttatctagataaaatatatatttataatttttttcttccttttcacatccttaaaaacactactataaaaacgatataattcgcgacggtcctaaaaacgatttttttcgaggatcgtcgcttaaaaaattaagccacaatttaaaattatcggaaaaaataagtattcccgacggtttggaaccatagcaacaaaaataggcgacaattttggttaaaaaagaaaaaaaaatacccctctatacccgacagtttaaaacatatattaaatacaaataaattatattttaaatattatgataaaattagggttttttttcaattttaacaaaaaaagataacaatattacaaaaatacttccagctggccaaataaacaaata

SEQ ID NO: 304020 - DNA, 1376 bp, Cannabis indica
ttgttctttatttattctttaaatgattattctaatttaatattgtcatttattgtaaaatggttctaaaattgatcagttttgtaaatcctaaagacacttactttctatataaaggagtgatccatattaaacaaactaagctcaaatctttgcaacagtcttcagaccaacctctgactgaatcactatatttctcttatattcttgttgtttcttgcttttgttcgtttgtttagtagtcaatagtttgagtactcactactctaggtaagtactctcatatttttaattgggtgtttatatttatattaaatactcgcacaagtttggtggtgtctaaattcctctaaagatatttggcgccgtctatggggcacgcataatcattcacaatttttggaggagaatcatcatggctacagatcaaacaaacatgaataataatgcaggatctttcaatgttaggaccatgaatgttcctattcatggtgaaggaaccacatggtggacgagtggcccctagtggaggaacaacactggaggaggaactaacctagtcgaagacatcataggagaagtgggatgactttgtgtcaccccactcaatttgttctcagcaactgctgtccatgcaggagaaacttgcacacctgcaacaacaatgggatactttccacctatcacacctgctgtcgtttctgaaggcatcgttcagctcacgaccacacagtatatagctatgcaagaactgatgcgagctatgcatgtcaaaatcacatggagagataaagttcagacctgacatccttcgcgagtcccgattcgacatcaggatgattctgaggtaactaataatactagatgtcgtgctaaacatcctaacaatgctcgtgattacagggaacgagaagatgagaatggacaagaaggattagccttgaatcaacctctatgtgactccacacgtaatagaggccctactgttccagatacaagtcgatagcctgaatgaaaagaggaaggaccacaagaggaagaccccgagtgaaataacccgcggagtcatagtcatgcacaactgcgatttaaggtaaatgaaggcgactcccattcttcatctatcgatagtcatcctcctagtgtttataccaggtcatggattgtatttacaaggttagggggaaggtaccgtgttcataggagggatctacgtgattgcctcaaagaggtattctaagcacggtcaaaaactctgagaaattgcaacgatgaagaggaactattgttggaaatttattttacactaaggatttcgaaattcaagaggaagagagagagagtgggttcggccaaagatagggagagagaaggct

SEQ ID NO: 304021 - DNA, 1375 bp, Cannabis indica
gagccccatgatacataaccattccacttccataatatgacataaaagaccaaatagcaaacacaatgccattacttccaatcgccaaacctttagccaacccttgttttaaccccaatttcaccgatccttgtaaagctgcagagaactctgttatggttttactttctcctacaaatgaataaacggtgcgtatcgatgataaggcttgctctgctatagtcccagccctgttatactcttctcgaatctttttagctaatcccatcaaagttctaccgtacattaacccaggaattaccaaaagaatcacaaatggaaaacccactattgccaatttccacaacattatgaaagccgctatatagctcccggcaaacatagaaaaattcatcaaaaaattgggtaactgttacaaacaaaacaaaaacagtcaaaaatctagaaacaaaaatagtactaaatttccaagacttgaaatgattttttttttaaccttttcactaagaacatcttgaattacaaggctgtcgttggaaacacttgtgataacctcagaagtacttgttacatgtaaatcgaagtacccaacatcttgtcgtaacactgcttttaaatatcttgctctcattcttgctgcttgtctttcccctgttcttgtccaacaatatccctctaatttttgaaattaaataattaattaaataaaataaaaataaaaataaaaatatgaatttaatttaatttaattaattgatatgttgaattgaaacccaccaaaaaaacaagtcacaaatgacaaacaagccaagtacaataacgccactgcattctgttaaaggcccacataagaagaaaacagagtatttatatgttagtacaaagaagaagaagaagaagaaaattaatgaaatatgtatataataaaccttattgatattgttaagaaaaagatcagttgaagagattgaggttgatccaactccaccaatattgttcattaatttgctagtgattaacaacaccaaaggagtagtgaaaccatcaccaacagaacccagaaagccaaggatcatcaagcaataatcaaaaccatctgcatgtatgaaaatggatcgtatagacccacctttctttctcatctttacatctctcttatttttctcttccatatttcctttttagtatttttctgggtaaccaatcaccaaataatagtgattaatattttgatataaagattcccaaaacacgtctttttctttttcagaacttcaactaagggtgggtgtgtctaagatgacaggaaatatacacaaggctagcttggtcctcctgccttggaacttgtatatacataatatatttatatata

SEQ ID NO: 304022 - DNA, 1902 bp, Cannabis indica
catacactcaagaagccatgcttcaataacaactcatctcacacacaagttctctctttttcacactgaactagctcaatttcaatcccaaaaacacacccttacttgttgcagcagatggctatttatagccttttccctcaaggctcgatcctaactgtcataacagacagttaggtaaaacagttagtttagttgagtaggatttagacttaggtgatgtgtcattctcctattagtgaccaacacaacatatttatgtacattttagtaattaattatttacttttaagttatattatggtagtttataattaaagaacatcaaacttatcttaaaaattatttttaaaatcaataaaattgacatgtaatatagcaaaatattatttttatatgccaattattttgtatacatttttcttactttaaaagctatctgttcaattttttttttcttgtgatatttcaaactatttatgaaattaattagttattatataatattatataatttaattaacaaaatattattaggtgggtatgcaatgtgtatataataaagaaagacaattaatgggactataaatccaatactttgagcagttggtactagcttgaaatagtgctgataaaataatgaattaagcaagaataatatgtaacaatttaattaaaaggatccgaaaacatggtatggtgaggttttggggcgatttataacccctaatcatagattcattgaatgactggctattttaaacatgtttggaggagatttataatttgattgcaaatacagcaactagtgcttggcttggctggaggatagtaagtacgcaactcctctaattattaagggcgataaaaagggcaagaattacaaagttctagtaacaggtgtatgctaaaactctaatagctgggagtttatcatatatagcgaagcaagaaagatgttttgtggaaagaatgcatgaatacattccccattatagtgtatacaatcaaataggaagtgaaaacaataataacaacaattttaccaaaaaatatgaaaaaaaaaaagatatagaatggtttgagcatttttaagaatatctatattttaaggatataaatgtgattatgaagtaatataatgattctaattcaataaatatgaatttaaaataattgttcaacttcagatatttacctattatttaggaataattaattagttttttttgtacgtttagtatgtacaaaacctatgtaaatgttcaacttcacatatttaatttacctattatttagtatgtacatttagtataaatgttcaacttcagatattaacatatttttgtttagactttatgtaagctctaatttatataaagagcactaggctaaacaaaaaatttaagttctacttcctaagctcttgagtgctatgctttatctcgaaaccctagctctccttctctcatatgcatcatgatatatgcaatacactaagtctatttattatctcactcattcaagatgtgcctaaggttgttctcactattgtaattcattaagagccactctagaaattacagggtaaaaacttgtgatctgagtggtattatctctcgaatcaatacaactaaaaggggagtaggtcattaccgttaactaagggagtcgaacctctatacaattattttgtctttatttacttggtttgattatttacacgtggtatttctgttgggttttgtaccctaaataaaactcatttcaatataatcacatttactaattaataaagatcagaaactgcattttatgttgcatggttcacatgatttatttcatgattatatttaatgtataatttctattaagtccagaacatatgtatttattcatgat

SEQ ID NO: 304023 - DNA, 1857 bp, Cannabis indica
aaaaaaataaaaataattgtttttttttttttttatttattttaccttcttctttattttgaaaccctaatttcactaaccatatctctccccgtttttctctctaccgcctacacaccaccaccatctttcctagtcttcctctcttcctcctatctacgaccatcgtgttctcaaagcagcaccacgatagagatccctggtaccaaaaaccccacccacccctcactctaatttctctggcctgccccattctcgaaccggtaccacaaaggaggaccaccacagagcagcgttatgagaagactcatcgggagtgattctcattttctcattctctgacattcgtttgctcaccacgatgagatccctacctcaaaaaccccacccccacattgaaataagccactatttattgggctacaagtgaataaatggtgctaattacaaaatattcaataaatgatgattattctcttcatcctttgattgtaggcaaccgtaatgacctagtcttgagggatttgagagctaattttgtggtcacggatctggagtgagtcaaacgccctagccggacaattcgaccgatacactatcctgcgaggtcgtagttatgaattccgctggtccgtgctggttggacgcgagttagttggagtattgggttagattatttgtcttccatacactctgtccaatattttgattgtcacattcggccaatccttccaatttactgccaagtgtcactttgtccaatgtcacgtcacttgggtaattttcgggataacaacttttgatgcacacctgatttagtacaacaaaattaataaatgacatcgtagctaattccatatatatgttaaatattctgtagatttccttacattatataaatgtgtgatatgtatatatggttatgattattgtgaatgtatgattaaatgatggatcgttaattttatggtgataattaggtagaggaattgttttaatttttttacagaaatctatgtaagccataatgggatatagattttttaattttttaaaaattattttacataaaattgtaatgctcatgtgcatggagttaggatttgttttttgaaaccccgaccgtgctctattggactaccaatctcgtgcccattgtcgacagaagtcgagcaaccccatggaatcgacgttgtcgtccgcacagtactgggtcttggttcttggggattgtttttcgtctgttgaacgaaaccttgacaagacctttggtcctttttcgtgctatcatagatgtttgaggaccttcggtcctcttctgggcgactaagattgatcaagcacctttcggtccttcgatgatcttggtcccatagggacggtgtttttgagctagccagatacataaggatcttcgaaccttttggttcattcccatgccatcgtcatgcattcttagggaccgtttggtcctttacgttaagataaagagacccattcgggtctttgacccgtgtgaagcctcttggccactatgacctatcgtggcattagtggctcctcccggagccttcagccactgtggcagttataattttgaataattgtatattatggatttaatataacatatattcatgaaaacaaaatatgtgaacaaagagattaacaaagttaaaatgtaatttttatttttgtaaagtcttttttggcaagttagttgacaaaatattttttatttaatggtaagatatttttgcatttatgaccgattgtcttaccttgtatatttggatttagttgatcttttcttggttagaaaagatgctttaatgctgaaccttcctttgtttggaa

SEQ ID NO: 304024 - DNA, 1164 bp, Cannabis indica
ttttaatctttatatgattactggatctagggaatttagtaattattatagcatttcctcctcgtctgatgattatggtaatgttataagtgtgagatttagcctcgccacctttatacttttgcttatacaaatcttaatgttttattttttgtctagcaaatatgggctttgaagaccttctatgcagtctgactagtcccaccaagcgatcgaggaaagaagaggacaacctcggtggaagctacttctgggtcaaacctagaagtttcaaagaggatcaagaagagtgctggcaaaagatctacctcaaccaagctttcaatcgagccagaaaaaactacagccacttcttcggtgccagcaattgggaactccggtggataggccttggggtctgtccatcaggtcaaattctcaaggtctcaacccaaggtggttttcttggaaccttcctgccccttgccaatttttcgtaggtgttgatggcttgtaggtctgctcgcaatatgctacccaaaattagtgtcattttaagaccttcaagtaagaggactggaatttgatcaacaaaggaaatttttaaagccttttgacgaggagtgttgatcttctacaataagttagtatcaactttatagaatttttgtatgccttattctttgattccttcatctgacctcgtcttttctaggctacatttttatatttcatggctcagtaaaagggtttccaaagtgttagtcaccttagcactaaactttgcaaatctaacgaccatcgcaaggttttggctagccaatggaatgaatctcaaaaagagatctttaggttgaaaaaggatgttaaaaactaagtaaaatccgagaaggcccttaagactgagcttgaggctgctcaaaccaagatccaagaacttctcgaggctaactagctggcccaagctgaagctgacaaaaagcttgaagaagccaatcggatgccaaggcaagggtaaacttgatggctaagtgatgtatttgtagagcctgaattataaatcctgagatggacttgagcttcttgggtattggagccaacgagatgcatacctattgcgagcagactaagaaggaagaggctagtgatgccgaagaaagcgaggttgaggaagaagaagaagaa

SEQ ID NO: 304025 - DNA, 4961 bp, Cannabis indica
ttccttggataagaagtttagagtactgtttctattctataatgcacaagaattatactaatacattttttatttattttgtacagttaattatttataaaatatcttaaatcactacactaatatattttatagttaataaataaatagattagtgttaaaagcttaaccgacctaatctaattctcataattcaatttaatttaatttataaagtataggtatctatatttaattatttatacaaattgaatgggcttatactaatatatataatttttaatggatgtaatttaatttattattagtattagtatttttaaaaacaaatataaattttttattaatttatcaaatcaacaaaaaaaaaaaaaaattgtatctcaagagaaatatcgcccttgttaaacacacatttagaaaataacaagatactctaacaaaactatgaacaactatattagcagatcgtttaataaaataagaaaatattattaaaaagtggaagaagtttacgacaatcttctataataactctaaaagaagagcatagataatgaattttaaatagcttaaactactaccaagcagtctgattccaactccactttccgctatagttgagttttaatccaatttagcgcttcctttatattaattgcttcagccaaattcggaatgtctttaccagttaccttgattgtattctcctatagcttaacccaaaattcagctctattaccagcttcaaaaactgaaaaagaagcctctgaacctttattttgtgttaacttccattatacaagacaactcattgatgagataagaacaccatctaccatggcatacgtttggttccaaaccaacttgtttcgaaccttccataactcccagcacaacacaacaccctccccacacttgtccttattccacctttacaaaatttgatcaaaccagcaacaaaaatcggcccacccgaaaacctccccaaccaaaagtgcttgccagaattgagtagcaaatgaacaagaaataagcgcatgaaaaatagtttcctcacctcttcaacaaaccagacacatgatttgaactgggaccctctaaacatataaacaatttaaagcaacctgtcatactaaattgagtcgagttaattagtattagtattttatagcaataaaagtaggttaatgttcgtttgaattttaagttaattacaaagttattcactttacccaaatatttgtaaaatccactacattttcacataaaaaaaaacacaccaaacaaaaaaaattacttcatataccccagaaaaatttaaacaatggccccttaacagagacacataagaatgttatatttgttcttctgaaatcattaaaaatcgtagttgacatggcttaatgaagtacacagtacacttgtttttccatgccaaaaaaaaagagagaaaattaaattaattgaccaaattgtcgttacaaacaataaccttttctaaactaatctcaccatatgctcataaagttgcattaattaaaatactaaacagcccatcaaaaatttcagaatccatttacatcatgaaagaaaaaataaagtaaaaaagaaaaataaaacctacttacaaatccaatcctaacatgtatgtgtgctaaaactaagctaaaaacaactaagaaattttgcatgtcttcttgttatggccaaggcctttgcacttgctacattgtaactggcgtttaataatgtctaatgattcaacctgcttcatctttggcctccctggtggtcttttcgtcgggggtggtgtcacagtaactattgcctgatttgtatcactcacaaccggcttgtccacgtctggaacaggcataattgactcggcgtaagctagcctgtaagtgtccacagtaaagtatctagagcaaaaatcgtaagggcttctcccagtgcattgcattgcagcaatagcatggctgcaaggcaagcctgtaagttgccaacccttgcagctacaatcccaattctcaatatcaacaacctcactaccagattctccccgaacctcgaacgagttaccatgtaaggccaacacttctagagactgagcagctaaagtctctttctgaagctcttcttccttggatggtgttagcttcgtcgcccattggttggaatcaactcgacgtgtgtagaatgattccatcatcttgcctcttaatacatcaatcatctgtgttattggtaactcatgtgcctctgatacccaactgtagaactgctgcccaaagtttgatgtcatgtgattgtaccttgctccttcaaaaaaggcattcgcccagtgtgctggctcgctttcaatgacccaattgtggcgtctggggagatgccttttatgttttcgacacttcgctcgaaaccttccagtctgcgtgaataggcagcagcatagaagtcgttaaccatgaatcttcttgcttcatgagaaaactgacccttcaaatccctgttaagtttctcagcgagatggcgtaagcaatagcagtggtggcatttatcaaataccacagccaatgaattcttaataccattctgaaaatcagcaacaaatgtaagtggctcagatcttgagattgtagatttgagttctgtcaagaaccaaagccagttctcatcagtctcggcatccacaacagcaaaggcaactggaaagatgccatcatcaccatctgcagctgttgcagacaacaacacgccttggtattttgagtttaaagctgtgctatcaagaaaaatgagagggcggcagccttgttgaaaacccacaattgaggcatggaaagatacaaagagacgatggaaactcgagtcttccttagtgctaaatgtagcaatgctgcctggattagtttcctttatcttctcacagaaatagggtaactgagtatatgcctctttataagagccttgaagctgctccctagcaatctctttcgcccgccatgcctgagaataattcaactgaatcccatactctcgtttgatgtcatcggcaatatccttaggcttatagtttggagaaactttcaacttctcctttatgatacttcctacccaacctctagttgcgcgatacccggctttcactgcagctccatcacatgtgtgattcgtgtgcattttcttgatacaaaccaattgagtagtagacaaccttgaagcatatattctccatgggcaaccttgagacttgcatttgacagtgacacgatgactgtcatttttcttatatctgtaagcaaatccatgtgcaattgagtatttgtgcaaagcttcccgaaactcactaaaactattaaacctttggtccacaccagtgattgtgttttcccactgctgagcagccttacgatgattttcgtcgcttgaaccacaaggaacacaagccaggggaaattcatatggcttcaaatcattttggtgattatcagtgccattctcaatcagaatatcaacaccctcagcaacaggtaccactgcttccgatacagttgtcctgcttgacctgcacattcaaccattttgtgaatcctttaaacaccaagttcaaaacaagatacaatgaaagatcaaaatcagaaaagggtgttccaaaatgattagaacgacaaaaacaactagtaattaaaacaacaatcacattacactatctttctcacaatgcatagcaaaatgtgaacagagtccatattcctttagctatacaaataatgcattaaaaacacaaaaatgaaacagtgaacaccatagcagtaagtacctactagcaggcatgttggatacatttcgggcagcagcttcctcaaacatgacaaagacatcaacagtgacagcctccccaagaaaattgaccattcgttgcaaatccttgtctttggagattgtgatgagggtcttcttattgccaggaaggaaatacttaattaccatagtatcagcattacaattaaacatttcagctatttctgacttgaaatcattgagttgtgtttcactgtcaatgtccacagcataagcctcacccccattataggagagagatccatctttattggtgacgaattctccccctgactgacatattgctataactttcttcgtagccatgaccttattctaccctaaaaaacattattcatcaataaaacaaacacacaaacacttagcatgaaaaaaacacatacaatgaacataacaacaaaaccattcataattgtcaaaataagaaatcagaacaaacccagtttccaatttcccacaagtaatcgaaaagcgtaataaaaattgaattttttttgggagggagaaatcaatttcaatatttattctcagcaaacaacaataccatgtgaataattaaaaaaaaaaaaaggaattttagataacaacgatgagaaaaggaagaaccctaatatgataatatgataaaagacaaaccttgaagccagagtaaacgtgaaaaagtacttcgcggttgagccctttatgtgttgtcttattctcgttcaaataaatttcaataaaaggaaaaagaatggaatagagatggaagtggaagtggttaagcaaagaagtaatttatggtttgggttaacaatggctttaaccttgtgaagggttcttcttcttcctgttcttcttcttcttcttcgtcgtcgtaggtcatagccgtaagaagaagagaaaagcgatgaaggaagggagagaagactactctagctggggttgcatccttatcatcctacgtccgcctaattccaaacccccctacattcaacatcattttctctaggcccattaacctggcccaatgggctgaattctgagggtccatcagcagtctaatagtaggggtaagttgaaaaatgcatcttttattaatcaattaaccaaat

SEQ ID NO: 304026 - DNA, 2857 bp, Cannabis indica
gatcttgctttgtgatccacactgatttcgggtttcttgtgctattcacagaaaacccaaatcgaccgttgaaacttttcagggaaaacctctgttaccatgatttgctccgtgaagcaattttcaccgatgaccactgctggatcagaaatatttcttcggccccaatctcggtcaccgatacagcagtctctgctgttaccatctctatcaattgagaaaccgaagcgatcatccatctcggtgcagaaacctctgcatgtttccatggtaggtgactctaatggaggttttgggtttttgaaagctcggaggagttcgatccaatgcgaggcttatgaggcggacagatcggaaccgatcgagactaatatcgaactgccaaaggccgaggggccatctgaggcggcaaagaaactcaagatcggtatctacttcgctatgtggtgggctttaaacgtggtcttcaatatttataataagaaggtcttgaatgcttacccgtatccatggttgacatcgactttatctctcgcttgtggatctttgatcatgttgatctcttgggctacgaggatcgctgaggccccgaagactgattttgagttttggaaggctttgttccctgtaagtgaataatttgattatgattttgtgttttttgctgagaaaataataatttttatttttcattcctggttggggttcttttggaaaaagtttaggaaaaggatggaaagtgaagtttttaactctttatgcgtatttcttttcttcttctttcatttattgatttttggtgtcttctgataagagaaatatatctcttgtttggttgttagataataatcaaagagaagtaaaaatgtattgtgtaatattattgtcgtagaacaagtcaactgagctaattaattaggataattgaatgaggcaaattccagttttgaaaacctaatgtaagatccacaatgctgtatttcaatttggatatctaaaaattttgttctgatttttttgttgaatctcttttccaataggttgctgtggcacatacaattgggcatgtagcagcaactgtgagtatgtcaaaggttgctgtgtcttttactcatattatcaagagtggggagcctgctttcagtgtattggtttcaaggttcttgctgggtgagagcttcccaatgccagtttatttgtccctcatccccatcattggtggttgctcacttgctgctttgactgagctaaacttcaacatgattggtagccgaaatcttaaatctttaaattcataaacatatcttacccaatttacgttttcttcttatatttgtagaagataaaaagagggtgatgtgggggtggtatctactatgacttagtcatgttatttgaactgaatgattcaggtttcatgggtgctatgatatcaaacttggcattcgtcttcagaaacattttctcaaagaggggcatgaaggggaagtctgtcagtggaatgaactactatgcttgtttatctattttatctctagtaattctcacgccctttgcaattgcggttgaggggccacagatgtgggcagcgggatgggaaaaggcctttcctcagcttggatctcaattgctttggtaaatatattatatattatgatatttgcggtttgtttgcttcattccttttaaagcatctatattaccatggggaaatttagcagaatgttgatgaatattagaactgtgtttataatcgacccccatacgttgtcatctgtttcattttgtgataatactaacattttaccactttaatatttccattacaccattttcactatattttgctgaatgtttgaatctttactatttaattcattatggcatcgaagcaattgatcaattactcatctaatgagttggtttgtagaaataattcttttagattacgtccacaattttattttgttggatagtaattgatatagtaatgtcgtaaacttaaaagttgtgtttaagttggttggaattcaaattatagaggcaagtgttttctatatctttgtttcatttcgaatgttattcgtgctttgtattctctttgctactgacaccatctgttactattggtaatactgtaggtggatggtagcccaaagtgtgttttatcatctgtacaaccaagtttcgtacatgtctttggatgagatctctcctttgactttcagtgttggtaacaccatgaaacgtatttcagtcattgtatcctccatcatcatcttccacacacccgtccagcctgtcaatgctcttggagctgctattgcagtctttggtaccttcatatattctcaggtaagtcctttgtcgtcaatataaattgtctcattgttttctctctgttgtctcatcttattttctcaacttgcctttatttgatttgtcaaaaatgccagatatggacaaagtttcttttgactgtttgtacttcaatactttgtacagatttcacgagaaccacataatagcatagctctggaaccttaacatgacttctttccataacgttttattgtatttcatctaaaaacaaaaattcgaaaatgaaatatgttttgggggaccacagttcacttaaaccaaaatgttgtgtgaaataaatatttaagctctctttcagcttagattagatggggataagtcaagtggaattagtttgtattgtttgttactttgttttgtgggggttggtaagggtgtttgcagggccggccctgaaaatatatgggcccaagacaaattaaattttggggccctcaaaaatatataaaaaaaattaaaagaagagtgttatggg

SEQ ID NO: 304027 - DNA, 1955 bp, Cannabis indica
aaagttatccgtgttccatcaaatttacaatattgatttttttttcaaagaaacattcattagataataaaagttaaacttcagagtcattacttaccatggtgaaaagtaattctaaagtagtgatcaattctatcaatgctatcgactccaagtaaaaaattgagagttaatccttatttggtcaaagaatcatttcctcctttgttagctatttattttgttatacttcaaaaacttatgagtttttatccgttactaatttaggtgattatctatttcgactattcctaaaaactaatgaccacgaagttaaattttttctttctaatgaatgctttttttaaaaaaaaaataataatttataatattgatgttgaagaacataatatattttctttattaagtgaaaaattgagctaatataaaatattaatacaattttccatttaataaattataaaagtaaagagcaactataaagtagttaggtcttgttcatatcatatttctaatttatgtaaaaaaaaaaataattacgtttgtaataaattatcccaaaaaaaaaaattctaatattctaaatacattacaaaataatctcttttttaattttttactttcaaaaaattacaataaaccgataaccaattgacgaaaacaccctcacagcaaaaacaacaaaaacaatcacgaacccaccatttcatcaaccgccacgtgtcgtcttctccaaggatcccacgtagaaaaacactgttgtcctctcacagccagcgaatccgcaataggtttaattaccaaaataccctcacccacgactgcacaaaaaaacgtcaaaagaaaaacggccaacgaaacgccgccgtacgccgtctgatccggcgaccaaaccaccgacaatccaagcatcacgatctgaagaggaagcgaaatcaaaaccgttaaagccaacccataaatcctcaacctcaaagctttattaatcaccacagaaaccactctccaagccgaaaccaaaaacatcacccaaaaccctaacccaaacgatccaaacgccgtcgtactgagcaaaggataagcacaaagcaccgcttttcaccatcgacgaagacagagcttctaacaaagtaatcaggaaatcgaaccgtaatcgattcgatctccgcgacgaagaagagaaccacgatctgtaaacagaaaagagggaaaatcatgagcagtacggaagcaacagcccatcggccgttaggggtttctttcttgatcgaaacgtcgacgaggaagagaagggttaccaaaaaagcgggttggaagaagccgaggcttaaagcgaggtggattttacagagggttgatggttgaggttgggtgaggtgttttccgatacggcggaggaagatgggttggcggagaagctcgttaatggtccagaaagttatgaagagaacgagtaggaatcggacggtccagagtgagttgaatcgttggagatggtgagaggttcttgatttgaaacagagatggaatatgaaacagagtgagaagagtgagaggaggaagagggcggttatggatgttaaaacgacgacgttgaatactaataataagctcatggaattgaaaaaagaaaaatggaatgatttgatttttgaattgattttttttttttatgagaataagaaatggaatgatttggccatgtttttcccaaccggtggaagaaccggttggtttatgggatatttgagatttgaaaatgaaaatgagtgtttggctttgggaattatgtaatattttttgtatggtgatgaaagagaggttggtaggtagtttctttttttctctatatgaataagaatgtgtaaataaatagatttttagaaagataaaaaagatttggttactttttttttattctcttaatttattattattattttttcaattttcaa

SEQ ID NO: 304028 - DNA, 3137 bp, Cannabis indica
ttacacagttacagtataattatgtggtaaaataaacctacaaaattgtgcaattaccttaaattacacccaatttcaattccaggctatacaaacacacccttaatgttaagggtgggttctttcaatattcaaaattgtgatttgatctaactaaatgctgaaagaaacgagttgttggagcaagggaaatgaaatgttttatattcaccacattttattaacatacatatcaagttattctcttgactagaaaattacaggcataaactaaatgtgctctggagtgtgttagtatagtatggcttctttagttggttattcctagttatgaaattgaaagttttgtgtccattttctggattaaatgtgtacttaattatgcattcaccctgatgcaatattctcaacgattacaggctgttgcagaacaatcacttgactggttctatcccagcagaaattgggaaactttcacagcttcacactcttgacctttcgggtaatgaactcgaaggaaaaatccctagctctttggggtccctgtttcacctaagttacttgtgagtatggtattgaataaatttagttactgaaatttcaatgttttctgtagaagttggttttgatatcatgttttggtctaaccatttacattttcaaatcattttcatgccaagtttttcaggcggcttagcagaaacaagttagttggaccaattcctaaacccgtcgcaagtttgtctggtctttctttcttgtatgtgtttcatcacattttcactttcttctcacgagtatagtttatgaggctctaatttcaaatataattaccacacagggatttatcattcaataatcttagtggcccaactccaaacatacttgctcaagcctacaggtaagatttttatggaaattagaatccatttcataatttcacattttctgttgatatatgtcttagccattttctgtaatttgacaacaatccttacttgatgtgttccttcacacttttttcctagttagctagttatccaaggttcagaaaattgtgtgaagaattataaggagagaaaaattgtggaaagaggaagtgattcatagaaaattgataagagagaagaaaaaaaatgagaactatgaagtatgaactcaaaattgacattttaataatttctttagatggtagttgtgtttagttactgatgtttgattttttgaaatattgggttgtagtattacaggaaacaactttttgtgtagtccttcatcggcgcaaatttgcatgggcaattcgaaacctataaatggtaaaatggattaaacttctgacatccagttgctttgtagttcatcagatttttaaaattcttttacaattgcagacaccagttcaccagcaaaagtcactggtcaccaccgatgggtgctttctgtcgccattggcattagttgcacattcgtcatttctgtgatgctgattgtttgctgggtgcattggtatcgatctcgtcttttctccacatcttatggtacttcctaaactatgtttaaacatatacttaattgaatacatgataagtttcctgagagattgtggtaattcaaacttttcagtgcagcaagattatgaatttgacattagtcaattgaaaagatttgcatttcgtgatctgcaaattgctacaagtaatttcagtcgcaaaaacattctaggccaaggtgggtttggtgttgtttatagaggatgtcttccaaatgggacaatggtggctgttaagagactaaaagatccaaactacactggagaaatgcagtttcagactgaagttgaaatgattggcttggctttgcatcgaaacctcctacgtctgtacggtttctgtatgacatccaatgagaggttgcttgtttatccttacatggttaatggtagtgttgccgatcgcttgagagaaacttgtcgtgaaaaaccgtcacttgactggaaataaaaggctgcacattggccttggaactgctcgcggcgtctttacttgcacgagcaatgcaatcccaaaattattcacagggatgtgaaagctgctaacattttgcttgatgagagtttcgaagctgtggttggggatttcggtcttgctaaactgttagataggagggactctcatgttacaactgcagtacggggcacagtgggacacattgcacccgagtatctgtcaacggggcaatcttctgaaaagaccgacgtttttggatttggcattctacttttggaactcataactgggcaaaaggctttagatgcagggaatggtcaagttcaaaagggaatgattctagaatgggtaagttttggttaagttgtttgaaatcaaatttaaagatctttcttcaattgaatgtcactaaaagatggttcaattaatcaattatgcaggtaaagactttgcatcaagagaaaaagctagaagtaatagtggacaaagatcttaaagggtgttttgacccggatgatcttgaaatatcagtggagttggctctacaatgcactcagtctaatcccaaccttcgtccaaagatgtcggaaatcttgaaaattttagaaggtcttgttgaacccttggcaccagctgaggaatcacaaggcggaaccaacctcggcgaggcaagggcttgtagtagtttctctagaaactatagtgaagttcatgaggaatcttctttcaacattgaggccatggaactttcagggcctcggtaacggctaatagttctctgtatgaattttgaagattaaatttttgcatttttaggactagtttggtacagttttttgaaaaactaaaagttactttctcaaacagtgaaaatcagtttattgaagaatttatagagaaattatagctaaaaatgaaagttagtgcaacttaacttttataataataagagtaatttgcggtataaatatctaagtttaactctcgattgaaaataaatacttaagtttaatttttagcgctaataatgcctaagttataattttaaaacttatgtaagtacttggctgttaagtgttaagtaaattgttacgtgttaatccctgattggtccacattattaaactttta

SEQ ID NO: 304029 - DNA, 828 bp, Cannabis indica
  modified_base (784)..(784): a, c, t, g, unknown or other
aacattgtaatggttgatcaatttgctaataaaatgtcaccaatttacctaaaaaaaaagttacaaaaatcttcttcccaaaaaaaaaagaaaggcagggtaagccctatatacataaaaaatattaggtcaaatcatactctccttgttcttctttttagttactctttcttctttttaagtttgttccatttgtccgaacttaatttcaaatctcaataacctacttgagaattttattaaggttaaaaatcattaaaaatcctcagtttgtagcttgtgtgttcatgattataacccttgttgtcgtactaggccatggttattttgttgatcatttggaagtggactctagctggggtttagctcacgcaacattctatggagacatgagtggaaatgaaactatgagtaagtagtttcctttatatatttatgtgtatttgttcttgtaggtatatcatatatattgaatatttttattaattaaattacttcttacttttggacaaggcacaaagagaactaaaaaaatcaaacttcaccatatagacacgcatagctacatgatgaataaatcatgactacaattaacttttactattaatattatcacatcatcatacaccattataataataatgatatatagacattaattaattcttgtaaatttttattatgcatgaaaaagtgggagcttgtggttatggaacctattcaaacaagggtacggccttgaaacacagctttaagcacagcactcttcaacatgggtccacgntgcggagcctgtttcaaatgtgtgtgtaaattcaagacatggtg

SEQ ID NO: 304030 - DNA, 3522 bp, Cannabis indica
gcctatcgaaggaggtatttttttgttgagtatgatacccgaaaacataggaaaaaagagacgaaaagaaaaacccgaaaaagccttttgaggttgaatgaagggaaattttgtaaacaaaaaattggattattctaatctgtttttgaaagattagaatcgcctactgctaagctcagatatgcatgttgataaggcttgtcttacttggagattgttcgagttcatatcgagggcgtcttcatatagcctctttgcttgctgaagtagcttcatcttttctttactactacttggccgcaaccgggatctttgttgtagtaccattccccatttgaataaagctgcaaattaatgatcagagttaggattaaactaactaattcaatgctaaaagtaagtttggttattgacgatgcaaatgattttttgggttcaagagctagtgagataccatctggtgcaaaatcgttaggattaaactaattcaagagtaagtttggttattgacaatgcagacttttcgggttataagagcttgtgagataccaactggtgcaaaatcgttaggattaaactaattcagtgcttaaaagtaagtttaattattgacaacacagattatttttcgggttcaagagctagtgagataccgtctggtgcaaaatcattaggattaaactaattcaatgcttaaaagtaagtttggttattgacaatgcagatgacttttcgggtttaagagctagtgacataccaaatcgttaggatttaaactaatttaatgcttaaaagtaagtttaattattgaaaacacagattatttttcgggttcaagagctagtgagataccatctggtgcaaaatcgttaggatttaaacaaattcaatacttaaaagtaagtttggttattcacattgcagatgattttttgggtttaagagctagtgacataccatctggtgcaaaatcgttgcctttggacatcattgcatcaaacttatcaattgcagctaagaacactttgtcagcatcgaaagaagcctcctgcaaaaccgaaaaaccacattgttttaagtcttaactactaaatcgattgatgataatgatgattaagtagaaatgaatgaatgcttactggcccaatatctgcgatcaattgtgctcgaaaagtaagggcaagaccccaattatacagagctcttacatcattcccatcaatggataaagccagcctatattttcttccagcttcaacaaggagcttttcacattcttcacagacatcaacaagggcatatgcaatttcatctttactttcagtttgatcgcgtattctaccccattttccaacagatgatggattacttctcgaaagtagagttctcaactcgcggctaatccttaattttagctctccatgaagaaggtaagtgtttcccaacaagccaacagctaacaagctcattggcttcatagctatagccttcgaaagaatattggcagatttatacaacacaatgtctgcaagttccttctcgtgactatctctcatgaactccttagcttgtcgaagaaggtcattagcttcactaagataccgatcaaacaaaacatcatcagaaaccattgaagatgtcgaggaaggaatctcattctcttctccagattcgttgacattcatgctctcttctcttaatggagatacatcggtattatactcgctcttgtctttaatacgagaagagctgtaaacatcatccgatctctcaagcttttgctttcgggcaaaggaagcttcagtttttgtacgttgctgcattctaacactgaaacttacagattcaagaagattatcatcagattctctttcccatgtttcggttttattatgatcacgatccatcttcaatgaaattcgacgattattcactaactgcactcgcttattatactcattactgtaattaaaactcatttttctatttcggtttccttcatctccattctcatcaaaaccgagctcatttgatgaactgtgagaccgaacagaattccctcccgacttattctcatcaaccgagtgtaaaacctttccttcatcagaaccaactaaactatcaacacgagtttcatcatcatcatccaccgcagctccaaccgtccctcctcgcttaacactactgacattaccttttactttagatggtttcgaatcaaccaatttttgtctaaacaaaaccccaagagattgaaaaaactcattcccaatttcaccaagttctttacttttcttatttgatttctgattctcaaccaacacatcattagagctctcaatcccattcctaatatttgaagaagataaactaatggaatctaaaaccctagtataatcttccaaatctgaaattctaatttctctacaatcaatagctttctctaactttttcttgagattattaactttaacatcaaattcatcaacaatttccatcaaaatcctaactttatcaatataaaccctaaatgtttcatctttaaccttcctattattattcccattatagctcatcaattcaccaattcctccaccacgaacaaccccaagtgaaaacccaacagcaaaaaccaatacagaagcaggaaatactataattgaagaaaccctaaccctagaaattaccaaagcacacaataaccctaatgcaaatacgaaaacatgttttctatcgtaaattccaacagaaacaagaaatttacgaaattgacccgagtcagtagtctcaccagaagaacaatcgagtccacccagattatcccagcctccgtaactcgctgacccagaaacggaattcgctgcgacgatggagaatctgaggaatctcggtctgtgaggccatttccggtgagaaaggctccgactttcccgagaaagtgagggaaaattgaagagaaaatttgaagttgggaagttaggagtggagagattgattggggaatgggataacaaggtctccattggaggaagagattgtacggacgaagcttttacagttgattcgaagctgaagctgaaagctttgttcgttgttgttgttcttcagaaatttggtgtagaagaagggtaattttgtcaatatgagaaatatataggggtatttccgtcatttagtccttttcttttttactagtcaagtaattaattttggcctaatttttggtcataagtaataaatgaggttatcattattcttcataaatgttaaaaagtactaatagagtctagtatcctctttgggattatttttttttttcgcggtgatcaaaatcacacatgattaacaaagcaataatttacaattggcggcggtacctcctcgaaccaagatagctcattgtctaatcgaagagcatgttttgccaaaccatgtgttgcagaattcacatcccaagccacatgggacaaaactgctcccgaaagtttagacaataaagctatgacatcctcaagtagcaca

SEQ ID NO: 304031 - DNA, 2201 bp, Cannabis indica
aaaaaaaaaaaatacagaaagtggtagcccaggttcttcgagggagctggagacatcccaagagctcgaagctcccgacaatatagtcacacttctttttccctttttctaacctgctccatgtttatataatattctatcaccacttaaataccctgctaatttggctacaacctatccctaacaataaatttgcatgcctttgctatacaattcaacttcttttttccttcacttgtcacttatgaaatttgtaatttttattttttcacttataacagaacagaaacagagtatgtaagtcagatgcttaccaaggttaagagatttgctcaacatcactcttgccatgtctggtttgtagcacaccctcgacaggttcgtttcctctactgcactattttactttctcccaaaataataaatataatctaatgaaaaaaaagaacaaaattgaaactaagcacttaaaactagtgtttcccgaatgaggagggattgaggaaagcagagaatctagagacttaaattgttttctgcaaataggccacatcaaaacttttttccttttgagatatgtttatttctttccaatcaaatgatccttgatgtttctatcaccatacaattccacataactgatgccaccataggcttgcaaaaaccaagtcttgcaagtcattaacatctcacatttttccttaaacacccaagcatactctgcttcactcaacaatttatttgacagtagttctctgtcacactacaatgaagaaacacataattcaacgctactttgcagttgcaaaattggggagggaatgctccgaatctctacgatattagtggaagtgcacactttataaacaagtgtgacaatggtattgtagtacatcgtaatcgggatccagaagctggtcctatcgatcaagtacaggtgcctatcgcactgaaattccatctgaaagagttcataaatttcacatttatcagtttttttttgttataatgaaacatcaaagtcattagctccttgagaaaagcatctgttgaatctatatatgtattctatgacttgcagattttggtgagaaaggtacgaaataaggttgcaggaaccataggtgaagccagcttgtcgtatgacaggtatgttatagcctagcattatggtcatatgattatttgtgttcagagtatctgtaaacattttctctttaactgctcgtcagtcctgttctcaaggggaaaagggaaaaaaaaaagaataaaaggattatgatttgaaagtgatgaaaatttgttgttgggctttgcagggtaactggtctatatatggatgtcaacgactcatcacaggatttataggcaaatacatgaaacttagagccttgtacagtggcgtcttccaaccattgatgatacttagcgagttttgtagttattcccatgatcggtctggtccgacttagaacatatatatatatatatatatatggtcacgaatggatcgaaaggtatgatttcgtgctaggaggtgagggaggttaaaattttgtttctatatttcatttttggatcttgttattcttgatgatttttgtcatattgtcttgtactcatcaacatgatgaattgagtttgaagatattcatattatgctctagttattttctcctgtctcttgttaattataatggcacattctatgcatacaccgttcgagtcgtgctagcgacaaactcattagacacacaattgttccgtcataaccgttatttagggtttcctttcactcctctcacattcgttctttcatttatttggaaagggtttgaaagcttttcaagatgtccccattcatgtcattatgatttaccaccttctctcctcttggatgttatatttgctagctttaagataaccattattagcaaacatcagacgatattgtttgtaactaagctccttttatgacatttttatgctgatagttttatttctttttcatgcattattcttcgtgcaaccaaaaaattatatggactcgtcgaaattttgattaagacattcgtttttattcaaaatttactctattaaaagggaagcattagcaataggttgtaaggttcatgtgtatatttagtatttttatggggtcgtttttatctgaataatatagggggtccgtttactttgta

SEQ ID NO: 304032 - DNA, 1259 bp, Cannabis indica
gccatcgataaaacaccagaaaagttacaccagaaaaacacaccagaaaccgccactccaatgcaccagtagccaatgaaacagaagccaatgagcaacagttgaacgcaaacaggaaacgacacaaactcagactttcaaaacactctcaaaccatgtcacgagacaagaccaaaattgcatatatagcattagttacatggaaaagaaaagaaaaactatgcataagcatataatttcactgttaatgctagtaaaacaattattctctgtagcatataataatacaatcctttggtaataaatgttcacaggttagagatttaaaaattgctaatagagaagaagacattgcctactatgctggttatgtaggtcagtatatatatgttcactttgctatttaattactataagaagaaaagagaaaactatccccttttaactagtcaaacttcatcaaaatttcacttaatttccaataacccatttctcttaaattatttattcttcataaaatcaagctacatatttatttttatttttctaacaatttatttactcgtttttatcttattgtgactaaatatatcccttttgttacttatttaaagtggctgtgttaaccaactttataattgttttaaggttctgcatacatgcttggaagagctttgacatctgtattttggggagtaatagctgatcgatatggtcgaaaaccagttataatatttgggacaattgcattgtcagtgattaatttccccttttgaagtgaaatttaaccatatattttatactagtctagataattaatttaacaaacagatctgacttaaaaccttttcttttggggggtatgaatgatgttgacttaggattatatgcaacaccgtttttggcctcagtgtaaattattggatggccatagctactaggtttcttcttggaagtttaaatggtgtacttggaccaatgaaggtatgataatgtttgattataaccaaaaaaaaaagaaagaaaaataaaacacttctccttaacttggtgttttggtttcattttctaatgagcaggcatatgcaagtgaaattttcagagaggaataccaagctctaggaatgtcaacagtgagatttctaatttcccttataattttactaagtcagaatcataatcatctaagtcagcaattttgttaaaaaataatcctccacttaaactgatattcagaccagatacaaaggacagaaaag

SEQ ID NO: 304033 - DNA, 2350 bp, Cannabis indica
ttcattcaacaaaaattttcatattgaacataaaaaaattgactttttttctttccactttatttttcttacattttccttacgttttcttttctagtcaaaatttaacttccaaacataagttaatcaacaatacactgaaaaaaagtgcaaaattgattaaccacttttggcaacagaaagccaatttatttaatgaatctccaactaaacaaaatctacaatgaccaagtctttaactaatacatgaaaacacttacaagcagtccttctcgaacatcctctacaagcatttgaaactttgatccgctttctgatttttcagtctgatttccaattcccgatctcagttttcctccttttgaaaacaacatcccgagttccttctcaacttcactgtcaaaagacaaaatctctaagaaaggcaaggactaatgcttgtgagtaggactccagatataagaacgtatcaaacctgcgatttattcttattttcatagtacacaattggttttctctctgggttaatacatatacaggcttggaaggatctctccatggattggaatctaccactgttttaaaaaaaagagcaatgtgtaaaatatctttattcatatgataaggattaagacacattcgattaataaaataaaatacaaaaatagtctcttgatagaacaaattaattagttaatcaaaaaaaaagacagaactaattaattaattagacactattgaaccacttgttttccattggacccctatgctttataggattaactataaataaatataattgtagccttttataatgatactagttcatagcacaacacccagatggccagatagcaaatagtggcaaaaaaccaactccaaaattgaagtaacaatcaattaatcgaaacttcacatacacaaaattgtcaaggccagaagtctttagtagcaaaagaatttaagcaaaaggccacagccccaaatttctgaaatcgttcatttgcaacagagtaactatatcataaacaaattggacacctcgatatgaatagcaacatatgatatatagccaaaaactctttgaatcccaataacagtaataaaaaatcaagcgatcagctaacatgttgtatgtacaaccatataattaacttgaagaaaaaaatgcatcaataggtttataaaaatactattatatatatatatgtaataattattattattatataccatcgtagctgctgctatcgaaggtctgttggaggtgtcggcgcatatcgtaggcacgtgacgagacctgcttcacgaactcgtccgaagtcccaggaatggctccgtctaggtgaagcgctctctccacctcttccgtaccgttatcatctttgtcgtcatcagtggttccaccaccaccgtctgatttgctagaagctcgcctgctccatgatctcctagagagcttcacgggtgagctcaggcgcggacgggagagagaacacgaacgacggcgacaattctgcaaacgacaagaaatatagaaacccatttggcgccgttgcggaggacagagggaattatttgggggtagaactaaagaaggaaagactgaagagagtgaatccatggcggctggtggtgctatgctatgaatccaatatggaggtatgagaataatattttgggtcttttctatgtaatattgtggaacagtttggtaggcgtagtaggatggaaaaagttctctgcgtaaacgactgcgtaacttggtttggtgacacaagaatacaggaaaggaaagaaggttggagaaggaaaattgagtttttgtgattctctgtgaatctttggatatttcctccctcatgtccgttgcgggtccgggtaactgaattatggggtccgggtccgggtctgggcccgggtaactgaactgtggggtccgagttcgggtaactgaattatgggatccgggttcgggtccgtatccccatatgtttttgtgaaataataccaaaaaattacaaaaatacggtttcacggaattttaaacatttttacgatttttttgattttatttatagaaaatacggtctttttatgttgtaatcttgttaattttttgttatctgtatgttattttttgttgttattttcatgttacttttatgtagttttcttgttgattttatgttgttttcatgttattttttggaaaattgtaaaaatgtaaaaaaaaacattctttgaacgtaaaaacgtaaatattttacaaaaaatggtgccttatgtaattattcctatttttttccaaaaaaattaattaagggtaataataatagggaaacttaca

SEQ ID NO: 304034 - DNA, 1715 bp, Cannabis indica
aaaataaaatttaaacagttactcaatatgcatatgagaaaacagtcgcgtatgcaacaaaaaatacaaattttattaaactactcaaaattttcacgtacacaattatgataaaaattagactaaaaaactcttttacgtaccaaaatagttatgtaataatttatcgaaatataaagagtgcactgtaaacttaccctataatttatatgaaattattatgttatataaataatattgatgatgtgtttttaagagaagggcaaagactagaaagaattcacaaaagttgaaaagggtctctatatatacaacctatgatgactagttttcttattggaaactaatgtcttttgctttaagggttggccttcattgagttccaaatacgagaagcacgcactactaccattccttttcataactagctgtataatattaatatacaatatataatattatatatattttgcttggtttgtccatgtatagtcttcttgttgtaaatatttttcttatataataaggaaataattatatattattaagtttctaactgtttataactgtcatgtgtcaacagtcaactcaaaacggtggccaatcatattaacaacaagtcacatgatttattctcaaacttgcccatatgagttttatatatattcatcaatacaattatagtcattttttttaaataaaatctagtcattttattttgatcatattttaattatttatataaaattgtttttttaatagtgaaatttatatttatgaatatttattaatccatcaaaaaatttaagctatttagctcagtgatgaggaaggaatgggaaaaagagaaactgcatgatttaaatccaactctaataaacatatatattttattaatactaattgtaatactattttgttaaaaaaaaaattaggtagtcatgatctttaataaacaataatatttcattttgaatatgagatataatattaattgttaatgaaaattgataattttctttccattattattattatataatagctcttcaaaatgtagatatcaagccaaggttatttccaataattccaagtcttcatcatgcttgaatagagactcccccaattttcattaacataacaataaaaaaatatataaatggctatatagttctatattttggtggaattttaatattaattaatgagttaaataatttattaatatatatagctagtttagacttaatttattaaagagtaatcttttggttgaatattgtagcctaaagttcaatcacaattaaatacactaaaaaaactaatttaaatataagaaaaaatgaaatacaaaaaaataaaaaataaataaataatgcagaacaataaagtttaacactgaatcaagattgaaacatgtagatggatgttataattagccaaattggcctactcaatttctcctaattgaggttccactagtgagtatgtaacaatgaaaggctaaagctagtaattgagcaataaacactcagtacaaagtaggaatgtcagtcgggccgggcccggcccggcccgccacaaacccggcccggcccgacatcactttggcccggcccggcccggcccgactccttcttttggcctagcgggtcaagcccggcccgagataattgggccgggttaggcccgtacccggtttttttttttttttt

SEQ ID NO: 304035 - DNA, 1302 bp, Cannabis indica
ttatgaacttctagttcaattcaaaattgatgaacaagaattatagatctgtacacttgaaaacctttcaaaatgctctgctttcatgaacaacatgcctaggaagtgtaaggacgtggactagggagagacagatcagtttgaggcttgaaatgcagagagatgatgtatatattttttgattttttttttatatttttccatagaataataataataaataaataaatacataagggaaattgagtatcaaaagacatgattcaagtttccatgattggggttacaagagtcatgtctacttcaataattggatatgtttaccattcactttcatttctttattggctgcatgagattttttgtttccatttctctttcttacatctcatgcaacaaaaattacaagtggccttttttgttattttatgattatattggaatatctactatggtaaaagtaaactttgtacgtagtaatttaaattagaaaattatataaacctatatatgggatatattctttatcttttcactttaccaatgacatgaaaaccattgccattaatggattttgaaatgtaaatattctccacattaaaaaaaaaaaaagagagggtatgacaacaccctctctctttgctatcataaatattattttcaattgatttattatatgttatattggcattacaacacttattttgtacgaaacaaaagtgtttgacaaacatataatattatatcttttaggctttaatacatcgattgcccatctttctgtttttttcgtcaataaattgcatcacaatccacttaatgaaaaggacaaagtagcaccaaaaaagaagaagaagaaacataaaaatatttagatttattattttgaatgaatgaaaggtaggcactagaatttttttttaatgtgtcacaagtatggtaaggcctcataatcgagtcatatatatttgataaagttgttcatgtcatgtgagttagaagtgattttcggaagagacaatggtgtaggtccatgcctaatttagagaagacccttctcatttctaatgcatgaacctataaatatacacaaaaaccatacataacaatatacatatgatatccacatgaaaataataacaataccataaactcttacaaagttttgataatttgataaatataatgtttagtgttattaaatctaaaaaaaatagataaatgttataaaataatataaaataatataaagtagatgagaagaaagaagaagaagatgaagagagaaagagaaagtgaatg

SEQ ID NO: 304036 - DNA, 3054 bp, Cannabis indica
ttttttttttatttgcttaaaaaaaatgtagttgagagaaaatgaagagtgagtgagtgagtgttataaattaaatccccacaggaaaactgtgtttcaacttatttaggccatatattaatgcctaaatgagcttccaaacaaaagccagattctatgacccatatacaatacaatactatttctaataacattccatttaaaaatgtgttgttgaaatcaaattgtttaagttccaatccaaaagagacttatttactagttctctaatcagtgtcaatagtttataaatagcattggggcactattttatttgtttatggtcccccatctacattgatttcatgaactgatcttgaggttgttaataatgtgtgcacatcagtaactttatggtagtaaatttattcaaaacagctacaattccatcaatcttagcttgaccaaattttcataggagttaatttttattagaccaactccaatgttagttgttataataggagttggtgttaaaaaagactaagtttttaattacatatacagacattgttgtccttgttgaacaagaatgtgtattatgaaaatttaactagaataacacctaaagttagagcatttatgttatcaaaaccttccaaaccatatattagtattacatcattgccatacattattaaagaagaagaagaagaaaagactatgacctgacttttctaggaaaattcactcaagccaaagactggttttttactgtattttaatttaatgtatatatgtctaaaatctcagcatacttctttttctgcacaaattcattccttcattacatctacatctgtaacagcagaagatcaaagtcttcagaaaaaaaacccgaaagaaatgtttcccgaaaaccatatacctaatctacttcccatacaatcaaaagggcaaagccaggattatgaggcaccttcctatttcagttttgcttccttcttgcttctgctttccagtctcttcgaccagagccggttcgctgcattgttggcgttgttgcatgactaacaacgccgtgggacatatcaggacgcgataccctttgtgaggataattctgatatctgactgttgctgctcaaaacaggagcagtgacaagattatcattaggataaacttgtaaatccttacacgaatgagccctccttgcatcttttttccagttccttctacaaagcacgcgagcgctatagttgctaacaacgacattagattgtggttcgggttccactacaggcaatgttggtgaagtactacgctggtgcactataattgactgttcaatgatgctgctaggcatgctcgatttctttagatcttcttcaagacgtttcctcgctctatatctacgctggcgttctctattcttcattcgacgcatcacaatgtcattgtgattcttggaatcacctctttcattattaactacttccatgcttaaacaatcttgtccgttttccattcaagatataaaaagctataacctgtgcccacaaaatcgattaagtgagctgaaaaagaaacttccacattcaggaactcaaacaacatgcttcagcttcttaccatttaatgcattcagcattcagttcataataactcctcacttcgagaacgatcgaaactgttctagcaaaccaaaacctgcattaaacagatcaaaagaagaaaattactaaacaaaaaataccatcaataacactctgtaaccaattcttttatctctctaagctataattttctttaaataacatcaccagataacaattcaatggccatatataatatacttttagtataaatgaattgtccaaccccattttcccttacttctttttattatcaatttcatcctttgagatgattttaacacaaaaaaatcttgtctgaaatattttaacatgttgaacataagctttagagatattgaaacacatgtggataagtatagaaatacaatgaactataaaagtattagctaatccctttatagtgtttattacaatgaaatgatcagttctcaaaaccaaacaagtttatttcagtaaaatctacaagcattttttccataagggaaatttgctgaactacaaacatggaaatgtgatttatttttttcttttttctttttgacaaaatgaaaaattaacctcattggatttacataaaggggatatacttgtaacataaatttgagagagaaatttaatattgagttcaaataagtataatcaaatgggattaaatggttccatctgctaccaagaagatcagacctaaattcataaatggagaattattaaagggttcaatttataaaactatagttctgttttcccaattaaaatccatatactatcacaaagtttatcaaagctcattaaacataaattaattatcaagactaagatgagatgagatgatcttatctaaaactctacattagacagaaacaaatggtaaaaaggtaatgttggacatatttactttttctaatctcaaaatgggaagtctacaaaaatacgtaaacaataacaagaattctccagattattcacattaataactaacccaagaaaaattttctttttttgccattttcgtaatagaattagaattaagcgcagaaaagtaaatatttgtaataactacataattacaagcattttttttctttacatatataaactgatgaaatctttccttaaaaaaatgcaacttcggctgaaaaaagagaaatttagatgctttcaaagatacccaaaagaccagatttttgttttctgtttcgaaaaataacgcattcaaagtttgaaaacaaaacgcaaatacacaaacatatacaatgccaaaatggaataataataataataatataccttgaaagaagtgagagaaaggttggtaatgggcaaaagccaaagaaagaagtccccttgttgttggtttggtgtaatggaagaatttgtagagagagagagagagagagtgtgtgtgtgtgtgtagaaa

SEQ ID NO: 304037 - DNA, 3374 bp, Cannabis indica
ataaaatgtcaaatttccctaacaaaacaactcctttcattttaaagttctctagaaatcaactcctttgtggaaaaaaaaaacacacacacactccaaaaggaacaaaaaagtagaaaagaaaagtctatttaattataagaatttgactttgactcagtgccgtttatgcttaatacgacaaatccatgtaaagcaaacaaactccattgagctccgaattcccttaaactacaaaatactaagataaagatttccaataaattaattatgagtagcccaaaaaaacatcatcaacaactagattgtggtgtaaaaggatttcagaatcaaaaatttcagaataaataaaaaaaacttatgatgaaattagtcacgttcccctccttgcccaacatggtttcaccctgaaaataataataataattaaaaaaaaaaaaaaaaactagttattattccttcccccaaaatagcatttttcttctatactttcacaacactatcttgtttaatctcatcatctttcggattcacattagcttgaacccaaccaccatcaatggatcccaaacttccattcaatccatcatctacaaaatctccaacccttttcactttaatctctcttggctccacagggtactttcctgagaaacaagcatagcaaaacttaggagcttctttctgtaacatattggtcaaactatcaaaaggtagaaaagctagtgaatctgatccaataaactcccttatctcctcaacactcatcctatttgaaatcaactcctctgaacttggtgtgtcaactccatagtaacatgatccaataatgggaggactagctatcctcatatgaacttctttggctccagcctccttaagtaacctaacaatctttgaagaagttgttcctctaacaattgagtcatcaacaaccacaacccttttgccttccaacactgctcgaaccggcgaaagcttaagctttacaccaaagtctctaattttctgtgaaggctcaatgaaagtcctccctacatagtgagaccttattaatccttgttgaaaagccacaccagctttagcagcatagccaagagcagccaccacaccagaatcaggcactgcaatcacaacatcacaatccacaggggcttcagtggcaaggatttcgccaaaggcgcggcgagattcgtagacagaacgtccaaagaccacagagttgggtagagcaaagtaaatatgctcaaaaatgcattgttttggctcagggtgagacattaagcaaagtgattgaacaccatctttgtcaacaaccacaacttcaccaggataaacctctctttcatatgtggcttcaatcaaatcaagagcacaagtctcagaagcaaagacaacagcaccattgcttcttcttcccatgaccaaaggtctaaaaccatgaggatctcttacagcaacaagtttatcattagttacaaaaaccatggaataagctccttcaagttgttcacaagcatcaacaattctcaaaataaaaggtctgtgttttgaaatagcaataagatgaagaacaacctcagtatcagaactagtattgaaaatagagccgttatcttctagtttagctctaagagagctgtaatttaccaaattgccattgtgtgcaacaccaactgaaccaaatctataccctgcaacaaaaggttgaacatttttaagcatagaagacccagcagtagagtaccgtacatggccaatagccaaatctccaggcaattgatcgagctttgaatggctaaagacttcagagacaagtccaacgcctgtaacggattgaagaacgtcgtttttcacagcaacaattccagccccttcttgaccacgatgttggagagcgtgaagagccaagtaacagagccgagaggcctctgagtcgccataaatacccacaacaccacactcctcgcgaggcttttcgtcatcatcgtagaaatattcatcgaaactgctatcagggtttttcttatcttcggcaaagaagtcggagataggggttttagccgaggcggtgaagaggggtttgtgtgtgtaggagagagaagctgttttgggaggtgaagaagaagaagagaaaggttttgggtggggttttggggagaaagaaagaggggtttgagatggggttagagagaaaggagtggactttgatagagaggaagagaccttggccgccatgggaggagctttgaaaggttttttggtggtaatgtgtgaaagagaaaaggctcaagcttgggaagagcctctgaaattcgttcaaagttttaggtttatggagtgaagagaatctagggatttgataaaatgactgtgctgtgagatagttgtgtcacccaaccctacaattttaaaagattcttttaggattcagaggtgagggtttaaaggttccacgcaccatatatttaattttggaattataatttatttattgttatttgttttgctgattttttttattattattttaatacatatatttaatttttctaaggaaaacattgaattaaatatattaatattactttccaagacaaaaaatcttaattttaatgaaccatatttgagacatgtaatctcttcttgatatttatttatttagaatatattctttatgggttgtgtgaagaactgaaatttaagtttgttactcactgataatttggatttatatgataggatattatttttgagcttaatttgaaaattcaacatctctttttctttttcatctacatggggatgaaattttacaaatgatttggttgaagggcaactctctgaatttgattttaatttgtttgctatgcatatatttggacgaaaagatttgtttttctatgctaatcgagttgcacattttttgtacgacaatctcagtgttatacgtgtcatatatttaggaaaagagatgtgttttgtgaactttattttattctttcaagcaactaattctaatttaatgaaaatgaactttattgaaacaaaaaatctactactttaaattttgtatacttttatactttcaattatgtgtgttatcttaactctctttttttatcaattaagaatttcagtagaaattatacaaaagatagacaatagaattttatattaatcttattctagttgataattctgaataacaaatcaaaaagagtattaaagcaatcctaccattaataacaactaattagtaatttttattgggcttttacactacatattgaaatttaggctattttcaaaaatatgggaaaaattattaaggttatgataaatatgtcataaaaagtaaataccactaaata

SEQ ID NO: 304038 - DNA, 1663 bp, Cannabis indica
ttcataattctagggtattacaccattactccaagtgagctcctcctttacattactaaaatcaattaagccgtagtcatctatacacctcctaaatctttccatagctgcccaacatctctccttccctccattcttttcatggtttccaattatctcattaaagtcttctatacaaagccatgctccaatcatagaattattgatcaatctcattagcttccatgaatcctcccttagagactggtttggattaccatagaaccaagtaaaaggtaataagccattcccagctatgttagccaaaatatgtcctggagacgaatcacagatttgcatcgtgatagtctctttccacatgagaattaaactgccactattacctcttctttctactgaccagaaatcatcaaagcccaatcgccggaccaccttcttagcttgacaattattaggcttactctccatcacaaacaccaaatcgggtttaatctccctaacatgggatcgcaaagatttgaatgtccaggaattccccaatccctggacattccaacttatgatcttctttgctctcggcagccttgctcatcaaggcttgctgcttcaaaataagaaagggatgagcaatccaaactgccaaaaagacccaccccaacaactcttttaacctcttcaacacccttagccgacatttctttcccaagcagaaccccagttgcctttttgtcgtcaacaatggtgatattttccacttctcttctcctcttttgaccttcaactctggccatcttcttgattgaaatccttttcttcgttcttgtatccttttctctgttagccattctccttccctctaaactaccaatgttgaagagattggtaagctcatcattgggtttatcttcttcaatcgatcgcagcccctcctttttgattcttcttcttgaatttcttttattaagtttttttctcttccgaaaatccaatttcttctctaaagtttcagtcggcgcagtggttagattttgttgttttttttaatcttctttgttagtatcacacgccataatatcagcttttgtacacgtatttgccatctcatcattgttaattctttcccaattttgagccacctcatcatgctttttctttttgacattcaatgccacctcatccttttcttctcctttattaatctcttcccctaccccacattcttcactcctatttcctaaccatgaataaaattaatttggttcctatcccccatatctgttcttgtactctctttggccaactgatgattagccgccaaccccattttaattcccgtactcatgtctccttgattatcgtgtctcataacttttggtggctgttgcacgtgctttcctcctttagcctcaccttcatttcaatcctttcctcttcccaaagtctggtgaccttttgtctcctttccacctcttccctcccttctctgagtttccacctccctcttgttggaaattattttaccaggatctagatttactaacaagtatgttggattaacaacctaatatgaattttaaaacaatgaaaataaacacatataaagttagaaaagcatcaccaagattgtaacctggatcttcttttctcctcctttgatgtagaa

SEQ ID NO: 304039 - DNA, 1938 bp, Cannabis indica
acaggcaaaaaaagcaaggagggaaagtatagaatcaaaattttaaaaaaaataactaccaaaacaaacaaactgccgcagagcacaaatgtgggcagacctctctatattcttcttcctctctatattcttctttcttattatatctatttaattttagttgttctttgttaaaactttatcaatgattctttccttttatcaaaacttaagacatatttttcttttaaaaaaggaaaaactatcaacactctatttttttggtttacaatttcataacttcattattaaatgttttttttttttttacgtaagacttaatacttttaatatatttcagactttaaatttttatttcttaaaactgtacacaccatatataacttttcaaatcactgttatattttatactgttattatttatctaaattaaacattctatattataaaattatatatgatatttaaatatatatatatatataacctaataaaattaaacaaaacataggtgacaaataataaaagaacaaaatctcaaatcagctgaaatctaatttggtaaaaccacactgatatctcatggatcatgattataatttgttacactaattgaagttcactcacgatcgatcttgacgctacagacgaatattcctccacatcaaaagccatattcctcttggcattgatctcaaatccctcacttcttttctccccatcgattaacacaaaagcttcttctccatgtacggcaccatcgccaatctccagttcatcatcatttaatctaagcggaacaaaaaactgaatgaacaagcagatcaagctagtgaccaccacgtttaccacgatcacaaacagaatgcctcccaattgaagtcccatttgtctaaacccagccgacgtccgaccgctctggaggccgtaaaatagcccaatgtacttgtcccaatcggagaccatgaagaagattcgagacagctttggcgtggcaaatagccctgcgaggattcctcctaagctgccggctatggcgtgggtgtggaatacggccatcggatcgtctacgtgtctcaagatctttatcttgtcgtgaagcaccatcatcgtgtaacactacctgctatcactcccattataatggctgcccaaccttgaaccactcctgtatatagtggaaaaagtgcttgattctcaatgagtgtaatttatatatgaattttttatatagctagctataaaagttgccattaaggatatagtattttaatttaccagcggcgggagtgatgcagaccaaaccggtgatcattccctggacagcgccaacgagagagggtttaccggagaagacagtgtcaaggatgacccacatcagcaagctgggggcagcgcatacatgggtgttaaggacggcaagagatgcgaccgcgcttgccacgtatggatctccaccgttgaatccactccaacccatccaaagcaggcctgcgcctgcaagcatcaatatcatgttgtttggtggtggaaatctttctctatcttttccagttctaggccccacctgacgtattcacattattatgttaaataataatattacaaattatgtttcattttcatattaatattgtaacatacacttataatagtactagttaatccttgacacactacccgtcttaatttcactagaaaaaagactactacgatctacacttacattctcaatattatgtatgggaagggatcaatataaatcttaaatatgccaccttatatagtgtataagacacgtacgtagcaaccttttctttttaaatattttaaagggtaaataccattttggactctctgttttacaaaagttactaattggacccggtgttttgttaaatgacaaaatgaaccctgtattttctaaaatagtacaaa

SEQ ID NO: 304040 - DNA, 3922 bp, Cannabis indica
tttgacacttttgggatgagaaacgatgaagagagaaattatggtgaataattgaatcaaaataatgatgttcatgctaagaatgcatgaacttttgagataaacaatggtgaagaaattacagacactaaagatgatggatatccaaattacataatggatgaggaggagagtaatgatgattgtagacagagagaagggaaaaggaatgtatactttgatgtggaagaggtagttgttgaatctcatggtataaaaatttcttttgaaacaagttcatctgacattgaatcagaagttgaggagactaatgagtttaatacaaggaaaaataagactaaaagtattaggatgtcccatctacctgagttcagacctgatgttaacatggtgtaagtaaagtttgagaagtgattggtatttcaattagggtcacaattcaaagatgttgggagaaagtatgctattcaaaatgggaaggaaattttttaagaacgatgacccaactcaggttagggctaagtgtggtggtgtcaattgtccatgggagctgtatggatctaaaatagatgacacaccaacatttatagtgaaatcctacaatgaaacacacaaatgaccaagaataaatactaatagattttccacaggaaaatggcttgctaagaagtatttagatgagttcaacatgcatgacagatgatgtatttgttcattccaactaaaaatggttaaagatcatagactaaaagtttcaagagataaattttatcaagctaggacatttgaatctaagattataaaagggagttatgaagaacaatgtaatgctctctaggattatgtcaaggagatcaagtggactaagaagggttcaatagttaaaatcctaattgacacaacagaaaatggaaagccttggttcaagaggttgtacatttgctatggttgattaaaacagaggttcaatgcaggatgcatgccaatagttgggtcgatgattaccatataaagggggtacatccaagacagttattgacaacatttgggattgatggaaacaaccaaatgtatcgtggttcttttactattatagagataaaaaacaaagatacttgatcatggtttgtcaacctattaagggatgattttaaaattgaaaactaagtgcattggagcttcatcacaaataaatagaaaggattaaagcaagcatcaaagggtttgtggggagtaggaataccgaaggaatagcacaaacattgtgctagacatcttgaaaagaatttcaccaaggttttcaaagatgaaaccttgaaaaatttgatatggaaatctgccaaaagtgatactgtcaaaagatttgaagaagtgatggaggagattaaagtgttggatgagggagacttcaaatggttaatggaagcatgcccacaacattggagtcgatcccactttggggttagtgtgacacatttttgtaataatatgtgtgagtgattcaatggtaccgaatccatattgactactaaggattgacctattcttactatgcttgaaaagattagaatgtacttgatggaaaaaggatgaacaaaaataaaaattcagttgtcatgtggcagtcaaacattgcaccaaggatatcagaacaattagaaaaaaaaaaccaagtagatgcaggggtcactttcttgttagttcttctaatgggtcttaccaagtggagaatatgtatggaggcatgttttgtgttgatttggcatgatgggtctattcttgcagaaaatgggaactgaatggaataccttgtagccatgttgttactgcaatctagtctaatagagaggatccaaataagtatgtgagaaaattgtacacaaaagagtactacatgaatgcatactcaaaatagatgtaccctattaggaatcaagaagagaggctaaggagtgggaagttggtaatggtaaaacctgtaggaaaatacagcctggtagaccaaagaaaagtaggaggcttgaactagatgaaattgctccatcaagaacaaagagactgaggaagagattccatagaatgaggtattctagttgtggtttatagggccataatttcaagatctatagcaaaaacaacaataacaaggtataattaatgtacaattaaactaagcttgtgtgatagaaatatgctctgctatggctattatttcatgtgtaattctaattgtaggcaaatgaagcaccagcagacctggggactgctctaggaatgtcaagccaacaaaaaaccactctttgagatctacaaacaaggatagttcattgtagtctgcaactataccggttgaggtacattttagaaacttgtaacttataaaatttatttcaatatgtatcaagttattcccttattaataatgttgacatcgtatttattattgatgcttgccacgtgttacacactaagaataaaaaagtatataagacacgagattttatagaggtttggctcccttaattattgggtaatgacatactcccctattggttgtattaataccagagataataccactcagatcacaagggttattgaatctgaagtggctctcttacgattacaatatatgaatcaagtaggaaaatctcaagtaagagagcgagagagctttgggtgtgtagaagagaggggaagagagttagggtttcgaacttagagcttgacagctttagtaaggcttagagacttaggacttagccttaggcaaatgctttttatataatagagcttgcatcccaaatatccctcaaaatagttaaataaagctatatttacataattaattaataaaattcaaatgacaaaattgtcctctaaaatagggaagttgctaatattttctccctatttttgtgggatgtcaaggtccaatgcactacttaacttgatgtctacggatgaaagttgcgcaccaagagccttccaagaaaaatttggtcagccatgcacttgccaggtgcaggctggccagccacataatgtctttcagttggggtctggctgaccatgttcctgctagggcctggctggccatgctcttggcaagggcaggcaggttatgttctttccaaggtctaataggtcatgttcctgccagctttggcaagtgttggccagccttcataggtggtggccaacctttataggttgtgactagcctttgtagatgttggccagcctttgtactacttttccttgcagagctcaagttttcttggtcgaatgggcccctccttggttagaaagtcacctttttctagccaacttgtgcttaaaccctaatcgcccatacaagctcatcatggctggcctatgtactccccttagttggctagacatggtggtgcagctccttaatggctcgcgtaaatcctctcacttgttgcttgacagtttttccatgccttataaggagacttttcttgttattaacaagactgtattccacgtgtcttcagtcttggcttatgtggacataccacgttaggtggacaaaatttcagataaaatttgccccccaagtccttatttgaacatctggtcggatagggacttcttcattctcatcttgcttatagtagcctttgtcgagtagccttgtttagccaagtattggattttgcatggcatggttttagatcttctgtctccatctatgcctcatcttctcttctttgacatctcttctttgaacctaccattgataagtttcaagctttttaagctttcaaaaactatttgattcttccattagtttgtaatctttttggtattttgatctacatgacagttttagaatgcataatgtatgattttatgatggaaaaaattctattttagcgttcattgtgattct

SEQ ID NO: 304041 - DNA, 2345 bp, Cannabis indica
aattaatttgacaaagatttagtattattatattaaatatagaatttgcatctaagtgtcactattaacaattatttgatattatagatgcatttttttaaaaaaaatattaagctttggccacgcaaagcctaatgttggcaaaattattctctatccttagacaataaatgtaatataattgattaagaaatatgaaattgaacaaagactttatagtaacattctctctctctctctcatagtataaaatctcataaagaataacatgaagtaacaaacaattatgtgagcttttattctcttttatgttgtttcaaaccttaaaacaaaacaaaacaaaacaaaaaaactcgagtaatgggaagaacagcatgttgttcaagattcggtttgcgaagaggtccatggacacctagagaagacacattattagtaaactacattcaacttcatggtgaaggccattggagaattgttcctaaaaaagctggtattataataaaacatatcataacacttttgttttgtattttgtttcattaaaatgttatgttatgttatgttaatgttatgttatgttatgtttgtgttatgaaaagggctacttagatgtggaaagagttgtagactaagatggatgaattatcttagaccagatatcaaaagagggaatatcacagctgatgaagatgatcttatcataagacttcattcccttttgggaaatcgttggtctctaatcgccggtagacttcctggtcgaactgataacgagatcaaaaactactggaattcccacttgagcaaaagactcaacaccaacaacaaagaaagaacaaagaagaaacaacaacgacaacaacaacaacaacaacagcaacaacaacaacatcaacaacaacaacaacaacaacaacagcaacaacaacaacaacaacagcaacaacagcaacaacagcaacaacaacaacaacaacagcaacaacagcaacaacagcaacaacagcaacaacaacaacagcaacaacaacaacagcaacaacaacaacaacaaccgacgactaaggagaatggagtttcgggaaatggtaagaaggtacatttgccaaaacctgttaaagtttcaaagtatagtactagtgctcatggagaagattgtgcagaagaggttttgaatctttattatcaagatggtaacaaagttgatgatgatgatgatgatgattatgattatgattatgtagtcaacaacaacaaaagtaataatagtaataaaagtacatctttggaccaaatttcacatggtaaagatgatatgctagataagatctttgaggaatatcagcagcttcttcaggtggaggatcatcttcattctaattttctctttttctgaagattcccaatatatatatataataatatatatgtgtgtgtgtataaggatatcaatacattctgttgaaattgtggtttgtattggtgttagtttgtaaggtatttatggataagatttcatgtgcccatttctttttcttttcatttagttcttttattctttgtttggaatcatataattttagtacggaagaaaatgatgtccaaacaaattcatttccaccaaataaaaaaaaaaacaagttcatttcctaaattgtttttcagaaataggaattatttttttttttctttaagtgtgaaatcaaatcccttcgattcaacaaggagaataattttttaatttctactcgaattaagatcgagaaaataaagtttttcaataattgcctcaaatttattctcaaaccccactcatcaaaatataaaattacttatggcagaatatgccgatttattatttcacaataaaatgaaagataaaattaatgatttattggtagattaatagatcatttcgaaataacatatacatccctgaataagtaaaagaatgaaattttggtactttaccactaaatctatttcattaagaattgatgattaacaatcccttggactaaaaaataactgatagcgggctcaaagacaagggttggaatgcagtagaggtcgaaactgatagcttactcactgttcaagcatttttcagtcaccaaaaaatgacttctatttttggtttgattactcatgactgtaaaactctcttatcctctctacctaatgttagtcttcgttttgttaaacgatcagcaaacaaagttgtccacttcgtggctaagcgctcttgatctattctgatcgtagcattcatgatgttaatgtcctggcagattataatgccaatttataatttgaatgctttatttcaatgaagttgatat

SEQ ID NO: 304042 - DNA, 2333 bp, Cannabis indica
aaaaaagactttacatatatgtagcaaattactctaactaatattttttttagaggtactgtaactaatatttgtacatatatatttttcacacttagtaattttttaaatgtaaataccattttggatcctgtattttgtaaaagttactaattggactctctattttgttaaataaaacaaaccttgtaatttccaaaattatacaaataggaccctaaaatgatttttgtcaaaataaaacttaataattatctaatctaaagatgttatgacaaaactggttgcattctctgtatctgttcgtgttagaaattgtcttaaagttagttatattaaaaaaaaaaattgttgaaaattaagctcagggtcctatttttatcattttggaaaacataaggtccattttgtcatttaacaacacagaaagttcaattagcaacttttataaaatacaaggtccaaaatggtattcactctttttttaacttaataaaaattaaactcatcttaaagtaatatataacttgttaaacaatttataaatgtaagagtatctctaatagtagtgtttggagaaaatacttcccgctaatatgacataatacttatagaagttaaccattagagatgtttgagtgccaaattaaaaattaacattgagccatacttttttttaaaaaaaataaattaaaataaataatatattaaaaaatattttgtaggatcattggagcaaaattcaagagtatttactattagagtattttagaagtaagagtactaaaaataatgtgtaaaaaaattaaaataaaatataatattttaaaatgatatggagaacattgcaacttataataagtgtcactattagaaatgctttaaatatattatcactagtgaatctcaagctaaatatttatgttgattgaaaaatattacattcatattttgtgataatcttaagtaatcaacaataaaaatataaagaccacatgttgtgtgtagtggtatgaaagattttattggtgaccttctttatttaagtcaagggtcatgacgagccttgagggtaggcgagtcaggcgtggacttcaggcccctgaactctcagggccctaaaattgtgaaaaaaatattagtacatagataaaatattaaataataaaacaatataacaaatattgtttggtatagtgataaagagtcttacactaagaggtcgagtgattagttctcaatctttacttttttattttttagaaaaatatttaatgtattgttatgaaggattgaatcttggaacagagttttaaaaaactttatcattacaccaaagtattataactattaatttgataataattaaactatatatagggattttaagatttaatttaccttaggctccatatatgtaaagaccgcttagtttaatttagaaattagctattaattatgatttaattatggaaaattatttatagatatttaaataattatttatgctgttattattgaattctgaaatgcattttatgtcatataatgaaatttcataattttgtatttccggtgcccggcaacatggaactcggtgtttggctcagtaaaatcacaacttagtatgttagtatatcgggatggtttattagacattggaaatgtcgggagtggtcgagaatttaaaatttcccaaaaataccctttagtacccctttttgttattttagtgtggactaagtgtaatttgattatatgtttttaaatgttaattgttggctaaatatagagtggatttattcattttatcctttatttaaaaattagaaaattagaaaagttaaaagaaaaaccaatttcctctcaaagctctctctttctctctttttcggcctccttgagcagcaaggatcattggaatttttcttgtgaattcatctctttttggtattctaatcaatctaggttagctcctaatcctttcctctttaagtttgttgaaaaattatgaaatgaaaatagtttgcatgcttagtttgggttgatgttgttgctgtgattttatgttgtttctgaggtttaaagcatgttaatttgagtagattagagctggttatgatgcatgtttgttactttgattcaagcttggaaatttttagtcaaaattatagttttcaaagaaaagtgaagaatcttgttactgtggttgttgttgctatgaaaatgcattttttggtgttatattatgttgaaataggtagagatatgcatgatttagtggatgttcggagggttagtcaagttttgagtttttgaactcaatcttgaac

SEQ ID NO: 304043 - DNA, 1506 bp, Cannabis indica
taaaacccgtccccaaactactaacatactaaattgtgattaaatatgaaaactactgaataacataaccatgcatttctgaattccataaataacagcaataatttatttaaatagctataaataatttcataattaatcataattaaccgataatttccaaattaactaagcgggctttacatcaatgttctaaaaaataatagaatcattaagtaaataactgcgaaaatgataaatttttttaaaattgtgcgataatgagatgtgggtaatcaacattaaattttattagccataataaggatacatgcatcctccctatacttagggaattgaaaattaaaattgactaagtatatacatgcgagtattactgataataaaactttagatgcttggcattccaagctctgtcaaaaacaaaatcgttaagatcagaaagccggtaggttacagtgcaatttttttttagtcaatgaggtatggacctcccaattatcgttgaaaactccatgtgttgaattgtgagtattagacataactttgcagagtactaagtcgcctactcgtagattcctctccttaaccttcgagttaaagtaatgcgctatgcattattgataggccacatttttatttgagcttgatcacattttttcctccaataaatctagttggagaagttgtcccagttcattgtccttgatgttgaaaacatcgcgatgaagggaaccatcacctacctcaatagggacccggaccatggctttaacacccatatgaaagtcaaaagggggtttcgtcggttgtttactgcggtgtggtattgtacgaccataatacccgtggtaactcttctggcaagatacctttcctttcttcgagctttcttttaatggtatgctaaattatcttgttgaatgcctcagtttttctgttactttggggatacatgaccgtagaaaaagctttatgtgtccccaagtcgtcgcacaatgatcgcatttctttatagtcgaactattttccattgtcaggaattagtgtgtagggtatgccaaacctgcatattatggctcgaaatatgaactcacagagttttgcagttgtgatggtggtgagtgcctctactttagcccacttggtaaaataatcaactgcgacaacgacatacttgactcttcccttgccttttgatagctcaccaattaaatctatgccccagactgcaaatggccatgggctggtgatggagtttaaatttcttggtggactattgacatacgtagcaatgcgctgacacttgtcgcatcttttagcaaaactgattgcgtttgcacgaagtgttggccagtaatatccttgtcgcataatctttagagccaaggaatttacacctgtgtgattaccgcatattcccccatgcacctcacggaggatgtagttgttggaaattgttttaccaggatctagatttactaacaagtatgttggattaacaac

SEQ ID NO: 304044 - DNA, 919 bp, Cannabis indica
ttatgccgcttataaacttaaaatttaggtacttataccgctatttacccttttctttatggagacgagattgcagagtttcaatgcagaatggttagtgaaaaaccacttttcttttgacatagacaatgattataatttttttaagaaaatgaagatattcattgtgtatttaatttagtagtttgcatattttctaacttaaaagaatttcctatttcaagtcattgatagacttgtttgtagcaacaagttgcttgttcactaaacccaattgcttgcttttcaactcaacatcttttttggcctcttctagtgccttctgcaagtcattagtggttgtgttggcctttagagttgctgatttggcttgggagtacgtataggccaacttcaagttaacatgtaaaaagaaacaaagttaagatatatgtgcggtaaaatctgtacaaagaactatgagataagagtttaccctggtaacctcctttaaaactccgtcgaccgagagttccacaggcatatcctccactccggtaagctacttgttgacctcgagcattaggcgatcctgatagaaactgagcatctctttagccttcttcgtctttggctgtattgtgggtgatgtagcatttggttttggcaggccggtccactcattattggctcccttagagcttttggcaggagtagttgaggttgagtttttgaagtcttcttggctggaggaatggactcaggaacatctacgacaacatctgtcgaagtcctctcagcttctatttggggtgtcttggagctcagggcaatgcttgtgggaatagaagcatccacctttgttcatttggcaggtgatttttggccgaatactgttggggattgttttaccaagatctatatttactaccatgtatgt

SEQ ID NO: 304045 - DNA, 1557 bp, Cannabis indica
tttggagatggtaggttatttcttcgtccgccaggatatgagacaattgcctaaaaatatgcaaaagtttgtggttgaacccctaatgacgggataggaggttcgatttgaatctgagaagccacaaagatgcaaggatgactttaatgagtatagaagaccctatcctaggctgcttttcaaatagcaaagtaggtgatgtgaggcttgcatatgtggtgtatgtgaatgtgccataaattgactgagaatgttgacagcaaaattgatgttcggtctcaataaagtaagtgtcctatgagttgacaattagaggatgcgtcttcaaggggagtgcctgtaggtcatctagcttgattcgagtgtccctaggtgtcttttctagtttgttgatagcatattatgtgtcttctaggagctgagtggtgtaattgcgttgtgtgagacaaaatccttctggtgcacaaataattttaaatgccaaaaaagtacttaagtggactgagggtcttgagtttgaaatgttgtcaaaaggaactttgtaattgttgtgaggttggagcttgtgatgatgatgtcatccacatatactaataattggcttcttgaacaaagtgtaatcagcttgagattgtgtgaatcctttaagtatgagggcgtctaaaagcttcttgtaccactgcctcaatgattgtttaggcccatagattaatttggtaatttgcacaccatggtattatttgcacaatcagaagagaaaagtgagagtcattgaggaatagtcatgtacactttctcatagagatttccattagggaagacgttattaatgtcgacttgcaaaatggtccattgtttaatggtagagatggcaagtaaaagctcgaatatgaccatcttggcaaccataaagaatatgtcaaagatgtctaagccctcttgttgtgtatatccttgggcaacaaggtgtgctttgtgcctttcaatggatctatcactattgtattcaattttatatatccaacaacacccaatttcacatttgttttgtggtagtttcatgattgtccaggttccactttcaagcagtgcatatgaatcggtctgcattgcatcattccacactttgtgcaaaattgcttggctgtaattacgaggtttgtagtgagttgtcactgcacaaataaaagctttgtgagcatgagataaattagtgtatgacatgaatttagggagaggataaggattggacgatttatctttttttacaactaaatatttaaaagctgaagaaataaaaattaaaagatcgaggaagattttttaagaggtctaggtgttaaaaaaccttagcctatgagtcagtctattagcctttaaaggcgatactgatgtgtttatagtatttttgtagaaaaccataactctaccctcagtttcttcttgaagaagaagaatatcaagggtaattttagcagagttctagctatgtatttttggcttgacccatttgcatgagaataaaggggtatttataggctaagtggcgggtatgga

SEQ ID NO: 304046 - DNA, 2282 bp, Cannabis indica
tggatttgatggatccaatccaatccaataaaaaaccagtcaatgcatctaatggttgaaacctatccaatccaatacatccattgaatcagattggatcggatgactcaattcgattggattggatcaaatgaaaaaaattcaatatccaataaataatttgattggatcagtttggttgggttgggtccaaatctattggatgcaatccaatgataccctcgtgtcatttagcgatgaagatgcctcccatgtataacgaccccttggtcgtcaaagtacaaatagtgaacatgacggtggcatgtaccatgatagataatgtagcctcctcaaatatatttttcaagtcaacctatgaaaagatgggcatccagctcaaggatctagttccatgtgtgcatttgatttatggcttctttggccatagcatcgcacccttgggaggtgttcgtttccccttactatggggtaggcaactaccaacaccacagttatggcacaattaattatagatgtgctattagccttcaacggcatgattggccaactagcactgtacgacctgaaagtagatctatattccaccctctatgtgaaatttcctactaggaatggggtagggtgcataaagggggatcaacggatagcctgccaatgcgaaaacatcgcgctaataaaggcaaaaaaaaaagatcagttcgtccaaagctccaaggccaaataaactgagaataaatagggatctgcccaaggcagggatgacaagatgggtccttgctttagggacgctagtgcaggaatcgaccaatggaagaattagaagaagtatagattgacccaaacatgccaacccgaataatcaagatggaagaggtttgttgcaagaaataaaatctactttgatctaatttttgagagcaaacctcgatgtatttgcatggtcacatgatgacatggttggaattgatccatttataatttttcacgccctcaatatagacccccacaacttttgtctagtacaaaaaaggagattattggacaaggaaatagcatgggcactgaaggaggaagtagaaaagctctgagccaacaagtttattatagaggcattctatcctgtatgggtatccaacctagtgctagtactaaagcccaatggaaaatggggagtctgtatagacttcactaacctcaacagaccatgcccaaagggctgtttttcgcttttgaggatcgaccaactagtagatgccactgtcaagcatgagatcttaagtttcattgatgcatactttggcacaactagatcaaaatgcatccaccggaccaagagcacgcaagcttccaaaaggatgttagtttgtactcctacaaagttataccatttggtttaaaaaaatgcttgagcaacctaccagcatttggtcaatcagatgttcaaagaccaaatagggcataacatggaggtattatgtagatctcattctcgtcaaatctaaaagggttagggcatataggggacctagataattattttaagatacttcaaaagtacatcatgaagctcaacccctcaaccccctcaagtgttcatttggggtaggctctggaaagttcctagctacattgttaatgcacgaggaattgaggccaatccaaaaaaatacaagcctttttagatacgaagtcaccaacaaagatcaaggaagtacaaagtttgattggtcagatagcagccctcaacaggtttgtgttaaaatcaacaaacaagtgtattccttttttcaatatcctctgaggaaacaagaaatttgaatggagcgaggagtgtgaagaagctttttaagagcaaaagaaaagacttgcacaacctcccatcctattaaaacctctggacggagaagaattgaagatatacctaccaataattaaatttgcagttagcgctgtgctaatttgagaagaggaaggtgcccaacatcctatctattatgtcagaaaaaagctcatcgatgctaaaatttattatcctccaatcgaaaaactaacctattaccttctactagcctcaagaaagttgtgaccatactttcaggctcatcctatcaaggtttacatcgaccaaccactacgacaagtattgaaaaaatccaaagcctctggtcgactacttaaatggtcaatcgagctaggacagtatgagatcattgttgggaatattttgctaggatctagatttactaacaagtatgttgaattaacatcctaaatatgaa

SEQ ID NO: 304047 - DNA, 3293 bp, Cannabis indica
aggtcggcgcagtatagtcacaattgagaattttaagattatttattgacatttttttgatgtgtgaatattctaaaattctattttgagtatgtatgtgatgataaatgacacttttgcccttggtttatgcatatgctttattatggccctaggggcattttggtctttcagccatttatttgattttcaacaaaagagattttttttttcgcaattagaaggaaaattctggtgtcttttccctcagccataactaaaccccctttccctctccctatctcatattgttcttgaagcttagcttgtgattgaggaattgtggagcttgggtgttaatatttgagtttgagaaggaattgaggtagtttctttactgatttagattgaatttgttactgaaattaggttgaaaagttaagctttaatggcgttttactcttgtatgcatgtttgtgaaattttaaggtggtggtaagtggtggtgtatgttcttgatgaacttagatgagattttaaggtgttttcatgtgtgaattcaagtgttatcttaagtttttgctgttgaaatatgaggttgaaagcatgatttgatgttcaaacttttgggtaaggaattgtattgatttttagctcaatgtttggagcctaacttttatgttgttaatctgatttttggttatggattaatgcatgaaatttatattttaactctctattttgttgagttataattatggattatgattttgaggtttgtgtaagattggggtgaattgggtgtgttttagcttgattttcgagctggaaaaatggggtttcttgggtttggaacccaggggtcgcgcccctgctccttgggcttcgcggcccgcccctgttttgtggcctgggattcgaacccaggtgtcgtggccccatgtgggagtgccgcggcccaccctcttgtttctgggtagattcgaacgtgatattcgaatgttcataactttgtgatctgaactccattttgggagttctatatatcgttgaaaagctcgttacgagctctatgtgattacctgtaatttgaatgcccattttatattttgtagaagtggatttagggattaaccttatacttgtgaatcccaaaaattgtgactaagattaccggcacttggttaggagtatccaaggatttggaatcttcacatttgtgagacatcaggtaagatagtagttagcacatagagttatgcgcggtggcacttatattaaatatgatatttgtgagtaattagaaaccggaattaaggttattaccctataatgagcggtttaatggcctagggttattacccagtaattatcaatgtgtaaatactatgccatgttatgtgtatattgagattaagggttatgcattcaaggcataatcgggttaaactctgtaactaaaatcgagatgaaccgttctaaggccttattgtaaatagacgtgtgagcgtaataacacgtaggtctatgccatatagacataaataaatgtgtgagcgtaatacgtaggtctatgccatatagacataaataaatgtgtgagcgtaatacgtaagtctatgccatatagacataaataggcgtgtgagcgtaacacgcaggtctatactaaatagacaactgtgaaattgcagtgaaatgacattgcgtatatgtgatatgataattatgaatattgatataaatattatcttgctggacttggctcacgagactctactgtgcaggaaagggtaaatctatctctgatcagtcatgagtgcgagagcttggcggtgcttgtacatgttcgggccacactagaccaagcgagttggggtctaccaataatgtacttttgtaactctgattttgccgcttagattggctagtgaaaagaaacaattataatagctatagggaatctaggaccaacacaaaagggcatcaaacaaccaaaaaaaaacatataccttgcgtaagtagtgaaaatgtttattatatataattatatatttaaagatcaaggcatgtgtatatattcatatagtttgtcacgtaccatgaattatttggtccacttggacatagtaggccaaaaacaattaaaaaagaagacaaaaaaattagaaaaaaaaagacactaaatttttcgatcagttagtccaatcaagctaggtaccacaaaatttggcttttgcacaaactaacattaccaacaaaaaaaaagcaaattataattagctagatgttggaataatgtgtgaaagaaattatatatatacataaaattctttgatgagagttttatgtggagaaattattaactaattttgtttatgttatagtgtacattataattatactagtcatgatgtttgtttttaggaaattctaaatatttataatgtcgaaaaataagattcaaacattcatttacatgtgttgttttattttacacgtatgcaataaattattttaaattttatttttaacacaataaaatattcaaaatttttcgaaaacagatataatatttattataactacaatatacaatatcacataaaaaaagttaaaatattaattttttaaagtaagaaaaacaaaaaacacccctataataaaaacagaagtgttatgctcctaccaaagaagctttctatattttaatagcttttgatgaaaaagttttgatttgaattttatgttgttatataaatatgaggaattaaagtaggtaataaataagaagaatgggattagtgatgtgtgggagtaggaggacatgtgaagagaagaaagagatatagttatatgtatagagaagagaagagaaaagagaaagaggggttaatagtaggggtagtggtcaaattaagaaggacaagcaaagcatgcccaacagagtcacacggtgcacagcgcatgctagacagcccatgggcccactcacacacacacccaagacaccccatcccatgctaccaacttatcactactaccatgcaccacttatttaattaatcacctatcttacatataatctatatttataccacttatcaccctatcatgtaaaatagttatttgacctatatatatttttttttgctaattaagatttttactctctgaactttgacatatactaaatcatgtcccctaaacttttaaggttgttaaaaatgctccctgaaacatagagattattggatttaacgacttttgtctaattttagtaaaaaagtataacatgaatgaaagttcagggg

SEQ ID NO: 304048 - DNA, 4331 bp, Cannabis indica
tattgaaatgagttttatttgggcacaaaacccaacaggttttccttttccttacaaggcacaaaataagaaattacaatgattctataaatacaatatacaaaataggaaatagaacaggttgccatttatctctgactcaatcccacaattatagggattttcgagtttggacaatcaagattaatctctgaagccttatgcatctctcggcaccaacatgcttctacttggttggatatcttctccacaaccctactcagataatcgactattacagatgctaattagtcgtgtgtaggctactagggatattttcctctgcccatgtatcaaaaatatggaatacgtgtcatttaatcctattgccacgtcaagggcaaaaaactggataacattctccctccaagtctgtgtgggaccttcctgtttgcacatggacttcacttagcctgtagtcttgtccagatgggtggcgcgtgtcctagtcatcgaatgacgaactgacgtgaccttgactaggggtctcttccattttggctcatttaatgctagttgacaattatgccttaaatcacggctcaatgtctgcacgtgttgacgattactctacctataatgagtacataatgtatacttttggggagaattcgaggaatttgaatttttaaaatgattaattcccttttttaaactgcttataaataggatcgagaaccttcagtgatccttttagccattctcactcttgaaaaaccaaagcaaaaggtttttaggcgaatttttctcccaaattcttcgaaggattcctaggaaaactcttgataataccatccgagcagaataaaaagcttcaaaccagtgagtaacttctttatttctttcttttatacatttgcaatgaaatgcatgcttaattttttgggtttccagctatgaatattgcctatttgaactgctctaggataaccatagtaatcctaagtttaaagtttagaaatctttattgtacttaataactgcgctttgattttaaccttatgatattgattttcactcatccattaggggtttagtgaaaattagattcgaattcgaagttttgaacttttgggttgaagattctatttctgagtgaaatttctgcttgtgattcctcaatcaaacctggtcggtacattcaacctatttttcattcgttgctccaacctactctcactttcttgtctcctaccttttatagatgaaccctggtgtgttttggggaggcaaacaccatatcgaccaagatctgcttcaacttctgtacaaagatcatcctcatctccgtgctagcccatcttcgtctagtgataacctttcaaactctaactttgaagactgggaaataagtagtgaacatacgccttccgtggaacccaaggtgcaacatcacttctatcccgatcaaattcaaggtgagggatacagccatttcatctgggaacttaggaaagggtggaggtgctaccttccaactgactggacatacatagtacatctggacgaagtcgacaccctgcccgagggtcatataaaccctgcttctgcaggcaagcctattgctaattttgctgtgaccgttgtgaagcacacttttgacaagattctgcccaagcatagaatgatggtgcggaccaagcagattgtacggaaatcctcactaaccaacacacatattgcccgccttgccacatttcctaaggcagaataggcccgtcccgctaacgaagaggaggatgcggtgggggacgttaaagtccaaaaagtgaaggaccagggcgaggtccgtcctgctactccttctgatgctaaagtagatgaggaagaaggagtagctcagatgctgccattcgtggctataatgaggaaggagagccaattttcgaggcaggtgatgttctgtagaccgctgaggactacgtcgtcgaggaatacactgaggccatacctttgaggaggagaagttcagcaagagatcaatggatttccccaccatccgtggtaaccatgaagaagatgacaaatctgctcgatcgtggtctcctcgagaatgttgagtgcttcattccctctcccgatcagcttgatactgacccaggaaaaggttctgtgctttcgggagctcacaccaagcagggcgcaatgctatccttgctcccatacttcaagaaaatagccaactactaccatataagtctgacccaattcactcctaagggtcttaaacatttgtccgccctgttcgtactctaggccttgtaaggatggggtgagtcatcttccaacgataccaactggcttttcaatctaaagtcaagccccaagtaaaatggtcagggtatttctacttctctgagatcgagaagtcatgattgacaggcataatggccaccgaggtgacaaagataggaggcttcgttgatgagtactatttttatcaaagggatggataccacatatactagctttcaacagatgtcgtccttttactgccctccatcacactagaactcaggaaaagggcccaaaaaattctacaactctctcctgctgaccggaatatctctctcttggctacaaatgctaacttcaccaagtacaaactccatctggctgactttgtaccaaaggttgaggcaccagaagagacggggtccaaacaggaggctccgagcaaggagaagaagaagaggaaagcccctcccaaaatccaagtacctactgagtgatctatcaggatcagaaaaaaccctgagaggattactcaaccttccaccccagtggcaggaaagggaaaggtcgtcctggtggagcaggaacaggagtattcttcagatgatgatcttccttctctacttgtttgggaaaatgatcttgccttcatgcagggtactttaacttgctctcaaatttcatttgcacttgctcatattgtacttgtttttaaccttcttattttactcatatgcagatatgtctcaaaagttttttcaagctttgaagaagagatcaggggatacctttggccaggtacctccgaccaaaaggttaaacgttgatgaagtaccgctcaaggacaagagttcggttgagtcacccattaacctctccgaggaggtggtgttggaggtggagctactagacaattagaactctaagtccaagagtgccaaggggggaagcacagagggatccaaactgtccaagtcctcaggtgctcttatcgtactgaaccttgtgactaagaagggcaaagaaatgctttaatttaatcaggatcggttgctccctgaggtgaacgatcagctgtctggaggggacgccatgtctgtgaagttgctggtgggcaggctattcatggaggcaacccgagtaagtaattctcttttggtttgtaaattcattcttttacccatgtagattttaacttttctccgtgcaccttaacttgaagatgacctacacttattcccaagcaaagtccatggcctctaggactataaccaccaccaacaacctgcagaaggaagtggatacagcaaagaaggaggtcgatgatacaagggcaaagttgggtgaggtcaacaagtagcttttggttgccaacaaccgagttgaggagctacgaaaggagatttaggacatgccctttatgcccaacttgaagtggatgttgatgccctgaccaaagaagtcaatgccttgaaggacgagagggaacatctccaaaatcttctttctcagttaactcaagagaagaccgatttggaagagagtgtcaagtctgagtaggtagagcgagaagcccttcagaagaaggtggagaacttggagacggccgccttggaagtcttctataaattctggaaggccaacccagatggaaactttgattacctcaacgaaaccaaagaggcatgtcttggtttttgtgcgacctggaaagaaaaggaagaatccaaggttgccaaccccaaagcttgttggattttgtgtcctaaataaaacccatttcaatataatcaaatttactaattaataaagatcagaaatcacattttatgttgcatggttcacatgacttatttcatgattataaatgctattaggtccagaacatatgtatttgttcatgattataatgttgttttcatagtgcaatataatcatgataatatgttcaaaagtttaatttcctgatttgtcagttcactggatttaaacttgcatgataatcaacgataggtatacttacaccttggataagtattatgtcctttccaggacat

SEQ ID NO: 304049 - DNA, 5732 bp, Cannabis indica
tttgtgttaaacgacctgccgttttatgtaggctaattacgattttttcccaaattttaaaatgtacaaaatcatgtcccttaaatttttttggtccttaaaaattccctctaaactttttatcgatgttagaatttttttactaaaattagacaaaagtccttaaatctaacaatctcaataacgaccaaaaaagttcagagggcatgatttggtagatgtcaaagttcgggagaaaaaaattctaattagccttttatatataattagttgatggttcatgaatgtaatttagtgattataacttaagtattattaccgtcaaaaattaaatttaggtaaatactattttaggcttgtgttttgcaaaagttattaattaaaccttctattttgttaaatgacaaaatagatcctatattttttaaaattgtacaaataggtatctaaactattttttttatcaaaataaaacttaataataatatggtctagagatattatgataaaactggttatattttctactttcgtattagaaattgtcttaaagttaattatattaaaatataaaatttttaaaaaattaagttcagagtcttatttttactattgtgaaaaatatattgttcatttttttatttaacaaaacataacattcaatttcaattgataacttttacaaaatacaaagtctaaatgatatttatcatgttactccacaccacttggcaatgatgtatagtcatccttcatttgaacattcttctattgttcaagatacaacatttttgagtcatcacatcattcacatacaaattcattttgagctcgccaaataatccaatttatcattgctaccatattttgtttttctttacgcacccgagctcccacctgttggaaccatatagaaaaattgtccccaattacatcgattaaaccaacacccgtattaaaattaatgcttgctagctaaacattggattgtgaaagggtgagaccatgaacaatagtctcatcaccatgcaaataaagagaacaatgtcactgaactggtacatgcttcaaactaagcagatacatcattgggagacaccaaactgataagcagtcttcatcgaatagaaacttgaaaccctccttactctaataaaaacaatcatccatgctctcctcactcaaaaggatactcaaaatgagaggcaaatccatctcctcgaacaaatcactaaaaaagattgcaattttatactacatcatcattatggtatatttcttatttgtttcaaagtattgaaaaactacttaatctaattttttattatgatcgtttactttttgtagttatttaatattattaaaaaatttcaaaattttataatagttaatattttgttaattttggccagttgtatatcacattaactaactatactcatgtataaatacaatatacagattcatatttcatacactctcattctctctctgaatctaacataaatgatccatgaataaaataaaatggcaaaatgtcattacatatttctcattccatttctacaaacgacattctgtatatatttatggcttttgtttttttccttttcaaatactcaaatggcaggcacctcattttcattattcaaaagacactgaacttgtaataaatatcaaggcttgagaggaaaaatcacacaagaagaccctgaaacactgttaatcaagaggacgatgagcttgttgtatgcaaagctactaaagaagcataaattccaccctttatagccatcaaagtttcatgctttcccttctcagcaatggctccatttttcaccacagcaattaaatctgcacccttgatacttgacagcctatgagccactacaactgtggtcctgctcaccgcaactcggtctagtgcatcttgaaccactcgttcggattcggcatcaagagcactggtggcttcatctagaagtagtatttttggtgccttcattatagctcttgcaattgccactctctgcttctgcccaccagataattgtatgcctctatctcccactctggtgtcataaccctgcacacatttttccaaacttagcatctatcattctataataataataggctaattaagattctcgaactttgacatgtactaaatcatgtcctgtgaactttttcatgtcattaaaaatattttccgaactattgagattgttagatttaagaacttcagtccaattttaataacgagcattcgacatgaagagaagttctggtacatggtcagataatttttaacagtctgaaaagttcatagacacaatttaggacaggtcaaagttgaggggaaaaaaaatcctagtaagacaataatatgatatcaatagaaatttgataattggtttttgttttgtacttgttgcagactactaatgaagttgtgggcattggctaatcctgctgcagccataatttcagcctcagttgaatttccttctttcccatatgcaatgttggccctgattgtgtcattgaacaaaacaggttcttggctcactaaactcatctgttgcctaaaccatttgagttgtagtttttggatttcgacaccgtctagtgtaatttgccctgaatctggatcataaaatctttgcaataatgagatcactgttgatttcccactcccactttctccaaccaaagcaactgtctgatttaacacaaagtacatttcatgaaattggttaagttctcaacaaaaaatcaactttcattttcttatatagtaaaatatggtactaagtttaccttgccagagtgaatagccaagcaaagatctctgaatattatcacatcaggtctagttgggtacttaaaacttacatgaagaaactcaatctctcctttgacactctctaatacagttccagtttcatcactagaatcaattttcgatttcctgtctagaatggcgaatatagaagcagcagcattctttgttttacttatatcaggagccatggaagcagtctgagaaatcccaatggcagccatagttagtgcaaaaaacacctgaaaaaacaaaatgaatttcaacagttaatttgagaagacaaatggagtactttccaacttgaagcagaatcttaaatttacccgaaaaacatcagagaatgttgtcttgccagctgcaacaagttgggatccagcatagaaactcgaggcatacacattgaaaagaaaaaatgatgagagaccaaaaccaattccactaactattccttgtctaattccagcttttataggcccttcacacttcttcttgtacaattccatcaccttctcctcggcgcaaaatgaagcaaccgttctaatactccctactgcgtcgttcgccactttactcgcctcctcatacattttctgtgaacaaattactatttcaacattcatagcaaaacattttactgtcatttggataaattaagtgtcaaaatatgaaaaacctttgcatcagcactgaaacctgccaagaacttggtttgaacatatccgtttactcctattagaggtagcaaagcaaggactataagagccattatccaattcgcctcgaaagcaataactaaaccagcaactgtagttgcagtgttctgtactagcaaaccgagtgcatctccaacaatagttctaagtgaggctgcatcagcagaaagccttgctccaattgcaccactcgagtgctcggcttcatcaaaccaacttacttccatgtaaattactttctcgaaacactttgatcgaattcgtttgatcaacttacaccccgccactgcaaagaaataacctcttgatggatgagctaccaaacctgtcacaccaataccaacaaaaagtaatgcccaaaactctgtatcttttcgaagtttatcagctggctcgaagaaagatttgattacgctggatagcaataccccgaaaacaggtaacactacaccatttgcagctgaagctattgcaccaagaagtaaggctgggatctcgggtttgttaagaagagctaggcgacggagtgagactttttgaggcacttgttgtgatggtcttaaagcaatgctattgttgtctgatggtgttgtttcaagggcattattgagtacagttggtacaccaaatgagaccgaaaatgagtgacggctgctgttcccagttccagatgaccctcggcttattgaccgcagtaaagaaattctttgacttgaatgcctccctgaattgctaactagttctggtttgtcttgatcaattgcagcaccttgatctgatgcttttttcatatcttgcaatagtataagttgactatatgcgccttctggatttttagttagctcagaatgtggacctgtacatttgaaaaacaaaaattgtgatcaaaagggaagacaagaaggaaaatagagcaagtacaaagcagagcaaaacagagaaaaatagaagaaaacagagaaaaacagaggaaaacagagaaaagcaatgtgccaatgagttggaaatagcattttgttaacagaatcaacaaagaaattgtacccttttcaacaatttttcctctgtggataacagcaattgtatcagcatttcttactgtacttaggcgatgagctacgataagggtagttcggttgatcataattctatccaatgcctcctgcacaactctctcagattctgcatcaagggcactggtggcttcatctaaaagtagaattttcggatctttaagaatcgctctagctatagcaactctttgtttttgtcccccggacaattgagttccatgctcgcccaccatcgtgtcaagtccctacggttcacatattttagaatcaagaaagctaaagctgaaatttcaatatcaaaagtctttaagagtacactaacttgaggtagtttatcaatgaatttagcagcattggcaagctcagcagcaactcttatttcctcaacagttgcaccatttttcccatacgaaatattgtccctaatgctcgacgaaaacaacaccggttcttgactaacaaggccgattttctgtctgatccatttcaactgaaagtcttttagattaataccatcaatgagaacttcaccactttgaggatcataaaatctctcaatcaaactgatcacagttgatttaccactaccactttgtccaaccaatgcagcagttgttccacttggtattgagagagaaaagccattaaatatttgttcatctggtctagcaggataactgaagtaaacatctcttaaatctatgtcaccattaatgtcatctaatatcttcccattactgtcataagcatcgattcgtggcttcctgtttatcgcctcaaacatcttataggctgcagctcgcccggtagcaaacgcagacaagcatggtgatgcttgcccaagacacctgcaaaaattaaccattatgtgtccctaaaacttcgaattcttaataattatgaaaaaaaatacgaaaaaaataccataatcatttaaaaatcgagtttttgcaaatgccaataattacagaaatatactaaatataaaactgtatacgtctgcaacagcagaatgtaattctgttactgcaaaaatcagttttgcaaaaacaaaccagaacaaacaaaatataaaaataattgcagaaaattaaatca

SEQ ID NO: 304050 - DNA, 3012 bp, Cannabis indica
atttctttgtctaaattattgtatgataagtcaagcactttaattaaggatgatgcattacatatggattctggtataatacctgtaagatggttttttgagacagagaagaacagaatgccattaagatggttaccaatatctacaggaattgaggaagtgaagttattgatagacaaatctatatatgttgaagctgggggtaaaatgggaatcttcccatgaagctggttggaatgtaagtcaaggataaagagaaaaggagaaagagcataaggttcttgtagactcattagagaattatgggagagattcaaaaccataagactttcaagtccccaaatccaattaggtatctccccatgaaattggttgtttgagaggtccaaaatggctaactttgattgattcttaagatcaggaaaagtggtcaatttacaagaagcaagcattaatgtgttaaattgtggaaatgaaagaaatttagagtatttaccacttgtattgattgacaagttgttgtaagaaaggtcaagtgatgtaagatttaccaatctttgaatcacatcgaattgcaaggtgccattgaatttgtttgaggacagtgatagaattttgagatttctgagtttgaagatggactttggaagaggcccttcaagattattgctgctcaaatcaagagtatccaaaagtgatgaactaggatttgaaaacccaacaacttgtccactgaaattgttgttggaaagttgaatcttctgcaatgatggaagtgcaaacaatgcagcaggaatagtcccaccaagagaattatgagatagatttatttctgttaagttcttggccatattgaaagatgggatttgaccagtgaacttgttataagataaacccaagtacatcagttggttgagcttagccagtgaacttggaagtgctccactgaaattgcatgcagaaatgtctaacttagacaagttcttaaggttgccaatggatgttggcaatgcccctgaaaaattactgctaagcagttcaagtgtttggagagaattactttggggaaagtctggcaaaacaccatgaagtaaggaattcattgataagtcaatattttgtaaggttggtatctgaaaaatcttttcaggaaagttcccatacaacttattcgagttgagaatcaaggaagtcagatttgagaaattagaaaaagatgtggaaactgtggaagacaagttattataatcgaggcgaatcactgacaaagagtgaagattcccaagagattcatcaagagggcctgaaagatcacagcttgacaagctcaaaactctcaatttaggcacagaagatgacaaggccttacaccagtcactacttgatgatgataaattcacaccatcaaaatacaattcttcaagcttggaaaggttctgaaccattaccccaaaatctatgctgtcaagatttagcttcccttgtagtgtggtgatatcaagagtgaccaagtttgttaagtgtgatatggtaaatgggacttgcccaacaaagcctgcatatgccaaatttaaatgacttagatttgagagtttaccaatctcatttgggataagaatgttgttgaaaatgttccatgataaatcaaggcttttgagatgttgtagattgaatagagttgaattgttgtgtaatccaccagagatccactcaaggctcaagttaagacctgtgacaagtccttcaccattaaatgttacacctttccaagctttgcaatctgaactttgatcactactccatgtgaccaacttggttgataatattgtgttgaaagtaagattgtttttcagttgaagcaacaaggatttttggtcgttaaggcattggctagaaacagtatgcaaattcacagtgagtaataatattaagctaaagggtatgaagaaaagccatgaaaattgatgaataagtctcatcttggaaggaaaggatgggttcaatgtggattaattaaggttgaaatgaaacaacatgatcttttcttttgtgctatatagtgtggttggttactaaattttgctcccaacaaagtctaagaattgaattcaaaactaactacgacgactcttcgtctcacattaatttattgctatattatctaaaatttgaaaagtatttactctattcaaaagtttatcaaaagaaaaaaaaaaaaagaaattatctatcaaaaaaatatatatatagtgcatcagtgttttgtgctatagtatccacttgtggagggcttatttaaaccagcaataaattaataactaccaatttaccatttttatcactaaaaatgtcactaatttatctcattttctaccatgaataatgagagaaaatgagtagacttggtcaaaaccagagaaaaatatcaacatcaatgaactttatttggtgagaaatatttgacagattcgttgctaataaattgatgttgatcttggcctgaaatattaaatgtgaatttttgactttatataggtgatcagttactggtgagttgggtgtgtgggcaactgggcattaatgatatgcttatactgagctgtaagtgttaattataatcttttattataattttttagtggacttttatatttgaaattacatgttaaaatatattttttttttcgtagcagtacttgttatagttactatattatccctgtaaatttttaaataatttatagtatcgaaaacagagtgctgatatttcagtttatcacgtgtgttcaaaaatcttcaaacctattttcggtactgtaaactattcaaagttttttaaaaatttacaaaggtgatattgtaactataacaaacactcctataaaaaaaaattaaaatattcagggatgtattcttggatacggaaattgattaagaaattatagtagggtaaatactattttggactatgtgttttgcaaaagttactaattagaccctctgtttgttaaa

SEQ ID NO: 304051 - DNA, 1537 bp, Cannabis indica
gctggaagataagttggagcagccgaagttccaatgcatatgtctgagagaagtacattcatatccgacgatgtaatttttcttaacctgaaaattaaataacattatttatttattttattatattgtatattaattaaattattttttgtatattaacttaaaattaattattaacaattcttaatcaattacctcgtagctggaaaaaacagttggctggagttgtttgatgtcaaatgttggaatgacaacattggtcaaagtttggttcaatttggtgtgccctaacttttgtcttataagtttatgtagataatcaccatcatattttggtcctattaaagacttaatcaccttcttaatacgagggaatactccgcaactgcatgcatatgtattaaattatacatataatattaattaagtttgaaagtttacctattatattattaattgattaagctataaatatgaaaattttatattagttaaggatactatttttgtctttatcaataaagatgcttttaattttagttcttagctaaaaaaattataaaaatcaaattttcttatatgaatgtgtacatatagtgttacaatatatagatacgtaatttacctgtttttgaaaaaaattaagataatttattaaatcaaaaatagagttcaaatattcagttacacgcacttagattcgtttgttaggcaaacaaactacttaatctagtgcagggacatgttgaacacgaatatgaccctgattcactttgttaggaacaaaatagagatctatctttattgctcgtggtgcgagcgtgaagaatacgattagcagccatcatgacagtgctcaaataattataacaccaaatggtacaactaagggaaaatgaagttcctatagtagagattgaatccaagtaactttagtaacaacactagcaaagctgcgaaactctgcctcaatagaagatctaaaagtggtagactgcttcttaaagccccaagagacaagtgttcccccaaaatacacacaaaagtcagttgtagaccttcgatcatcaaggtcaaaagcccaagctgcatcactaaaggcttcaagatgaaagttagaagctttgcatatgagcaatccaaaatcaagaatcctagctaagtatcaaaggatacgcttgacaacaattcaatgagaagagaagggattgtgcatgaattaactcacttttcttgacactatatgaaatatcatacagagtgatagtggcatattataaaggaccaaccacagactgatatagtgtaatatcaagaagtggattcatactgagatagttgaagactaccattcgtggggaagttttaggagttaactccttgcatgttggctttgtagagaagatcattcaagtgtttggtctgagataagagaatgtcatatgttgtggaagtgacttgtgtgacagtcagtagtcccgtgatccgtaaagggaaacaccgggtaagctgtgcaatcccacatcgcctggggaag

SEQ ID NO: 304052 - DNA, 3698 bp, Cannabis indica
gtgtgtaattggatataccaaattaaaaaaaaaaaaatcaattcaatattggattggatttgattggattttgaggtctaattagatttgatcggatgatgattttccaaatctaattattgattgatttggatcggatgaggaaagaaaatgttggattgaatcggatgcccatccctgattttgtgtgttgggtttgcatttgttgagttgttttgggtgtgtctactggtctgtgattttttggttattggttcaataaaatttaatactggttatttacgaagaaaaaggggggaaaaatttatactggtgtgatgctagatggtgtttggtggtcgttttcttactaatattactaatagggcggtggattttttgtcagttggctgcttttttggaagcccattaacgatatttacataaaggaatttgatgctaatggatttttatttcaattttaccatcaaattgacatcacaagagttattgaagaaagtccttggtcttttaatccaaaagcattgattatttctaggcttaaggagagtgagaatccgcttactatacctttgaataggttggatttaagggttcagatacatgatcttcgtattgtaaaaaaattgacacagaatatgaaacttaagaagacagagatattaggctaattttagcttactatttaagtgtcttattatatctggagcagaattatgcttgttttacttgattttaggtttattcaatcatcttggacaatttaatttactcaaagtcaaataagcaaggaaaaaaatgcattcattgcctatatcttagagtatatgcaatgtatatattgttaactatatatacttctgtcaagtttacataatatatacaacaatagaaactggattaactgcttacattaaagatgtacagtcagtcaaactacacaactctttactagttctttcttcctacatctgcttcttccaacattactatccaacacttgttccttattcttcacctctatatgtatatgctttgaccctctgaatgatgtaacactaaactagcactaaaaaccagactccaaaactattccttctgtggcttcatgctttgacagtggaaccagtttgatgtgttagaagggatggtatgtctctgattctatagccactaccccagaaagaggctagacataggcccataatagccatagcaactaccgaacaagccggaggaactgcctggctgctacctaggaattgagttgccaacagccctgctaaggttgagctttgcattcctgtgcatagtgatattgttctgctcacttcttcttcttgcctgtgagcaacaacgcggcgaataagaatttatctttgaatgaaggaaaagtaactgttcatttcttgaaatgaaatagttaccatactcaatagtttcattttggaataattcttaattagaaatgacattttaagcagaaagtcaacattttgtacctccaggctggaactttggacacccaataacccaaagtaaaggctactgtgtgaaacgccactactggaaacaccaaacgaaacccttccggggaaagaatttggctacggtttatggcaagagggcttcctatgcacaatgaagtacaaatcatggcaacataaggcatcaatggttgaaggactcttacaacaggttttgcataagtattgagcacaaggccgagagtgactggaacaagaactacctattggaatagaagacaaggaaatgtattagcaaatatagtaaatgtaaaggaattcatttatgtaatcttcctcaaacaccatacttgcaaaattgactttgacatggccacagcatcaacaggaacaacagaaccgattagtaggccggttagtagaggtgtaacaagaactgaggcaatggtggatgtgctagtgagaagaatgcttatggccacatcccctttgctcagaaaactagcatagctagatagctgagctccagcaacacaagaggtaaggacaaaccccgcgaagaacatcggggacaccccgcatgcctttgcaattaatactccaagaaccggtttcaaagcatactgagctataaacccaacagagagcggtaaaggtctacaaaagattgatttagagtgttgagatctcacaaacagattagatataacatataaaactagaagaatacaaaaatagtaataccttctaaatgcaagagcaaaatcatcaatggaaagtttgattccaattgacaacatgatcccaccaagagcaggggcatataaatcttttgataccctgcaaaagagttgaattggaaaataaccattgcagattagtaaagtactttagagattgatctgcacatggcccagaatctctcatgggcatataatcaaacacataaaaaccaaactttatttccttaagcaacaagaaccaaattactttaatctgaacatgttgagggaaaaaagaagaaacctttttaagcatatgacaagccctttcttaaggaaagtatattcataagtgtttaatttacacaactgagaacaatctcttatctgacatgatgtaatattatattattaataacttaaaatatgtaaaaggaacagcatattaatataataaggaacaagaattcaactttaaatttaataaaacagatcccaatctcaggttcatttatgcttataaaacccagttgcaaaaaacgacaaagtaaaactacatgcaaaacttaaataccccaaaattcagctaaaaaattcaaattcagagaaaggaaaaatcaacatgcaataccccaaatatcaataattcgagaaattggaaaagtacccaccaagtaaaagttgaaggttgagctagagcagcaatggcagtggctgcaacaacgaatggaagcattgccgacaagaattgagaagagtcattacccttttcagaatcttccgtcatcgtcttcgtcgtttctgggtttataccaaaagaaagcattgacgattcgccttctcttctatgagacccaactcttccaatgaacggagaagtcgagcaagcgcatatagacaaaaccccattgttgattctcttattcgaaactgaaaatccattagaagttttggccggaaatgaaaaagggttaaaaattggacctttgaaaggttggcggttgacggaagagagagtaagagaagagctatagggagcagagaagattgagggagaggaataggatgttaccatagtaagacttttacttttcgctgtttaatttttgatcgccggggaagtttcctcgccggcgattgaggtttccggcgagctctgtaatagtaagagaaaaaatagaaagaaaggtgaggtgagcatccaactctagaacagattttaaggatataatatataatattatagaatacaaatatttgttttttatttatataaatattaaatgaaggaaagggaattattcaggtgcaacacatgacacgatgttagtttgactttagagtcaaaaagtcgattttgattgagtgagtattgctatgggtgatataaggtgggcatcgtccaattcaatctaattgaaccgaaccgatctaattcaattacaaaaagttggatattcaattacaaaatatagtgtaattactacac

SEQ ID NO: 304053 - DNA, 1895 bp, Cannabis indica
ggtaaaagagatttagattgaggagacagaaaagagacatcaccaaaagaagaggcacccacaaaatggtttcaaagtcccaaatacaaggtatgacacccaagttaaaacaaacaacagaatgttcgctttcaaaaataaattatttcagatagggcctaacttacaccaatggcatttcttattcggctggctatttacctatatgcctttgaaattgcaaaggtaagactacagccgtacagtcagacatgaatttcgcaccctgataagggtaatatagcacatgcatgtcactatagtaaaatagacactatactatcagtcagtcaagcatgttgcatgtccaggactaagaggtaccttaagatgtcaagtatcacaaaatgtggcagattgttattggtgcaattcactattggatctcacacattttgattaaataaaaaatatggaagactgctaaccacttacaacacgcaacatcggtatagtgttgggcactttaatgtgcctaatagcaatgctgatattcaaaagaccattacatcatacaataggaccgatgtagctaagcactaaagcattactaaccttaaaaccatcgacagagtcatttaactatacaaaacaaaatagatactcaaaggattaatatatattaattagccttcttaaactactcagcaaccgaaaatcatttcaacgatgcaaaaacacccacccactttagcttaacacacattagtaaagcttccaaacaaaatcttctcatttcctttttgaggaaaagcaagcatgtatcaaatttgttcaaataaattctttaacttctgataccttcccatccatagaatcagatcccagcattaaacactaaatatttaaataaacaccattaggaccatacacgaacatttccaaagagaccctcaaaacattttgctgaaaaggcagtcggtgaatagggattataactgtatcaaatatgaaatcgttttccagctcttttaaaattatctcatgaaattataatactaatcatgggtaaactaaattttacgcaccggtaatgcacccattacacatgacaagttttcatttcgctcttgattctcattctcttttttcactatacttaaccggacatgataaacaattcaatgattgattgccactgattctagatgtaacaaaacatagtccactttaatgtttttcctccattttatcaacagccaaacagaatatatatatatatatacatatatacacacacgtacgtactagactagactagactagaaaaaggaaatataataacaatacctgccagatgatgactggattcgaagtctttccagtctcatgattctccacagccacaggaggaggaaccgccagatgagccttggggaacctcactatgtcaggcttcgaactctctccaccatcaacagcagcccttccttgtcttggttcaacttcagcaacagaagcggattctgtgttgggctttggcttgaaaaatgggaattgatggatgaatttggtaaatagtgagaaaatgtttacgggttggtttgggttgacttcattggtctgagtttgagtgttatctgccattgttgaggtggagagagaaagagggaattggaaggtgggagtgagttaatagatagaagaaaagaggcggagaatacagagcgaaaaatgtgcatgaatgaattgaattggttttggttagtttgggctttcttgtttcgtttagcgattttggttctttggaacgagagaagagaagtagtgaggtgtatcccgaagtttttagcattatcgcacttgtcttattctagccacgggtgacggccctctttcgtttatctaaatatttt

SEQ ID NO: 304054 - DNA, 5704 bp, Cannabis indica
ttatataaattttattttaatttctctctattcaaagatcaaaaaacttaaattaagtaaaataaaatggctgaaaatggcgaagaaaaatggttagctgtggcgcggcacatagccaagacgctgggccggaacgacaccatggccgacgatattttgcagatattttccaacttcgacggaaggttttctcgcgagaaattgtctgagaagatcggcgatgacgattccagtgcctgcgccgcactcgaacacgttatcaagtctcttgagcgccagatctctcagtacgtcgctgccgaccatcccatctggctcgactcagccgactcctctgcgtttctcgaagctgtggacgagctcatcgctaccgttaaggattggagtcccatgggtggggacaagaccattgccgcgtgtcttttacgcgctgatgatctggtccagcaggctatgtttaggattgaggatgagtttaggtcgctcatggaacgcggcggtgagtcgctcgagttgagccgtgggtacgggaacggtgagtcagccgggaacttgtcgtgtgattcggaggacgaagaggaagatgatacggacgtgggtgttaatggggttgaagaccagattcctactgccaggccgattggagactatgatatcgttattgacgcgctgccttcgggtataattaacgatctccaggagatggcgaagcggatggtggcggctgggtttgggaaagaatgttcgcatgtgtacagcagttgtcggagagagttcctcgaagagagtctatctaggttagggttaaagaagttgagcattgaagatgttcacaagatgccgtggcaggacctcgaggacgaaattgaacggtggataaaggctgcaaacgtttcgcttcggattctttatccaagcgagcgacgtttgtgtgatcgagtcttcgccggattttcgtctgccgctgacctctcattcatggaggtttgccggggatccacgattcaactactgaacttcgcggacgcagtagcaattggatctcgatcacctgagcgactcttcaaaattctagacgtgttcgagacgttgagagacttactgcctgagttcgagtctgtgttctctgatcagtactgtttgtttctcagaaacgaggcggtcacaatctggaagaggttaggggaagcaattagaggaattttcatggaattggagaatttgataagtcgtgacccagcaaaagttcccgttcccggcggcggccttcaccctattactcgctacgtgatgaattatctccgtgccgcgtgtcgatcgcgccagtctctcgagcaagtgttcgaggagaacgcagcggcgatgccaccgttgtcgaagctggaagaccgagcttcatcatcgtcactttcagtccaaatggcctggattatggagcttctggagagcaatctagaagccaagtcgaagatttacaaggaccctgctttatgctccgtgtttatgatgaacaacggaagatacattgttcagaaggtgagagatagtgaattgggttcacttttaggcgacgattggattcgaaaacacactgctaaagttcggcaattccatacgaattaccagcgaagctcatggaataaggttttggggttgcttaagatggatccttcagtagcgcctaatgtggctgcaaggtccatgaaagaaaagcttaagttatttaaccagaactttgaggagatttgtaagaaccaatatacatggatcattttcgacgagcagttaaaagaggagttgaaaatttcaatcaataaacttctgttaccaccttaccaaagcttcattggaaggtttcagaatgttcctgaacttggtagaaacgcagagaaacatattaagtatgatgtcgaagatatagaaggacgaattaatgaattattcagaggaaatggaggatcaaacggtggtggccggaagtaagaggtaataattttacttctggtagtttgtatgtgtaattaaaggtcaatgtttacaaacttcttcccccttttgtatcttgttagatgagatatagcaaagtatttttcttttttctttttgggagtgaaaatcatagatttggatgatagttcagttgaaaccataggaatcatttttgaagctagtatgttttgagggagaatgtttattaaaaagaaattttctgtacaattaatgggtactgctctatgtagcaaaaaaaattggattggaattagttacgagttctactgtttggtattccaaatgcatgtgtagcttttctggttgtagtagtaaatgattatgttagaagatcaagtgagctacactttaaattctggttttacaatgaatgaaaaatgtctatagagtaagaaatctcgatggcgagactatgatttagaagagaagcttcttgtacaaagtttactgctgaattaataagatttcaaatcctggggtttattcacaaggtttatttttgataacagagaagaagaaagagagcttttatttttttataattcccatgtcatttctgttttggagagtaaaattaagatagctcgagtaaaaaaggtgttggactcttgtctcaattgagttaataacatgtgaacctactcttttcttaacaattgaatttcttattgataatgcttccactgtgcatatcctatgccacttccaccagaattttttcattattgaatattttgctatagcacaccatatggtgcctaacactacttgcaccgtaatattgaaattaactgagagaaggctgttgtagtgaatcaacaccagaatgaacacaaatgtagcagctgttatgttacctaacaaatggtttgcacttaaaaaaataatacagaaacgattaggaagtaaacgttgtgcaaactaatacgaaataatttcctcaagttaagtaaatcatttttacatgtggtatatgctatgtagatggtgcccctcgaagattactattcatcttcttaagaaaaagattaaaagaaaaaaaggagaaaggataaagtgatgactattcctctgttgtctttttaggtttaaagctttgatcttgagagggttgggtcccaatgaaaggttgagagaatcgatgtgttgcatcagtttgactcgactgatgatgatgataggaaccattattgtcttattaatcagacattttgacaacaaggcactgaggtcatatactttcaaaaccatcataataggaaaagtttcataatctcaccaaatatttgctgcattcattaataccttatcaactatataaaagactaaacaatgtccatcaatggattttgggaaaaaagaaattataataaacaagtaaagaatgtgatctgatacaactttcttatcaagctatttttattagtttctattaattttttttccctatttcaacaaagtaatcatggacatgggcaatgttttgggaatgattggtagtaagcttgggaagaacttcttcttttaggtattgagcaaggtacttgtaagtagcttcacttgggtgtatgctgtcccagaacatatactttgaagcctcatgacaagttggtgttaacacattacagattggtcctgcttctatgagtccagttccacagcaccctctttttgtttcctcataacctatgaatgaaatgattccgtacaaaacaattagataacccttctttgtcttcttcttcttaatcttaatataattacttaccatacttatctggatgattgatcatatcaaacaatggctggtatatatcaacatacacaactttggtcccgggaagctttgcttgtgttttggctagtaccctttcaagcttatggttgtacgtttttgcccccatattctgatcctctacacagcttcgatctttccaaagctgtgtactcctttgaattggaaggcacccaattggtggtagcccagatacagctattctacggcatccattgtcatagagctcctaattataatgcaccaaacaattataatcaaactatctacacacaaacatatttggcttgaaagtgttattttgatacatgtaactttgtagaagaaaaacatacctcgatataacttatcaatctcttgagaacaaaatcttgatagccactaatgttaaactctaattttcttgtggggatatcaaagaaattaaaaacgaagtcattagtgcctgcagcaactataacaagagctctaccaactatctttttggcttgcttttctccgacaatcctctcaagtcttgccaagtactccttgaagtagtgaatttgatttgaaaacgagataaccccagatgcagcagtggtcaattcgtcgaatcccgatccagcagaagcgaaactgacgccggttaagatgtctttgtcagatagttttggatgaaaaaaggagggacagtgtctttaatctttaacatagaggcaatgaggtcaggaactagttttccatttgagaaccttcctgttggaacatgaccctcgaaatctttcccataagggtaatgattgcccttgaacaaagtttggatgtagttattgttgcctgtatcaacagttgaatcaccaaagattagaatggctgggaattctggtgaagatttaggcctagagccactgcatgagttggtaatagtagccaaaaaagttcaccaataatattatgaagaagaaagtggcaggtgccattgtttaatattactttcacttctattatacttaatgtgtgttttattggggtagttatatatattgtatttttgtgcatatgtgacttggaagagaaccaattcaaaacgtgacataggtgtttaagttattatatatttcgaattcctttcccccaataaaaaaaaaacttagagaaagaacaaatatgcatttttttttctcatatcaaattgcttaattaattctctctaatttggtttactcatttattatttggctggtaacgagttaatgtagtttatgatttaggtgtgttaatattttcgtgccaacttgataatttgccacaatatattaatgaacttccaaggaactatatatgtttattaccgtgtaattcatgctttgcccttcttggtattaactgaaaagatttacataaaaaaagttgtttagattttaaaacaaggcttatatagagtaaagataaataaactcaatcatagcctgctctcattttgtgattttcctctattttataagcaagatccaagcattaagagcttgcttaatcatcatgtcaactaataaaacacattttcttttcaaatataccaacatttctatttaaccaaatgtaatagacaacaatatctcccagcaaacttctctgtctctttgagtcaatccaactcagccaagcattatggtcaatactaataggcctgatagctcccccccaaccaagtctaaatctggtgaatgcctttctatttgaataagaacaatgaaagaacaagtgttcatggcaataaatgccatcatcacaaactgcagaatccaaagaagcaacattaacatttattgagcactcaaatgagctattatagctcattctctaaaatgtaaagaaaaaataacagaactgacattcctgttagactatatatatagt

SEQ ID NO: 304055 - DNA, 3378 bp, Cannabis indica
aaataaaaaaaattaaatctttatttaattaaattattttttgacaccttgttcgcccgccagcttggcttggatcggtcagacggcggcacgccatgcgcacaaaactgggtacctcttagggcacgtacccaaatttcaaacatgcactttatacacttctaatgaagtatttctattccatgtggaactccaatcattcacacacttcacttttcatttttatacaattttacaaaagttccaactgcttctccattgcttagttcatttttattacaacatatgttttcattttttttcatgtcttgttctatctcttgttggatagtgagtgatgatctctctctgccttcattacaaattgggaatagaagaaagaaacttgaattctccattgccctcaaaccagttctaagaagtattctttgtattagccatatatgtatgtgtttttttgtgtctccgcctgtatgtatagttagatataattattataaataaagagcttgattttcgaggagactaaaaatctaaccaaattatgcgtgtttttagttagatcaaaagaaagttggtcggaaaaaagaaaatggatttctttatacacaatttctttcattatgtaagtgtgaagttttaatgttattgcaattaaaatcatcatcatcattattattttcaagatagactttgttatcctggaagtgaaattaatcccaaagctttttatacagccattaacaattaaattttcttgttttttaaggtcaatatattgaaaatgagaggggcttggatacaatgctacaacattcatgcttttacattcacaaaaatctatcccttttattttcaaaaccgagctctaatccaaattatagtaattacccataaaattctctaaaaacattcaaattgtttaattaatctttgttgtgtttgaattctacaaagtaaggccaatttctgaaagttgtacaaagtaggaaagtttaactaaaatatatccccttttattatttattcacttttaattacaaaatattaactaaaatagagaaattcaacatcatctggtaaatccaaaaactaaaatatataagaaaaaggaaatggtttagtaaactcctgtctggtaatctggctcacagaattctcctccaagatcatcacaagcctccccagggaacaccctgttgtaccacaatcaatacatataaattatataaaatggtttttgcttaaacaaataaataaatgaaaagtagagacttttgatttgatcttacgtcttgggttcatcatactgaagataatctctgtcaacggattgtaaagtagttgtggttgtagctgtggcatcagtctttgtaggtggtggcttcacttcaggatacatttcagcatcacaagcttctcctccaattgtctcacaagcctcagctggaaaaacacttgttttgttttggggtaccaaagaaaaaaatgtcattagtattacattccatttcattaccaaaagaaagataaagatgaggtacttacgaagtgagagagctgtaatcaactgtggtgggagtatcgtttgcagctgccgagaatggtttgagttgaagttggagaggcctgaaagtggaaggtttttgtagcttaggaaaccatggcaataagggcaagggcagtgggggtttggtaaggccaaatggtagtgatgatggtggaaggttgagggtagcttgcattttcatggagatctatggtgagagaccttagagtatagtttgtgtgtagccaatggataaggttatggtaattgactaattgagttgtgttgtgtgtaaagatattttgagacaagataagcttggattggagtttccctgtttgactactcatcataacatacatatatatacatacatacataatataatgcatgcattattgaaggggtcatcacatcacatcacatcacatcatatcgtttgtggactctcgatcagtgaaaaattacctttaaacgacaagacgactgtgttcttttgcagaagacgacacgcaatgtaatattctcccatcgccaaccaacgacattacattgcattgcatctttgatcaagattatattaaactcgcataatatttcttgtttttgtttctcggattaatttcattttctccttttaaaattatagcaacgaagaataattcatgtaaatgtgtatagcaccctcacgatggaatgtatcgtaaactcgttaaatataaaaaatgatataatttaatattagagatcaaatatattttaatttaataattattatgaaaattattaaataattatattgagttagtgctagctagatactactcagtaggagtactacgtgataacaatatagtttttggttacatttttaatttgtaaatttttaactgcaaaatcttaaaaaaaatgcagtgtggataatttatattgtaaccaaataattcaataatttaacattataataaaattttcaataaacaatctaatgaaaataccaacaaaaaggaactatagaaatagcactaaatctcacataaatcttgagctgtgtttataatagggataattaaataaggtacttttttgtaaaaaaattatattttttttttatatttttacggtttttcataaaaataacacgaaaacaacaagaaaactacataaaagtaacatgaaaataacatctaaataacatcaaaactacaacaaaaaataacatacaaataacaaaaaatcaacaacaaattaacatgaatacaacataaaaaaaagatcctattttttataaataaaattaaaaaaattcgtaaaaatatttaaaacgtaaagccgtatttttataatttctttgttgtttttgtgtatttgtgaaattatccctttataatatcattttatctaagcaatttaataaatttgacttacataaatcttgcacatatataaattttgataaatttaaaaattatatttaaaaaattggtattttggtaacaatgccatgcaatttaaactgctttttagattcaaaattgctattacaacgcaaataatttcaaatagcatttctatgcattgtgagcccattcctactatgtactgatgtttttaaggaataatttacggcataaatacttaagtttaactctaagttataaataaatatctaaatttaatttttgacagtaataatacttaagttataagtttggaattttgtaggtacttggctggtaagtgttaagtaaattgccacttggcaattcttgattggtccaagtcattaaatttttatttttaaaaaagaattaatttaaatataccaa

SEQ ID NO: 304056 - DNA, 627 bp, Cannabis indica
ggatcatctcatcagaaactatataattttattttcaaacataaaagaagtatattaataaaagtagctagtgaaattacaagccttttttaattatatattaatctttggttaaagacctaaagtgatttaaattgcatcaacgtgggccggtggcaaatattaacaatgttcatatgtatataaatagtaattttaagtgggaagtcaagtggtttaattatgcatgcatgtgatgatcattaatataaaaaagatatatataataagctaattcattcgtgtactgcactccaagcttgaattttattacttaataaatttctccttattatccgtatgcaatttttttaataaaaaaacccgaaattaagggaattaatataattgggaaatgaaaaccatgcatgcatatatagttgcatatatctatttcgtctaattaatatgatcaattcatcctcttatgtgaatttagttcaacttccttatctttcatatatgactacatatataattgacttgaaattaatgtaagattttagttttcaaatattattggtggttattttaaagtttcgtttcattaacacatgtctttatctagaaaaaaattctaaacgtaca

SEQ ID NO: 304057 - DNA, 1246 bp, Cannabis indica
gacaccccatccaccatccgatctgatccgatccgatccaattggatatttaaaaataacatccaatccaattcgatcacagttgggtattcaatgtttggcggtcggttgtaattgaatcgaatcaatttatgcacacccctaagtacaagattttgttgttgtcggtgggtgtctggtttgtctgtgtcattcatcttttctgtcgatctctagcctaggggtggtggtgtttgcctaaggttgtttcgattgactttgtgcagtgggatttggtttggcaatcgtggtctggtttgggcgtttgggtcgtgcttatggaggcaacggggaggtggaggaccggttgtgtaccgtggctgtctatcttggtcagttccttgcaacagggcgagtcagagtggtgaacaaaatgacttgtgggttttagattcatggcttatggagaatttttcagtgtgttgtttattttttctatgtttagttttataacctttggctttattttcaataatggtgttgcaatattttaagtatggtgagggatccttactatattccaatttaggggattctcgaattttcattgatcctgtgttttgttgttcaatctttttataggattaacataaacatggttggtcgtattgttatttttttttttgttctagattgaataataaggtattagacaatttttattaaaagatctttgacttatagtcattgatagggtggagttggttattgttcatttaggttggaaacttagtatttttcacaatttttttttatgttttattgttagcggcttagtgagcatttagttgaatatgctattagagttttcttaccttgttattggttagcctaaaattattgtgttgattattgagtgatatttaataaattttgtctaatttgccaattaataaatatttttcttttacctttaaaaaaatccacattgcacattctatttaataatataaaaaataaataaacaaaaatttcattattatttttatgttattaaaaatatcacagtcattgtctgccatgtagttttactatctaataggggtaatttgttaaacaaatttgctaattaaaaaagtatgttaaaaggccatagctacaaatatacactttcatgcactattatggtaatagaggcatctgtcttaaagcctgggaccagttgtgtcttcccaagtctcgtggggggcttggctttagaaagact

SEQ ID NO: 304058 - DNA, 1236 bp, Cannabis indica
tagcagaattactttctgctgctgcaaacgcttacagtttttatattttcttatacataactgacatttgcaaaaacacagtttttcagcttgaaacccctttccttccatgtgataacatcgatacttcaatattacaaattacaaatcttttgtgaatcttcttttaggatttagaaagtatttttttaatttaattagagtcgaactagtacctttttgtacttctaataagtttctcaaattgatgtaattctctttttcaattattaagctattattattattattatatattatatataatgttattaatttataaaaatgtgtatgcatgcgaaggattaatatatatctgtcctcaacaacaaatgtggattgttgatgatgatgacttcattttgtttcttcagtggattatcatctaattattgaaagtaccaatatttccgtaccaaataatgagatagctagctatacatcttatatttgaatttgattggaagcctccttataaagtgtatataataacaactaataatttcagcagctaagtaaagcatcattaagtaatttgttggctattaatcatgtccattagccattagtttgatcaattattttcctatgttttgagatattctatttgctagagataacactaataataaagtacccttttccccactttcgcccaccccacttataaattaaagtatttttagtcgtgttcaagttaacaattaatttgaacttgttgaccaacttttatatagtataataaaagtttacaatatatatatatgagaaaaataataataattaggagattttttatgaagttactcataggatatattgtcttgaaacaatgcagagggaattctgtttattaagtcacagtttagatgagatattcccaataaataagaggtcagtgagattagaaacacaatgctcttgctatgttgaggagtaggtgttgacgttttctttccacaattaaattctgttttgggcgttctacacaagaatggtggtgaacaacgcctttagaagcataaaaagatggcattatgagatagctaagagtatcatgtgttagacttttatttcgtgtattatgagagtgggctctgataccacatgatagataaattaataatatacccaagatttatttgtatataacatagaacacaatagtaatatataataattaggtatgtgtacctg

SEQ ID NO: 304059 - DNA, 1479 bp, Cannabis indica
cctatctggaaatttgcccgaaagtgttttccagctccacaatctaactgagcttcaacttggagataatggcttttcaggaaaacttaatgatggaattggaaacctttctaacttggtcaaattagatatttcgtttaatatcttttcaggtagtcttccagatatttttaacagccttggtaagcttgagcatctttatgctgcttcaaacaacttcactggccacttacctgcttctctgatcaactcaaaatctctaatgattctcaatatcaacaacaactcgctcgatggtctgatcaatctcaactgcactgccatggttaatctgatctccattgatcttggctccaatttctttcagggtccccttcccgaacgactattcacttgctggaaactgattagtattaattttagccgtaacaagtttaatagtgtgattccaagtagctataagaatttccagtcattgtcatacttctctatatcaaatgcaagcatctataatgtatccacagcccttgaagtccttcaacattgcaagaatttgagtatggtttttctcacaatgaatttcgctgaggaggagataccatatcaggtgaattttcagttcaagagccttgaggtgtttgtcatggccaattctcaactaagaggtaagattccagattggttgagtggctgcaccaagttgcagctattggatctatcatggaacaacttgtggggaaccattcctccatggattggtaagcttgatttccttttctacttagatttgtcaaacaactccttgagcgaagtaaatacctagagaccttaaccgaattaaaggaatttaagaaagagtttaacttctcagtagtgcctattctaaccttcccagtttatacttatcgagaaggttcaaagggtttcaagtacaaaaagatgtcaaatcttagaccatctttggttctaagtgacaacaatctatctggaccaatctggccaacctttgggaacttgaaaatgcttcatgtgatggatttgaagaggaatagtctttccgggatcattcctaaaagcttttcgggtttgaagaacttggaaaaattggatttatctgagaacaagctcagtggctctatccctgattcattgttagaacttcattttttgtccaattttaatgtgtcatacaatatgttatctggaaaaatcccttctgggggtcagtttgatacctttccattttcaagttttattggtaataagggtctttggggttttaactttttctcttctggtgttccaaaacaacatcactctacttctcaagtttatcccaatatcaatgggcaaattatagattttggtttggtatttcatttggggactgtaactggttttgtcattagtgtaacgatttgttttatatctggatgggtgtttcaaaatgcagaagaaaaaaaaaaagaaagataaatg

SEQ ID NO: 304060 - DNA, 1896 bp, Cannabis indica
agttgcttgatgcatggaacgacgattataataggtgtcgttattaatccaaacagacttgcctttaagtgcaaattgcttttgtttctgctcttcgaatctctctctcctactggaaagtcaaaaggtcactaattcataacattacaataatatttgatcaagtaaaatgtgacaactagtgatgagtaaattataagtgtgttgaaattaatctatggcaggggaagaaaggagtatggctaaaaattctgctagaacaagctgacttagtccctatagctatacaggtaccaaattaaccatctccaatacttattactacacaacaagatcttattattattattataataatattatttggtttttttgaaattttcaggaaggttttaattatcaccatgctgaatcaggatatgttatgttaacatattggattccagacgaagtttgcttgcttccatctagcccttctcatcaaataggggtttgtggatttgtgatcaatcacaaaagagaggtaccaaaaaaaagagaagaaaatgtatttggaaaagtaccaaattcaatgtcttttaaaatgctcaattttaattaattttaggttcttgtggtaaaagagaagtgcccttgtagttgctctgatatgtggaagttacctactggttacgttaacaaggtcaaatatttactactctttattattttgtttaatgaataattacttatatgttttctgcttgctaattttattttaatttgattaatttcagtctgaagacatacattctggagctgtaagagaagtgagagaggaaactggagtaagatatatagttacgaatataatgttcatatttgatattttcttttcctaataaaaaaaaaatgtagtattctgtaatactaatatttctctccttttatacgacagattgacactgttttcttagaaatagttgctttcaggttaggcttttgatcacaactctgtttaattagataacccaaaacgacatcattttttttcccttaaaacaataactcgtcgtttgcatttttgtttttgcaatgcaaaaaatcaaagacacgcacatctaatggcctttgagaattcggaccttctctttatttgcatgctgaaaccaatgtcgtttgatatcaaaatcgacgagaaggaaatccaagctgcaaaggtatcaatcaaaaccattgtcgtttgttgaatcttctaattattatttttgtttccttagtttttgttattttattgaatatttcgtggtttaattgtgttttgttttgggtaataattaattcagtggatggatattgatgaatttatgggagaagggttttatgtagaagaccccatgtacaaaaaagtaattgacatttgcattgaagctcaagatgatgggtacagtagtggtggttatattggagagcagctgccttcaaaactggatgggaaactgtcccacttgtatcatgctcctacaatatcatacaataaaacttaaaatgaaatttgaaattaataataactttaccatatgggttatagtgaatactcctacaatatggtattgaacttttcatgttaattgatagttacacattaaaaatcaattgtgtattgctttaacaatctgcatatgaaaattgcatattatgtgagtgttgagaattatgggttccatcttaaaattaattagcaagggacaatgttcaggccatgctatttgctcgcttatttttgttcagatctcaggcgtctttgcaccatctgaatctcgtgcggctggctaaccatctggacaggtgtggatcgaaagccggttagggatatggcattgataccatgttgagaatcatggggttccatctcaa

SEQ ID NO: 304061 - DNA, 2117 bp, Cannabis indica
agaatattattcattgctttaaatgtattttattaattgtttttaattttaataatttttttatataaagatatatttatattatatatttgaaataaataaaatatattaaaatttgaagaaaaaaatgggtaatatattttaaaaaattttatatatggtgtaatgtaaaagtttgatttagaataaagaaaatgagattttaataatattttttaaataaagaatagagaaactaatgagaatgaaaaatttaaaacatgagaaaagctttcccttattttctcaaagtatgccactacatttcatcataaattaaaagaggattctaccattaaataaataataaatattttctatgaaatgtaatttagtctaatatttaaaacagtctaattacataatctaattatataaacaaaataaaataatgttgattatgttttccgtctattcaataaacaacgtaacataatcatgattttgattatttaatattttatttatttttaaaacacttatttatttattttgatttgactacattttagtaaatgtgacataatagtggtgttgatattaatagttcggagactaacgagaatactagtgagggtcggggtaagaagtctcgatctcaagtgagctcctaaaatggaggagtgaggattttgcctactcaggatgagggggtaactctggtttgacttacccttctctgccttgttctgagaatagaggtcaaggtccaaggattttgctaatggtgttaatgggttgactacagaattgactcatgttatttgtgcttctcaaggtggtgatgtgaattcgtttatctctgatgcttgagtccaacgactttccagtgttgataatgttattttaaagaatggaattgttgtgcacagtttttctttgaccgacgacgcagaccttatcatttcccccaacgccccatgaagctcctctcttagaattgtcaggaattggggaatcacgtgcaaagaaagctctttggagtcttgtttttgtgcaggatctggatgtattcttccttatgaaagcaaagttggactgaaggcgtatgaccaatgtgtggagacagttgggttttgttagtgcttcagtcataagttatgtgggtttggttggtggtattttcttatgttggaaggtagatcttcaagttgacgttctattgacttctctttcaactattaaagtgtggttcctgagctcttgaattatcttgattggatctgttattgtgtttatgcacctcatgtgcatggagagagtactgagcttctggagaatctttttattaaggtgggtgcatttaatgatctttggatgatttttggtaatcttaattcgttgttagatcaacaagaaaagttcgagagtaattttttttcttctagtgatagtaaagatctttaggattttttggcagttactggaggcgtcaaccttgggtgtattggaatttttttaaacctggtccaatagttaggatatggttttattaagataagactaaatcgatcttgtaattggggatcctaaatggattcctaacttcaataagacttgggttgaatctttagctataaaggacttttcgctttttggatgcttagacacacgatttgggttgcaggaaagtggttcaacaagtgtaggctatttatgttaagggtgtcaatagtttccaattagttaagaggttgggtaatacgagaagaagtcttgccaaatggaataaagcttgcttgaaattttgtagagaaacaattggtcttcgtaatcaacttttggtggatgtccaaaatagaacccgtctaaagataatttgaagattgaggcagacattcttcttaaattataagaggtggagaagaggaaatcatagatttggcgtcagaaatcttgtgaattatggcttcgagatgggggataaaaatacaaagttctttcatgcctcaactatcattcgtagaaagacacaattttattggctcggtgtcggataatggattgaactgggtaagtggtagggatgagatggggctttatttatggaatcgatccatggatgtcttctcttctac

SEQ ID NO: 304062 - DNA, 973 bp, Cannabis indica
aagatctgatcttgtgtcaaaaaaatgtgtaaccacccatagagcgacttttatatgacgctgacgtggtcattgcccatgagactgctatcacgccccggggccatcacccgagggatttccattcgggagctgcctacctcaagtactccctggtttaagagatgttacttgtctgcaaatggctcgttccaacaggtgtctaatgcacacttccaggattgtccctgggataccttacgagctatttcgattaatccttttcgttaatacactttgtcccttaatcataccacatgtcttatgcgtgaaaacatggataacaacaacgatatatatttgtaatataatatgatacttatagacataatagtagctttggtgtaatagtcaaactaaattgtatatatgatataggttaagggttcaaatcccactaaaaatatatttttttttttaacttacttttgccctagttttacaaaaaaataaattatacctcttcttactttaaatttcgggtctgcatgtcactgctcctaaccataacatttgtaagaaaattaatagattacatgtggagtccaattttgagactcgtgagaagtctcgtatacttttaacaaaaaaaaatatcttaccaaaaaataaaagaaacaaaagaataatggaagaagtgattaaattttaataatatagagtaccaactccttttctttcatcaatgtttatattgtaatgggttagtgaacagtctaattattttatttattttttttatatataaaacctttaaattttattcaacaaggttcaactgtcttaatttttttttttaatttgctgcacacaaatatatattaaataatgtatgctatatatataaataagtgtatacttatcataaaattattctatatattaatattatttttttcaatttttttttaatttttattggtaaactttttat

SEQ ID NO: 304063 - DNA, 3126 bp, Cannabis indica
ttttattgtacaaggcggctttttttttttctttttttttctttttgtgtttctaaatttgctctcacttgtccagcaaattcggagatatttatgatgaagattatttcatccatgccttggaaaatgatgtgcaagtggttgacaagattcctgagtacataatggatagatttgaccacaacatgagtaatgtttacaacttcagaataaaagctttctcacctgttcagtattacagggacgtggttctcccaagattacttgaagaaaagtgagtttgattatgaatttggattcgttatcttttagctgtactttgcattcttaatctacttacacttctgaatgatgtgcaatttttttttactgtgtagctgatttcctagtgtctttagggagcatgaaatattgtttttttccccttcggtttattttatattttatttatttacttgaataggttgagaacaaattggataggaaggggaaaaaaggtctacagaaatcttgtatcattaaaatgtcaaatatgttttaaaaatagagctgggtcatttttttaagtagtgtgactgagtcattgaatttctatctttctttatgtgaattctgcgagtgcacgaggtttaactgttgatgaatcaattatctttggaacttgacagggtcattcgtatttctccttttgcaaatcgactgtcgtttgatgctcctcctgctgttcaacgactcagatgcttagcaaattatgaagctttaaggtttgcgagtcctatattgactctaggagaagctttggttgctaggatgaaagaacgtagtgcaaaatatggtggcaagtacatttctgtgcatcttcgctttgaggaggttagatccaattgagaagaattagaattttgacgacaacctcctgcaaggagattatcaccttttgcacttttagttgcagacataattaaattcttctaatctgcaggatatggttgcattctcttgttgtgtgtttgatggaggagagcaagaaagggaagatatggaagcagcaagggaaagaggttggaagggaaaatttactaaacctggccgggttatccgtcctggagctatcagaatcaatggaaagtgtccgcttactccattggaggtaaatatctattacaatgtagggaactgagttgattttgaagtacacaaatgatggtccatgatattgcttttggttaataactaaattggtctagaaattaacatatttatctccaggtttatattctcttctttttgtgtcttaataaaaaatgataattacccttcaaataacaaaatcacaataacaccttactatctgattgtttggagctcgtctgtttaagaggcgtaacctttagtatgatgtcgagataaaaaaatgaaatataaaaaaaacgtagcagaaattagaatgtttctgacttttgtggcgtcacctttaccattaccaagatataaacaattcctctatttctttttggggaaattgatgactcttctaagttgcttctctatttatatcaatagatcacttatttatcttgtttcttgttaggttggattgatgcttcgtggaatgggctttgataaaagcacatttatctacttggcatctggaaatatatacaattctggaaaaaccatggccccacttttggaaatgttcccaaatttgcgtaccaaaaatatgctgacgtctgaggaggaacttgctccattcaaggtctgaagattaggttgtcagttattttccttaaatgtttgatttagtgtcattgttttaacttgagcttctgctactagaattattcttccaggatggctgccttagactacactgtttgtcttcacagtgaggtatttgtgacaacacaaggaggaaactttcctcattttttgatgggccaccgaagatacttgtacggtggacactctaagaccatcaggcctgacaaacgaaagttggcattactctttgataatccaagtattgggtatgtcatttatcatctcattgctcttgtgttttcttaattgtcacgtgtacattatgtgaagcaaaacaaaaaatgcctgcctttccttgagctgctggtgtagggtattatttgttttttgtgaaacaaataatttctgtcgcatttttctaacataaatttagaattctgtctttctatactaaattcggcttcagttttgttttagtttaatggtttcttgactctttcaagttacagatatcaattgataatgatatgtattttcaattttggtttgtcatttgtgttcaaaatgttcactttgataatgatgtaaaaccattaggtttacctctttccctttctttccagatggaaaagtttcaagcgccaaatgctgagtatgcgttctcacagtgattcaaagggattcgagatgaaaagacccaatgattccatatatacctttccttgcccagattgtatgtgccgtacaaacaagacagaagattcaaagcagtcatcgccgtgatttgcatgcagattactctgatgatggaatttccttgcacccagttttgatcgctgtttattactgacccccttttacgcgttggaattctttcattttttcccccttccataggtggggagggcataccctcaattttgggtgctatgaggattttgttcgaggtcatattgatctgatttctttcccgggactggattgttgcataggatactggagaagaacagagcaactatccatcaatcattccattccagaagtttcccggggttgactaaaagcaattgtttttaaatttaaaggcgcagctgctgtaactaacaagctgcaaattgacacatcacatttcttcacactctggtttctgatctctgcaggttaggtttgatatctgcttgttcaagtagattctaagttgaacttttgtaaacattctctttggtcccagggtattcatttttttttttcctcttacaccatttttgtacacactcattggttccttacctcaacaactacacctcctggttgtcttcacattaaatataggaattgtcttttttattttatttaattttt

SEQ ID NO: 304064 - DNA, 5293 bp, Cannabis indica
taatcattgtatatgaatggcgcttgtgattgtagttgtggttgatactgactgctgtgtgaaatgagttcttcgtaagtaccctgatcaccttgttgcattaattgtaattgcggataacaatcattgtatatgaatggttgtgattgtagttaccacatcaagatagagagttctttatatcattccaggatgacacttttcatcatttactttttttttttttttttttttatttttggttcaaaaaattgctatcatgaatggtattattatggatcaacaaaactatatgtatacttagctgttgcttttgctctttcaagaaatgagagagggattgtaagttgacatataatatatgtgttctatagtttacagcataagagttttgcctaaaatatgaagaataatttgcattttaaacttgtaattagcacttaacataaatagagatagcatgacacaaaattgaacaacaacaaaacttgatcaaaactgcaaataaaaacaacaccaaatatttattttatctccatgcacaaataattaattgagatgaaattgtctgactccatggaatttttagcatctttttacatgtaataataataataatattgtcttttcacttccaatcttgatgttcaatgttttctgttctagtgtcttccctctgtctttttgttgggatggagcaccataaacataaatattaaattatctaattaatattaataactacctcattcaccttcttaaatcttaataaactacttttacttattttcaaaataaataaataaatcaataacgttattttttttattaaaatgaattgcagttgtaaatagtaatcctttttgttgggatggagcaaaatgtatataacagccacccaagtctctataattcatggtgaattgttgtcaacattgaaatcttgtaaatttataaattgcactcctctctttatatttcttcatttattttaattattattataccgttagttgatatttattatttttttcatttttatgataacttattttttgaagtaattgcactagtattattattaatacgtctcttcctatgctttcaaattcatatagaacattgctatttagtattagtggtgtctaacactttttgtaggtgaatttttacgattggttagcaataattattaaaagttatttttttaaattacataggattcgttacttaattacaatataacactaatacaactgatatcttttagcatttctccattgatgtgcatatcattatttctcttgccaagtctacttattttttaataaaatgcataacaaccgaattgatgacttcatccattgaaaaaagaaaaattaaaagaaattagcatttatcaatttgattaaaagtaataattagttatgcaatgagtctcttgctctgccttgaagttgttcaatgtacctaaaactaactcatttacttaacttaattactccattcatcaatcagcttattaattttcgactctcaatgggtaataatttttttttttgtttaatcttgttgttgattgttaaatttagttcataatgttgttttgatgttcgatctattagttgttgctgttttatatatatattatttttataaaaatggttgttcttttttttttttattcatttttactttatgacaacttctttatcgaaaaagaagaaataatttagtatctattattttgattaaaagtaataattgttatatagtaataagtctcttgctctgccttaaagttgttcaacgtactcaaaataaaactaactcatttacataattactctattcatcaatcaccttattgttttctagagcattggtcagcaatattttttaaaattattagttattatgagacccgatacttaattacacactaataatgttatgacaccgaatgtgtgctttttagcaattatcttatcttaattagagtcttcctctcactcagatcatcaatcatcaatcatcaatcatcaatataaatactagctctctctttagaaagaagcactctctacttcctgatgttctcaatgggtgatgcaaatggtgaagacaggatttcgaaacttcctgatccagtgattcttcacatgatgtcgtttcttcccactcaagatgtggttagaacatgtgttctttcaaagcgttggaaactcatttggtattcagtccccacactctctttctctgagtttgatgataacgaatggaatcccgaacagttttgcaattttctaaacaaatatttggagcaccgcgagagagttatgtattttcttgtagattcagtcataactagtttcaagcttgaggctgagattcctcatgatgatgaaactaagaatgacatcatagataaatggttagattttgtagttaagaataaggtaaaggaaatatatcttaccatacatcctgaagaagagtgttactcctcctcaattcaaatatggtttacttcaacatatttgactgttttggagttgtatgggattgggataatgttcgatacttcttgttcatttagttttccatcattaaaatctttgtcattgacacacatttgccctctatataatttggaggatcatgatatggtgtttatgtttttgttgagttgtccttctcttgagaaattgtatttaagtgatttttatttcatcggtacggatgatcagctccgactgcaaagtttaagccttaagttcttggaattgaggaagatagatattaataatacattacaagttgaagccataaatcttgaatctttggtcttacataatattataaacataaatttctcttcatgcaaaagaattagaaatctcacattatctaattacatagaattagataaacagccatctttggaatatcttattttcaaaaatcctctactggagaatttgactttcagaaactccagttcatcttcggactaccatcttagaatttcgagtcagcacttgaaaagtttcacttttggtagatttagtcatcgtgggggaatgatccatgtggaaattgaatcagctccaagacttgaatactttagttatagaggtggtttcaatttcagcatatcaatgaagtcatctaatttgataactggaaatattgtaattcggaacagctataaatcaacatggtttatagatatgattaattttctggacaatctcaattgctcttggaagattgtcaccttacatgttccatcatataaggtatttttattgtttgtgttagtttttttttttgttctctaagtttacaattgtaaactattataaaatgtactaatatttatatgtttttcacgtatcgttatatatgtgaagtatctcatttggccagcaaatttgaagaagatatgtcgttaccccttgcttaattggaagcatcttagaattattactggtgatcagcacgatgagggagagttggagttgaaggatgcattgacgtggatttcaccttctttagaaacattatctattaataaaaaagtcatattgtaactgctcatgagagtatggttgtagctttgcactgatgaagaatttgactattttgaatgagaatgagacatttattttgttgtgaactagctgatattgttctatctatattaagttgtagagatttatctttatacatatattatttattgttgcaattgttacaaatcttggctttgtaaggctgccttattttgatatgatgtgctctttaaattagagtactgatagttaatcctaatgcataacagaattagttacctataagtgaaattttcaacatcagcaaaacagtcttaagtggttgaactaatctcacacttggctttctaaggctgcaacattgttttcatgtaattttcttttcaaattagatattagtaactaaacagttaaaacacaacaaattcccctgtagtatttaatttattcccagctgctttgcataattattttcaaattgaaatgatgaagattatactatctttgtttgaaccatgcaaaattgctttttataataagatgatgcatgaacgaaataaaagaagtgaaagctaaaatgaaaggaattataatgaagccaattgataaacctttgacttgacaaggtcaagagtatgaatttgctcttctgtcttttgaaagttttgaattaagtaatcaaaaaagtgatcaacactatagtgttaatgaaaatatgtggaaaaggataaacattgaatattattattacatgttaccatttgatttgacaaaatataaagggtcagtttttattcctctgtttatttatttgtaaattacaacagaatgtgattcaaaagagagttgagcaaagctttgaggatgatcttgaatccatgtttaaaaacactcaaattaaaattacactgaattagatttttgttttgttttccttttaatttgtacttaagtgaggtattgcccagtagaaaacaaactaatgggatcataaccattatataaaagggactgatcttcgttagtactctgatcaccttcttgtatcaactgctgctgttgttgtggttgatattgaccattgttggattcttcatcactttgttgtatggatgactgtgtttgcggttgttgttgctgttgtagttgtggttgataataactgttgtgccaaacgagttcttcatttgtactctggtcactttgttgtatgagtagctgtgattgtggttgatgataactattattgtatgaacaaagttcatcataagtactctcatcaccttgttgtatgaattgtggttgcggataataatcattgtatatgaatggcgcccgtgattgtagttgcggttgtgattgttgatgatgattatattgttgttgttcatcagtactagtatgtggttgatactgactattgtgtgaaaggacttcttcgtaagtactctgatcaccttgttgcattaattgtggttgcggataataatcattgtatatgaatggttgtgattgtagctgcgattgtggttgttgatgattatgttgttgttcatcggtactagtagtaacatttgtttgtagttcttcttcttgattttgagcttctaataataacattgattgtggttgttgctgttgtcgctcctcatctttattatttttatatttttttggatttttgtatattttgcacaacgcaaaatcattttttt

SEQ ID NO: 304065 - DNA, 2156 bp, Cannabis indica
caaatatttccattagaatcattgtgaattactattatggataagaactccaaattaataaaaggattaaggatattaattaattttcccctatcaattcttactcatctcaaaattactacattaattataattattctaattacaagccgaaagatgaatgagattgagatgggattattattgtttattaattaggtgttctagatgggagtggaggtatagagtccataatatctgcaccaaaagtgttcacattatgtaagaggtttccaagaaacttcccaaactgtgttgatatgtccaatttcaactgtgctattaaataagggtaacagctgtcaacatctgattgggtagagtgtcttggtggaaaatttactatcaactaggtcttggtcttggtcctcttgtgcagagtcaaggacccagcatgagtatcattattttattaagttcaataaattttaaggatcaatatctcaataaatttccaattatccacagtattatcatgccatcaagaactcttcatttatttagttactatttatattattttataattttatatattgttccaccactttgatagttgtaagtatatgatgaggcagattttttgacgctgcacaaaattgatacgatgtcaatcgagaaaaaaaaatataaatttaagtatgatataatacgatataatttcacaaattagcataacaacactaaaaatgtgaacttaaatgtcacaatatgtaaacatgaataaactaacttgaaagcacgacaccataacaaattttatattaataataataaatatgtatttattaattataaataatataataaaaaactaaaatatcatatctctataattaaacctattagatattttaaaactaaaactatatatcaatttatatgcaaagtgtagtgacttgaaaatttgagtattcaaattctaataattttatttatatgattatttataaaatattgttgaaattaaaaaattatacatatagtaattagttcattaattgttaaacaaatgtaagaaagtagagcacaaatccgatcgagcccatataagaaaattagttggcctatttaagaaaaatgggtcgacctgatcaataaagtataacataaatttgagcacgacacgaaaatatcaagtcttctacctttaaaaatattggcatgacataacacgatatattacttcacgacacgacactacataactcatatttaaaaaaataaggaggaaaaaaatatggatcgtatgcatttacaacatgtatactctataaatttatttaatatgtatattatttttctaaatatattttatttaatataatgataaattaatatcctaaattatatttacatttgttatataatatatattttctcattctaaatttgaagtaaataatgataattctacgtacggacttaaatttctgcaagtatagatagagtagacacactaaattaataatttgaaatattgctttgttggagtatgcgtttatattatattagtattgttattgggcactagtttagtacctttacatatgtcgtcttgcggttggttaattagcgatactttttaaaagttattacattaaactatataggacagatacttaattggatcaatagcgatagtcacataggagggtgctaagcactactgtaccttttagcatttctcatattatatagagcatattgctataattaggcatttttcccaacaccatatcaatatacattacaaatttttttacttttagtcacaacaaaacttgtgactaaaaaagaaaaaattgtgactaattataaatcatcattcttatgttgtgaccaggcccggccctgggcataggcgggctaggcctgtgccttgggcccactcagcccaggggcccaaaatttttttttcctcttttaaaattatacattttttttaccgattttgaaaactatcacattttttctaacataagggcccaaaatttttttttcccatggcccacttgtttcaggcggccctggttgtgactaaaagatctgtggctaaaagatattagtcacaaaaaactacaattattgtgactaaaatgtatttttagtcacaa

SEQ ID NO: 304066 - DNA, 4168 bp, Cannabis indica
tttggtattggactagtggctagaacggcgggtgaatagtgttacaagcaaaaaagatgagtaaaatgggtatcttgaagccgcatgtggttgaagctattggcatcaaggaagctttgagttggattaaagcaaatgcttggacaaatgtggtagtggagtcgaattgcttaagagtcatcagagatattcaacagtctaaacaaatgacctcgccttatggtcatataatttctgaatgtttgactctatgttcggatgttgtgggtgtttcttttaattttgtaaaacgatctgctaataaggttgcgcatgttctggcgcgatcttctctttctgaggctgattgtactttgtctggggatgctttacctatggtagttgcatctttggttatggatgatttgatttaataaaattcataatttttcaaaaaaaaaaaaaaaagtataatatttagatatatttaaattaaattttatttagtgataaatttaataaatgtataataactaactgtggcagcagtgggtaacgataaactaagccaaaccagaaccagtaccagctttccatggagatgatgacgacgacgaccccaaccctccattgctccaacctccaattacactcgttgttgacccccattcaagtcgtcacttcttcccctttgaaattccagctccaacactccatttccgtacccaatttcagaacacctcccttccaattccgaagacctctcccacctctttgctccgtcgccgatggcagcagcacttcatgtgagttcccaatattttttcttctgtaacgtctggaagctccgttgattgaaagtaaagggttttaattcttttatttttttctctgataaatttacagctccaagggtcgccgtacttgattcctctctcgaattaaaggtgactcaaagttcagttattttggaaaaaatttacatttttatgaaacccaattggaggctgaagaattttcatttgttttcgtgtgatttgaatggagtgttgattttaactcgtcagttttaatccagaagaaggcaatggatatatctcctgaactcaagggaacttccatatttcttgtgggtaagcaatcagttgttgatcaagaaatttcctgattttagatttcatggcaatttagcttcttaaatataatgtaaaatgggtgtgcttttctttttttttttgggtgaaattgaaaagggatgaacagccccatgaaaaccagtctgggaaaacttttagcaaaatcattaagatattattacttcgacaggtacctgtttaaatgattgaaagatcaagcttatattattacctacctaaaccaatcacttacattgttcattttgtccccatctgcagtgatagtttggttgaggaagctgctggtggtgaatctgctgtcaaatctttcagggagactgatgagcagggctttcgggcatctgaggtgattttctcaacatacttgatgttggttccccattttgttaggatctaaattgaccaactatataactatttgggcgccctcctttcttaggctaacttttgggagtgagttctacccaagtgattgtaccacatacatttattgatgtttcaactccctagcttgattgttaagtttccgagatgaaaaacttttcgtactcagggcaattctttcaaagctctaatttgcaaattgctaaacttttgagcttgtatctcaagtgaaatattggtgcagactgaagtactgaagcagttgtcatccatgggtcgactagtggtttgtgctggaaatggtgcagttcagagctcaactaatctgtatgaaacttgtcctaaattcatatagcatctgtcctgcttaattggtcaatttatcctaatttgcattgcaaacacacgtagggctcttctgagacatggtattacaatatggattgatgttcccctagacatgatggctagtggaaatatggaagaccaaagtgtttcagattcagaggtctggtcttaacttccaaagctaaatttacctgaataagaagaatttccagcacaataaacatttgtctacttaagtttatcctttctaaaaagatcttgattatttagttctgatggatgatatcaggtgtttactcagttagcttctctgtatgaagaaatgagagagggatatgccacagctgatacaaccatctcacttcaaagtattttcctttttccgcccattaactttgaatttttcataatggggttatgttttcccgttggttctaattgcttcttatctttagcagaagttgcatctaagttaggttatgatgacgtaaatgccgttaccacggaggacatgactttggaggtaaggaaagcttttttttttctttcttaacactagacatgcttaacaagcatcaatggagatgatggcaaattatgttttatttttctgaaaactcaggttctcaaggagattgaaaggcttacaagagtaaaaaagatgatggaagaggctgcaagacctttttgacataacaaggatcaatttttatcaccaattggagcaatttactctatgggtttccaccattattttggggaaacacacctgagtaaagcttgcattaggcaattctatcctatattgttggtaaggtaagcttaaatctgactgtataggatatttttagaggtcttaatcacattactacattagcaaagcaaatgcatcaagccacttcagggcagagtgaggattacttggtaccatagttcatattttggatttaagaaactccattaatatggttcaaaagctacaaatatgataaataagccactcttaaagtttctctagcatggtgaccctggttatcacgtgattccaggaataatcacgtgccttatatttcttacctgaactgaacataattataaaactttattttttctccttcttttcatgtgtaatttaatgtgaactttcggctcatcaagggtaaaaaaactttttttttaattaaatattgatccacgtaagatgttttcttttgttggtaattttgattttggtaagcctaagtgacacgcttaaaaagagttgttgaagttggcgataatgtgtgagcagagcagccagctactgctgctgcctgctgggacatcaaaagcaccaaaaaagagttagagaagggacatacataatggcaatgggcattagtctttttctttttgtctttttcttttttctttgataatttgctaaagggatatgtattctattttaatatggaatttaattgctatagaaaatggttcatttctttaatatggaattttgatttgagtgaggaaagagacaaagttttgcagtttccttgtatcattttgtgaggagaaccaagcaagcaagctagtcgagttgcagagcagtcggcactcggcacagcccattaattattgtcctttttcgtccatatctatctccaaatccatccacgtattctcatcataatataattataaattattataatgcgcttgcagttcaacacacattttctaatttaaaaattacaatcaaactgttatgattttatgtgaattgttgtgataataatagtcatcatcaatgtgaccattccaaatgtgtagcgtaacgtatagtataggaaaaagtatataagtttggtatagtagaatagaatccataacttctcatatatatataattcacaagtttggtggtggtataatgaactaaatatatatatacatttataagggacaaaatctactaatgtgattattgaagcaccaaaaactgaaaactgaaaagcattttcagttttttttttcttttgaaattatgaaatgagtcatcacttaggaattaatgaatgttcaaagtttctatattgtacatgatttgattttaacaaagtctaattcccaatgtaaacacgtatctatcgtgtcctacatccctataatcgtttaactttatcacaactattttgaaatcaaaactaaaatttctttttatatttaaatctatatatttaacatgtgggcctcgtgaaagtttcattggtcgaaaaaaaaaagataagcttacagtttttttttttttattttac

SEQ ID NO: 304067 - DNA, 4802 bp, Cannabis indica
agagagagagagaatacacttcagaaaccacctacattacatattaaatttattttctattcttatctccaatagctaaataatataaaacatagtcttcttctttcgaatagttccataccttcagattctgtaactgaattgatagatcagtagtcataactccgatgctattcgctacagttggtatgtcaaacacatactttccttgcttcatttcagacctgaaaatctccatgtcataattgcttagccaaaatcttattgacaataaatagtactcaactagcttagtttttttaacaattaaagatactcactttttcagaatttcagcaacaacaatatccctttcagcaagaacatcaggaggtgtctgcaaatgtgcaagtaatactattggtaagcatcaatgatcaaactaatataatgaggaaaagaacaggtaattttccctaaggaacgggtttctaggacagctatatcatatagtctcacatagtaggacaaatgttttatataattcctgccattggtaacatgtttatagcttctgagagcacccgcagcaagtagaactcccaggtgaacagaggttataacgaattttctacccaccttatgaaaatttaaggtacaagtaacatttatctgcggtagtaaacgcaggtattgcacttcacccaattccaattgtgtcagaagtgtgaacatcacctggaaaatggacaaaaataacaatggaatgctttagaaggttgcagtgtatgagaatcaaaaaataagtacaacccccttatgtgcacattatatagtttgtgtctctttcatgacaatacatcatgaacctgaaccaccaccaatcacagagcattcgtgactaattatataataaacttgagagttgaacatgaaaagtaaaaggagaaaacctcttctttcatatcgagtttgcaagaagcggattcttttacaagtgagaagatcttcccttgtgatttattatcaatggtgaaaacttgagaaaggaatttgtctactgcatattgatcaactccttcactgcaaacaaaatactaccaatttaaattttgtgaaaccaacaaaccattatgctaaatgacaaggtataattcttatctgactacctgaacataagactacgaagcttgaaatacgtgtcatcatccaaaaatagatgacaatacgatgatcggccatctcgccctgctcgcccaatctcctacagaagtataactctatcttataggaaacgttaactcaaatgtctttcaaataatcagtgaatagaaacaagagttcaacctgaacatatgcctccaaactttctggcaagctgtagtgaatgacctgaagcaaatgcaatatgttagtattcaaaatatcttcacagaaaggaagctaatcatttataccagtggcttgtgtcttgattggataaatacagtagaatgttgtctttttatagtgacatctaatttaaaaataatgcaacaaagctatgttattataagtagtttttcttacagctccaacatccgtcttgttgagccccatgccaaatgctacagtcgccacaacctttgatagaagcaagagttaacaacagaagaaattgaaagtttttcttagaatataaaaggactaatttaaaaaactaaaacatattcataatataatgagcatgatatgatactcactactctgatcttgtttgtacaaaacaattcctgtattcggctacgatcttttgcaagtataccactgtggtaactctatgtaaaatttaaaaaaaaaaccttgtcagatttatacttctgtgatacggcaaataaagttgtgaactaaaaaaattaaacgaacctttgcagagatgttgtaatcacgtaaatatctgcttagtatgtcagtttcgaactgcaaacattagaatgatgaactaagttgtctctcaaaactgaatatgtatggacttttttgttaatctgatgagtaaaacaaaaatttatactttattgcattaggtgtgcattaggtggttaaatgaattatatttctaccaagaaatatactttttgttcaggtaatcacaccccaaatatatagaagcaaactaaacatctgaaaagaagttgaaaaacaagaaacagatatatacacaagtgagccaatgagccagtctagatggcatcacagatagccagtaaaatatatatcatatttatatatgaaagagcacacacagtgaaatattgcatgtacctgaaatttgcagtatacaatgatgctctgaacttctttgaatggagaagactttatcaatgctagcaggtctttcattctagttttatccatgaaattaataggatgagtactgtacagaatttgttatcatcttaaagatatagaatctaggaaagaaagagcaactgtacttacttatctttactcaatgatacagacaagtgtaaattatcccttaaatgggccttttggatgagactagttggaggaatctcaagagcagacataacagcatgtaaagttgtggttgttgcagtagctgtcattgcaagaatgcagttgacattaagcttctctttaagcaatgatgctcttaacctcatgtaagatggtcggaaattgtgagacctggaatcatacacaacttcataaaagtgaatatgaattcattaccagaagaaaaattaaaaacattcacctcaaaaacaggatcaaaatagacttccacataaagagaaaatcttgatgtaacaatgtctaaggatataagagttaaggcttaagaggcagttgcaatcacactcaccattcggatatacagtgagcttcatccacaacgacaagtgatacgagtaaagtaccagaaaatattgacaggaattctgcattcaaaaatctttctggtgaaacaaaaagaacctgaaatgacaccaaaggcagagattttatactcaaatggaaaaatcactatacactaaatataaattggactccacacatagtctatcagtaaaagagagaaagccagcaatcataaacaaacacaacaatatatagaggcattgctagccacactctaagggaagcaaaactcaccttaatgagaccttgttgcagcaacatctttgtcttagaaacttcttcgggtgtctaaaacaatgaaaagaattccattcatactactatcaaactattctatatgctaatgtatgagacaaaaatgaagagaacgaaaccaataatcacctgactgctacaaaaaagaccaccctggatcataggaggcagctgttttagctgatcaatcatcaatgcaactaatggactaacaaccaaagttatcccaggtaaaatcattgcaggcaactggtaacacagtgatttaccagcaccagttggcaaaacaagcatcgatgatttcccatctagaaccatctttattgcttccaattgcccttccctgaacgaatcataaccatgagttaggctcaacagcttcaacaagttctcttccgaagattcatttcgagcagccaaaatcgtttcctcaatcgattcacaatcaaatttagcttttttcccctcctgcttctccttttctttcgttaagctctccataaacacaccatgttcctcacaaacaccctcctccgtctcacccccacctgctggtttaaactttttcttatatttcttgtaaaatcttcggccacctgatgaagtactatttcctcttttccccttgttcaaaaacttcttatttcgcttcaaattcaacttcacaaaattcccttcgttgccacattttcgcaatttcacctgcggcataggttcattgcttccaatcaaattggaatgtctctttccaactttcacagtgtttccataaccaacagatgcttcatcttcgagctctggcagtgtccaatcagtctctgcacaatcagacccaccaatatgaaccttttgttgcgaatttgacgccaaaggaggacatggttcatctttaataggatcaaaactaacactagaacgtcgaaattttgagaaagacgcagacttggagaaaaacccagcaggaagggtctcgatagatatcgggctctgatcggaaacccggttacggatttggaaaggtaaaattggggagagagtgggaaatggttcttcgggaggtgtctgctcgggttcaacggaggtcggatcaggtgccttagacttcttgtgagaagaacttttgggctttggagcggatttggagtgtgaagaagaagaggaggcctttacattgattttggatttggtagtggagaaaagggtacgccgtgaaggaggagccgagaccggtgccgatgtcggtgccggtggtgaaggcttgataactcttgggggagtgttggagacgtgagaaccgtcggaatctgaatcggaatccatggaagaccgttgctggactggaaatgagtatggagataagcgatgcccgcccttgttctatccaaatttcccgccatttcttttttctttttaacaaataaatatatttttctaattttctataattattattttgtgaaaaaaaaaaaatgtaggatttttctaaacaaatggtaaaagaaaaggttttatatatttgcgtgtcgtgctttgcttgtgttaatctgtttttcttaaataggtgaacccatttttatatcaaacttgaatttgtccttacttttttatatattttttttataattaataagttaattatt

SEQ ID NO: 304068 - DNA, 1421 bp, Cannabis indica
cattcatattcattgttttgaatctttagattttacaatttataaaagtgagatctttagaaatcatatgcttgattgttttgttatacagtaagaaattaattatttgaatattttatacaccctgagtagtgaaagcaccttcataggttataagctaaaactaatgtcttctatatattcatttttctatttttttttctttgttaagtattgttgattgcctatatatacataaaccctttagttatttttgtttcacttagataatatgtgttaatgtgtacatgatcagagaacattaccaatgtccattgccatgtaattaatagagcaagtcacagaacacactattactaataggcaaacatttattccaaattccaatggcttacacttattccaactcaaccaggattcatagctttgaaatcttaatatatttccagaaatagttcatggattgacttttggctcccatcctgcaatgatatatttcttttcagcctttgttttctcgaacgattcccgtgagaatagcagctgcacataataaaatcacaacaaaagtgaattaattagtataatcaaagttgcatatatgaacatttgacataaatctacatgtttagaatgacactactagtgatatataatacctcaaaaacacaattgagaaagacagacctaatcataaaatcggtctaacattatataatatagtgcaaagccatgttaaattataggatgagcttttaaacctcactaaacaacttgcctaaatatgaatatatatataattatatagatatatataaaccttcttgtagttgaggacattagtgaggtctgctgggacagtccacttcttgaaataatcaagagcaacatcaagatggtatagttttggggccaaacttaaatctacagcactaatcttctcaccagcaacatacgggccctgattccattccaaaataataaattaatcaattatatattattcacgaatcacaaaacacaaaatcttaattatacatacatgtgccttgagatgctcttcaagtgccttcaattcagtgagaagagcttgttctgacccatcacttgagtccttgctcttcaagaaagtagaaaacgcactaaatatatttgatcccctgcacaacaaattataaattaatacatattttcatgatagggtgcacttgacataaatcaaaacacaagttatctaacatagatcttgaacatacaaaatgtttaatacctatttgtaggtattggagcaacggttagaacataaataacttaacagacttaacagccagtcacgactggcgtctctagccaactaactcaaacacaaaacagttagacagagctaacactagggaaatttgattttctatacttagaaa

SEQ ID NO: 304069 - DNA, 1129 bp, Cannabis indica
aattaaaatttaaaaaccaaattttactcccccttaactttcaatctcacaaacaaacgtaaaaagtataggcacatggtacatgaaaacaaatttacatataataattaaattgtgtaagattaaacatattatagctctgatgagcttctgtttttcaccacaccaccaccaaaagtcctgataagatgtccttacatacaaagcaagaaccccaacaaaacagctagagccgaattaaccaatgtcctcacaccaaacttcttcacagacaaactttgcaaaggtctcattgccttctcagccaacccttcaccaggtttacatgcaacaccagccttatcatccaaacccaaaagcttcttctcatgatcatcagctgatgatgatgatgatgtacttggcataatcttctttttcttcttcatatcatcatcatcatccttagaggccaccaaagtcggcattgttaccttcttcttgtgatcatgatcagcttgccccggcattgtcttggccgcggtatcatcaagcaattctttcctcttacgatcatgatcagcctcggcggccccattattaatgtggtccttgtttattggtttgacacgatcaggttgctgttttaggatagaagttggagggggtggaggtggaggagtaggaattctttgtcgtttttggtcttgatgagctggtaatgatggggttggtgttggtgttggtgttgttgttggtgttggggttggagttggttttcgaggtggctgagtagttgtttttgttgttggttttggtactttgacataaaggattccaccttcgaatttggcagagattttggaggtgtcacaattggggtccaactcgaattccttaatgaaacgacgccatttgttctgacttattagtctttcaccacttattctcagttttccagttgatgttatttgtatcttcagtttctccttttgaaaccctgattcgccaattatatatatgagtaattatatatataaatgtttaaacaaaatgaattatatatatgagtaattactaggtgaatgtacgtgccgagccacgtattgctagttttatttaagattttagtctttttaaaattttgaat

SEQ ID NO: 304070 - DNA, 973 bp, Cannabis indica
tttaaatcactttctctcaatgtgtttttatgaactttcttaatttttttttactttcccatcagtatatctattattattctgttcagccttacaaaaaataaagtaatgaatttttgaatcagattgagtgagaaaaaaaaatggagatcaaaataataagaaaaatatattatagccattatatctgaaattaccattatggtaactagctaataaaacaaaggaattttctaatatctttaaaaatatagaacatctataagtgaaaatacatacatacagatacatatatatttagcagaacaattgatcttgagtataagtagaacacagcatttaaccattagccttattcggcatattcttaattgattcattcgagtagatatattgagttttgattttcagttttttttttaagcaacgctatagtttttggaatagaattttttttagaaagtttgataaatcacgttaataaaaattttaattatatttttctaaaataaaataaaatattagtgtgcaaatatttttggtcatttattaaggaccagtgatgtctcagaattccaagatcactttggtaatccatccaaccgagtctaataaagtgcatctcaatcaactatgtttcattcattctgtgttagcttgttttttctatttcttctttttttatcatataatagaatcatacaaatcatttgaaattgattagaaagtacttagaaagtccctttactcgggcttttattttatttccaatatgataaaacaaattatgtcaagtgtttgctttctaaatatgtttatcaactattaaaatgagaattattgaaagaatatatgtaaaagttcactatgacttgcatatatatcactttcctcaggtattaacagaatcagcagcacactatatttgactgctaaatttaataacattaaaattaattatttattttctttt

SEQ ID NO: 304071 - DNA, 1793 bp, Cannabis indica
  modified_base (875)..(875): a, c, t, g, unknown or other
gaactagtggtacagagtaaaaactagatgtaaaatgcatatctaataatgcaagaactatctggcattgtaaagtgatgaattaggctaattgtaattgaccaagttactctaagtcattgggtaactatttcaggtgagctcttttttacaattttgtctcccaattcacaaagtataaatttctaacgtagaaggtacatctaatcacactaacttgacccttataaagcggagaaataggataattctaagtaacaggataactgtagcggataaagttttgtaagcggatagttatgacatacatatatattgatttttttatttgtttttttaaatgacctaaatctttaggtaattatctcatgtaagttcattttcacaagtttgtacacctatttgaaaagtgtaacttcgtcacatagaaggcacatccaaccacgctaccttgacccgtgtaaagtaaagaaattcgataattctaagtaactgggtaactgtggtaggtatgtttaggaaaaaaaaagtaacctataaaattataacattggggagtagggtggataaggttttgtaagcccagagttatgacctagttatgtattcaatttattttatttttactttttttttttgttaaaaaaaaatttagaagtagtggaatagtgtaaaaaccagacatagaatgtataaccaataacacgaggttgtttggcgctgtgaagtaatgaattggattaactgtaattgaccatattactctaagtcactgagtaactatcttaggtgaacttacaagtccatcaatataatcacactaccttggcccttagtaaattatttaaaaaaatcaatacatagtatgtcataanctgagcatacaaaactgtatcccctcttatcctactaaacgttacaacgtttacgggttaccttctttcctaaatatagttgccacggttacacagttatataaaattacccatttcttctcttgccttcagcacgaggaagttacactttgtgaataggtgtacgaccttgtaaagtgaacttacctgagatagttacgcggtcagctagagtaacctaatgaattattgttaacccaattcatctcatcataatcctatacagtcttagcgttattggatttgcattctacgtcaggttttaacactgttctgctatgtcaatttttttgaaaaaaaatataaatacataagtatatcataactctgggattaaaaagcagtatccaccctattctttaatgttacaacttcacgggctacttttttttcataaatatacctgccacagttacccgattacttagaattaccccattgcttcgctttacaagggctaagataacgtgattggatgtgcctttttcgtgaggaagttccattttgtgaagtgggggatgggcgtgtaaagttgagctcttctgatataattactcgatgaattaaagtaacctggtcaattacagctgacctaattcatcactttacaatgtcagacagtccttgtattattggatagggatattgtcagcaaaactacctaaacttgatattttttaacacttaaccacaaaaattaaaattttgacagcaaaacctagtgaacccccattctgttttgttgttgacacttttgtcaaaaatctcagttaagtgccacagtggactgtccacgtgtacacgtaaaaaaaatttagtgaaccacataatattaattttaaaaatataattataaatatttaaaaatttaaaaaataa

SEQ ID NO: 304072 - DNA, 781 bp, Cannabis indica
aacctactagtaataactattaatttaatttaatttagttagtagtaattaagtactaacaaactaattacacgtattattattaatatgtactcttgtacaaagagttactcttatttttttaatttattaagattctattagtaattaatcacctaccaactatagattagatcgagtcatgaagtcaaagttatataacaagataagtattgtatatatatatatataagtcatagtgtataattatatatgtttaccaaaaaaatcataatatataacaataccaaaaagccatgcaataatatatattgtgaaaaatattaatgattgttgtactgctaactactaacgtaacgttataattataagttttattatacaaagacccgatttattaattataattaattcccttctaaaatcaagattaaaacaaaaatatgtaataattatagatatatttttaacaacacatgtattgaaaatctcacgaaaagaaataacataataataattttacatatggtgttgatacaattaatttgaatatgacaatttataaatttttacaatatataattaatatagggactttaattttaaattaagtcaatcattatatataaattaattgcatcatgatatatatgctcagcatttttacgtcacatatatatataaccacactcttttaatttaattaattattgacaactttatatatagtccacgacaagtttattttttatttatttttattttattaaaatatatatat

SEQ ID NO: 304073 - DNA, 1226 bp, Cannabis indica
tgtaaatttcccaaaattatttataaaaacaaaaataacagagcaacctaactttattaaaattcttaatttgagaattattaaaacttctaaaagtgtcataagcctaggtaacaaatatttgccaaattatcgaaattttatcataagattaaattggtatctgatagctaagtgtaatataaatattacaaattatttacacataaaaaaatgtgtgataaaatacatgtcttttttcatatttagataactagattagtatggcatatatgcacatactatcataataaattaatcatgctaattagatattactataccataactgagaattggtaaacatccattaatgcctggtttgctattgagccttcttttctaataaaattaaaataagcattaaagaatatgaggtggcattctacaatatttttatctattttgttatttattattatttttttaattaatttagttcattttatatatttatagatattaagaaatatgactttttagtaaaaaaaatttacaaccaatcttctattagtcttcattcctaaaaaaatcaaataaattataatatcccatcataaatgagaacctcatatcattgattagaccatactatattacttaatataatgatagaaattgaaaaaaaaaatagaaattaatatatgccaattcttatatattcaagcatattcaattatataattaacaagtttaaaaattaacacatccccaattaaatttttatataggtaaattaactaatgatgtcaaacattagttggtataatactcatctgtaagtggtttgtaaaatttatattaggctcatatctactactcaatcttaaattcatgataaaattttcataattatttatggatatgattgaactttataaaaaaaattaattattttttaattaacttttcttagagaaaaaagaaaaatttaaatatttcgtaaaaacataaactttttattgattttggtattttctgaaataatccaaaaaaaaaacaacttgggctatgtctaacccaaaagcccatcctcgaagcccaataaatttattgccccaattttgagtttgacttcatcaccttacaatttcttgtggggtaagttgaaaaataccccttttattaatctattgatcaaatttacctctaattttatatttatttgaaacatacctctttttata

SEQ ID NO: 304074 - DNA, 2620 bp, Cannabis indica
aataaaaaatttattgtgcagtgactatagtagcagtagtggcagtggtgttgttgtagtacacctaccaccttgctattgaattgataacacaaaagttggttgtggcccatacatgcatcctttaagagcattgttattgggtactagtggtgcctagcactcttaaaatgtatcattttgcgattgactaacaatacttcttaaaaactattatattaaactatatgagacctgatacttagttagaccaatagcaatattgacacgtaggaggatacttgacaccacttgtaacttttagcatttctctttattaagattattagtcattttcataactaattaaatataacttggcaatgcgtggattgtgaccttatttatgagccatgtttttccgagagacaattttatgaattctatctattttcatcaaaagttttataactttttggttaaatttatttctttttcaataaacttaattaacagtaaattaagttatcaaaccacctttggtaaaaaaaaaaaccttggaagttataaccttagttgttaaaagagtgagttacatctctattatcttcttaaaaatatgaatctgatgtgtggtaaaaaaatgtgtatgatatctattggtagctttattgttatgtttccttactcacttacaaagcaaatccacttaggctatataattttcgaaagtacaaaaatgggaccaaaccaatagataatattaattagcaatgtggagcttaaatttatactgctttgcttttaatcgagttggtttatttttattaatgatggtaataatggacacaggtaaccaaattaaaggacgggactgcaatcgggtgtgctttcaaccacgcaatcctagatggaacctccacgtggcacttcatgagttcatgggccgagatctgcagtgggtccgacaccatatcagtcccaccgttcttagaacgcaccaaagcacgaaacgcgcgcgtgaagctagatctcgccctaccctcagacccacgcgcttcatccaacggagatgccaaagacacgaaggcatcatccaacggtgataccaaagacacgaaggcatcatccaacggtgatggcaacaccgagccacaactcagagagagagtattcaagttctctgaagccgccgtcgataagatcaagtcaacggtcaacgcaaacaaccctccatcggacggttccaaaccgttcaccactttccaatctctctccgctcatatatggagacacgtgacccaagcacgtgagctaaaaccagaggactacacggtgtataccgtcttcgccgattgccgaaaacgggtcgacccgcccatgcccgatagctacttcgggaacctgatccaggcggtgtttaccgtcacggcggctgggcttcttctggcgcacccggttcagttcggagcttcgaccatccagaaggcgattgaggcgcacgatgctaaggcgatcgagaataggaacagcgagtgggagaaagcgccgaagatattccagtacaaggacgccggagtgaactgtgttgcggtgggaagctcgcctaggttcaaggtctacgatgtcgatttcgggtttgggaaaccggtggttgtgaggagtggcggaaacaacaggtttgacggaatggtttatctttaccaggggaagagcggtggccggagcattgacgttgagattagcttggaggctgctgctatggaaaagctggagaaagatcaagaatttctgctgaatgtttaataatttcaaaagcataatgttattggatctgatttagtgttggatggattcaattggaaatggggtttgtttactgattttggtttttatgattaagcaagcaataagtgcttaaatcataaacgccaattttatggtgtaatgtgtgtgtgtgtgtttgtttgtagtgggatggttttattttccttgttatttatctttccttttggaatttgttgattatggttatatttctgagtaatacggcaaggtttttatttctttttcttttagattttggaaagccagtaattagatttgtgtgtaattggagataattacacaatttgacatgtttgtctgaccatggaattacactgtaactgtataattggaagtaattgagggattccaattacactctccaattttcatactaaaaactttccatattaaacattagctactaaaaaatattattttctcatgtaattactaattattttgccaaacaagatattaggaattcatatgtaattaacacctcatattcaaacacaccttgcattttaaaatatagtgtaattactaaactgtgtaattaccaccctagtaattaccctacctagtaattacacagttacttccaaacacacccttaatttataccctaatctatttgtattagtgtgtaatttactgtgtaattactaactatcatgccaaacatgatattaggaattcacatgtaattaccacttgacatccaaacacatcttaaacacatcttgtattttaaaatacaatgtaattactatatagtgtaattactaaggtagtaattacactgcatagt

SEQ ID NO: 304075 - DNA, 1053 bp, Cannabis indica
aaaaaaaatgaaaaacttaaaaggaaaatatattagaaagttagaattggtatatcaaccaaccaatacaagaaaccacactttgcaagagaaaactcctcctaattccacatgactaagctttttaatcatttcaatttttgatcctaattagtatattaaaactactaattaatttctatatttagggtgaatatatgattaattatgtaattagtttaatataaattggagtatgcactttataaaatacatcaaactaacattattagatttggtcattaatttcggtatcagtttaatctattttatgaactaggagcatgtttggttgattagaagatcacgattgtaatataattaaagtcaccattacaatgtttgatttgtgtttttaacctttgtaatggaattccattataatgggcattacactaattttataaattttcattacaactaaagaataaaaagacaattttatcctttctctttctcactttaaaaatataaaaaaataaataaagcatagatatttttgtcaattcaattctaattacaatattcattacaaaataaatcaaatatagtaatagtattcctattattattaccattacattctattactattcttattaccatataaaaaagaaacgcttaaagacactatttgtatttttaagtttttatataatttaatataaaattgggggcaaattatgaaataattaattttagggtaaattgatatagagtatgtataatttttttatttttacaaaataataaaataacaataaatgattaagaaaattggtgttcgtagtgtgaagcatggacaaagacaattactgctttggtcaaaaaatttataatttcttgtctgactaacaaaatataattttggaatgagtaatttagtgtctgtaataggggcattttcgtaaaattaagtactaaaaaaacaaaacaaggaacaaaaatcaattctttctccactaacatatattatacgtttattgttaaaaaaagaaaaaaaaaacacatatt

SEQ ID NO: 304076 - DNA, 1777 bp, Cannabis indica
ctctctctctctctcttcgtttttttttttttttctttttgaggaaactaatatgcaactatattaatattaaacagtaagttcagttacaagatcgaaaaatacaatcaatggaattaataccattccaaataatatctttatctgttcctaatgcctttttgctagggcatgagctaaggtatgtaggaatatgatcaattcgcacatagaaaaaggtgataaaaataatataactttgttatctaaatcagataaagaagatttttctctctatttgtgcttgattttattcactagcactttgacaattagtctgaaaatgaagctaaaggaaacttcacactttcacaccattgaagagctctaagaagagcatgagcttcagcaagaatgggagaaagagctccaggcatagatgaataaaacctagcaattacatcactcctacagttttgaataacggccccaaaaccaagcttcatagaatccttgtttatggttgcatctgtacttagagcaaatttcccctgtggaggcaaaggaggtaactcaaagaagttgaggttgtgtgaacagtagtagtagaggtcctttgagcacttgtgtagtcctgcaaaaaggtaactattcaacttttgacatctactataaaagctttattatcattaaaaagtgtgatatttcttcaatttcaaatagcccaaactatattgaaaaataaggaaagatcctctttacttaaactatcaaaaaccagctaaaagaaaatttttaatatcaccaagcatatgattataatagaattgagaaaatctagtttaattccaaatttggactactctggaacaccctaggaatgcatgagtgacactatcaatgtggttagagcaaagggagcaacataggttattaaggatatttcttttgaaaaggttgaaggaaatagggagaatatgcttaaaagcattccaaatgaaatgcttgattttggaggaatgttaaggatccagacagttttccaccaactttaaaaataatcaaaactagaggaagaaggggaggtaatgcggtaaggtgctagagaggtagcaaggtgatatgctgagctgacagttaaaactctagaggaatgatgaccccaaataaatgaatcttcttcggtgtgatcaataggggtcttaagtatagcatggacaatatcttcagagaaataggaaagaagtttgttcaggtcccaaatgccaagatcatttataaagaaggaaatagtattctttggaggatggatgttatctttgaaattgagaaccttaaaaccagggatccagttatagtgaagggtggaaattgatttaccattccctactttccaaataagcccttatttacaaaggtccttgccccgtaagatactgctccaggaataagagggacattggcctttagagactaaaagaaaatcattgtacttaaagtatttagcttttaaaagtctgaaaagaagagagtttggattagtggaaatcctccacgcttgtttggcaagcaaagcttgattgtgaaaaataaaggatcgaaaacccaaccccaaaaaacttagattcacaaagagagttccaatttttccaatgaattttagtattactacccatagaaccccacgaaaacaagacattgcatcagaagagattgcttggataacaactttaataagagtccctttccctgccttagcgaataaattattgttctaaatatttgttgggttttatgc

SEQ ID NO: 304077 - DNA, 2035 bp, Cannabis indica
atttgctgtatcagacattacacatctaggtctccgaattttccccaggagtgcagatttctcatgttatagatctgcgaatacggctgctcatttgttagcgaagtatgctcgtttcggtggactctgtttgtttttggttggaggaatacctcccccgttaaatgcttatgtattatggatgattaatataatataattggcattttatactacaaaaaaaaagaataaagttttttaatataaagtaattaattgtttcttatgggtattataaataatcaaaaagctagctacttttaaaacacataaaaattaactaaaaaaaaaaaaaaaaattaaaaggaatgaaaaagttgattatattataaatgttagttgcttgatgttatttatagtatattgttataaaaaataacacgaaaaggtagaacagtaacaacaacaataaacagataacaagattaggattaacatgtaatttgtagtatacaaagcaagtaattacaattttagtggtttatagtatatgaagcaggaacagtaataataaaaacgactaaaaatatatcatttttcaaagtaagactctatttcaaattaggaattagatcatataatttttcaacatacgaagaaatgatactatttttgttaggttatctattcaacaatatatgatcgatattacgatgtaagagatacaatggtgtatccaataatagggctcttttgttttttttttttttttttttttttttttttttttttgtgatggtaattaaatttttcacaatggtttggtcgagatgataatcggcctactctttaacacaacaatgatttcaaatgcaaatttcaattttaagaattgaaatagaatcgattttttttttttttactcaagtttgtttaggttttttttttttcgacaatggagttttctgattcagtaacagaaatttccttgaaattaattaatcagattgaattgatgcatgcactgattaaaaaggagattgagttaattgtggaggagttggcgaaaacaatttcttattttgattatagaaattattttgattggacggtataaaacttacgtgacatgttatgtacactcatttaattgattaatgataatgatgtaaatttaattattagataaaagattcccaaaagtacaagtattttttgtcctttttttaaaaaaatatttacgtatatacatacatactatttttgtaaaaagaaaatgtctttcttatcattatatataattagtcataataattgaggttaaaataattgaaaataagacagagtaacaaaatttatgtaataaagggaaatatatattttttaaaattaacttaaaaatttatctaaatgtctataatatgacacttttgttggtaaacaatagatgcccagcaaatagttagtagatttcttatacaaaattttcctaaacaatttatatattacgatccctcaaaaaaatattacatattacaaaaataaaatatcatattaatatatcatgttgttaatcacgcaaaaagtgtcatattatttaaaataaaaaatatttaaaatttttaatgtaatttgtaggacttgggttgtccctccctcccacacaatataaggtgagtcacatgatatataaatgtaatatttaaaatacacaatgtaataattaaaataatgtttcaaaatattgttttaagaataatttaaatttttctaagtaaatttaacttattttttaattaatttaatattttattaggtttttaaatattttttataattttttttaaattaatttttattaatagtacattgtaatttttaaaattatttttttaaaaaaaaaaaacaaaattttgtattggtcaaaattcataagagtaaaaaaatgaaacctaacaaaaagaacataattatggaaaattctacaatgcatccccttaaaattgacatattgatgtacccttatctgttttagcatccgaaataattttttagt

SEQ ID NO: 304078 - DNA, 2949 bp, Cannabis indica
atatcaacaaggtgcatcttgttttctagtagcccatcatgaaagaactccacaattaagtgtgcctgacttggagtaatttcaggatgggtgacctcctgagaaattttcctaggaagcatgcgagtgaggacaaaacatgctggaaatactcgtgttggtttttaaggtcattcgtcagtccatgaagcagtcggagtgatgtactcgtgtataagagtcattattttgtgggtgtaatgacccaatgaagacttgaagcgggaatgttacaattagggcattaacaattgtagccatctgaccaattctatcactgaaaattcaaatagtccaaccactataatcaaaattccaagctctgaaacccaaccaattaaactctgaattcaccactttagcagagaagcaacattcaaaaaacaggtggctatgactctcattacataacataaattggacaaatgaaagaatcaatgggaaagtagaattaagtaagaagatcttgagtgagtaggtgtgagttaattacctaccgtaatcagaaatctatgtttcgggatactcaatctacaccacacaacttgcttatacttcacctgactcacctgaggctattagcaattgcagaagatcgttatacagtttagtagttttaaacttgccaaaacaaccaacatcatgaatactttgtttgctaataaaaaaaaactatctcaaatggtataatttgcgccagtgccaactagagtcctactgcaaattatactcctagaaatcagagcctttgagataaacaatgttaacccatttgacacatgagagatcatgcttctccatgattttcctaacatactttgccaagatcgccttattcaagatagcaccatctctaaaacctagccctccataagcttttagaagattcattttctcccaagaagctatgtggaactttcttttgtttccatttaggccctagaggaccccacgacaaagtctctccccttgataacacttaaggcaaaaaaatgttcttccaataattcctgagccctgagagcagagaatggatcaattgcacttgaccaacaaaagataaatgtcttgttgcccaagttagactcgaaacactgctaaaatcatcaagagttgcctttaaatgactgattgcctgcttggaccctttatagaagaagattagatcatctgcaaaacaaaggcttgtgagttgaaggcctttacacataggatgatacctaaagtttttacttagcttcaagctttagccatctagttaagtattccataatgagaacaaagagcaaaagagatatcgggtctccttgccttattcccttatcccctttaaatctcctttggattctaacattcatcattaaggcataagaagtaccctctcaaacatgtcataagccaccctataaccaagcaagaaagcaaaggccttttattaagagatcttctagaaacattcagtctaccgtatcataagtcttactaaagcctattttagtaacacacctaggggatgcattttttccttccataatttttaattaagtcttgaaaaaattaaaatattacggggctatagacatgtgcttagcaaaagcaccctgattttgatgcacaagggaggctaagatctcaacaagtctcaaatagaggagttttgaactgcacttatcaatgtcattgcaacaaaaaaataagtctatagtcaatatcctttgtagggctattaattttaggaaccaaagagatggtagtttcattgtgctctgaaggtatctcacaaatattaaagaaactcaaaatagcattgctaacctccaaggtgattttaggccacattgccttgaaaaacacaaacccataccgatgggcttttagagctagggatattgaatagaacaaacttaatttctttataagaaaagggcttcaacaaattcagttggtgatcaattaaatgaagctcctgaaatgattaataaaatgatataccacctcagagtagttgtctacagtttggccatactagctatcctattttcttctctccttttctttttgcaaacataaaaatagacagtattttcatcacctttattcaaccaagtgatcttactcctctgaaccaaaaaattattataaattctagcctgagaactataattagcagcctcaataaaatagtcatgttttggatgagcttgggcttaaaattgagctatagagagctttagctttatgatagttagcctcaacatcttctatagaacaattattaaaattcttcagattgtgcttcaatctaaagcaccaaattttagaaaccaaatacttaaaatccttgtactctatccaaaaattaaaaaatctaaaaagttttataccaatattttgaatcacaacagaagtaacaatacaagaacaatgatatgaaactatttcccataggcttcattcttaaacacatgaaaaatttgagaatatatcctatcatgattcatgactatcctaattgtttgtccaagtaaaattggagccaattttgttcaaacactctaccttccccaaatctagtcaattatttaagtcttaatctcatcccttaaaacttaatttctctcttgtctaccatcaaaacgtacaacattaaaatctccaaggataaccaaaatttaacaggaaaattaagcccattaataagccttgccaaatgattatttgcggtaaaagtcctcaaaaagttcagtatgatacagataagtccccaacctcaaaaaatagcggtaatagtcctcaagatgatgttttttatttgtccgttagtcccaattttaactgagctgtttattttttttcaaaatttccacgtgtcaaaatattattggtacaaattattattttaattttaaa

SEQ ID NO: 304079 - DNA, 3287 bp, Cannabis indica
aatagagtattcttaaatagaggttatactgtatatatatatatatctctttaaaaataaaaagagcaaaagtgagaattgagagtgagaaagactcaaattgtaattaacaatttcaagtacacaaaagacaaagctggctgctcataaacaaaaaataaacagagagagcccaaatttaaccagctaaaaagaccaatcacattgacattttcttaataatatcataacaatataaatatttatatttatatatatatagaagctacttcttcctcctacctaaaacttctttgacataacaaaagcatttaattctttggtcaataaaatttctccataggaagaattaccatcattgtctgaatctgcataaacaaaaaaaaaaaccacaatcacaatcacaactttacaatattttgagaccagaaaactataatcggaactcaaaccgagcactctcttaaccgataatctactttattcttcaaaatacatcactaaaatcacgtattttgtaaaccgaaatcctcctttaatatgtttttgagtaatgaataatattttataaatgtaaagtaaaaagtatgaataggaaattttcagttatattttttatctctaagagagccaacaagaccacttggccttataacccttttgaggtcacttttctctctcttttaacagtcaaaaaaacatggtttttgttttcaacatataaagttgaaagtaaaacaaacaaggtaacagttactaatgttattttcctcaaaaagttaatagaataaaaaagattagacaaaaagccaaagtacttgttttccctttctaagagtcaaagacagttacctgttatggatcctttacttatctctacagcagatgaagctacattctgcaaagatggtcagataaaatcatatttgggtcagaccaaaatgtattcattctttcattttcatcaaaatatgaatcaattgaaaaaggtaaaagaaaagggtccttactcttttctcttatttgtgctcatcaaactcctcttgtaactgttcacaaacctatccaactcccaaagtgtttcagcttcaagactagcaatgtccacttcaatttcatcttcttgatgagaaagtccaggagttctcttcttaatgatctgaacaacattgtctagcttctctgaaggtaaattctgaaggtttgtactaagcatttgtttctcttcataggtcatatctcttttaacaacatccataggtttcggtttctttggtattggggtggtggttaccgaattgggattcactggctttgttacagattctgctctatctaaacttctcattgctggggttgaaagcattgaaggagccgaacgatacttagttggagccgagggccttcgcaacaacacatcattatcatctccttcaccatcatcgatttcatcttgttggagctgattgaaacttctcattgctgggggtgaaagcattgaaggagccgagggccttcgcaacaacatatcatcttcttcatcatcattaatttcatcttgttggggctgaacaaaacttctcattggcggggttgacattgtcgaacgagctgaacgaattcgagttggagctgaaggccttcccaacaactgatcaccatcttcttcatcatcatcatcatcatcatcaatttcatcttgtttgttaagattaaactctttctctataccagcccatctatcttcaaatatcttcaacaactgttcagccatggaatgaacatcttgtcctttcgggttatacaacatggcattattaaaagtaagtctaacatcatcagcaaactcaattggtgacttatacaatgttttgtttaacaatctactcttaacagttcccaaatccattggatgcttaataattgaattataatcaagtaatcctaaccctttaacatctacaggtacattaaaaacccaaccaaacttatgtttcatcaatttctcaagcaaattaacacaactcttaaacaattgactagaatacttatctttactctgcccaaatctcactactccatgatgatgatcatcatcaactcttttcccacctttggatgatgatgatgatgataatgacttcaatttcttgttactattctcttccttcttcttcttcttcttcttattcacaaaatcaccatggctgctatcctctgctccaactcgaactgacctcgaatcgcgatgcccaacagaacccacctcagaattcaccctcattgtgctctcaacttgtttagctacataataattagcagaaaactgagaatgagttgttccaccactctgctgattattattattattattactattattaacaacaacaaccctcttagccaagcacctaacttgatcaagctccttaatgagcttttctcttagctttcttaaatcaatctttgagcatgaattcaagctaaacctaactcgattatcaaactttgaatacccatagccattgaccctatcggagggatccgatacagggcaactctcgctcgatgagtcgtcggaagccgccaccgccgccgctttcaaccgcgaaaaaagttgcagaacttgatgtaaatgatggaagtgacttggattttagcaagatcaaccatacatggaaataaaaatcgtaactttgactttgatcgaacaaaaaaaaatcccaaaatggaaactgtttgggaaaaaactagggtttctgattatgggaagagaagtttggagaacgctaattgaagaccgaaagtgaaaatcactgaaattaggggggagattagggttgttagtctggaattaggggttggaaattagggttttgaattcggggaagaaaatcaaaccctagaagaatggaaagttggaaagtgatatctggaaaagatagtttttaggggtgtggaatacacgcgctcacggagcgcgttagtgctttcagtgtggtcctaaggtggatttggacttggatcctttgtttaggtttatttaaggtttacttacacttgaggtggagtttaatttaagttatgttttattatagttacaatcatatttttgaacagtttataatattgaaaaatagaatttttaatattctaaaagctttatatatatttttagtcagggacggagggactttagcccatgtgtgggctaaagccctcactcaaatatatacatcaaattttttatatgtagatatatatatatattaattcactttgctcaa

SEQ ID NO: 304080 - DNA, 1772 bp, Cannabis indica
agcttttagctttttcaaaagttgtaccaaacggaccctaaatctagtgcattgatgaatgatgggacataaacttttgaagcacataatcacaattaccttccactgtgttgacactactgtaattgtgaataactatatgtccttgatttaacaaaaattttatattaaaccttaaacatgaataatacatgttgacataaataatcttctattgataacaaataagattatattgaaatggggtttatttagggcataaaatccaaacaaatctcccatgactccttttcctttatccctatttggatcagaagtaccagggtcttgaggattcgttattttggtggtattattctcctacaggatctctaggattttcttcatcaagagttaagattcttgattcgattcttccttccaatcgcatcagagtttcttgcattttgtgagagaaatcttcttgggccgccattttcgatttagctataactaattttttagccatcttagagattgcagaattcaactcagcatgttcaccttctttactagttttgttgtcttctggatcaataggatcactatcctcagtttcatttacttcatcgataggatcatcataaacacgttacacatcatgttaatctttattcacatgacgactagtagctagcctccgtaggatctccattgatccttattgttgtttgagcattgggattaactttgtccatcgacatgtcctagtagtgacgaccatatttggttcgggtgagtccatgattacaagatgtttcgttagaggtatcactgttttctccaactttgaatgaaagcactaaaaattttactgagtttttcagaaaccaataatttaaatctaagagccaaagaataataactcaaaaataaaagaaataagaacactcgagaattttacatggttagggcattaactagtataagtccatgagtcaataccattaagttaggttacaaaagccttagggattataagaaggtatgagtcttctcggcatgtgagtaaaaaatttcgaaccctttgcatgtagggtttgttgagaatttatagtgcacataggccatactagttacccattttcccctcaaatagaagtttacaaataatatataaactttagacttatttggtgaagcctgatccatggggtaccttgtgtatgctgacgtggataccacatcacgatgttggttgtcaaaactgtgtcctatcttcataaggattaatgccactcattacttgattgtcacttaccatttttccttatttagaaagatttgatctcctatttgagattctagggaggcaatccctaatcttatgcgatctggcagtaaataggaaactatactgggatctcacctggataagttgctcattcttcatctggaaggactaatgatttatggatcaagtctagttatctcgattgggcccgttgttgggccttatgtatttaagctatatttattatggaaaattcacgtgtccctacctagaaacatgagtaacataattatgcttgttgctccagaattcgcccaaaatacgtggaccagtcgagaggggacacgtggatcagataacttgtaaacatttgctaagtctttgtgcgccacaaggaagcgctgttagcatgggtcccggaggaggcacccggagtacaaggtactccaggaagcttgtatagcgtgaaggctctccgggatatgtcaggtctctcccg

SEQ ID NO: 304081 - DNA, 829 bp, Cannabis indica
tatatttacatataaatggctaacagtatgcatttttccttcgattacaccattcaataccctttgcatgtcggccacttttgtctccaacctctggttctttagactgaggtcgtttatctcctcctcataacaacgagtttagaagctctaactcgccaaataaacttgtgcacacacactccaaatggttggggtcttgatattcatagcgaggtgggatgtgacatcgtgaaggtggtagtggttgtaaatgtgtcttacttgttaatggtttggcaagtgatgttaggatcctagttgagaggagcgctctggttggtagcacttggcctaccgaaagagtagtacacattgtcggagatcctaccagaggtgatggcctcattaaaaaatgtcattttttggggctatatatggttgtatcctaagggaagagacttctttctcttccccttcccttgtgcatatctctttgggaactgttagccttcgatggtggtagatttctcctcaaattcattggtttaactccattgaagtgcatctctatttttctaagacgcctcaaattccttggcatgatttcttagaaaaagtgccaaattattgactgtaaaaactcatcaagtaaatcttagttataaaaacaaacgtaaagagcttaagataaaatatctaagaaatattcataacactcaaatgataatggagtgaagagaatattgttctattgattatcaaaactcttttacaagtaatcatttcccaacccaattacaagaattcacatggggtatttatacttgaactctaatggctttgaaat

SEQ ID NO: 304082 - DNA, 1642 bp, Cannabis indica
aaacagtgtgtttctgttaaagagctatcacaacataacatcaactctttctttatttgaatcatcccaaaaatacattttattcccaattatttttctcacatacaatttccccttggttctacgatatttgaacttgtgactattttagtttgagctttgatgtcgagaaaccggttaccaaaaaatattgtcacatgtcattaatgtacattgattgatctaataggtaatcatttcaaaacttttggaaattgtactcgcttttacttcccgaatatttcatttttattcttgttttaaatttaaaagatatatatataaggagaagttaaaaagtttaagttacttctgtgatttttttcaaatccctatcttgaattattttcttcgagcttttctccccttccactttgaaatttccttctttcctctagctctttgattccattcgtcttaataatgacttcaaatcttctaagggtagacaaaatctattactgagaaagcttcttatattgaggattctgaattcataatcgagtatgaagtcactttcaatgagatatgtgttaagtaccctattccataagggatcactttccacatgttgacgaaacaagaattggaccaaaattttaaggaagttgaattagccaaaggtgaaactatggtcactgggaactgcatggagcttttgaaattcaatgtccctccttttctggtttatattctttctctcactagagtctctatgatccaactcctccccaactttattcaaacaattttgggtttggttgttgtttgatgtttgtgaaaagccctaattacctagttcatggtcttccttcttcaaacaagggttgggactcctttgtctttgtaattggtgataagtagtttcccaaggttttcaaccctgagattttcctattactaatcacattgttgattcaattttttagcccgctgaagattcttatatttcgtggggatattttgcgtaaattggagattattgacagtatcaaggatgatacatacccaataggagtcatccttactgaagaagtctctaagtggttgcctactctctgctcatcttctgctttgaaaattaaagaaatagtaattgagttcaagttggatgatctggccatcaattacaaagattatttgaagagttttaatgccgcaaatgatccattggtcattgaagaaatttctcctacccaaattaaaggtcttagagccatgattgacgctcatgactatgaggtttccaaagactgacaatgcacaatttttagtgttgccactaagctacacaaagagggaaattttattttgggaggtgttgatgcattcacttatgatgtggacccaattcaatcctatttgaattcctcccattctatagttaatgtgcatacaagctcaactacctcatccgcagttgtttactcatcttctttctccagacctcaagcttcaatgtcttcccctgtttatatccctttaaaagccaaagattctcgaaataaaaagaggaaacttgttgagcactgttgaccgaggttttcggcaaccataaaaatatgagtttaataatgagctgtacgaaagcgagatgaagact

SEQ ID NO: 304083 - DNA, 2556 bp, Cannabis indica
tgctgtagttatcttgggaggaggaggaattaggtgtttgttgttagttttggcctatagattattgtataaatagctagtccttgttattgggagatctatatagagaattgagttgtctaggtcttcttggagagaccaagcctctcgaaagctgggaagttttttttttatctcatttcaacacaatcattaaagaagtacagtagttttatgattcatcatcaatctatcctactttctgtcttgatagagttctaagacattatcatcttcgtaatgtttttctagtgacatgatagttttattcctttttatgaaacaaaattagagaaaatgagcacagctgattttagcagtaaaagttttttacatttgacttattttcttaatgcagttttgctatgaaacaaacatatttgtcaattagttatgatttttactgactgtttgattctatatcttggaatctttaatagggatgactccacttctcggcaccgggttttggaggacaagttaatgcggcaaaaggcccagctgttgcttgatgaggctgcttcctggtccctcctgtggtatctttatggaaaaggaaataacctttacctttgtagatttatgttagaactgacatccttatgccatgttcatgcattgacacacacacagaaacagaaatacacagacatgcatatacatgtaggcaaaaatatggcacgggcattgttcatttgccaatacagtaatatggctttcagtacttaacacttacgttgcttttgatgcccaccctcatcaagtgtcccatttttctaaagaaaaacatataaatatgcctatgtttattagtctacaaatggaaagtgtaatatgagcaagctatttttgggatgtctaaagtagaaatgtcatgtgaagttgtcagtttatatcatagctatgaattacggtatcaattatactaatttgatgtaaagcatctatgattgcttccattggtcaagctttgcatatttataattgttgtgaaattgttctttattatgacgatggattttgagagggtctcaagaaaatctcaggctataggtaactcatttgcacacaaacattgcctctagaccactatctgtatttgttttggttaattttggctgctgtgaatcacaaaatacgagctttgtacttttcatctaacagtgtttcttcttcttgcaggaactgaagatatccccagagatctcgtcctggtaatgcttaacacacacacaacacagcaaacccattgttttattggaagaatatttccagtttcttgttttttgttttcttcttcttcttattcttcttcttcttcttcttcttcttcttctttttagtgtgaaaatacttgaaaattgttgaataaattgctctaaattaaattcactattaacagttgcccccaacatcacatttggaggcttgtcagtttgtggcagaggaccatacagcacagttgtgcttgcggattgttcaatggttagaaggtttagcctccaatgcacttgactcagaatgcaaggttgtcatttttgctttacttttttgctcagtttaatctattttttttgttggtaaatgtaattatctatgcttatttttctttcattttgttggatacctacctatttcttcaccctcctgtatgcttgcagaaagatttattttgctggcacgtatctactaaataatctgataatctattgtgtaaatcttctgtcatataatttttgttaattcttaatgtggcccaatcatattattaatttccttcctcttgggcaaagattgccatgatagaagttttattatattactagagtttttgacttggaagtatatctataatttttgggtgcagggatcatatattggtacatatcttccaacttctggtatttggcgtcagacccaaaagtatcttaaaaaaggagtttccaattcaagcactatacatcacttagattttgatgctccaacacgagaacatgctcatcaactacctgatgacaaggtactctctaagttagataattttgcaatttggggccacaaggcaacatcaccatttgcctcaaacttttggtgtacatatgtgtatttctgtatagtggttatttttcccttccattttcggtacacaaaactatgcaaattttgaaattagtttgattttcagcaatctatgacgtgtgctgaattattttgaacaacaccagttggagtaggactaggattatcagtggttagtgaatgtgatgcttatttctcatttttacattgcggtagattgtgcaaatttggctcttttgcaatcttgtctggctcctttgctggaagtattggaaatgaaaattatatataggacactactgattcagaattattatattttatgtaagtatgacaaaacaaagtcatgattttatgtaagcaacataattgctggatgtttctctctaaccatcaaaaaactaaaaaatgtatattttttttaataaaaagctcaat

SEQ ID NO: 304084 - DNA, 1500 bp, Cannabis indica
ggattttagtcacaacataggaatcgtgatgtataatttatcacaattttttcacttttagtcacaaattttgttgtgactaaaagtaagatattttgtagtgtttgtctcatctacaatggcctatctttggaaagccctcttctattactcatcgatctttccaactttaaatcgcaacttgaatcacaactcaagtcgtaaccctaatcacaattcaagatgcagcccataagacatagatatgtctgtaacaaattgcaattttaatcgcaacctaagtcgcaatctaaattgcaacccaactgaatccgcaatccaaatggcaagtcaagttgcaacccatatcgcaacacaagtcctgtttcaaatcgcaacctaagctgtaatttaaatcgtaaccaaatcataacttgagcaacttgagctgcagtacaaattgcaacccaagccataatccaagtcataactaaaaagagatagattttgtggttgtggaagattgatatagctctatactagttgtcagagccaaaaatcaagaagtttggaaccagatttttttccttaatttctttaaattgtgttgtaagttggtaccttttgtaattttgcacaaaaaatatacatataccgtagaaatgattaggtttattaatgacagtatttttgattaaattattaactataacagtattaatgaaaaaagccctattttttttattatttataaaaaataaaatgaaaacaattttattattaataaaaataattatttaatttataataaaataaaaataatatatgaacatatattaatataaatcataactaattaaaaatagataatattatgaataacaatattatatgattagcaattggtttcatctttacttccaaatataatatatttataacttatacacgtaataattcaagttctacataagtttatatgcattatgtttttcaaatttgagatacaatatgaccatccaataaaacttttacccatacttccttctcgtcatcacgaagaccgctaaacacattaagagtgtgaatatcacgagtaatgaggagggtagctttatgtcgatcaaacatgtccaaaaaagtttttcttattaattcttcattgagggccatttgtcgttcgttcagttctttatcattaattacatcacttagttgagcaaatgactctttcatttctctaccaataactaatgcaacctcgttaattacttctccaagatcatcagaaccttcaatgctctttctctttcttttgatgatccatctgagcgagattgaggcatttgtgaagcttgtgagaaagacataaagtaattattattagcctccatatctcccatagtttgagtatttttaacattttgttcatctgtgttattgatttcttcatttcttgcggcctggaactattttttgaagtccctggacaactattaatcccacgaagtaatggaatga

SEQ ID NO: 304085 - DNA, 3011 bp, Cannabis indica
taatttctaaattaaactaagcggtctttacaagaagcttgcctcaacattggaaaagtaggaagaagaagcccaaatgtttagaaatagtacaccacctgcaccgtctccaccaccaaaggatcctcttgttgccccatctgtatctactcccaacactttatagcctcaggaaacggtatcctttacaatcttggcaagtttggatactgtggagagggaacaaattgttctgaagcgaggtcagcatgctattttgaaagggaagattgagagtattggttaattgaagaccctaatggccttcatggacgattaaagaaggcaaacagaagaggcagagccacaacaagagccctagtctcgtgaaactgaaatcattattccaaatgattatggactagatgatcctgatgatgtgttgagtacacctgacaatataaaaatttaccaatgttggagatactcgagattctgagatacaaaattagagatagctctaaaccaacggagaatagaagaaagagaaagtcatctaggtggttcgatgagtacactaaaatgaaaaaaaagtctaaggcatcgaagacaaatatgaatgcagacccacttagggtcattgatcgaaagtttctttcgtctatccaaagttgggttctcgaccaaattgggaacaagtatctgagggagtactactctggtagacacaaggcagcttggttcctccaactgcatactccaaggacatggcttggagatgatgtaagttcttatgacttttaacgctttttgttttcaaagaccttttctatcttttttatttaatctctaacatattttgttttcatgttttagcatttagatgcggcattttagttgatgaggagacgataacacttttctagaggtgtacccaaatatgtgtgtggtcatgcttaacattttctcatcaggagttattgctcggtgggacactgcttgtaacaaccactctaactttgagtgggatgatggtatattgaatcttattcgaagggatgatgtccaatacttggagagttggaagaataaagagagaatatatatggccctgatcttcaacacccaaaagcattgggtgactttagaggcaagcttcaatcgttggatgttaagcgtatttaactcgagtcttggattgatttccaatgatgaattgaagatatacatggaagcgtgggaaaatttgttcccaacgttgctgatccagtctgacctatttgagaatcatgtaatggtcatcatgtcttagttgacagcatcaaagagtcaggttggacagttcacctcagaagtcatcgatcgcaacattatacgataaacaaaatcaaggtaactttaatacaagtgaatttttattatgtaacttgattaaattttcaatattttatgaaatctttttttattgtctcataaaatagtgattgtgggatgtatacaatagagcacatcgagcttaacatgctcgaactttcgtttcataatatacacgataacaatatgaagtaatttagagagcagtggtgtgtagatttatctttgcttttttatattttccaaaaagggtcaatactagtctgatatatggaccaatagggttctattatcatatgtacctccatgatttttaatattttccaaaagggccaatgctagtctgatgtattgattgatagggtccaattttcatatacattgaaaaacatcgaatccattagtcaataagtcagactagaactatttttttctcctaaatatatgaaatgaagtcataggagttgtatcgggccctatcagaccggtattggattagtcatttttttagagatacagttactgaaagaagacatgctcatcgctcaaatgatagttttatgtttaacaaagtccaacaaaaatttaacaacaatacataacaaaattttaagctatgaaaaaaaataaatttatgaaacttttctgttatgcctgatgctggtctaatgagttcgatggtttatattttctagattacaaatacataattcaaaggtttttattaggtccgatatgtgatccgatataggtttgatatatggttcgatggtgatagtgctaactacatttttcttttttaaaaacttaatgactgattttcagcataaccccaagcaagcattagaccaacatcgggcccacatccgactagcattacactagtcatttttttacagaaaaaaatgttgaaaatgttgctgtaagttaatgaaaacctgctcatgccacaaataataattttcaacaaagtccaacaagagtttaacaaaaatatgtaacactacaatagataacattacgattaccaaaattaaacaataatttttaacctctacaggtgcaatactttctgttgtgccctttgcaataacacttgctacaagtttgttttaccacaatcctttcaccattacaagcagtttggtctgacttaattcttagaacctcttgcttcttgggtttccatactggttgcttcttaaaaggcactctaactggcatgttctttatgtcatcaggcaattctcaatcatcctcgtcacaaactggcataactgtatcttcataggtgctccaatattttattgtgtaatatggcaagcatagcctgtacaagctaatacttcattgttgagctacaacacatgcatgagcacaaggcaacttcatgatttggaatgagccacaagtgcaattttgttccagtaagtccactacggcaccaatctcaactaatcctctagggtgcacattcaacgtgaaacaccctaacttacttaggcatgttagcatgatttttaacgtactgtgcagctcgttgctaatcaacgaggttatcgaaaatcgtgattaattaaaagttcctttatttaattaaaaacataaagtaacatacttataaaattttgggaccccgtttacaaaaatatttataa

SEQ ID NO: 304086 - DNA, 1408 bp, Cannabis indica
gtaccacactgcaccattttttgcagtgcagaatctacaattttttagtttcgcggtgctggtgcgatttggaaaattagaaacactgcatatgttagttaatttaaaaaaataatcaaaaactagactatatgcaccgtgaatacccctacttatatggtaaaacaaacatttcaactaatatcataaatctcatttgttaaatgtgatttatcaagtttatcattagtcacatttttattattactaataatacgttattcctcaaatattccatgaaatgagtaaagtgacatgtgttgtaataaatgtggacttgtttagatccaagagtcttccttcccctttccttttgcttctcacctaattactctttttcatataatattaaagttgttagaccaaaaatattcattcaatcaaaccctcccaacgcccttccttccttgtttgtttgcctagaaaaagaagaaagatcaaatttttcctttctctctatctatctaaacctaaatcaaccagaaatcaaggactcctacgccttaatcatccataacacacttctcaaagagctttaggtaaattctgaattcccccatctcccattttcgttgacattttccattactcaaagccctaacttatatataaataatatcttgtcaaagtttcgttcttttgttcactttcaattaagatttttgttcgagggatttctccttttctctgcgtctccatggctgtcgcgtcgtctgaggaagctcaaagcatatgcagtcactggtaacgcctaatctgaacttcttttctgtttattattctggttatgtaaatatgtgtttattacttatgatcgttgttttagtcatctagatgaatatattaggtttaatttaagatttttataaggtaaaggggaaatttcatatgccattaactatggataattggaaatttgctgtctttaataataattatttcgttcgtgttttggaccattttgttcttcaagaataatgttacttgggaattgggattgttctaagtgagtcaattaagcttttttcctttggtttgacaatcgttggttgagtaccgtgaaaaatgaacatattatcatattttggctaatttgcaatttttcctctcgaactttgatatataacaaattatattccctgaacttttttggccgttaactattgagattgttaaatttaagcacttttgtctaatttcattcaattttactgtttcagtgattatttatgtactaaaacgtgctccccctttgatatctaccaaattatgcccctcaaattttgatatgtactaaatcatgcccctgaactttcatcatgttagaatttttttactaaaattagacaaaagtccttaaatttaacaa

SEQ ID NO: 304087 - DNA, 2211 bp, Cannabis indica
tatagctcatttaataaaaaatgtgctccaatggtgtgccaaaaaatgatatagtaaatttgacccatagcaaatattgtgtcaaattcggaaaaatatttactatgatgtaaaatttacagcacaataaatgcactactttttaatttatatttatgtcatttcgattattttattagtatatttaactatcacattaaattatgaaatatttatattaattttttattgtcttacatattaaaataataataaaattgattataaatttataagattttatttgttttaataaaatattattagatattaaattttatatcaaaattttataattttacaattgtgcattggagcataaaactaaaattttgtatagatttaccaaaaattactttttatgttaaatataacacaatttttacatctccccattggaagtggtctaagagttaatggtttgtgttaataatcatatatataattgaggtagtgatgaaaaatatataatcattaatacgaaatgttttgaaattctttttaaattatttttttattggatgaggaagatttgatttagagtaatataatattcaataatagtaatagcatttagtcacttgagtgggctttgctagggttttctccttttccctttacagtcgttgttgccatttcttctttgacaagggctcgccaactatttttggctttcggtgtggctctagttgtgcatcttaatgagtgccctagcttttctaaagttggtttctcttcttcttttgtttggttttttggtatttgggctttatttctttgggcgaggggttggggttttgtgagcgttggtctgatccttgcagtgggcgtttgtggtgctgggtcaggctttgtgggtgtggatctggtggcatatggtagtgggtggggtcggatatacatcttttgggtctggtttgggtgttctggggtcttaccgcgtcgtggtggtggttgtcggttggagatttgttttggcaggagaggaggttgatgggtagggtaagggtttatttccaaaaattgatgtcgaggaaaggagactgtaggggtttttggactaatgtgtggcatcgggtatgattataatgtttttaatttattattattttttttattttaagcttattttcaataatttaatggtgttgatagtactggcagtagggctttgttcattcaagaccagattttttgtcttgcttcttttcgggacgttaggagattctaaataggctcaaagcattttgggtcgagcttcgtgggtgtggatttggtggcatctggtagtgggtgggggagattctcaataggctcaaaaatattttggtgtcagtagcatgactatcttagtccatgttcagatttggaggattctcagattcatattgacctcattgtttatggtacgatttttcgttacgattgttaatcgtttggtcgtttgtttatttttttttattttagtttgaataatatatagggttgttattacttaatttttattagaagatctttgactaatagtcattgatagatgtaatttgtcacatattaatttggattggagatcgatcattcttcgcacttttttgatgttttatcgatgacaactaattgatattttaattgaaggatctattaaggttttcttttcctatttttgtaaacgacataatttgtctatcttgttaattatgctttttgactattatctattaatgaaatttttcatttttcttaaaaacaaaaaaaagagaatctctaaattcatattaaaaaattatttcatcaaatatatagccaaattttcctattttatatataatatatagatttaattatataacactaacataatttatttattttttttaatttttttcattttcttaaagaaggttactatctaagaatgttataaaaataataaacattataatataaatagagttttcgttgtattttgcgtataaattgttgaccaaaatttttgcattagaaaataagacaatgacttcaaatttttgcatttgtatgtgtctatacccaaaatactagcatttgttgccaagtgttctaatttgtaccgaaaggaatattatttatccaatttaatatttcaaaaataataaaaaaaaaactaatataattaaatatatattttatgta

SEQ ID NO: 304088 - DNA, 1627 bp, Cannabis indica
gagatactccatcagtatatgcgacacattatattgtcagcatattttgacaattaatttaggaaatcaaataaggtaatgaatactgaaatctgaccatatatacaatattacgtaattaattttgtccaatataaaatattcatttatcacaaactcaattctttattttattccttaattagaaatattctaataattgcatatcggtttaactaaattaaaggatcacatgcatagtttttatagttcaccccttgatttgatagtaatggtaagtccatggtaagtccacttgttattatatcgatgctgaaacaaactaggattatgttcttaaagaatttatttgagtgattgcaacggtgaaacctctttatggagatctctttaggtttctctctttgtatgtgctctcaagagagtcgactgtacaactgaaatgttccaactgagtgatggctagggtttctcagaagactaagacatagatcgattctcaagaggatgaaatctgatatcaaaatggtggatgtgaaaaagattgattcatcccctatttagatctagattataactttttatatgcttaaaattagactagtcactcctctaaatgttgaaagaatagttatagatattccttacgactgaacatttacaattcaatgaaaataaatagattacataaaaataaacatccttcttgacttttggagttggttattcctttgaaagtcttttagaagcttcaatctctaggaacatgctgaatgaaacccaattatgtggaaacaacataatatgcgaccactgacactagaacgtgccactggtcatgtactacatcttgcactgccccttagagttgcctttggaatgtcttggaagttggcttacacttttagagttttaagcttccaaaatgacaaaggagacctcccttagttgaatcacacgatcattgacactactattagtgagtgctcacacaaacttacttcgccctcccaaaaaaaaaaacatcttccaaggggcttctcttatgtcttattcaaccatttggaggagtcattagttgcatgatatctctatttctcttatcatatgcaaccattgtttttagaaagagtcatgatcacatgtggctttgttttctcttggaatatgctaccaatgaccaacggttaggccttggttgcatagttgacttagcttccttcagatatcgtataagaattggccaaatctcttgccctactcgcacaacacccattttgcgttgtgcctatgtgaccattgacacttgggagtgccttggtcgcatatagaatttatcttctagccatgacgatgtcattttatcctttgtacttcattattaacaaaaaaaaaaaaagttaagtatttagtgccttgttaaaattcttcctcgatcgttttgaagtgaacactactacaaaacttacatttgttgtcaattttaaactgacactttgatgcgtgtcataagctataaaacatttaataatttttttttatttcaatattactagttacttcagtataatgtaggagtgtacatcaaaccgctcaaaccgctcaagcctccctcatcgcaaaaaaa

SEQ ID NO: 304089 - DNA, 5538 bp, Cannabis indica
acccagatcatataatatttattaaaaaagttgttaaaaatagggatttattgtttaatatttagaattaattaataagagagggagccagtaaaacaaaaatagtaacaaacaagcaatcatgcacaacttaaattgaatatgcatcaggaataggaatattgatttacttacagtttacagctatttttgtttcaccacaaacatagcttataatggttgatgaacaaagaaagaacatacgtgacataaaagaagttaaaaaaaaaagaacaaaatgaaacgaggttgaatataactcaaaatgtattaacaaaagccctttttttttactttcttttttttctcagtttttacctgggtggtaagtagggtaggatttttagggcatccacttctgcttctgaattttcttttatttgcgtgctttgttacagtgattgaaaaaacaaaccccagcgttgttgaagctccccctacaaacattgtagactagaacaaagcaaattcaactccaagtgcgtgataatggattggatggatgtataccatttttaaaaatttacagtggggagagagggacggatatcgatttgagagtgactgctcctaatactgaaccctctcatcgttgttaaaattcaggctctccatgcctctaagagtggactctaagttctttgtgttcgaaacatttcttgaagaagatgtacggttctgctccgatgacacaataggtgaacttctctgcccgcttggaattttacgtagtgtgcctgcgcttgcatcagtggtttgagggcgtgaaacatctgactcgttggtgatcatccctggatcacggctgctagagatgacaggcctccttgatgacccacttgagcgcatgaattgtgagcttgataactgcacgagtttaagcaggataaacaagctgattaagttccagcttaagcacaatgaataacgtaagtgaacaaacacagttttagttctctcagaaattagatgatgatcgtgccataaggggaagcaattgaactacaatgacgctagtgaaatgacaggaaactaagtcccgactgttgcattgcattgacgttatgaataacctcggcaaagacataaaaggcaaaactcttgaaagcagataaaacagcacttaccattgcatcttttgacatggctggatcatttgcaaccggacttttttgtctcaacaagcttccagtatttaccatgggaccagagtgtctcctacgagagggatctccagatgcccaacctgcagatctaccgtcttccaagccttcgtgaaaataagcaaaagattactaaacgttagtattttgtatgaatagatatgaatagatagcaacataaagaacaagcattctgattctaactatgtacaacattaaacgtataaataaactgcacgacagtaataccagcgtgtctattatcagcacttgcgatagctggaggtatgccagaacttggccccgcaccagtaacctacagaagaatggtaatgaaaaatttaagatttgtcccgcggtaatttatatataccagagcactagcaaccaacaaaatacagtagtgacttacaacagtacgactggggggagtggcaatttgggattgctggtatttcaagatggtccaatcgaaaacataatcaaactgaaaacctgtaccaaaagtatatatacataaagaatgtataaaagtgaaaaatggaagctgtgtgtggatactgctaaggtagaaaattaaatgtcctgaataacaaaaattagaagactaccttcacgaatgaaaagatcacgaaagagtctctttaaataggcatagtctggcttatcatcaaaccgtagagaccgacaatagtggaagtaagatgcaaattctgtaggatagccacgacataaggcctaaagaagaaagaacgaaggatcagtaagattccaagacatacaatttaatgccaatcaacatattcccattctaacaccatgatacctcaattgaagtttgaactttcttctcactgatcttctcatacttctgtttcttagttcctgctttcaatccctgccatggaagactgataaagaaataggtcataacaatagaaactagaaaagaactcgttaagaaaacagaacagtaaggagcaagaatattcaccttcctctacaaaaatacataagaacgtaaccaagtgattctaaatcatcccttcggctttgctctgtacagaagaagaatagaaaaaaaaaaaaaaatccaatatcaatcaggtaacaatgaggctaaaaaaagttagttgttggataactacaagtaaatctagtaagactacatgcacatgattgcaagggtaaaaaataattggcttaccaatgccaaggtgagtattcatactagcatatctagcagttcctgtcaaattcttattttctctgcaattatacaagggtcagtactttgtgaaaatagcaataaaaactttcgaaataattgaaaatagaaaatgaggccaatagagaagagataatagaatattaaacatttaaatattgtaaatgctaacctgtaaggaatatgttgatgagttgaactatctctatacttcttagcaagaccaaagtcaatgacatagacctaacaaaggagagagtttatagtcatgcattcatatactattacaacaaaaggaactaaattttaattaaaattccaaaatacctgatttgcacgcctccctaaacccatgagaaaattatcaggcttgatatctcgatgtagaaatgattttgaatgaacaaattccacacggttgatctaacataaaccaattattaataaaagaaacagaagggttaaaacgtaaaggcaagaagaaattgcactatatattcattaataccatctgatccgcaagcatgagaacagtcttcaaagataatttcctactgcagaagttgaataaatcctcaagactaggtcccagtaaatccatcaccagaacattgtactctccttcagtcccaaaccatcttacgtttggaattccagctgcaattgttaagaaatggtcagacaacaaatatatctgccgcatgagcacagcagcataaagccattatctaaacaaaggcaaagaaaagggtaagggccattacttcctccctgtaatattttgtacagctttgattcatatagcaattgaggatgtttcgtcttgatattttcctgcacaaaaagagaattatggatataatcactatgaggtcataatttacattctcatatcattatatgagcaagcgccaaataaaaggtaaacaaataaacgaatacatacactcagttttcaagaattaaaaggaaacgtctaccatgataaagatcatcaaagtagaaaagtaaaatgcgacaacattcatgctttaaagcaccaaaaaaacagatttcgaagcacagttaataaaatatatcactctaaaactatgtattccaagaaaactaatatattggaagagcgataaaaacccctaatgtgtataacagtgttctaggccaaggtgaacttgaatcatgattgatacttcacaaaacctttcataacctaccaaattcaagtcatcaacagcaatttggaacgaactattactaataaccccataccacagaaaaaaaaaattaatcaaaagctatgtcaatcggaagccaaattcctaaaaacagaatctggaatcaacactctaatttcgaaaacgaaaaaacaataaattgaattgaacaaaatagaaagaaaagaattacttacaagctttatcgcaacctcttcattcgtttgaatattagtacctaaacaattaaggggggaaacgaagtaacgaataataatcaaaacaaaatacgaatacagaaggaaaatcagaaaaggaaagaagaagaagattaaaatgaacaaaccgagatagatctctccaaacgatccactaccgatcttccggccgagtcgaaactttcctccaactcgagcatccataggaaaataagaaaatcaaagatcacgatcaaactgaagtagtccacaaaagataaccctaggcagccctaggaagattgttcagaaaattccgatggccgtagcccaaggattgaccggcactcgaagaattggtatgtgtagatatatcagatgaagaagaaaaggtgggtttgggggcatattaggaaagatcgtcaactttctctctctaggaatttaggtcatagtgagaagaagaagaagaagaaaccaaaggcatcgtcatctttctctctctacctcgccgtttagaccaagaaaaccggaattttgtctagccttttatggaaagaagaataagttattaattaaaatttaaaatttaaaaaataaaataaattaaaggagcttcttttttctttattgtaattaatatattaaattgaggtgacagagacggtaaaattaattttccagattattagagagagggattatcgtctaatttagtatttactgccagtcccatcctccccactctcagttcccatacaaacacgttactttatttcttttgtcgttttcttatttttgttgtcgtttatgtgttttttgaaaataaataagattactattgtagtgtcttgtcctctaaacttttcttcatattaaaaatttttcacgaaataaataaaatgtcataaatatctcctctagttaaattttatttattttttaatattttaattatgtgactataaattataagtataatgttagtacaaaaaattatttaaaatctttaaattatttgaaatctaaagtattgatattaaatatacaaatattaactttaagaatctacatatatattttcataattcattattacactgctattatgtatatactttttgtctaaacttgagttaaattatctttttattagtgttatatcaataaattgtgtaataaattgaagtgaatataactacaaaaggatatttacaaaaatttttataattcaagaagaaatttcgtaaaaaaattaaagtgacaaaactccacatgggccataattatgagggttaatcctatttatttattttttattttattaaggttgtcgtttatgtgctaagtatccaatagtctctcttcctttgccctccaattaatattaatatataatttataaatctttaatactcattaatagtttttctttttactagaaccaccaactctatctatctgctgaggtattatcctcaccctcaagtcaaataaatctttatcatataattcaaaaaaaaaaacatattaaaataagcaagaacagccctatatatccagaagaatatccatcttaaagtcaaaaataagttcaacatctacttttctaaatatatatacatctaaaccaaatcaaaatcatgaggcagcagtagatatgatataatatcctcaagtcaaataaggtaatctac

SEQ ID NO: 304090 - DNA, 1236 bp, Cannabis indica
aatagtcattccaccaaatgatggaaaagtcattccaatactttaaactgcaaccaaacaaaggaatataatgaaaaatattttctttcctttccattccatttcattacctccatcccaacgccaccttatgagggttttcccacagtaaaaaaaaaaaaaaaaaaggggttcaatgtctaacaattgaaacatacagggtttggtcacaaatttctcttatcaaaaaaaaaaaaaaagaggggatcagcgtcagctgcccccaatgtaggtctgaaacatcatttactttgtttcatgtgaactcatttggtacgccgtgtttccgtgttgtataatattgttggagtgtattccattaatattatttaatacaatactatgtttgatattgacttgtattaatagcttgagtaaaatttattatctttgccataaacttgacccaaagtccgacccttgtccaggtcaagagtttgggttcgggttcaaagtccgtgttccgtggtccgaagctaagtcggattctaggtccaaatccgggggtcaggactggagccagggtttggggccgaagtcctcaaccctggaccctttgtaaatattataataaaagctattacagatcatttgttatatatttaataacaacgattcatattgtattaaaatttatggtcgtaataatacaatacaatattttatccaaacgtagtgttacttgttatttaataccatacgacccttgtacaacctaccaaatgaatccttaatcattttttcagctctttgctaccagcagtattaattaagaattgaatttctgactactagggcagtgtaaagcataaatcagagctatgtagtatgtacctctcaagcacgttgggttttgcaagctcttgctgaatcttcttggtacctactaaatgataagatattgatggacatttgacagcagatgactgctccattagtaacctagctctccattcctacagatcagacaacaacattctaagctagcagtcaccatttccagatgcaaatttatagcaaagaacttgcactgaaagtaaaagcatttgtatgataacagcagaagttcttagtcaaataagcaacacattacattgaaaattgcttaccgactcagatggatagtcagttggcgtatatcctgctctgaaatatatgactgaaattgcttggccatctctgatatacaaaaaaaaa

SEQ ID NO: 304091 - DNA, 1871 bp, Cannabis indica
aaaaaaaaaggagtaaaagaagaacaagagagaagaataaaagattataagtcggaaatagcatagttagcctaaacaagcatagcgacgacatcaattttccatagtaatggccacatacacgatcagtgagccatcagcttgaagttccccttctgcatcaatttcagccaaagtcttccgaatacttgtaatattatgtgtatcgtaaagttgaggaacaaaaccttctactaataagctccacaaaaataactcatccagataaaaaatttaaaaagtcattttgataacgttgaagcatagaagtgttatttcccttcccccactcttcaactcacctatccatttctcttcctgttaaagaagaataaattgggcatgcactaccaacctgtgtcaattttctacccacattttttttaacaaaattgtatcttatcttaaaaatactactggtacattgacatgaaaaggatatctttctttcaacaatgaagaaagccaatgttggtcgtacatgttgcgttcatctgcttgagccacaaccataactgtagacctgaataaatatataaataaaccctctggaattaattttccatacaaacttcagtgaaagctacagccaaaagaaatagaaagaaggaacacagcacacgcatttatcaaatccaacctggggttgttatactctgtccaagcttttgccaatgcatctgcaaactgactagcagcagtgttgccaggaactcttttggaatctaagttaagaagctttccataattatcaagtaagctcctggaagatgaacagaaaatatttagaaacaccaaaccactagagttctcctaatcccaaatgctacttcacctgtgaaggtcgctgacaagactactaagaccagcaaatgaagaggaaattgtgttcatctctatttggaggagagatttagtctgttcatcaagcatataatctgatcgatgtaaacccaaacgtatttcctgcttaagtgataaaagaagatcacaaaaatttcatgttcatctgatgaaccaccccaagaaacctgagatgagacaagtaaatgaatatctacaatacagttacctctttcttgttgatatcaagcatcttcgaatgaatatctagaagtctcgaggtaaaggcatccgctttcttagttctgtgattcgaagatcatgatagtgttaatatcaaccgacaaacatttcccactttgagaagcaaagtaagctttgcttattggtattcataaaagaactactacaactgctaaatacttattacaatattaaaccaatcatgaataaagacaataataaatctatacacatgagattcagtgaatgggagaacagaacctggatagtgaatcttgcagaaattttgcatccaaactcactctatctactagctcattaaaaattggagctacctcacatgctagtttccagtgagtttctgggaatggcatgggcaataaagcgaacggagcatgaaccatgccaacaccaggtacttttcctgatctctgtccttgcaaaatacgataatccaacatcaaaatcaagtttatacctataatttaatacaatgacactaacatgcgaaaatcgcagctttaataaatgtgataataagaaaaagggttcaaagaaacaaacatccatattctaatttcattttcttgaatgagccttcctcaaaaaagaaaaagttaaaaaaaaatcaaaagatataacttttttttagttatatgctaaggttaattacttcaaataaggaaacgaattcataatctaatttctatgaaatcgccatgggcggagagagagagagagagaga

SEQ ID NO: 304092 - DNA, 3085 bp, Cannabis indica
ggtacattgtaaaattttcctatattatagtggtatataatatagcaaatttctgtttcaccccttgaaaaaaatgatttggtgcacccctaatactaaaatcctattggctttcaactttagtgtaatctttctaattgtgggctgccaaatagagacacatttttatattcctcttctctttctttatcattacttatttatattcacttttatattctttctctcttttttcttgcaattgcttatttttgagctaaaaattgaaaacaaataagtaaataaaaaaaaaaaaagcattaagagagccaatgctgcgtttttttttttttttacataaacctcattttacaataaattgttcatgttacttttttttcacattctctctccacctcattttatgatcaaaattattcatgaattaattgtcagcgagaactttataataattacttaattttaatataaaaattagtaaatacttaaaaatttattttaatattttaatattatatgtcttttagcaaaaaattaaggcatattatcaaaagtaggctttagattaataatttctcaattatagagatatatttgaattctaaatgtattatatatgttatatataaaatttcattttttttttatattttatgtccggtaatagtagaatgcaacgatttgactattataatcacttagatacggtagaatatcttaaaattagcgagcaagataattagacgtttagaatgtcgagataatgcggggttgtgattttgaaccattttatccctaagcttttaggttgcttcaaggtaaagtaaaaggcaaaatgaccattttaccctaagattattgaaggttgtctttagtgagataatattagttaatagtggaatacttcaaattttaataacttcgttaatttaaaaaaaaaaaaaatagatcattatccacaaaatcaagaaaccctaagtcctcactttcttcctctctagttcggccaaacaagaacccaagctaaaaccagatttttcttctctaatttctgaccaaatcaagggatttctagtagaattcaagattgtgttgcccaaagactacggtaagcttctttctcctttcaatttttcaagtgaaaagttaagtttatcatgcaatttttgagttttggtttctgttcgaattggaggtgtttggtgttattttcttgagctatttctaggttgcttgagctgtaatttgctggttttgttggtcataacatagtttgaacgcttttaattgttgaattatgcttgttgggcccaaaataggggttccaaaaagataacatagaaagtttgggatagttttagtcgaaataggatttttggaaaatctacagtagaaaatagtagattattttctcataaatggtctaccattttccctagtagtatcccaaaaaaacggcctaccatttttagagaaatggcctacctatttctaggaattttcccaaagtattatttttggtgttgtattgatatttagggtactggcatgctatctatcaatagagaaacttttagttttgagttcaaagtcactggaagtgatttagtgagtcacttattagttttacataaaatgtgatttagaaccttaaatcgttgagcagcagttttcacttatagattgactggcacacttgaatttaaaattgaggtaagatttgtataaagatatgcatgcatacatgtatagccaacatgttagtttatcggccagagtaccgagtatatcagcctgagtaccaagtatattagccagggtaccgagaacatttgctagagtaccaagtgtattagctagggtactgagaatatcagctagagtaccgagaaaggactgcagttaggtgtatgggtgcctggttacagttaagttacatgtttatatttatgtttttcttactgagtctatcgactcacagatatgtttacatgtgtaggtaagagaaaagcaaaggctgagcaccagtgagtctgaagctaaatgaagattgtacatattgaggtggttagacctggagtgttcaaatctttaatacagttgggcctttattttggtaaacgctaggcaacagcttttgtagtaaacatgttttataaatagttgtaaacttttaaacaagatcctaaaatatctatttgtatatatttatttaagtttatttatgaaagttttaattattcataattttttgataaacccttattagcaaaggagtgcacagtaattaagtaagcattgtagcgcgcctaaactagtagggcattataatttggtatcagagtcgccaggttgtcttctaaagatcagcgtgatatgtacaatcgtcatcagagataagctcgactcacggttcaataagccctttgcatgctcttagtagtttaaatttattatgcataattagaaaagtatgataagaggcatggtagtagcttgatagcaaattaagagcatgttaagtttcccatgtttgcagtaattaatttacaattttgatcactgcttgattgacctgacttgtgatttcacaaatatatcctatagaatggatacatgtcaaaacactagaggtcagggcaatatggttgagactggtggcaggcggggagatctaaatcctcttcatccccatggtcgcaacagaggtcgtggtaggttttttagaggtggttttgaaaatccaccacaggctcctcagggctgggagcaaagatttgtagagatgcaagccaaagtttaacagaatctatatttgtctccttgccttgagtgaatcctcaatacccttggtcggactcgctgttcgagctcttggtgagtaggtcttcctttttttctttagaaagagtaatgttgtagcatttccaagcagactgttggtctccctttaggcacctgacaccatgcttggtcagaagcttgatgcataggtggaaaattgaagtgactatttttaggtcaaatacgattggtcgtccttgttgggctttgtgtcctaaataaaactatatttcaatgtaat

SEQ ID NO: 304093 - DNA, 2293 bp, Cannabis indica
tatttttcattaattagaataagtagttaaagtcgagtgtatgcatgttgaatagtcattattctgtattatttttctaacaaaactaacagagatctaattcacccaaaatagaaaaattaaatttattattttctatcaaaccaaccatctaatttttaaaataaataatgaagggtggtttactattatacctgtaattacaacatcagtgagattgattccaaagatgagactgctgaaccttccaccttctgtatcccttcctcgaccatacgatggtaatggttcaatcactggccaatcattctcatcctacatatttacataaaaactccaatatataaatcatgtgtcttgttttaataaattttgagtttcatggcaaaatagcatcttttttggagttataagcacaatttcaatagttgtttgtaaaatggtttgatagctagtcagaaaattcagacaaataatccaaaagtttagacagctcaccaaattaattttcactggaaaaccaattttacaaaaaattattaaaacttggacacaacaccaattaacttcaaaatcaatgtagccgaaatctaatcatgtaatatggcccatattaagattaaatatatcatcacatcgcatataacatggaccccatcaaattgtgattcccacttctcctcctctcaaattacatcgtagctctttttaatgcttctttaattaaacaataaataagagcacatttaaatacaggcggtggatcaaagtgccgtgcttataatggttatattatattattttattcattagtactcaccaattagattggtagatatactaattaataataataacataacattttcatatgacaacatatgattctgttctgtccatcaggtacatctaaaagtaactcttttttattctcctaaatatatgtagtaaatgtaatttgtgtgtaaataaatggtaataataataataattaagttaataacctgtgaagcaagtagaacagcgtccttgtcaagaaaaagagtgaaatggctagtgagattgaagcttccggtcaaccatttcccaggtggaacaaagagtaaagatccaccgtccgatgagtactgactcagataattgattgcagcctgaaacgacaccgtgtttagtgtcgttccatcaccaactcctccaaaatctgtcaatgaagcactgtgtgacctgcaattaatggatgagtactcaagcccctccattgatgagtaccgcacctttgtttgtattcggcttgaaattaccccatttgtgctcagcaaacccaacaaaatcaaagctaaaactaatgccatttcaatcagctgtatctatgtataacatatatattcaacccccaaaatgaagagaaacaagaaaagatgtagttatttggatttactgaaaaatgaagaaaattaaggagtgggtctagagaagaggggatttttgtgaacctgacttgttattgggacagttctcagatgaggtgagagttgggagagaccacactttacaaaagtagagttattggtcttttggtatttttttagcaaagacgtctaataagctatatataatattgagcttgagtagtgtattgattaatttatttaaaaataaattaccatttttctttactccatggttttgcttgactttgaaatcactaatttaattttagaataccttttttgacgtaatggacgtgagtatgaggtaagaatattatgtgggcacatgtagaaaagtacatatatatgatttcaccggtttcatatagctggttataagttttcaactatgcacgtcaaaagttaggctagttttagttttattggttgtgataatctgttctgttgggacagaattggacttgatcactcgacccccatggctcacgtctaacgcatttgtgtttgttttgtttagggaattgttatgggacattttatgactctcgtacgcacaaacattttatctatattgccgacactgtttcaaaataatatccatattcttaagaacctacactataccaattgttatgatttcagtttcagacattaaatcttgcaatataattaaaagaatttggagaaaacttcaatttctaatttatgtttgctaaacaagcctcaaatcaatcttttggatctagtttttgggattaattatttttttcatttatttagttatactagagaaggcgagtagaattcggaacctcgatccttttttaaaaatgagtgaaaat

SEQ ID NO: 304094 - DNA, 1370 bp, Cannabis indica
ttttttctgtctgttctgttttgttgctgcaatactggtttctgtagtaacaaaattacattctgcttctgcagacgtatacaattttatattttcgtatatattattgacatttgcaaaaactcggttcttcaaacatccaatgattacaaaatctgaagggttttatgccatagttaccaaccttacattgttaataaggcagtaactatggtctgaaagaaccccccatctaatactagcctctgtattcgggaaatgatctaaccaacactcattggtaaagactctatcaagctttgaataaattcttgccccctctcagtgcttgttagactaagtaaaatgcaatacaaagacttgaactcatcaacttggccctaggcaagccaatcttgagcatctaggatttctgaagccttgacattttgacatccacatctttccttgtaagcaaatatggcgttgaaattaccaaggataatccaaagattgttcaagtggcctaaagtagctaacttgcttcagagatcctttctttcattcaaagaatttctaccgtacacagtcgtaaggtaaaactcttccttgaacccggtcatctttatgttgcaatgaacaatttgacggtcctacaaaagaacctccactttgaccaacttttatctatccatatcaacaaaattctttacgaaataacttgactggaataaaagttccaactagaaaaatcattcgaccaaactaagagtcttctcatggttgattttagtcgcaaataaatcaccaaacctaactttattttctttatttagccctctaacattccatcctaacaagttataattatttattagaaagacacttcaaaccagcaagagccaccccccatcaaaaaatttcaaaatatcatagccattgctaatagtagcatttggctaagatcccatgacatttcagtgccctttctcattggagtaatccaattccctgtctcagaatcaacaaaggcagtattcgtgttttggatcaccaaactcggctctccatctcttatagaactcccctgctattctggtttactattgtctgtaactattatatcagtagctaccccaggaactagtcgttttctgtattaaaaacagcatcagcttcctttctcgcaccaatacctggttgtttaactactccaaaatctgcctcaattttttcctcagttgttttatactttgtttccccttgtttcttctattccattttgtgccctaaataaaacccatttcaatataatcagatttactaattaataaagatcagaaatcaatgattatatgttcaaaagtttaattccttgatttgtcagttca

SEQ ID NO: 304095 - DNA, 1406 bp, Cannabis indica
aactaaattcaaagatgaatggattttagattcaggatgtacttttcatgactaatatagatccttactttctgattttaggaagccaaaggagggaaggtcatcttaggtaacaactaaacatcccacattgaaggctcaggaaatgtgagttttaagatgtatatatgatggtattgtaagaactcttacatgggaaagatttgtgcctaacatagcaagaaatttaacttctataagtatgctagatgaccttggtgttatgagtaagattgaaatatgtaccataaaacttagcaaaggttctatgaccataatgaaatgctacaaggaaaggggtctatctacctaaagaaagaaccaatttcaaattgtcacaacacaacagcagaaacccttgaagattctaaggcaaccctatggaatagaagacttgggcacataagtgagtagaaatagatgaaggtaaacaagctgaaccaacacgagagactagaagtttcttacaatatccaatggataatgtcttaataccattgtagaccataacagaataaaggttgtcaactgagttggtagcatgggttgttgctcctatatctacaaaccatcttaagtcatcaccaaaattaggtaacacgtgagaagaaaaatattaattttcttggccagattctagttcagtgaggaaagctctaagagtgtttggtgtagattttggagtaatctaattttcatcaaaaagatagtgacacactaccgctgtgtgacccatcttaagacacacttgacaaatcaagtgagaatgtggagtaaaacctcaaccattaaagtttctacgatttgcaaactgagaaggtctcgagctggaacctctagagttgccaaaggtagagatatctttgcctatcagtacttatttgtaccaattattggtaggtaaattttgataatgttacaatattgcataagtttgatttgttaccattaaaaataagtacttaaataattttacatacacatatataggagggaaaaaaaattaactttaggtgctcatttctccttctaattttattgaaaattttaatatttttattaaaaaatgttgatgtgtatcattacatgtcaaaattagtcctacatgtcagtatacactagaaatctatcttacttttcattacatttagggtatgtttggtaggaagaatggagaagtaaaaggatggagaatttaaggagggagagaatagaggagtggactaatcctttgtcttgtttggtaaggtaggaaggagagataataattttcaatccttttgtttggtattagaaggagaattgaaaggatggagagtgatttgttaataaaattactattttgttaataaatatataataggtat

SEQ ID NO: 304096 - DNA, 1537 bp, Cannabis indica
tttggttctctataattacagcttacgtgtaaatagtgagcctatcagtcaattttagcccaaacaaacgtgaaaatttaaaagcctaaacaactcaactaccccttttttcaaaaaggcaaggcctcaattaatatctacctattctactttctcagactcttaccaaagcaatattccacaataagagattatatattacaggcttcaacatctatcaattattacaagacaaaagtccgaatctttcaggataaaaacgtacggacatggttaaaaaaaaaaggttgacctcacaataaatcaggcattcaaccaaaattctcaaacccattacagaattattaatcatcaaatcatgaacaaacagcatcaaaattagaatgtcaacaatgtcataatctacaaaaatcatcaacttacggcatcacggagctcagttccaagctgttgaataacaagagcgaaactacgagagaccttatgaagcattgagtagcagaagccccaatgaggcacctgagggatctgtttctcggcctgcctggctgccattttaagcttcaaaagtgggtaaaagtcatctgggtgtttcagaaacgctcccaaactccccattgtttggttatttctgattgtattagatctgaattacaacaactcaaatctcaaatcactgagactacaatggcgtgatatggtccaatgcagcgtccgtccctgaatttatgtataaaatattaatcaatattatatatatatgtgtgtgtgtgaaaggagtattgttgaagaagaagaagaatacaaaagagagaatccagatagataaaagatttgaaagactggcgtttgaggttgagctgtgatcaaatatatatatatttatttatggtaatatcaagccaatgatcttcttcttcttctttctctaaattacactaataccctttttggtgttcaaatacttttgcaatatgtctatgtccaaccaaattaaccacccaaaataaatcaagaataatacaaccaaaatatttaggaaaattgtaagggccattcgatgaaatttcgtagtctaattttttttatataatttgtaattatttaagatattttgtaagattttgaaaaatttaaaaaagatttaaaataaatagggttcaaacaacatgttagagcatctgcaatggaaatattatgaaagatgtttgatgatatggatacatttttagtatttttcaattgatcattactattggaatgaaaaataatgctccaaaaaaaatgttataccataatatcctttatatcttctttttcttattttattattattattttataatttagtaagaaaaaaattttgaatgaaaataatctttattaggcagaaatatccgctaatacaaagacctgaagagcaaggggaacatcgctctcagtaaaacgatgacctgaccaataacaaacaccacgtgtcatacaatgcgcggctttgttaacagaccgtttaacatgaccaatagaaacattactt

SEQ ID NO: 304097 - DNA, 3710 bp, Cannabis indica
ccggtttcaacatttggtagacacgattggttaatttaaaccttttctgaaagtggtatgtatacagttaagagtggatattggagttctattttgaaattgagatggtggcaagtgtcagcctcttgtagttcctcgcgctggtggaagtatttctggtctctcaccatcccactcaatgttaagaattttatttggaaagcgagccttaattttgtgccttgttatgctaatctcgcaaggaatggcatgaagactttggatgtgtgccctttatgtatccaaaataatgaaaccacgatccatgctctttggttttgttcttcacctaaaaatattcagaaaggctgggttgttaaagggttggacactttgaaaaaggcttcttgtttttatgaattgcttgtgggttgtgtggatgtcctttgaaagcatgatgtggaagaatttcttgtgttatgttggagaatttggtatcgtcgcaatacttttgttcatgataataagatgttatctgatgagttgattaatcaatgggctttaagttttctttggcgttatcaagatgcttaatctaatttggatctgaatgctcatgtgaagcaaacagagactgtggtttggctctcaagtggctcgaccaagactttgaggtttgattttaatctatttgtggatgcaggtatcaatgaggataatagttgtatgggtcttagggcggtggtgatagatcgtgacggggtgattttgtgttctgtaagtgatctagtggcagcctcctttcatcctcatgtggcagaggcagcaactctcttaagtgggttgttgttgtgtcgccatttggggtataactccaatactgttttctcaaactatcttcgtcttgaccaagctattaatatatcagagagagtttgatattattgttcatgatattttacatatccggctttctttctcttttatttctcttactcattgtaaaagggctcaaaatgctttaactcattctcttgtacgcttggctttattcctttacttttctcgagtttagtgacctgatttaccgccttacctctaatcttgactatcatgtagtgtccttgattttgactttttgccttttaataaaaaatttcttcaattccaaaaaaaaaatatagtatttacccataaatttactttttttttttaagtccataaattcacttaattgttctagttttaaaggaacgcgcattacgcacccagttgcgtagattagaaaaataaaaggccgttccccgtaacactacgctcatctcctcaccctctttctctgtcaaccattttcagaccagttttcttccaaaccctcaatctcgacaaaaatgcaggacaagaaaccagaaaccgcaccaacgccacccaaaacccctaagaagactaatcttctggatcaccactccattaaacacatgctcgatgagtctgtttctgaggtcagtgtatttttccctttccgatctcgtttcttatattttctaggtcaccaaacaatttgatattaaaattctatttgttgactatcaatttttctttcttctttcctaatttcgggggaaaaaataattagatcgtgacgagccgtggctatgtcgaagacgtgagactcagtaatgttcgattattgctcggaactgttatcattgtcattgcattgttcgcccagttttacaagaaaaagttccctgagaaccgtgatttcctcattggttgcatcgtgttatatccttttctggctatgcaatttcgatttagctatacaactaatttacatttctggttgaattaagatgcttttgtcttgatggaacataattttaaacctgaaattttgataatgtctagatgaaaggggtgagtattataaatatatatatatatatatgtatatataatatgattagtgattgattgaatgtgttaaccttgacgctcgcacatatgtagtcttcaatgggttgttgcagctgatcatatacacaaaggagaagaatgcgatcctgtttacctatcctcccgtggtatgtttacttcttgatagtgataccatttgaattcaatgtagaaatggctatctaatttaagtttgattggaattggattaatgcgaaaagaaaaggtagaaatataatatatgcatatttgagtctgtataaacaggttggatttgtttaagtattacatggtccttgaaaggtgccttatttgaaatttgtgctattaataatgtctggtttttctgtaataatagtataatcgtatgtttggcttgggttaggtatttgtttaagtattctatgatcttttaaaggtgccttattcgcaatgtttgctattagaaatttctggttttgctgtaacaatagtagtcgtgtgtttggcgtggttgggttaggtcatgtttataagttgcaattctccttcatttgctactttcatgtttcaaggttccactgccatctcatggttgaaagttttagaatgcttgcttgtcaatgttataccagatacttttctacttggaattgaaagattttatagaattatcctttattgtcttgcaagatttcattagaactcgaataaagctacataaactttgacaactgatatttgttatcatgtgatttatcagtcctacaatattatgaaatgttaaatcccgtggaatcgagtaatattagcaatcaaaccttagattcaggcccttttatgaggtttattgttctcatatggttttctttttttgtccttttttcttttttcctactctttttttataaattaacatatcactaaaactggttcagttattttcattgtaaacaaagagaatagaaacgctcatcttaggattctcacccctttccctccattctctcctcacttacacacgcatattggatcttaactaattaagctagctgcacatatgaatatcattttcgtagctgctcacaaatttaaattgtgtatgaattaatgatgtcaaagatcaccttttttattttctttcctttgcagggatcatttacaagcactggattggagatctcttccaaactaccaagattctctgatatgtacacgcttactattgcaagtgctgatcccaaatctatttctgccaatgaaccagtagagttgacaaaaagtgtaactaagtggtctctctctctctctctctcgtgtgcatttatgaatttttgtataattatttctgctttcttctattgtgttaagagctcctaatttatatcatattgtaatttacaggttcacgaaggatggggtattggttgagggcctcttttggaaagatgtggaagcattgatagatcaatatgcgaaagaaccaaaaaagaacaaatgatatggaagctctaaacttcacatataggacaacactggtttgagaagacgagctctagttatagtatcatgtaatcacagatgttgtgcaggaactatctgatcctttacattggttattttagaactatacctgttgaattgaagtttactgtgttttcagaagacaaatatataagatgagttttagtcagagttctcactagtacaatgtagaaaaggttagtgcatgtttggcatcataactaaaaaattgttttttgtttttaaaaaacagaaaattgtttttaaaa

SEQ ID NO: 304098 - DNA, 1721 bp, Cannabis indica
aaagttattattattaggagatgatcatcatcatcaagaggagattactactattaatactagtactaatttgaggtaccttttcttgcaattaatcaaagttgttgtagtactacaccaccaccacaacttctaccactacatgagtattttgcaaactcatcctcggatcaccatgatgagggtataaatgtaaattaccatcaaattaataagggtaatttatttgatcatgtggtaacaacacccaaggataagggtcttgattttcatgagtatttgagtttgggaattaataattataataataataaagagaaaataataagtacttgtgttcatgatcaagaagaagatgatgatgttgaagtactagatttggagcttcgacttggctatcatcataagtattactagctagtatttttgtttaattaattaatatatttatttatttatttattattatatgtgttttttatatatagatattattaattatatgtgttgttaattaattagtagtagtagtagtagttaaggtatataataaacctaatccttttttttcaattgtttattaattattagtatatctaattaatttaagtgattaacaatttgattatggtttttgtctaaaacaatattattttaagatttattcaattttgatgattactttttagtaacaatatatggatttttttaattactaattagtataattaattagattttttaacatatatacatatgttatgtgttagtattttttttttaattagtcactaacatatagcttattcttttctgagaatttctgggttttgagggctcaccaatatgcctcgacctgctatgatatgatatttctcagctaattcaaaacttcaataattaagccaaaattattaatcaattggaaatgaatatatatgttaaagctagctagtcatgatgtatatatatacttttccatgtcaagataatatattatttaagttccacattctattaaattaaccatatatatatctttatgcattgaaggggtactatatatacgcattcatatataagtccacatatatatatatatatatcaatttaaatatttatactaattattaattgaatcacatatcattgtcttagaattaatatgtactgcgctaatgtaatgttgcttatatatgaaaatcatcagctcgagctatatatatatatatagtctagatatatatagagagtttaatttacaacataaaagagatttcaatatctaaaaatcttatatttatgcatgaaattaataatttgtaagtattattattattaatcctcagaaatataataattatatattgcaatattgactcggtactattgtaagttgtaaaatattaattcagaaatattaaaaaaataaaaataaaaatcacgtaacgttaatacattatttggtgttactatataagtaatataagatcttgccttgccggccaagctaattaataattttaaaacattcatatcatatgtcttttggagccaaaacgaaacttccacaataataatcacaaaaatatttattatgaccatgctctatgtatagacatgtggttagggttcacccttgtttttggtatccaaaataaaaaagggtttgggtaaatactattttggaccctctgttttacaaaagttactaattggac

SEQ ID NO: 304099 - DNA, 1003 bp, Cannabis indica
ctaatgaaagatctctccccattttaaaacataatatttaaacacaaattattattaatttagttttagtcacaacatgtattgtgattaaaaacacatttagccacgacaaattgtgacttttgtgattaataatatctttagccacgaatttttttgtcacaacattaattataatttttgtactttttgtcacaagttttattagaattaaaaataaaaaattttgtagtgttgtcgtgcatggattgttttttttctactatataattacacaaaaatggatcaagttggccattttcaactaaatatatatgtctatggaatagaattgaattctatggtggacgatattttgatttattaattaaccggacaatttgtattaggtggggcctaaaatgccaacctttgtggggtcaaaacttacaagatgggatggaatttgttagggagtgttctatatatataatctctcttctgtctccaaagaaatgaattgggttggattcgatagatttgcatgaaaataattataatgtgcaatgattagagagattttggacacaaagaagtgaacaaatactaatgccatatatataaacaatataatgttggagtaaatatatcatttccactccaattgaacaagaacaagagaataaggcccaaaacttttgccaaaaaagtctccatctttatgagcagaaacttatcttgaaatgaccatttttaatgtgttagaggaagggttactacaaaaaatcttatttttagtcacaataaaatttgtgactaaaagtaaaagaattaagactaattataaattattattcctatattgtgactaaaaggtccatggctaaatgtattagtcaataaaattacaatttgttgtgactaactatgtttttagtcacaatatttgttgtgactaaaactaaattagtgacaacttatgtctgaatggtatgttttagtcacaaataattttttgttgtga

SEQ ID NO: 304100 - DNA, 1521 bp, Cannabis indica
aagtcttcatctcactttcttacagctcattattacaattatattttaatagttgccgaaaacctcggtcaacaataaccataccataaatgataataattaaattacatcctttcctataaaggaaatcgccagttaattaaccatagataattagatatattttagttaataattatatggtaaacttttcagcttgccggaaaaatatttgtcgtctattagatttttttgtctttagctgtcatttaattttagacatgcatctatattggtctataaatagtcacatgatcttaaaacattaaacaacagactcacttcgtagagtcgcatgtctatcttattataactaaaaataaataaggcacaagtatagataggtatctttaagtattttacctaccatatttttttactgatggggacatatgagggattgaggttcaagcactttgtattagtgtcatctgtacaccatgcaatgggtttgctctcttgttgccacttgttgatgcagtaggtttgttgttggcaggttgagacattgttagttctctacatatttcttcatcaagtttattgagtgagaatggacagttacatgtagtgtctgtatattacaaatcatagaagagtggatccaggctcggtcctgggcataggtgcactaggcatgtgcctagagcccacctagcccagggacccaaaaacaattcccttttaaaattacacattttgtttactaatttaaaaaatatcacattttattctaaataagggtccaaaaatattttttttcttatgacccactaaattttaagagcggcactgattagatcgttgtagtctatcatggtgcgtcattttcaggttttggccagagtgcgtcaaaaatcaccatgttggtggcaaatagaagtttttctagttgtctaacttgagggttgcccattacgacaagtgggtgctcacttgatttatgtattttgacacttaatgtgaatgataggtgcagattgacgtgtagccttagtagtaagatcataaacatcacattgggtttgccatgttttcgctagctgggtgtaaccctaatttctaggaacaccacttgtgtgtttttgtaaaagtttataataataaactcaactttaaactctaaaaaatatgttttattaaaaacttggcatttaatattaataaattacacatttatttaaactttaattttacaatgcggatccctattttaaactaaacattttcatttacataaataatattcaaataaataaactaagtaaaatatcacaatgttagacatttatatgtataaactgaaatatatgtatgtgtatattaaatacagaataaacgaatatatatactatataacttaaggatcgaaataccttcagctattgattcttgaactttaatcccaaaagcttgatctgcaaaagaaaccgattgatgtgggtaatcgggcttcctcgctctctcaactctctttacatg

SEQ ID NO: 304101 - DNA, 6538 bp, Cannabis indica
tctcaatataatcttcgtaaattaataaattatgctatctataatcagtcactaaattctcagtagataccctaagaaagatcataatcttacttcgttaccaaaataattacgtatttaataaaatatgtctatttaaatattattttattttctgagatattacaataaacaaagcaccttaaacccaagattaattgctacccagtcatctagttgtcttaaaatgaaaaacaaaaccaaagtttaaatactccttggcccatcatttttgtctctaacaaaggcccatggaccgaacagatatataaaaaaaagaatgtctcaaatggcaggggtcctgggttccttgtatagatcaacttggcctatgggggccaaaggctcaacgttctagacaatacgagtttcgatgcttttgttagttagaactatagaagtgattgcctcggggttttctttggccacctaactcacacagtattcacaatatacctctttggaatcatcgaggtaatcaaaatttcctttggggttttccttccaaaactcctaaaaacctctaaggcagtcgtttgtagattgtcaacctccttcccgagctcctcttcactggtctgcctggtccgtgcgtcctcttccagctttgtaagaagagagtagagactctccccctcatctataagagcattgacatccttggacaaagcctccttgtcaacctcaagttgggcaggagaagctatctcttgcatctccttcgtcagctcctggactcgggtattggtagcaaggagatttttctgcctccccgaactcattcctcatgtcttaaacctcttttctagcagtatccacctccatctgcagtgtgttagtggtagcaaggttcttggtcgcggtggactttgcttgcgaataggcataagccatcttcaaattgacctacacggaaaaatgttaaaattcgagctcaaaagagagaataaaaacaaagaaggaaatagtcccccgagcagcctccttcaagactccccccatgacaagttccaaggacagctcattatctgtcctagatagctgataactcacttcgggaagtgaccgatccagataatacagtagcatgtccttgcccttttttgcctttgtgttgagcaccacgaccgtcgaagaggtcttagtctgaccagacccatctgagctcccccttttggaactgtttgattttgagaccttctagactagagggtcgacaacacatcgttccttagagaggtctattacttcctcgacactccccttctctttggacggagtctccttgcctttagatctcttgggcgggggagtctggccctagctgtaaccaacccttttcttcagagcctgaagtaccttctgggacatttcttcacaaaccaaagaacagagttagaagcaattgtaatataaagaatgtcatgaaagtaataaatggaagtcagaaatagcctgcacgtggttaggagcattttcctgaacaagcaaagacggagcatcgtcgtccgaagagtcttcctcctgctccatcagaacgacttttcctttccactcaacaagggcggacgaccagacaagcatatcaagttccctaatcctcatagcctgctccactagtgcttggtcacttgggagagccttcttctgttcttgctcggcttctcctgctctgtcaccccaacctagctagactttgccttcttcttctccttcacgggcctcggcacaaagtcccctgggaagagtttgtacttaacataattagctttagtggacagcagggtgatgttccaagcaacatcttacagctaaagaattctttttgccctctccctgagccccaatgtgaaaggagggcgacagtacgagggaatttgctgtaactagggtgacggtattcatgccctgaaaaaagtagtactcatccacaaaatgtgctattttgttgacatcgctgtccatagtgcccgttagccacttctactcgagttgagaaaaatagaaataccccgacctgctctacttgggagttaacttcaggtcgaagagccagttggtgtcattttgggagggctcgccccatcctagtgaggcataaaggatgaacaaagaaaatagatatttgatgcccttcagagtgatctgcaatcctccttaagtacagaagtatgagcagcattgcaccctgcttagaatgagcgccagaccaagcgtagtagccatccctacgactagtttcccagtgatttggtgagggagggaagcatttgacatcctccaagtagtcgtgcttttctaagttcttcattttttcctgggttactatggaaggaggagaaacccaccgagctcctacagcaccttgtcttctctgaggaacaacctttttgtattcctcgtatcgtagtcttccccctccaccaaggtttcactggccttaaacacttgttctctatcttcgttgaacccaccaaagggcagcctccgagttgctccctcctcctcggcttaagatggagtatcaggacggacctcgccttggtcctccacctcttagacatcagcctccccctcgatgtcttcctctttagtagtaacgcgagcctgctctgcactaagcatcgtggcaagtcgagctatgtgagggttggtcaaagaagatttctgcactatttgtttggtgcgagccatcatcctattcttagatgggtccttgttgttatgcctagttattttcacgtcaaaaatggtagtaggtaagccttcagcggcaggacttggacgacctataggtagagtatctcttgtgtctggtaagacaatatatgtccagttggacgataaatattctctccaacccttcttgagctcctagataaaaagtttgtatccttcaccttcgatctggccgggataaaaatgatgttgcacctcaagttatggagatagagtatgttcgctgcttatctcccaatcttcaaagattgaattggagagaccgacactggatgaagacggactagcatagagatgtggatgatccttgtacagaagaaggagatcttggtagatattatgtttgcttcccccaaaactcaccagatttcatctacaaaaggtaggacacaagatgagtatttgggtgggataacgaacacaaacagattggttataccgaccaggtccaatcaaaggatcaaaaataggaatttttcatgacattagggtttacaatgcagaatttcaaaacatcaaattaagggttaattttcactaaaccaggaatggacaagtgaaacagaatatcattgaatgaaaatcaaagtacagttataatcaagccacatggttaagcatagtcaaaatctcatactcctaaacctaaattttctaaggttttcctagaacaagttcaagaactatcaagttttctacagtggaaacctagaaaatcaaatattcaagcataaaagaggaaaaagatgaagaacttactcactgtttgaagctctaaagttgctcggatggtgttgttcagtgctttttagagattcttcgaaggatttgagaggaaaagattttcttgctctgaattcttcaagaacgaaaaatgctaaaaggtgttaattagggattttagcccgatttataagctaatttgtgaggtagagcatcatttcaaaatttgatgaataccttagtttccccccaaaaatatacgtcaagcactcaattaattgaatggtaactgtcaaaacttgttattttttaggcgtgattcgatgcgtatgtctgtttgcattaatgagcggaatattgaagagaccattggtcagagtcacgttgggtcgccaacagatgctttgaacacgtgccacccgtccagataaggatccagaccgagcgaagtccacatgtgatctcagaggtctcgcgcagacttgggggcaaatgttatcccatttgttacactatgatgtcgcaacacgtacgagtgacacatgtccaacattccttgcacctaggcggagatgagtatctcgaaaaaatttcatgtagcacagtaaaggggagactatccgagcagagaacaagtttggtttttcaaactatgtaccaggacttgactactttagaatggtatcgtagagtccaagtacgaagataatccctacaatcatgagattgaattagagggatacgacaggctgtctcaatcccccaattcatttattcaattatgtgaatgttccttcctattatagaaattgtaaggaaaaggaaaaccttccctcattcattaagcccctacaaatagtgatctagcttcactgttatatggatcgaaagaaaagcttgagagagagatctaagagaaatactcaaagatttcattgtaagagcttcgagagaaaaaacacggtgttctttgttctcaagttaataaaacctaaagggagtaggctattaccatattaggggccgaacctcttcaaaatcttgtgttctttatcacttattagttttttctctatttttattacatttgtaatagcttaataattcactcatttttaatcttgtattcttttttctcaagttaatacaatctaaggagagtatgctattacattttattacaaaagggcctatatggtttataacgggctcctcaaaacaaaatgcaaaactgagtaccacactcctacaacaatgattcaaccattaaaaatctgatcattcattattcagtcgacataaatcaagtattttcttagccctagtcaaatatctcgatgatatcattgttgcaactaacaactttaacgggcttctcttgatgctcaattcaagtctaaagaccttggtgacttaggattcttttttggccttgaaatatgatgttgtgataaggtatttccgtcagtcatataccattcacaatataactcttgcaagacacaagttatggttgtgctaaacatgtatctactatagtggaacttaacatcaaattaggcaaagactcaaaggaacctatattttatccaactacttactggagtctaataaaaaaaaactcacatatcttacaatctcaaggcttgacatcagctttacaatttacaagcttagccaatgtctccaatgtccccaacaaccacatctcactgatgcatatcacattctatagtacttgaaaggaacactaggccaaggccttttcttctatgcagatgctcctacgcctccacgattgtctacttttgttgatgctaattggatataattgtttggtactagacgctccatctctagctactgcatatttcttgacaactgattaatctcatggaagtcaaagaaacagaaaatagtctctcgaacttctgatgcagctgagttaaaatctcttgccaacatagcatgtgaaataacatgccttaccaccatcatcagggacatccaagtcaaaatttccactcctgcaagtcttttttggtacaacaaggtagcaatacacatatcagaaattcggttgtccccgagcgcaccaaccatgtagaaattgactgccatattgtttgggacaaactcaccaatgccctcatcaaattgaaccaggttgcataaaaaacaaacctagctggcatcttcattaatcctttgttccctaattcccacatcaatgacataatattcaagagtggtgttaagaatctttacactccaccttcaaggggcctattaagattagttagattcttctatgaagttagcattttctgttatacactttgttacacaatttctcagctcttgtataatataaatacaaagtccttctccttgtaccaaattgattcagatacaactcaataaaagatttcctcactttcatttcctctctgttttactaatagttatagttacaatatcgtttttgtatgtttttttttaaaaaattaatagtttatattgcagaaaacagttttgaaatttttggaacgtgtgtagtgttgggattttatgccctaaataaaactcatttcaatctagtctggttttttatcaatgaaagattagaagtcatttatgtttacatgtagttttcatgtttatggtttaatatatacaaaatctgtaagtccaaaacgtatggtcattcacaattacagtaatgtcaacacaggggaatgtggttgtgattatatgcttcaaaagacaaagtccctgattcatcagtgcaatggatttacactgatgtgataatcagcgatgaagtgtacttacactttgcataagtgtaatgttctttccagaacattggcaaagtatgctagtttcggatgcatggagtatacattggactgggaccgatattgatcttggtaaaaatattataatcttaccattgtatctttctaagtcaatatcacttgttgatcttagatcaaacgatcttaatcatgacatgctttggttcaatctcagg

SEQ ID NO: 304102 - DNA, 1648 bp, Cannabis indica
  modified_base (1601)..(1601): a, c, t, g, unknown or other
aagtatttataatattgttaccttttttggttaaaagtgaaaaaaatccttattaattttcttgtgttatttttactatttattattcttatgtatacgtggtgataatcatcaattaataaggttccactatattggctaaatttcaagttaataaagatattttttttaattactttcctatttgatttgattaagcaacttaccaaccaacaaaaccagacaatttttattcatattttgtttgcccacaataagtttttagcatttcattttctaaaaattaattaaaaaaaaagtaaacttgtcactttctacaatccaaatcaacttgaggccacacacatatttttaatttttttattttcctgaacaaacatagactctgttttggttcccttttcagtcaaaacctttaaccgggtttagctgaacccgtcaacatgggcggctcaaccgtcctcacattcttcttaaaccttttcttctcagtaattatattagttaggaaaacctgaagattaataacactatgtaacattttattatttttataattttcttaagaaaacaataaattacttcctttattaaaatatatatatataaaaaaaaagaggaggaaggaaagaagttaataccttcgtttgttcttaaaaaggaaatagagtacaagatgttcaaccttggcttagtttgaagttcatactaataaccattctttattttatttatatatcttttcattttctttattctaagtcatagataaaatcataagaagaagaagtaaggcggaggaggaagaagaaaaagatcatgtctaatgggaaaacttcatatttgttcatggtggttttcatcttcatgttagttcttatcgcaggtaccaattcaataatattcatatatgaaaaactgtttaccttaatgaagtctttgtacgttttctaaaaactatggttttgtaaaatggtgataagctagttttgtgatactaatgactcaggtcttttaattatttatgttccaaatttagatttccgtattagtagtttagacaaattccttgcttttttttttttaacaaatttatcctcacaaaagctgaaacatattgatcaagagatcatacataagatctctcctaaagattaaacggacaaattattcaatttaaagagaatatgataggctaattattaatgctcaaatgaaagaacttgtgattagtgaagttcttatacagattttaatagagtaatcaactcgcctgagttctggaactgtattgttgcttttctttaagattcatgttttattttcactttttctgttccagcgtttagaccattggatgttttagtgttttcattattatttgtattctgatgggggatttttgattctagtagcagtttacatttcttttttttttaaaaaaaaaaataaataattttgctctttgatttcaaattttgggcattttgagtatttttagtgaaattttatgttttttcttaagtaaaataaataaaatctttctggggaatgtgaatttttgtttagtaatgaaattatgtgtttttcctgttaaaacnttaataatatatatatatatataaaaatatatatatatatatatata

SEQ ID NO: 304103 - DNA, 6170 bp, Cannabis indica
ttattcttgaatagattattcttaaatagaggttctactgtaatacctattgcaataactcaagaatctaaaaaataaaaaaaaaaattatttacagaccgatttaacaaaatataaaaattaacattactaagattattaaaaaaattattatagtcaaaaactaacaaactaaattctgatatataaattagtttcaaaagcttgaatacaaactaacctgtttgtttccaactcatcgcctctttgatactaataatttcagctacctacggtgaaagcttccagaactcttccccattatcacgcgctaaacaattcattccaaactgaccaaccaattcaaacaatgctccaccaacatttaccattattattattattatacattctttgtatggaaactaacccaaataacattaaaaaaatgtcatagtgagagttacatatgaccagacataacaagcaataaagatatgatcacacatccatattttcaacatattttcaagctctcaaaaactccatattttgattcacacatctccttattatatataaacaataaagatatgatctttattctaaagactagtgctttattagtttggttttgtgtatgcatattcattcaagtaaaagttcagaactttgttttgttctcattactctgtaaaggtttaatctttactcagtgttatgatggaagtgaagagggaaaaagctttgttcaacaatggagaatcatgtgtagtcgatattcgaaaggtagtagaagctaaagagcaagaagggtcttcttcaaatgtctcccttgctccacatgagactcttactcatcggaaaactcttataaggtcagtctttttgaaaccgaaatccagattcggagagacctcagctcccattgatacagccatggttgaagagcacccttcaccaggccttgatgactttgaggagacttatgaaaaagttgagatgaagaaagagaagagaaagaaattgaagaccgaagtgttggttgagttggttttgtttttgatcttagttagttgtttggtttgtagcttgactgtcaagaaattagagaaaacaatcatttggggtttggagttatggagatgggtttttctagttatggtgatttcatgtggtttatcaatgatcaattggtttatgcatctaatagttttcattatagagagaaactttttgcttagaaagaaagttctttactttgttcatgggctaaagaggagtgttcaagtctttatttggttggattttattcttctaacttgggtacttgtctttatcaaccatggtgttccaaggtctaaatttactaccaaaattctagagtccataacttggggtcttgtaacttttctcattgggtcatttttatggttgttaaaggctctattgttgaaaatcttgggttcaagttttcatgccaacacattctttgataggattcaagaatcaatttttcatcagtatgtgttacaaaccctttcagggcatccatttatggatgtggctaagagggttgggaggttaccaagcatggggcaattgagttttacaagtacaaaaagggaaacatgaatgaagaaactgaggttattgatatggctcagcttcataagatgaaacaagatgaggtttcagcttggactatgaaggtttggattgatgctgtttcgagttcggggctttcgacaatctcttatcagtttgatgagatggaaaatgttgctgcagaacagaataaggagattactagtgagatggaggctactgctgctgcttatcatattttcagaaatgttgctcgacctggctccaagtgaggacataatctagctttgtattattaactttttccctttttgttttgttttgtgtttaacttggtttttgcaatggcatttagctacattgatgaggatgatctcttgagattcatgaccaaggaagatgtgtaccttgttcttcctctaattgagagagagaatggtcgaattgaccgaaaagctctcactgattgggtggtaagccgtaaactcattattcatttgaagtgttatattgttattggtgtaatttaatatcggttttcacttattttacaatgattataaaatattactaactatttgtaatatatcacttaatagaaatgttattttcttttaaggtaatgtttagtttgaattataattggtctattagctaaggataagcaaatatggattcattcaactattagtcttgaggaatatatattgccttaaaggggcaactcatatggttaagacatttgatctgttcatgcaaactcagatttgagctttctcacaagagtctagactaagaataagtaaatatggattctgttagaatcccgcgttgattaagtatgagattggtaggtagtatataactacttcggtatcctctttttctatgttagttttggaagtgagttttacccaagtagtatcagaagcatgctcccttaagagtgaaaggggcaatcttgggataaggctcgtagtaaattggactatcattgacatttgttgaaagagtgttgttatgatcccacattgactaaaataatacgattggttagtagtatataattatttggtaaccctcctttcttagattagcttttttaaagtgagttctaccgaaaaagttgtatcagattcatttaagttaaacattttaccactcgagtacggtagcttaaatgatcgatcatgttagatttgagtccctctagagcacctacatgcaattgttttaggatgttttttatgaaatcattgtgttgagtgttttttttttattgcaggtgaaggtgtacaatggtagaaaagcactaggacatgctcttagtgacactaaaacagcagttaatcgactgaacaaacttgttaccactattctcattgtggtgactattgtaatatggcttctactaatggaaattgataccacaaaagtactagtctttttctcatctcatcttgtattggcagcttttgtgtttggcaaagacattgtgtttgtgttcataatgcatccttttgacgtcggggatcgttgtgtcattgatggcattccggtaatgttcatttttgcaaaaactttaaagttatatgtttggtcgagagtagtaaaaaaatgaaatttttagtacatgtttaacatcataattaaaaattattttttgagaataattaggcatgtttggtcatgtttttagagaactaatttcaaaaaacaataattttgagaataaccaaatattgttttctattttaaataacaattgactttttgtcaattttatctgacatcattttatattattttttctctcattactttttctcttctcactctttatctttcacatcattttcttgagacaagattggggtccaaagcacggggtcgggagcccaatttggggtcgagtttgaggttgaggcctggacttggggttggagccaggcagaggtttgggggcaagggtaaaggtggtcagggttcgagtttggggtcacggccgtggtctgggatccgggtgagggtttggggtcaagatcaaggtcggtgtccggtctagggcccggggtttggttctaaggttagggttcaagctcgggatcggagccgaggtttgggctcgattcggagttgagttttgggccgagtcaaggttcgggctcaggtcaaggtcaaagtgttaggtcgaggttgggatccaagtcctgggtccatgttcaaggtccaaggtttgatcctgagtcaggtttgagtctgaatctaaggtcgggttggatctgggtcttgttacggtccagagttgaggttgtgttggggttggcttgggttcgggttcacattcatatcatggtcttaaaaatattgaaggtatttttttttatatatagaatgttttaaaaaaaaaactaaaaaactattgttttggacaacattaaccaaatgcgcctcatattttgaaaacttgaaaaaattgtattatgttttcatttctaaaaccgaaaaacggaaaacaatgtcgagctaatccttatatcgcaatgttgctacagtgccttagattctaaccaaaataaaagactttcctaccatccaaaacgtcatttcaatggaatgatttttgtactatttcggtgaaaattactataactcgtattaaattttcttccaatcttatatttggtgcttatgttttcttattaaccaacatttttaactttgatagttgctagttgaagagatgaacatcttatcaactgtgttcttgaaactcaacaatgaaaaagtatattatccaaactcagttttgtacacaaaacccatcagcaactactatagaagttcagatatgggtgattctatagagttttctattgacttcaatacccctgtggagaaaatagctttgctcaaagaaaaattcaagaagtgagtttacttgctaataatgataataatttctttatttcaatgtcatttttttcttgggaaatttccattttaaaacttgtttttggcaaactttacaagaatatagtttatttttgaaaaaaaaaaacattttatgggaaaatttccaaaaaaataaaaaattaaaataaaaaaaaaatcagcttagggtaacaaagttacttaaggataatcaaatgaggcaattaggggtaaatattattttggacattatgttttacaaaagttactaattggaccctctattttgttaaattacaaaatgaaccttgtatttttcaagatagtacaaataagactctgaactgattaattgtcaaaataaatcttaataataatctgatctagagatcttatgacttgttacattttttgtatctgttcgtgttataaattgtcttcaagttggttttattaaaaaaaaattgtcaaaaattgagctcaaagtcctatttttaccattttagaaaatatagagtctattttgccatttaacaaaatagaaaattcattctgtaatttttgtaaaatacaagattcaaaataatatttactcttgtttccttagagtaaccagttatcatatactatcttttttccatatatttttaaaaatttattgcaaaacaacttttttgaaaataataataagcaaagctatattcttctccattaaatgtataattctcactttttttcttccatttaaactctttgcttttgtttttgttatttattttaggtacttagaaaagaccccattacattggcatcctactcatagtgtggtggtgattgagattgagaatgggaacaagttaaaaatggcgctttatgttaatcacaccataaattttcaagaattcggggaaaagaatcgacgtcgaacggagctggttatggaggttaaaagggcttttgaagagttaaatataaaatgtcaccttctacctgaaacaattcatgtcaatcccgttggtttggactcaaatttggttcaataataatttttcggagtatatttaaaaaatttaattttagaccttgggtttaataaaagattacaattaaatcctagggttacaatattcattaatatgactaaaatacccttaaatataacgagagttatacaattttttaacattatgatgatcttgtatatctagaaattttattatgaattttaattttctttttggaaaatgttaaaactaaaactctaatttgggtgttaatcaaaatatttttaaatatagttaaaaatactcttgtatttacgaatgaattaaagaataagtttaagttaatactcaaaatgaaaagaaaaataaaggttttcaattattaaaaaatctaaaatatagggatttaaatagataatgaactaaaatataggatctaaaatagtgattctttatagtgtgtgatatgaaatttgctactcataatttgtattaaagttttggctaattaggatttttgccccctgaactttgacatgtaccaaatcatgcctcctgaacttttaagatcgttaaaaatgctccctgaactattgaaattgttggatttaaagacttttgtcaaatttcattcacttttactat

SEQ ID NO: 304104 - DNA, 1054 bp, Cannabis indica
ttttttttttttaatttcaatttaataatattaaactccccaaaaaaaatccctctcagtagattaattcatacccaaaataatgtttttatttattattaattccccaaactaatattcatccaatattgatttgggagatgtccacaaattctacaaacttgaccaccccataattgtgttgttgccaaattttgaacttcaaaatccagtctgaaagacatcttcaccagatcatgtttctccctctattattcttctctttcatggaataatattgcttcatttagacatttcaacaaacaccaaatatgtgagaatcaaacatttgtctgacgtgtcgaccatccccataagcatcctttacaagagtctctgtattaagaagctcatgttcaactaaatttcatctgcaaatattaatactaatcaaattgaaattaatgtgatgaggtaaataagacaagaaccttgatttgtatggagttgataagaggtgggtcaaagggccaatgtcattcacatgagcgacacgaatgagggtggaagtgaagattttctgacaaccactgcaaaaatttaaaccagattgaactcagccataaaattctgtactccccaaggtaatataagtgttttatttcagtagcacaaggtaatataagttttgaaagagaagttctacgttattagagtgagggattttgtttttgttttttgggtttgattttattaaatggaaagttaattaaaatataatgaaataataataaaaagaaagtgaaaggtttttaaattttggtaaatgggtgaattaatctgagttgtacgcgtgtacacaaactggcagaattgaattgggtactaacaaatactaacagaagtaaacattgtggacttttgccactaaaaaaaaagattgggtacttaaatcatataaatatggaactttgggtacttatgccgctattttcctaagaaaaaatgttgctaaagaacttatatttttccataattaatttttaaaaaataaaaaataatagtcaatagcaac

SEQ ID NO: 304105 - DNA, 1873 bp, Cannabis indica
atagaaaataatatttaaacagtctaatttaaaaaaaaaaaaaaaaagtagccttttgggtgataaattttcatattataatttatatatgtatgtaaacacgtaccattgaggtgattagtcccatattttcatacaataataacataacttataaactaattaaacattcatagcaccaccaccaaacttctcgtatacattaaactcaagtcattttaatactaacgttgttactgctttttgggattaatgtttggttcactctggttattaatattgtgtcacataaattaaatataaaatcatatataaaaatataagttagtctactaactatttattgattttaagattacatcgtattatatatattatattatatttttaatgaaagtatattatgttttatattaatttgtatgtgataacatgcggtgcatatttgtttataagagctgtaaactatgtgtatatatagtactaattaaaataaaaatattgtaaatttgtaacctggagatataattttgtcccgtgatgtacttttacggaatgtattccgtggtatatttgatgagtctcagagtacattaaatgagtgtcagggttcgtttctactttttaaccctaattactcctagatcaatctcaaccgatcaaataactctcttatctaacggctgccgtacatcacgaattacaatccgtaaaagtacaataacaggataaaatcatatttcaatatatatatatatatatgagcttaggatattcacaaaagagctcggatagttgatttgagagtctctttataaagaagtacgtgcatattaataaagaaaaaaaagcaagatgatataattacatatatacaaagaattgttattatcaatactactataatgaaaaaattaaataatttacagtttaattagttagggttttgctatatttgagtttgagttttattgtacttagtaatataaagaaattttgtgggtagcacagtccttgaaattgcagattgtattcttcttactctactcacctttcttttcaccaccagtgatattttatcttttgatattgaaccctcctcctgctcatcaatacatatatattatataatatataataacaaattaattaattacattataatatatctcaattagaatcataagaacaacggtcacttacattatatatttaaagtgatagagttttatatatagaagattaatttttatgtcgttgactattacaaaaatgaacaaagaaagttttgctagattttagaatctaaaaattattactccaataaaaatatattatatgttaaatttaataacataagatatagttttatactaaatttagttcataacaattaaatattattttttatttactataatattattcattattatgattcatctattttattaaattttatatcatattactattatttaaataataaaagaaataaaaaataataattttttgtatacatatcctcaataaaatcccaattaaaaatgaaaaaacccatatgtacgtactaccttttccatatgatcagaaggttcttccacgaatcttctattgtcatcatttgctccctcaattaaaccctacacttacataaatatatatatatatatgtatatattcaaaactctaatatataaacataaaatatctcatatataatcacgtgtattaatagttatttttaatcaaacattctttaactttttttttttggcgatcttaatttatatataatgatgatttcatcttaaattatttataaattgctatatatattatatatatataatagagatagagagagagagag

SEQ ID NO: 304106 - DNA, 2057 bp, Cannabis indica
gaaaacaaaatctctcttctttcagggagtgcctgaacagaagctccgaagtcacctcggttcatttggtgtcacaggaaatcttgcacttcagccaatgtacactttgtctggtattttcctttcttaacttctgtttactttaaaaactttatgtaacttgtattttaccctcggcctccagcttttgacaatggtcaacatcctatatatatgtttgtatatgattagtagctcttttctttttattatttatctttattttaaaatatttaactgggttgcacatccaatttgctcaacttaaatattaggtggtcagaagagcagagttgcatttgctaagataactttcaagaaacctcacattatattacttgacgagccatccaatcatttggtaagctacccctttcttctttttatgtttaatgctcttcgtgggctactcggtttggttctttgtttttcgagcaaagccgaactatcaatatatctcgatttaagttagccattttagtctagaaatctcaaggtgtgcttgccctttattggctaattcatttattctgtatatattgcaagaaacaaacaatattatctccatctattacaattttctcacctattgttgttgaaaatgtaggatttggatgccgttgaggcactaattcaaggacttgttcttttccaaggaggcgttcttatggtaatgatttcaaaacccgattaataaaacgtctataaatctaggcaattttacccaagctttagttacaaattgtgtgtgtgtgtgttttggttaaacaggttagtcacgacgaacatctaatttcgggaagtgtggaagagctatgggtggtgtcggaaggtagggtgaatccattccatggaactttcaacgagtacaagaagattctccaatcttaaaacaagtaaaaacttactcaaattttcttcttgagcaccatccttttatatagttttgaatcttttacaagtcttattatcacttgaggaatcattttttattttattttatttatatctttagaagaaggaaaaaaatgtgagtatattttggattttgaggtatgataaagctttatcttttccaatttaatggccatttatatgtatatgaaaaaattagtatggcatttaatagaactagaagagttattaaatgccacaataacaaaataatgcaaaatttgcctctaagatgaatgaaataagagatttattttctatctaagcatgtttttattaaaaaaaaagaaaagaaagaaaaaaaaaaaagagttacactgaaattgagaatataaataaaaacttgattagaaaatattttcctttatccatatacatatttatacttaattagagttacaactttttcggattgtcttcgttttgtcttcccaataataatgacgtttgtcatattgagttttgtattgtgcttaatgataatacatatctcttgtttgaaaatctttccatagtttatgttatattatttgatagtataataagtataaattaaaatgtaataaatatattattatgagaataatatatattaagggctagtttggcacaatttttgaaaaatttaaaatttattttttgaaaaagttgtgataaaaaagtgtttagtaagctattaaaaaataatttattgaagaatttatgaaaaagttagagttaaaagttaaagctggtacaaacttaacttttagaaatagctcttttaattaaaagactgtataataaattattgtttttaaaagggtaaataccattttggaccttgtgttttacaaaagttactaattggaccctctgttttgttaaatgacaaaatggactctgtattttctaaaatggtacaaataggaccctgaacttaatttttgacaacttttttttttaatataaccaacttgaaaatacgaacagatacagaaaatgtaaatagttttgtcataacacttttagatcggattattattaaattttattttgacaaaaaatcagttcaggatcttatt

SEQ ID NO: 304107 - DNA, 1519 bp, Cannabis indica
aattgtttattttttttaattattatatatataatttacaattatataaatttaaaatgaggtgaatggttaacttttttcaaaatactaatttttttaatatcttaatttaagaagaagtgttgaagaaattaaaaactaaaaaaaaagagagaattatggaaaaactaaataaaaatatatattttatattaatttatatttataaagctaataaaaaattaaaaaataagagaattaatgagagaacaattaatgttaaattaaaaagtatttagaatatcacgtcaccgccgcctcatatctttcttttatatagatactaggtaatataatcgctcttcgcgagacttaattttaagttttttttaagtaatataataacaaataactatttataatataataaagaataacttaaaaattatttttttgaataataaactactggataaagtaaaaaagaaaaaattgtgtgaatagtattaattaatttattattatttgagggattcattatttatttattaagaattttaaaattttaactattaatgtatatatatatatagaattttatattgatttgttaaaaaaatagggtgatataagaaaaattgagtgttcttcataaatatgatgtattatttttattttgcgatcatttatcgtagttattaccgtatctcacccattgtttcgtattttatctcacccgctgtcaacattatatctcattcggtgttatcatcatatctcgccagttatcgtcaccgtatccttataagcaccatatcctttaacaccatattttacccattgttttactgtatctcacacattgtgattaccgtatctcatctattgttatgtatcattcaacgtcgtatttcactcgttatctcaccgtatctcacccgctatcatcactatatctcacatatttctttagctaatttgaggctttacatatgcgtgcaacctacaattttaatatttcatgaaagaattggccattaaaaatggagaaatcatccgaaaattatgagatctaaacctaaaaaaaaatctaaagaaaaaagggacatagatataaaattattatagataaaagtgtcaagttaaactatacaatacttttttttttccttgatttgtttgcatttggagcgaagagagaataaaaatattttggtgtatttggactataattctagtgaatgaaaaacaattaaatccttgtaaaagagagaaaaataaagaaaaataaagaagaaaaaaattaatctataaatttctatttagtataagatactagaaatttaatcaagaatgatgttgaataaattgtattttttttattttctgacgcggtgaataaattgtatttaatttattgatgatacaaccatgggttttaattgttccatcaatatagtatatgatgatagaggtataatagtatgggtgactatttaatggttatatttttattgtaattacatttttctttaacctg

SEQ ID NO: 304108 - DNA, 1893 bp, Cannabis indica
caaaaatagtgaaggctattataataatttgtaacataaatatttaaagttaactcttagtaataaataaatacttaattttaatttttagcggtaataatacttaaattatatttttgaaactctgtagctactgacagttaaatgttaagtcattatccacgtgtcattttcttattagtatatttaaattaatctttttaaaaaaatatataaattcatgatgtggactaatcaaggattgtcacgtggtaatttacttaatatttaataaccagatacttacagagttctaaaaatataacttaagtattattgctgtcaaaaattaaatttaagtatttatttacaactaagagttaaacttaagtatttataccgtaatttactctaattgaattattattgtaaagcactagcatttgtggtgactattagtaaccctaataatttttttttttagtgaaaagtagtattataatagcttttttattgttgtgagtaatattataatagtgattaaattaaattacttaaaattttatttggtgtcttttagtatatgcattttaatttagtaattagtataaaaaaccattaactactaataaaattacaagatagtgtaatcttatttggttaagtttgagtttttgcttatagcttgaggcacaaaataagtaaaaaattgaactttatttttttttaatttggattatgtaaagatgtttttaataaaaggtcatttataatgtgtttgaatattattttgaaaaaatattttatgaataaattataaaaattattctaatttaaaaaatagatttttaaaatttatattagaaaaaattacaaattttaccttcttacaaaataactttttattttattttttagaaagatagagattacttgtcttaaattgacccactcaaatttatttgagaaacctcatttgtggcaaagaaaaatggtagaacactctcaaaagaacttttgtaatcgtagaagctaaaaaaaaaagaacttaaataagcttagccaaatggttttatagatagtcttaaatatcactatgtttaataataatactccttttagaaaattgttaaaatgtatctgttaatatttaacgccatctaaaatatcatagtataatttaataccatgtgttaaacacttaatctaataattattataaaaatttactaattactcctaaggtgcctcttgacgttacacctaattactatgcttaaaaatattactaaagtctactagtagtacctgtttgttatgtgtatttttagaggtgacatgtgtatttttaaggtcccaaaatcaatcaagatgggcctatttacatgcctaattaagccagtgaatcagcccacgacgaagcccaaccatggttctgggtctaattgcaggtcaactctaatatatataaaataaggcctttttggtctcagtagggcgatccgtctagaaaagaaaagacttaatagaacgtatctgaatgccctcacggggtaatccaaaacaggcaatcaacactgactaggtgctatcctaagtggcatccttctaccactaaattccatagaatcagaggtttgtcccctttatcagacttggaaaaggtgcacatcacataaagctacatacattttgtccaatatccattaccctcacatttacaatacattgtctgcagcgcatgcccacctgttaccatcaaatggtactactatgtacggacgacgattatctcttaaattagtcctctcctattcggctgaaagacaatattataaggaaaatctgattttatatacttaaaaactaaaaaaatttattcttaaaccaaaaccttttaaactaaaaaaacta

SEQ ID NO: 304109 - DNA, 2933 bp, Cannabis indica
tttttttccttttttctttttttgtttctgtctcagttctcaaaccattgaggtaagctccattgtctccagtgttttttatgcccctcggtttgtgagccgtcaaatcacaagtattgatgttggcatgtttttggcaggaattatctaaccaagctacgttgtttcagactcaactttctgaaatacataagaggctcaggtaagtttggaatgtttcaattttgaagtttcttttttggtttcattatagttggcatcatcactgtatactaattctgcatttgttttgagttgtgcagctattggacaaaccctgataagattgatagtgtagaacacctggggcaaatggaaaattctctaagagagtcacttaaccaaattcgtagtcacaaggtatgtttctcttctaaatgtatcattggttgttgttcatttacccgcaacgaagtttgtgttaaccaccagcgccacagatgcttttagtttggttctgggtatttttaaccatctaattgttggttcaaggttcttggtttgggaactagtaatatatgtgtttgagatttcgctttgctttaaatctttgggaaggagttgcaaaaataattcggtacgatacattagaattatgtttgcaataaaattgagaaccttaacgttcatgctaatagctgtgcaacatgattacttcggggtgagggggaggttctagattcaaacataagctgtactttaataacagagaaaggtgaagaaagccatctgaggtgaataggatgtgtgagttgagatgataaagcacatcatgtggcttggggaggaaagaaaaactgaggattgagtattacagaaaaactaaatactagctgtaacatggagtgtgaaagcaaagttacctatatttttatttctattcttctttgcaaattttttcacttgatactatctcatcttcagtgatactttcaataccaacacgttctactttgtttggcaggaaaatttacagaagcagcaattcatgtcattagattgcactagtcaggtgagactaggcttgatagttagcctgatgggattctttagtgtgtttaaagcattaatcgtcagtaatcttgtttttcagttccaaaatgggttacatatacccttcagagtgggtgctgaccaacagctccagcctttgtcatggatgccaaataatgatactcaaaatattgttttacctgatgacccaaatttgctttcccataggtgagcgttcttttgaagtgtaatggcttaagtttgattttctatagatattatttcaatttactatacctctatatcctgcttccaaaagacaatatttaagttctctgtcaaatttagcattagatgaaaccatacttagccaattcatataatatatacgttataaaaagatgaatctcttttaggggtggaatgtttataggtcgtgttcatgtcgtgttgagacttaagtattacaagcaaatgttaaacccaaactcgatctatttattaatcatgtcgaaaattaaatttcaaacccaatctgtttataaacaagttgatccgactcaatttttttatataaagaattataattaattttggtaacttataaattcattaacatgtttataacaactttaatgtttacaattttttatgacacatttatggataatttaacatatttatgtattatttaattaatttaatttaatatagtttacatgtaataaatataataaatataagagtgtatactcttaaaaaagtggttgtgttattttcgtgtgttcaactcaaaaatgacctaaaactatttaaggaaaacccatatctatttttttttcatgcaatttcaagtcgtgttatcgtgtctaattcatttttgctgcctctaatcacttcctcatgagggagatttggtaccttcatctgcaacaatctttaacttgtgctgtttttgtatttgtctcagggatatggagtgctctacaagttcctcatttggtagttactctggttactttggcatgggtagaaacccagagatttcgaattctggacaagaaaatggcatggttaccgatttaagcagaaccacacctatgaggctgcaactaaatggtggtcaatttccttatgcgccgtacaatctgaatgttctaagtgatcaaaaatttcaacctcaaacagagatgaatccacaggaaaacacggtggattatcaagtcaacggaaattttgaagttcctagacatggatatgagacaaaccatcaaaatagttgggcttctacagctgggccttacgctgtttctatgttagatgaaacgttataccctcaggtcagttttgtcccgtctctcaataaaaattagctagtaacaagaaagatttactctcaaattgtatatcaagttcagtgtttgaaatatctaaaatatctacttatgtgatttgaaacatctaccttttgagttacaaacttctacattgctttttgcagcacccaaactaaaccaatgaatgggatttcactcattcagtgttaaaagttgctggagaaaatggatgatttgcttggacattattatacttataccatcaggatttttgtagtttgtcatacttactagctatgtaaaatagaaagcaaccagtgagtgatgtacactacgggaaaaacctatcacattgttaatcctaatctccggccggcgtatcagaaggaacactgttaactccattgaatgaggcaccagtttgtgatagcaatttttatatcagtatgttttagggtgtcaagattggtcatggcaaccacgaatgaagctgctgcatacccttgctccccctctcagtaccttgagctgtatatatattaaaaaaaacacaaaaaaaaaaaa

SEQ ID NO: 304110 - DNA, 1688 bp, Cannabis indica
ttcatatttaggatgttaattcaacatacttgttagtaaatctagatcctggtaaaatattcctaacagaaacctgtttgaattaatattgggtgaacaattcatggtttttttgataaaacatgggattgaaattgacgtatcattgaacactgcactcaccgatatgcatatgaaatgtggcgatgaagcaacagtaatgaatctatttgagagttattctaataaggaataatgtgatctcataaaatgccataattgctaaccttgagaaataaccaaggtgagaaatctcatttacttttcatccatatgctaagaagtggaacctaacaatgtcacgattatgaacatatttcttcattcacacatcttgtgactctaactcaaggacaatgattgcatgcttatgcaatgaggagaaaactctctttttacaacaattgtctcttgcaaatgcatttgcgacagtgcatgaaagatgcatgaatttaccaagaaaaaatatcatcacatgtaatgccttgatagacaagattctatgcatttttaaagatgatagaaaatggtttgagcccgaatgttctaacttttactacttgatgttttttcatacaatagttaatgatttctagataaatttggagcttgttgactatggttttatggttgatctttcccgttgaggttggttaaacgaagctatacaatttattgagtccattcctatcgaagcagatgcgtcgttgtggaaggctttgctcagtgcttgtcaacttgattctgatataaagttagctgctactatatttgagaaacttgttgagttagaacccatgaatgatggaaattacatattgttatctaatatctatgttgcagcagctcttatgctaaaagtaagaaagataaggtcgttgctccaagaaaaaggattgaagaagtccctcaatcaagttcgattgttgtttataattaagtacattcttttgtgggataagttgaaaaatctcttttttgtatccattaatgaaaaataccatcatattatatttcattaaaatatactcacttttgtgagtgggttgcccaatgtattatcgctttctacttaagtctaatacataatttacattaatctaaagagtataatgaagacatcatctataaaagtaggtatatctaaaagaatattaaaataaaagtaaaaattaaaacagataaaataaactaggtatataatgtaattttttcttttttttttttttttttttttttggcagctggcaagacatcatattctcttccaaaaaaatatctatgccaatttgtgttctttaactacttaatcagagaaaattgatatacatttgattccatatggcttttatatgaaaaagaggattagttttggtttcaaaaaaaaaaaagagagagagaattagtttttaaattggttttatatgaagatattagagaatctcacattgctaatgtgtgaaaagataatagaatatataagagaaatggactactcctcccgttaccccattccagcttattcctaaattctaacagaagaagaggaggattagttttaacaatctctattacgcctctcaaagactaaagcaaatagaatattagactaaacatttctccgtgtttaagattccatgtgtaagaaa

SEQ ID NO: 304111 - DNA, 1465 bp, Cannabis indica
ccgcgctctttttaaaaatacacatatacacatatattatagtcaacggtcaacaaaccaaactttttattatattgaaaagacaaacataccaaagtattatagttagtggtataaaaaccccttaactccatgttgagttcttcacatttataacactaattaatattgtaccattaattatatatattcactacctacctagctcaaaatctcatccatctttgtctccacatattcaagcaatattattaatagagatgatgagtagtcaatattattattattttaggtcaagaaattacaaaatgattgtgattgttttgatcattattgtttatgtgatgatgagttttaatgttaatcccattgaaggtggtagagtactacaacaactccataatgatcaagataatatattattgatcatgtcatcacttcaaagaggggcaaacaagcctccatcacctaacccgaccagaccataaatcaaccaaagagtttcaccggccggcgcaaacataagacatcatcatcggcctccagctccaccaacgacgcaccctagctaattgtagtctttaattatttctgcgtagttattaaatttgtcgatcaatatttgaattacttattacttatttatatttaatttgtggagttgttttttaaaaaaagaaaaaaaaatcttatcataatttattattaaacaattaatgttcattttcagtaaaattctaattcagtaacatatattacttcttcagttacaaataattattaaattaaaatatctgtaatccttaataatgcggggctttagcattttaaaataatagagcattattattaattaggtgtcaatagtatataataacaatacgacgtagtatttcaaatgataataataattatttagttaatatatgtaatacaatctatatttattagttacatcattaaaaatatatattaggttatgtgataaaagataattttgtaatactaatcagtaatcaatattattaatacaaagcacttataaatttgcttttataaaataattataccttcataaatcataaatataaatgtaagagtagcaataatgacctaatgtatatcaatgaacaaattatagatatatatattattgacccaattaaatatatatatgtatcaaacataaaaatacaattttatatgtaattcttaattatttgacatgcaaaaacatcttatactatgatagtaattacgtatagactatatccagtatcaagtaattaatctgtgattttcaaacgcaaacgtaatttgattgacaattaatctaatttaatttattcacaaatcatgattaaattatatcagcatatgggtttgagtcatttgattaagtaactcaattaataattaattaattcttttttcattcttttatcttatattttaattaataaaa

SEQ ID NO: 304112 - DNA, 990 bp, Cannabis indica
attgattagcaatactctctaaaaatgattacattaaactatatgaaactcgatacaactagttagtctaataacgatattattatatagtatagtgttaggcaccactaatatcttttaacatttctcaaaattaaaattttcattagtaagagatttgttaataaaagttaaagatgattgtgtagtatttgcaacataaacattgtttaattatgaaagaagttttgatgttttttcttgttgtttcttgattatgatcaggttccccatttggccatatggtaagctaattttgatgtgttggttagtgttaccacaattcaatggtgcagcatatgtttataagcactatattagaccatactatatgaacccacctcatgctgctcaactttggtatattccacgaaataaaaacaacatctttcgaaagcaagatgacatcttaactgctgctgaaaagtatattgaacaacatggaactcaagagtttgaaagacttattaccaaggtatatatatatatactttatatacacttactttaaatatgctatatattattaggtaataattaataatctcttgatttaaaattgtaggctgacagagaagcaagaacaaggagaaacaataacaattacaccatctttgatgatgattatatgtattgatcagttagctagtttgtggtttgtctaagattttattattattattatgatgtttaatttatatgtatctatatatctaactcaagctcagaattatatatgctacatatatcatctgctatgttggcttctgtttaaacttttaggagaatattggagaatcatgaatatgatcttttcttctttcttgctcctctttcttaaacttttatttgtttatttgtttttctcaaaatctcataagggatatgtctcaacaaaaaaaaaaaaaaaaaaaaaaacaaaaaaaaaaaaacaaaaaaaaactaaaaact

SEQ ID NO: 304113 - DNA, 1832 bp, Cannabis indica
atgtaatgaaatatagtagatttcccaaatattaattaatatcattactttagagataactaagtgtaatagatattgacttttaatttttatttttaatgttaaagaaaaatgtatacctagtcaataactttcatgtcatgtgacaatattattattaattagaaacaccaaaacttaaaattattactaaaacaaaagaaactagttattcaacaaaacacaccaaatttagaatcattaattttaacgcgtacaaacaaacttacaaataatattatcatgacatgccctaataaggtactaaaatcacaaaattctgaaacaagatgtgttatcttcaatgcccatgtcatcaccagcgcagtgttctacaacaaataaaaataaataattaatgtacgatgatcataggagaacgtaaaagtaattcaaagaaataaagtacacataaaataacaaaaaaatatatattattactaacttgttagtgccaagctagctttttccccatcaatgcagctcctttcatgagggtaatcatcttgtaaagccaccctctcaatattagcatgaactgaagataagcaaatctccaagaattgtccaacataaaattcccacaaaatccaatgaaaaatccaacaccgattcccatgtaaaccgatgacatgttaaaccatttgtcatcgttttcgcttccatttgaagtagaaaaactttgtaatgatgtctcgtctccagggcatgagcttgtcaaaggaactccacaaagagcaaaatttttagcgtatgaagaagcattaaagctttgcaattgagtacttgtagggattcttcctgataatttgttatttgacaaatccaagtaatccaacattgatacttctcctaagcttgtaggaatttttcctgaaagcttattgtgagacaaatccaatgattctagtttactcaagcttcccatcttctttggaatatttccactaagttcatttcttgataagtttagttgaaccaattgtacaagattagtcacttcaataggaatttctccattcaatttgttacttgatagatcaataattcttagtaatccaaggttcttcctgtattcatactcagttcctttccaaacaatcgatgcaatattatgaaagaaaataaaagggccaggaaaccgacgaaaaaataccaaaattgtgctaccataaattggttcctcaaccattgaagtgaaattctcaaagcatgaaggaatggatccagacaaattgttttgagaaagatcaagtatttgaatcttagtaagatagcaaagatttagtggtacatttccatatacttgatttgacttcacactaagtaaaacaagatctattaatgcttccccaatccacaatggcaatgcatcttccaaattattatctcccaaatctaaaactcgaagttgagtgcagttcttcaatgtggaaggaaattttccggaaaagttattatgccctaattgtagagtttcaattgatgaatatgaacttgaacatattgattagggatctctccaaataatctattgttgttgagcttcaaaacaaaaaagtgagtattcttcaaacaatcacttggaagacttccaaataaatggttataagaaatatcaagaaatagtgtttcaatatctattgtttgacaagaaagggcttacaatcattgaattaatattggagaggtacaacactgttgcattggatagaaatgtggatagagccttggaatttgttgaaactcaaatcaacataaataggctcataagatgggaagaagggactaga

SEQ ID NO: 304114 - DNA, 1353 bp, Cannabis indica
tatacattaaacataatcatgaaataaatcatgtgacccatgcaacataaaagcaatttctgatcttcattaattagtaaatctgattatattgaaataggttttatttagggcacaaaacccaacaagttcaacatgcttttctccaatatataagaagctattggggagcactatttgtaacaggaagagggtgagcagagctgtaatggagactgggccattacttatagaggagcacaatcaaatattgaattagccatttactagccttgaggtgtcaaagaaacaatttttgctatccccagtatgaaggctcctggcccggacggatatggtagtgcattctatcaagacaactagatttagttggaaaaaaagttgaagatgcagtcattagcttcctaagcactgggaaaatgctcaaagaaattaatgcaacaaccattacattagttcctaaaggcaaatgcccagacagtgtgaaggattacagaccaatttcatgctgcaacgtgatttataaggctactacaaagattatttgctcgagattgagacaggtgcttcctaagataatagctaaaaaccagggtggctttctacatgggagatacatttctcctaacatactaatatgtcaagacataataaggcattatgggaggaagaactttaaaccaagttgcatgatcaaaatcgacttgaggaaagcttatgatatcgaggattagaacttccttgaagaaatacttgttgcctttcactttcctcaaaagattattgatcttatcatggtatgtgctaaaactccaaaattatccttattgttaatggtgaattgcatggattctttgaatccaaaagggggttgagacagggagacccgatgaataatgagagttgtgagcactctgccacgatttaagcatcatgacagatgtacttcatcaaagctaaatcatttatgctttgcagatgatttattacttttctgtcatggtgattatatatccatattgttaatgctacaacgtttaaagcctttctcctccacatctggtttagttccaaatgaagaaaaacagctgtgttttatagtgggatgaaagaggatgagggaaagagggtgctacaaatgtcagggtacataagagcaagcctcccttttagataccttggcatcccaatctgttccaagaaaatatcttcagccgactgccaaattattcttgagaagatggtggctcgtattaaagtgtggagtttgaggaacttgtcatatatgtgaagaataacactcattaacttggtattaattgctattcactcatattgggctcaaatcacaat

SEQ ID NO: 304115 - DNA, 1727 bp, Cannabis indica
atatttttgtcaattaaatatgccaaaaatagaattaacaagtatccatgatactcttgatcttgagaagagaatcacacagcaaagactagattttagtgttccacagtataagttttgtattgatcgatcttagcacgattgagataagtataatattcttgaagattgatccaaatatgagttgcagaatcaaacatggatgagagaagccatgacataagaatgttgtcttgttgctctcaatcttcaaattatggacttaatttttttgctcgtcaatctttttctgtgagaaactgcagtggagtaaggttgggatcaaggaatttctacagtcgacttccctttaacggctgcaagaacttgatgcttccatgacaggtagttgaactcatcaagtcgaacaaagagtgagtgagagaaagagacaaaattagttttgggaagattagtagtgttgtgaggtaaacaagtttgttgagatgaacttggaggaatcgacaaacctccattgttgattgctcaggtctgctcctttaagaagacgatacaagctctgatacctaatgtcgaaagtaaaaaaataattgaaagaaaattttgtttccattacaaattaagaaaggaaatacaagattatatatacacttagaatgagctgaaaagactcagcaacaactaaataactaaaagttagtttacacgaaaaaaaaaatagaaaagcgaacagcttataactgtataactaattaaactaaagctaaactaagtacccttaacatgtctaatatctaacacatttctttgccgataatagaagcacaattattgtacctgccctcatcgcagatgagctaccagcatgattagccatgaaatcagactttttctcaacaagtagtgtcatgagactttggtattgttctgctgtgagagtgaatagtctgttggcatctgcatgattagccttagaggaagaattcttgcactctttttggtgatgtttattacctgcagagtttgtcttttgtagcttcctacaaacatcaacagtgtggcctttccaactacaatattcacaattgaggtatgctcaaggttcacatttcaaatgtgaactttgtggtgtgaaattcctctcagagttgcacgtgttgttcttcacagcaaaagtcgaagcttcagtcattgttgtgttatcctttgacatgcctcgttgtttttcatcttgaaggatgaaggagtaagctttattgatagcaggaagcagctctatgaggagaatctgacctcgagcggcagcgtaaatttcattaagacccatgagaaacttcaatgtcttttgagtttgttgaaattgtagattttccttcatagctccacatgtgcatgaggtgatacaatataatgcatcacgttcatcccagcgacctttaagcttggtatagtaagctccaatggtcatgttgtcctgtttacaaccataaatggattcttcgatatgaaagagatgaagactgttagtgtgagaaaagcgatctcttaaattagaccaaatttcataagcgcttttataatataatatgcttgctctaatatcttgagaaattgaattaaaaaaccaagtgcatgtttggcattataactaaaaaactgttttttatttttaaaaacagaaaattgtttttaaaaacaatttggcttgtttggccttattttttaaa

SEQ ID NO: 304116 - DNA, 1835 bp, Cannabis indica
tttatttattaatcaaaaataccttcatattatattttattaaaatatatctacttttttaacatataattatattataaaaataagtatatcttaaagaatataaaaatagaagtaagtggtatacaatctaatttcttcaaaaaagtctctaccctattcacctcttcattatgggccagcccagtacaaataaagtccataagcccataaaaaggtttgatcatccaacggctacgattcaatcggaattcttacgcttttactatatataatcgcgattgactcttcactattatcaacattaagcttccgtcagtattagcatagctgatacaatatggttctagggtttcttttctgtagccgtcttctcttattgttttactataaataattttagatgcaatgatgattattgttgaaatcgtagattgctttgccaagatgaatctgtatttcggttcgtattcactgagcatcaattctatcatcttttctttttcggttacttttatttaacgagggacctatggagagaacgcgaaaaatcagtgcgttttttaccaagtttgccttcggacatactatcgaaaccagatcgccgaatctcatacttatttcgtatgatttttggtttaattttcttgatttatattttcgaacataaatatatattttaaaattttaaaggcagcgaaggtcccagcggaggggtatggactctttaattgaggcctctctaacacataaaatattaaaccttcgtagattcatgagccgaatcgtaggatgcccggaatttctgtttctggaacatcttgaaccctcggctaaatttctaatatttatttttcttaatttctagtttgtttaatacaataggattattttatcacaatttcaaagcagattttggttggtgctatgtgaatttttaacgttttgtatatgcgatgaaataacactaacggaaactgcggatgatttcatctagaaaaaaactaaattgaatatgttgaggatagcaaaaggttaaattaagtaatggatataagtgcaattatattatattcataaatagtaatgataatgaatgtataagagaccatattgaacttggacgttcataatctcctgggtctattgtagattacagagttcatgaacttatctttatgattcgagagcttctcatgcatatactgtatatacgaccatgcatgcctggatttacttatgtcatactaaccatggcttaagatatgaagattttagggaactgatggaatatgtgagaaacaaatttcttttcctctggaccgtttcaacgctcattttacactgataagatttgcaatatctcattttacctttggttgaggacattcctttaacattttcggtcagtagccaaggcaatctggtttgggtagccacgatctataaaaattgaagaatgggacaatctcatgtaaaagataaaagctttttggtgacatataaaggagagattgtaagtcagtttttgatctaatacagcttccttttgtttgagcctgagttgcttggttggattcttaatctgttcagccacaaaattcaaaattgttcgtggcagctgtgtcacccataactaacacatcattccatcaagcaaagttttacactagaataaaataaaatttgaaatacatacaaaaaaaaattattaaattttttcaaatctttaattcgaatggtctttaataattatttcaccaaataataaaacgaaaattttttccactctatttttgttaggctaaaattagtctaagtttcgggtcgtattt

SEQ ID NO: 304117 - DNA, 1813 bp, Cannabis indica
tcaatagttcaaggagaatttttaacggctagaaaaattcagggagcataatttgatacatgttaaagtttagagggtaaaactattaattagcccatatagtaatgtattgttgacatatatattgttgtttgtggaataatgaatttgtatttattctatattctagtgcactttaagttggtttcaatgctatttactggtcttcttactatttgatatgaaaatttaatgctaatgttatatgaaattattcttaattttactatgttatacagtaaagactaaagaggtatgtaactagtgattgaacaatatataaaattaattttactactaaaacaatcgaatttttaaatattaattattctttttctttaaatattaaaaataaattaatttgtagtgtaaaaccatccacattgcagttttgaaatcttaccgcgattgtggttccaaaaattataaaaaccttacgtgtataatttaatttgatcaaaaatatctaaaatattttaccattcgaaataaaactcttcataatagttttaattagatatcttattgttcttattattatatatactgattggtgcctagttcaaattataataactaatagatacaaacgatcaaagacaaccgaacaagtcagtgtctgatgtttgaatttataattgttttcaattttcatgacaaaattaataaaatatcaaataatgacacaaaaagatgcctgttgctgctttgttttctaggttgtgtttaataataattagtgaataatgacattagctaattgcaaaatattatatatgaattggtcatcaattttaaatattttattagtgaaatattattagtatttcttgagattattaatttttaaaatttaaaattattatattttacttttgagtactaagtaatttcttttccacatgcaaagctagctttaggggaaacaacaaagcagccgtgggctataatatgggagaactacgtatacatgttattatatgaatagtatttatatcatgagttactaagttctgaaattccagtcaaacaatttcaacaaaagaaagacataattttaattaatttattaacaaataataataaactaaaacttcttagctagcttgggaattatcgatgaagatcgatgtttttgatgagtttataattatagctaggaataataatatcaacacaacaatgtaaagacaattatatgcatattccaacattctacggcattttattcatatgatcaactctctcaaatattttatgttatatataataattaataataaaaacaattagataattacttattattagcacttgactcggtttgcatttgcctagctatattgacatgatcgacaaagaaataccatagataaattcaaaggaaaagacgtacggctttatatatatataaatatatatttatattatatatatacacatttgtagtcttcctaataaagattattaatttataaacatggtgcatgcaaatagttataaataaaaaccgacaaatcaaagcctattgtttgatgaagacatcaatttttaaattaccaaacgacaaataaacaaatatttaactacttgcatgtatagaagaataactactaagcaatttactagtcaaaggttataattaattcgtttttcaagtttatttttttgacgattgattcttttgtacatgcatgcatacatttatatatatactaggtgattgttacgtgccaagccacgtagtgttagttttatttaatattttagtttt

SEQ ID NO: 304118 - DNA, 3214 bp, Cannabis indica
taaccatatttgatgctctaaatatggacataaaacttataaatttatatttttttatttttgtcttcacatatttttatatttatattctaataaaagaaaattatttttgttctctttatccagtttatatttttatttctaacaaaaataatataagaaaagaaagaaaaaaaaaattgtcctcctaacatttgtggctggctccattttgaaattttgctttatagatttttctttcttttggcattttctcttatattgcaatgtatgctaaagatgtttataaattgtcatacaataacaccaaaatatataaaagcaacagcaactgtgacaacaagcaacatagcataaaaacatagggcaagaattctccaataacattaacataaataaaagatgctttattgggtcaacatgaactgctataaatgtaatttatgaagattcttccagttgaaaaagctaatgattaatctgaattatgtgctttaataaagcactgtctccacattcttcagtccacagttcattaccttttagcacatgatgtcaaaagcaagtctactcaataaacataggactctagcattacttaatttgatatttaaatgcacatttcaaaagaaaaaaaaacactaaattatggatttcttctccattttattaataacccacgaattaagagttcattacaaataaaacaacaatggtaccttccatctttgttgaaagttctaacgagtgtggattttgcaaacacaattctcagctcctatttcagcagcaatacaaggagactgaactttatcaacctggtaccaagttgagcgtttttcaaccaattcatctaagaaaacattaagtttgtctatggtcacattaggcatcaccaccacatgggctatgttaccttggcaagccaactgccacctacgaacaaactcctcgtcttgaggacgctctaacacaacagtgctactaagttcattcagcatggcactgataccagattcacgtaaccggtccttcaagtagtgagcgtttctaaggcatttctggacttctttctggaatcccttgtaaccttttctgttaagggtgtaccataggaaaattggagcatggccatttcggcttcccataatcgtggcatcccgtgaggcaaggtactcaacatttcttgaaagtgcattaatgtgctccagccttgttatctgaacaccacagggcatcggacaccccacaaacttgtggccggagacgctcacacttccaatgggcttcttgaaagaaacctttggtgcctgcttaccatagtgaacaggacaagaacatccaaaagttacttttaaaggtagattatattttatggtgtgacacaacataacatgttagaattcttaattccaaatcatttaagtccgaaaaagaaaagcaacaaaaatctgccataaataaacatgttaacagttccagaaaaagcaggggaatctttaagagaacaaaattatcatgataaatcatctgcttaaatataatcttctattatgaaaggaacatgatataatctgcttgtaaaatagcaaactatagaaagcaagtccagattaaagcaaacactgtagtttgcattcctattggtacagaaattacttacacgcttgacaaaaggcatcataagtccgaaaagtgctccatcgcaatgaatgtagaaccgatcgtgtgaaaagccgctttcttcaagggtttgaattactagatcaagatcatcaacagctcccttaacagttgttcctgcagtattgagttaagactttcaatcaagtaaaaaggaaagacaacatgaagaagcttatcctagttgaatatccaagaaaaaaatgagagttatacctatgttaacattgattatagctggcttatccttgttaacaaggagtttatccttaaaatccgaacaatcaatctcacccgagacgagggtagcaatcttcacacaatccatcctatacattctagctgctttgaacacagaataatgagactcttttgatgcatacagaatcccatcagggaaaacttctctcctgcataaaaaaaagtaatattttttataaaagaaatgtataaaaacaacacatcccacgaccaaaaatttcaaaaacacatattaatatatatagcaataaatatactaacccaactaaaatcccgtggagatttccttctgtgccgcaatttgtaatgtaaccccaatactcttccttctcaatctcccacaaacgagcaaaccaatccaaaacaccaacttcaaactcccttgaatgaacaccataattgctctcaatgaatggatccccaagattgttaatggagaaatgttgtaattgcccaagtgctccataatcaaagtccaaattataaggataccctgttcaacaaaaaaacaaattaccaattgttattttctcaaattatcaaataaacaagctctttatttatgtcattacctaaatggtactttgtcttctccaagagtgtttttcgataccgagccaaaacgctagccatgaaagcatctttatcaccggtaacctcgtcattagcatctggctccgtcacggcaaggcaagtggtatgcacgttccgaccaagaacgatctctctcttcttaatcttaatattaccacccactactacctcctcctccccatctccgtgatcttccccattggtcataacaaccggaggcagaggctccggaaccacggatgcaggattgaaaccctcggccaagatcttttccaccactgatgagccattgtttagatcgagaaatggcgattccattagctcggaggtcccaaccatggctgagggattccaaaaatggagtttgataattcaaatgatgggaaatcaggaaacaggggaatggagattccggaatctggaatctggaatctgagagaggagaatgaggatgagatatatagagatggagagagagagaggcggtggaatagggaatgagagtggcggtaaaaggttttgttagggttctatttatagtagtgctctctctctctccctcctctgaatcacagttcgaaatttcgttttgcgcacttaacaaaaaaaaaaaatcgtcttcctgaaaatgacaatgacacaattttcgtgtgtgtgtttttttttatatatatat

SEQ ID NO: 304119 - DNA, 1096 bp, Cannabis indica
cttgaagattgtgctgtgttcattgtgttcttgtgatcattgcattgtgtcgattataacattaacaggttatatatgttaaaatctgctgtatatatattttgtgatgcccaaatccacaaatgagaagaaacaagaagatttcagaattagagaggaaatatgtatgtgatcagaaaaataaaataaaaaattggacttgcaggtttacatcgatctgcacgaaatgtatatttatttatatataacaattaatcgatgtatacatatatatgctgaatgacattaattaaggaggtattaattggcggagatgatctttctgatctaaacttcatcacctatatattatatacgtacattaggtagaattagaaaggtaatgtatcatgaatcatgatgaaggggggaccgatatgatcaagtaattatatatttgttcgaaatcataatataatcatcgagctgatcatcatattcatctctggtttggatgttaacacaggagcaccgctgtatagacgcgaagaaagccacagccacgccatgaaacacccaccccaccaacccctccaccagtttgcaaccactcgctgctatcggaacacccatcgccggcgggacagccctaatcggcactactgcgtcgcatgatcttttgcgacgacaggaggaatttgtgcacccacaaccactccacgtcgtaaggattgaatccatatcatgtgttctaggaagaaaatattattaggcataatctatagctgtaactttaaattataagtttatctcaaaaaaaaaaaaaaaacgaattataagttaataataaataaaataaaataacatcaatgctgatatatttataagagtttctttttctttttctttttttaatggaatattttcgtaaatagtactcttcagatcagtgtttatgtggtatggaatatatttccttccacctttatattttattaggatttctttttcttctaggaattttggagagaagaattaagttgggaaaattacaaaatgaaaaatgagtaaaaatatgcatatggatatatatacttgatagatattacttgccaaa

SEQ ID NO: 304120 - DNA, 4841 bp, Cannabis indica
tttttaaaatatttatttacgtggaccaataaaattgtgccacatgtacactgtgtacacgtggacattccaccatggcagttaacagccaaaaatggatggaaagggctaagtgctaacagaacttgggtttaggaggttttaccaccaaaattttagaattgggggttagttgcaaaaacctgaccacttaaggaggttattatgccgcaaataactctattaaactaatataatacaatacaatacaacacaatccaacacaatacattacaatacggcgtaccaaacgagccctaaaagaactgatacaactagtcactaacttagttttagtcacaataaatattgtgactaaaaatacatttaatcacaaaaaattgtaatttttatgactaatgcttttagtcacagatcttttagtcataacataggaataataatttatagttcgtcacaatttttttacattatgacaaattttgctgggactaaaataagatttttttttggtaatgatatatatgggtaattggttatatatttattgtaatcgtgatgattacatttattttaacctctaatagaaggttaccagtaggtaaaatttcttgaattaaattaattgtaattaactatttttttaaataattaattttaaatttaaatattaaacaaaactctttttagaattaatatttataaatatttttattattatatttaaatccctattataatttttttaacaatcaaaccaattttttatataatatttacaaattttttttttcacaaatattaggcttccactcattctaaaataaatttttgaataattaattagtttgtaaaaataacatttaactatttttttcagaagcattaaggcatagaattctctctctcatacttctcacctgcaacatgtacacattctcattgtaatacttgaagagagtcatagctagaaaattccaaggcttcagcctatcatctaattggtattatttcaagaatgaatataactgaaaggagagtaggtcattacctaaacaaaggggccgaacctttataaatctttgtgtctttatatttattatcatcctacatgtgacagtcgtataagaataatctgatcctagtcaaactctgcgtcgattggctaaatccacactcaacacaatgattatcttgtctagggataagcggtaataaatagatacatgtctcgcgttgtgccataatgacaacgacaataatacacagaagtgtgaggtgacgatatccttagatcatctaggaagctaacaaggataactcaaaaaaatacaagaactgaagctatatcgttggaaaatggtagataacgagttcttaaaagagcttacaactcattgatctacatactcatgagtatgttaaaagactaaggaaaataagtcaggagcgaccaatctcgaaattcttaaagattagtcgaagaactgccataaaaggcaataacgaggataaacatcttaactaacatctcgtggaacgcaaccaactattcttgaaaaccattgaagaatgcgagcaatatatagttggaaggaatatgttacctcgacaacatgaactattcttgaaaagtagttatcagcagttatttcattttattcacatgttgtaaatatgaaacgtggggattgtccatgtttcatgaatagttacctagataagattgaaagagaattaaatacaatgatcctattcataaaaaaaaaaaaaaaaaagattgaaagagaataactggcattattaaaattcatataaataaggatagaacctacatggaaaataatcattttgggaggaaaaaccctacaagattgagtaaatatctaggaaaattctcttgtaatccaaacacattataaagaaatactcagaaataagatggacatggggagtatgtatattttaaactacaaaaccatgtaaaagttcttagtgttttatttatatttattgattataaatagtaaacttttatttaaaagctacatttattattaacaaaaatctgagttcacaaacatgaactccttaattaatcaggatttagactgagttactactgatcatctttatgacatgaattagttctttatagtaaacgacatatttgataaaaataacttaattacacatctgttcatgtcatatataatctctattatatacaacacatccacttaaatgtcatactacatcaataatctaaatcgagattacttgcaccgaataacgagtatcagtgaactgccttagcaaccgttgatttaagattctaaaactttaatgtgtttctaatcattttattcatggctaagtgaacttaattctctgtatacaatacaagtcacaatctcatgtaagaataaggaattttctgatatttatatataaattattcaatattaaatattaataattgaacaattaagtatatatgaaaatgtacaactcctatttataaatagaaatttttttataaattttttagagcataaattctaacaacattttagttgaataaataatattagaaatcgattgatatttatttacagtgtgtcacatctttgtgtgatgttgagcacttaaaaaaaatggattcatgaaactttaacacaataatttagcattttcataaaagtaaaaaataaagaaaaaaaacatataaatagaaaattagaaaaaattctatggtgtaccatttatctgtttagacatccaagaaatttttaaagtatttttttatagttatgtacattgtaattatttaaatttttaaaaattttacaatatatttaaataaatataacgtatataactactaaaaaataaattaatgaacaaacaaatttcaattatgcatgttttttttggagtgcaacataaaaatagccaaacaaatatataagaataatatttatttatgtttgtttttgtttttcattcttttaagaaagcttatcttttagttttaaacatatataattggacattttttgaaaaagaaataaataaataaaaatataaaagaaaaacatttataattgaagtgagtgccgcttttactaatttaacgtttttttctttcttttttataacgtctagggaagctggcgggcgcgcaaatagattatataacagatttacatgatctctcattcggtactctccctcccaacactatgtagtacttagtagtaatcttttttcttattttttttgaaatggattgtattagcaatctttgatttactattattagtttttaattgaataaattaattaattcagtttaattgtcaaataactcaaaatttattagtttttattttttttggtataataaaattttattagttaaatatatacacaaatttaaatacacaaatatgtacaaagatttgtacgaagtgatgggatcatgggagagagcccaaaaatcatgatgatgtcgtctagatattccactctcccaatgacatcatctcacgtcagaccctacttgctttacacactccaaatcctcttcaacgacataacccgattacccggagacttaacccgacttatatcgggcgaacccgattccatctctcttcttgactcttccaaacccaaactcacaagatcagccggtttatctccccggcaccactccggccttaaacaacccaccggagaagattccgagcaactcatctccccgccaaatctatcatcagaaacgtcgattactctagactctgaatctgactctaaacccatttcacccactgttataacgatttgggccgaagtttcaggcccatgggccggagattcggataggacaggggcccggcaaagagggcagttggagtgtgagccgaaccagagatcgatacactcgacgtgaaagacgtggctgcatttgggcaaagcacgacctaagtcgttgtcttcgaactcagataagcacacggcgcattctagcaaggcggcgccaaccccgacacggtgggtggaagaggaataaacgaaggtggggatagttttgagaatagagaggtccaaaccttgagatgaaacgacagcgtttgtttgagtaatagaattattacgagcaagaatttgacggcgtgaacgacgtcgtctagagggattagtgaaccagcgagaatagctatggaagaaaacgacgagacatatgatgatgaagagaattactactgaacagagcattatcttgccgtttaaggcgtagttggcgggtgttgtagtgtcgtttatgctgtccatatttttatatctgagcttgatcgatatagaaatgtatatatatatatatatttatatatacagaggagagggagaagggagggaggaaggttcctatgtgttgggttgatgggtttactttactgactaaaatttgtagtcttatggtccatgatgctgtttatactaaaaacggaaatatattctcataaatagacttctttctatttatttaagaaaaaaatatttgttggcagttgagtacagtattatatatatttgtgtatttgtgtatattatcttgtccccatttgtaatttgagagacagtaagatgaagtacagttttttggaatatttatcttaaattcaagtttcttctattctagtaggtctatagctataggtcgtaatattattttattctttgactgtatgtgatagatatttgaaaaataattttattattatgaaatattgaagaatattattttgggccctttaccaaaaaaaaaaaaaaaa

SEQ ID NO: 304121 - DNA, 2566 bp, Cannabis indica
tctctctctctaaattctctcttctctttcgaccctaatccaaaccaaagagaactaagtatcctaagagagttttcaaattaattcttctttatattttaaaagaattacatgttggttttttatgtatgaatttgggaattactactgtttgagtttggtttatggtttgttgtggttggttttaaggttttgtagcagttatggaaggttgcgagcgagtttggattttaaaactcaagctttgctcattgtaaaatttaatgcatgttgttttaaatgcttttgagttgtggtttatgtttggaatacccatttttttgttatggaaagtttggtagcttttggttaaggtgggagcttgatttaagggccttaaaatagaaatttttgagccctaatagcccaggaaaaggttccagaaggaagcttccagataaggtccttcccgataaggtccttctggacaagggacttccggacatggggcttccagagaagggacttatggttaaggggcttctggattgggggtcttccgaataaggggttttcgaattggggtgtttttcagattaggggcttccagattggggggcttttaggtaaggttttaccgagaaggtcaattttagtattttggccataacttatcactcgggtgttcattttggatattttttttataccattttaaagcttgtaacgagctttatagtctggaatttatatttgagctgaatttatttgaagatgttttcaccttagagtttggtagaaaactataagttttatatgagtattaaaaagtgctctagagtgactcttatcggttttacatgaatgtgacatagggcctccattcaacaagcgacattttcattcaagttgaccgacaattggatctagaaacgaggtaaaattagtataaagatatatatatatatttatatgtgcatgtgttatacatgttagattatatgaattatatactactgacactgatacggttgaggtaccgagtatatgtggtacaatatataattatgggatatgacatagtgttacccacactagtacgtgacgagtacaaagtgtatggggtataacaaacagttgtactcgaagtgtgagcagatctcaccaatactagtattagaaagatacttagtgcatgtggtgtagatgacatacttctattacaaacattcaaaactcataagacgcgtaggacgcatgttaaactgataactaggtgtatgggcgtctgagcaacgagacaaattatatgttatatgttttagatttttcttactgagtctgttgacttacaattatgctttcatatgtaggtaaaagaaaagcaaatgctaagcagtagtgagtctaaagtttgtgggtgattgtacatatcgggatggttaaacctagagtgctcggttcttcgggacaacatggggctcatattttgtagttgttgggcaacaccttttgtggaaaatatattttgagtattattgtaaacttttaacggatcctgaagttatgtgaatatatgtatttataaaagttaaaatttaatcaaagttttaatttgtcatattttttgagaaaccctttgattagcaaatgtatgcacaataattggaaaattattgtagcgtgcctaagcaagcagggcgttacaggtacatttgcattaaggagagaagagaaaattatttgcccaatatcaaaaagctgtacgcaaagatgttgagcgagcatttggagtacttatgctattatacgaggactgacacagttctggcaaagagatgttcttaaaatacattatgtatgcatgtatcatattgcacaacacgactctcaaggatgaaagagaagcataaaagttgtttgttttaattatgatgaaggctccaccgatattccaacagctaaagtatgccatgaacttgtttctgacttcccaattatgcttcaaagatatgttgaaattcgtgacaaaaacatttactacaatcttcgcagacttggtggaacacatataatctacatttagaaatattttcatgtagtattttttttaattatgtcggattaattattattattattattttatgagttaattttaaatttgtcgtaatttaaatttcatgtaatatttatttttattaatatatgaattttaaaatattattgtgatcgtttttataattaaaataaatgatatattgaataataatgtgtgagatcatgacaacaatatttagagttgcttagtattggaattgagtactttttagtagtaaagtgaccaacattgatgtagatgagagaaaaaaataaaatattatattttggattgacctggagatttataggaactttgcatattacttgtattgaaaatgctctaaaagtaaaattaccaaaaataatatagatgaaagataaaataaattttaggtttattaggatttttgtcccccgaactttgacatgtatcaaatcatgcctcctgaacttttctgatcgttaaaaattcccctcgaactat

SEQ ID NO: 304122 - DNA, 2830 bp, Cannabis indica
gcataaaacccaacaatatcaactttccaatgagagatctgaattgtttagggtctggaatgagttcaccagattcattactgagctttatgttaggctccattggtgttgaagttgaaatggcctgtgtcctggagcaattgcatattgaaaggtcgttgtgttactgagatgcctttgttgcatcgagcaatttcaaggcctagaaaaaaatgtaggctgcaaggtctttaagtttaaattgtgttaagggtggcaataaactgattgaggacagtggtgttgttagtagccacaattatgtcattgacatatataagtagggcaaggaatgcatgttgtgtgttttttatgaacaaggaatgatcatttctagattgagaaaagccttgtgagatgagtgtggagcttaatttgcataccattgtcgggatgcttgttttaagccatataagctctttgttaatttgcaaacaacatttgggggtatcactcctttgggggtgtaaccttgaggaagtttcatgtaaacatcctcttttaaatcgccatagagaaaggcattgtctatgtccatgtgacgtagatgccaattattgatggcagcaagagcaaatagaagtttaagggtgttaaacttagctacgggagcataggtgtcaaaaaaattgattcctggtttttgtgtgtaacctttggctacaagacatgcttttaatctattgactgaaccatctgggttgtacttgattttgtacacccatttgttccattacatgttgattgggaggtaaagaggtgacaatccatgtgtgatttctctctaaagcttctgtttcattgtccatggctttgagccaggcagcaaacttagaggcttctttgtatgattttggttcagttaaagcttcagtaggtaaaatagctgccttaaacatattagagaatctatgataagaaatgtagttggcaataggatagtttgttgaggcagcaactttatcatagatgtaatcctgtagataaagaggtttagtgatgtttccgcctgatttggttgtttgtatgggaactgtagtgttgctggtagtgttatcattaatggccacaagggaaattggagcaagagatgttggatgaggaactgatgtgggaggagtctggtgttgtagagaagggtctgctatggtatttgagtcagggaaaaaggtcaatgttgctgtttggggttttagtgaggagtggaaatatgttctcataaaaaaataacatctcgagaggtgaagatgtgattgctttggatatctaacagagtgtatgctttcatattgtctggatatccaatgaaaacacatgcttttgctcttggggaaagtttatggccatggggggaggcataagctaagcaaccatagttccttagatgatcataagatgggattttgccacttaagagctcataaaaagttttgtctttgagtaacacagagagtgttctgttgagtaagtagacagcagttttgatcataaagctccaatagacaagaagtatgtttgattgaaaagcaaggacacgagcaacatttagtatgtgctggtgctttctctcaacaatagcattttgttgaggtctgttaacacaagaagtgttgtgtaatgctcctctacttgcataaaaggaggttaatgtaagttctttagcattgttagtccttatagctttaatgtttttgttataatggacattggcataagtaaagaaatttctgatgtgaatggcagcatcaaactttgttttaagtagatagatacatgtataacgagaatggtcatctacaatgttaaaaaaatatctatatccttcaattgaatcaaggcgataaggaccccaaatatccatgtgtacaagatcaaaaatgtgatctgtaaagctggtattagaagtaaatggcagctttttttatttggcgaaatgacaaattttacaattaaaatgatgaggtagagtagaattacaatgtaacattttattgagtttgtttgtgatgataacagatggatggccaagacgggaatgcgattgattggtgtgcatctgtttgttgtaagtgactgcattacattttagattggtagatatctcttgctggatgtaacagagattgctaagcctattagcagtcccaatcttcaaggtctgagagagttcttggataatgcaattgttagagttgaattgtaaaacatgagtattggcattaagaaaggaactgatagaaaataagttgaaatgaaattggggtacaaacaaagaaagattaggtaaatgtaagacgaacgacaaaggaagcattggagtaggagtaattctaccagacctaagaacaggagatggtgacccatcgactaacgtaacagtacaagtggaagcatggggttgaagattagaaaagaaactagaattacctgtcatatggtctgtagcaccaaaatcaatgatccatttggaagacgaggaaaggagacacgaattttgtttacctggatcatcaatagtagtgatagaagaagatgaatatttaagagactcttgatactgtaagaatttggcatattcatctgcagaaagaaaaactgtctaccaggagccattacaaatatgttcgttccaccaaacttcacatacacaaatcagcgaagcatatgacacatatttaactgaaatggacaaaaaaaacacaggggaggtcgaggagaacaacgagaagaaaactggtggcctggaacagtgccacgcgcccccacacgccggtgcacgagagtcgggccg

SEQ ID NO: 304123 - DNA, 2461 bp, Cannabis indica
tcgttctcgttttttttttttaatttaaaaaaagattgtttaattttttgagtttaattattgggtttatttgttaacggagatcaaacctattagctattagcatcgttaaatttaacagaatattcttttaaaattttttaaagtatattctgttaaaccaagaaatgccgttagataggaacttttaatatataaagatatatgtaaatagttcatatattaatatatagatagataaatgatagtttgtagatatatagtatggttttaggattttttttatttatttttcttaacttgaattagatttagttagctagtgatatttttagttaatacatagtgacattttttatttagtggataaatgataaatatatatagcaatcaaaagatatttagctaagttttataagaaataaatttaaggaaaggaaaaatggttgagagggccgtgagtgttatctaatggtctttatgactcttattatgttcgaatgttttatgatctttggtttcatggttatgacaatggaagaaagtacagtggatgagattgtgcagttggctgatcagttgggaatgaatcaagaagaggagtgggaggtgaatgaggagcaagtggctgagtttggtgaaaaatctttagtagggagaattgtctccaaacagagtgtgagtgtggggttattcaggaccatgttttctagaatgtggaaatcaattggggaatggaaagtcaaaagtctgaatgaagataaagaatatcagtattttgggctgtcctttaatagcagagctgaagcaaagaggacattggagaagcagtcttgtttctttaatggaggaatgctggtatttgaggaatggccgactagtggtcaatggagagatgcgaggttggatacagtttcttgttgggttagaatgcgaggtctgcctttgaaagctcttactctgaacaatatcaaacggctaggcaatatggctgggaaggttgaagacatagtgtggaacaatccgcaacaaatatttttgaatggttatgtgcgtgtgaagattggtttttcgattcaacgtgaggtgtttgttggacgttatattctagttgatggtggtaaaagatgggttcaatttaaatttgataaattaccattgctttgctttaaatgtgggttctagggccatgatcagttgaactgtaccaaggaggtggtgatggaaatgaatttgcaagggactccggttcaaaaatatgggcagtggttaaaggaggaagacccgattccgaattgtttcatggctcatgatcaattgatggctcgacaaggaggaggaaaggttaatggcaacggtggtcctgggatattagaggtgattagtcggccggagatcgatcaatcggagttcaggggctctcgtcaggctgcgggtagtgggaaggagcagttttctcgatcgatgcaggttgagaaaagagcggatgatggggtcgatcgtgggaatgttgtcaatggtgcgataggatctaataagttaaagggtaaacttgacaatttttcagaaatggaccaaaatggaatttttctaaaacatgcacaaagcccaaaagttgataaatttaatattgggtcggtggtcaatgggcctattcattttaaatcccaattgagagaagggtcttctttgtttgatcaaacacagcaacttggaagcagtagtggaagcaaggagaaggggactcgaagctgggagaaggatcaggtgataatgactttgaggatgaggatggaagggaaggaaggaaacggaagtgtgggcctagtggtggggtttcaggccgagatgaaggaggtgatgttggagggagtcttcgtgaaaatggcaacgatgtggccgtggagatgggggatacagaggggttcgaaaagggaaagagtatgggagataaggggctaggaaagaaaggggagagaccagaaatgaatttcaattaagaacaaggctcgggcaaaggctaaggtgggcggagctcaatcggatggcattttcaatggtaatggggtgaaagggacgggtgaggtggttatgttcacagctggagatgatggtgcgattggaagggacagagatgtggtcaattcctctgaggtaggtatttctaattgtgtggatttaccttcttctttatctaaaaatgaagcggcgagccttgatgttcaaggccgccgaatgcaatgaaactactaagttggaatgtccagggaattgggaatccctggacattgagagcgttgcaatcccatgtgcgtgaagttgacccgaccatcattttcttgatcgaaagtaagttgactcgggttcaagcggagcgtgtttgtaatgttcttaagtttgattcagtgtggacggtagatagagcgggattgaatggggggctgttgttaatgtggaaaaa

SEQ ID NO: 304124 - DNA, 1486 bp, Cannabis indica
atcgatttatgcacacccctatgcttaccagcttgtaaagcacatgaaaataaaatatcttcaattatatatcaaacttatacaaagaacaaagaaaaataaaaataaaaaaaatgtttaaattaatcccattatgattgttcatttcagcttaacgatttttaattaatcatataaatgaatagtaataataataataataataaaatatctgctggttagatatgacatgaaatgcgtgttcaattgaattaagcagcatatgatcaaacagacagcaacaaagaatggattaatgcatgaaaagtgtttttaaatctctgaagaagacagaagacaattgcatcagtttcatgatttttgtccaattaaaacggcaaattaaggctgctgctctcaaaaatccaaatccaatacatccaaatgtgcttcctgaacctgacaactacactgatttaaagtttgaaagccattaataatgtgggaatctttctcgattatatatagcctatagccctatcactatcatatataacaaaaccctctctaccaagtggaggacctctttttcattttttaggtctttcctgtaaaggtaggtctttattataagataggaatctttttgcttttttttttttcttttatatatacatatatattatcagtgtgtatagtatcaatgtctgaaaaataagcaattcactaaaatgtaaacatcataaatagtacaatgatgatcatataaatataaataataatataagaaaaaggtcttgaccatctatccaaatagaagtaagattttagtaacttaggagaatgagtggaagaaaggaatgcctcacctaactgctaagaattctggctagtggcttccccatttgtataattaagtcgaaaaagaagtaaggttgttttcaacacaactttatattgggtttatgttgtagtaggttggagcatttaattaacatttaatttgcttttatgaaaataatcaaaacatcttaataacaaacataaatgtatacttattgagtgatgtcacaagttaaggctgctactcggtagccttttgtaatttcacccctcaaaaattacatatttacattacacttgaattagagtgtatttcaatgggtctggtgacatatttaactaatctataatataaatattgcaaatataattaattgtgacccaccaaactaaaatgaaaaaaaccatactttaggattttggaacctgcctaaacccaatatttgtgttacgtaaccctaggagtgagcattagccgatttggtcggtttttttctatataaaaattcagaatttggttttcggtctggattggtgcaatttaaaaaccgactgaccaatctagaacctatcttaaaaccgaccgttttgaacctcaatttgatcggtttaaaccgcccaaaccgaactttttttcctttaaaatatgattcaatttattcta

SEQ ID NO: 304125 - DNA, 3034 bp, Cannabis indica
gctaaggtacggatgggcttctcagagccagtaaggttggagttgaaaagtcactttgtatttaatgcggcatggagaaaatgtttgggaacgcccataagaggacgtgtcaggcgtcataaacctgatttagggcgattacacgataatcaagggagctagtgacgactccattatgaagaatcacatcaatcaagaagggatgaaggctaatctcacctaacacctacgcggcctactacgcaggttgtgcatgcccaattttgtactttctgggaacttgtgcatgcccatagttggcacttcaagacaagttactccttttcttcttcccagcaatcgctataaatacccctcataaaaattttgagggggatcgaaaaaaaaatacaaaaacattctctgtaagaaatactctctcattaataacagagactcatggactacggctcattaatgcccgaatcacgtaaaaactacctgcattaattatccctaagctctcattattacattattcatttggttgccgaaaatctcggtcaatattttggtgctttcattgagagctgtgggaagcattgtccaaaaacgacaatagaagatctaagatacaatggtggaaactcgaaaccacacacgccaacctcgtccccctaagatcctcagaacccagaggacgaagaagcagcctcacgagtaaacttgggttcagaagagcgagacaaatcaaatgaggaggaatacgaagaaaacctagaagggtatgatgcttgtgatgatggtagctatagagagttattaaccctaagcagaaagcaactgatcataaggccaaattggccgcacaaaaagagcaaaagaaggatgcaagagataatggtcgccatgcaaaaggccatggaaacggctggaatccacgtacatcccaaggctgtgcctcagggactagtaaaaacacaagaagagtcctcaccaagcacccaaaggcctacgaatagggatccaagcccaatacggtatctttctaaatggaaccctaagaaaaatcctacctcattccctgaaaagaacaaaaaagcctgagatccgtgaaaggtctgctctgacttcccgaaagggaaaggtccacagaggggcaagcttcctcgggagagtattggccctcaagaccaagaggactgaaagagcgtatcaatgcatcaggagcccggggaaagagggaggaaaagttagaagcatccccctgccaacttaagacaaaagcttaatgataagcacggtgacttgagaaagcacctagaaaggaagaagtaggcaataccagtgtcggaaggtgccctgaatgagggaatcttggcgaagttggcgatcctcagcaaagacatcactagggtcgtgcagagatagaagggagatgactcagagtctaaatgcgaggaccgagagccctacgccaggaacatccgggaggcagaactccctaaaaatttcaaaatgcccgagatggcagtgtacacaggggactcagaccccagcgaccatctatctcgattcaacagagtaatgactttcatgagagtcagcaatgacacaaagtgtctatgctttccactgacattaggtggatctaccgaagaatggtttaagaagttggaacccaaatttgtagactgttggaacaagttgcaagtcagtttttgacgacaatttgtgacggcgaggaagaataaccttgaactaagtgccttgaccaacataaaacaattaccaacggagaccttgaagaatttcataaagagattcaaagaggaggcttcaaaaaccgaaaaggttgatgacggacaatagttagccttactccaatctaggatccgaaccaaattccctttctagaatgagttacaacaggaaggagcagctagcctccaagactttagaagagggtctagaatacattaatctggaggaagcacagatagtggcttacagagggtattcccaacgcgagtgtcaggatatgcaacaggagcacaacttcctggagctgcattccctactgctccccaaacaagtggaatatagttctccgcgactctgtgatacaatcagaatcttactctggccctgcactatcacattttgaggcccccgtaagcgatctccctaggataagcgcgcaactcccaactcaatctacaccaaccacaagcataacaggagcaccacaaagttctcggagtaaggggtcttccaaaggtactaaacgatgtaaggaaaagagacaaaggagagggtatacgccccaatatactcaatatattgagctaacaaactctcatgagcgcctgtattttgtgactcagaaaaatacacattaccgaaaacctcctccttcgtacagggacagctcctggagagatcctagcaaaaggtgtgactatcacaacgatattggtcataccatgaacgaatgcaaaaatctaaaggatgaaattgaaggcttattccgattgggccacttatatgaatggatcaaaaataggttgccacgcatgaatccagcccaaactggagtcccagtgtctcagggaggaaccacaataacgtcggagggccaggaacctcccggagggatgccccatcagcaggcacccgaactgccacctaagactaatgggagagtcgctatgatctctggaggtcctcatattgggagaaccactagaaatgagctaaagcgttatgcttaggggtgttcattggatcacatccaatggatttggacccatccgagccaatccaattatttattggatattggatttttccatccgatccaatccaattgaattgagtcatccaatccgatccgatccaatggatgtattggattggatcggttccatccattggatgctttaactggttttttattggattggattggaatccatccaatagatcctcatggatgaatccaatctattttagccatgatttcaattcaaaagaaaaaaaaactaatgaaaaa

SEQ ID NO: 304126 - DNA, 3908 bp, Cannabis indica
actccaaatttcacctcaagggagttacgaatttaagttataacttacccgaagcgggtcccataggtgcgactcaagctctgaaaattgacgatcgacctccagagtcaattagatcatcatatacagtcaaaaatagtgtaaaatttttttccatattttttggattattttgttatcattataataggacatcattccctataaaaggagagctccacaagctcatattttaagttcaaaaaagtatccataagttcaaagcagctcatattgtgagaaataaaactcaaaatagacgtagctcaaatactatcacgatataaggagtgaactactataaatccttatgtttgtcatatttatacttaacttataattcattctcgacaatctagcgagcgggtgtggcctggagatctctatctggagatctctatccagattttttgatcaacattttggtgctttcattgagagctaaagtcaaggaatcacttacaagatggttgcaacaccaccctcaagtgttgaaagaagatccacaacaaccgaccaaaagaccgagggcacaccaatcactcaagctggtgatgggagtacaccgacatctcaggtgccaggtggaggcctcaaaaccagctccatagcttgtccctcaaggccaccaactgctcttggtactgaaaccaacaagcatattcaaccaggggaaccacgtgtggaactagaaaaccccgcggaggtcaatccttgggctgaataacttagccaaattgtggctgacttgcaacaacacatgtgagactctctcgataggaaacacgaatagttccaaaactagttcgtagagaactggtgtaacatagagagccaacgagttgaacagtacaatgaagagctaacttgtttcaacatattagagaagcttattgctctggtcacggaactaccccacgcaagtgtctttctgagttggtaagagagattccccatcaaccaactggccatgtgggaacgagtactctaggggagacccttaatgcatggaaaattactaccacacccagtaactgtgtaagtactaagtaaacaacaggtgctaaggctcccctgagggtagcgaaccttgagaaaaagattaaaaggactcaagctcaagcgagcaaaccaataggccctccaccttatgtggagggaccacgaaccactgagagaaccaactgaactactccacttgattctctctatcgctctaatgacaccatgcctcgagaccttgtaaagggaaaaagacatgtagaaaattgaagactctactttaaaactggatgttatggaattcatcaagtaaggaccaatgagctgcttcatactcgaaagtatttttaagttgaaagaggtgagttgtgacattactttgcccatggccctgatgttcaacaatatgaatacttcccttgagtacatgaagaggagttgaacttgagcaactaattttattcttttcatacttgtgatctagccaaagactacttcaaggggagtagctgctacaatgctccggatgacagctcgcgcaaagcgtcatcccaagacgactcgaatttcattctagagatatcaaaagtgttgccttcataactctgtgttcaagagacaacaactaggcctaagtcgacaggagttcatgatcgacttaggagaccaaaagacctgcgtggcaccctaaccaggaaatggttggtggaggtaggagttttaagaggtgaccctgatcgggtaacagaagttccaatcgagacgcaaaccaccacccacggtgtcaataggatagagtttgacaacctagcgacctttgtgaaaggaatcactacctgaaaattgtcagagctcaaactagatatagagtatcgctcattgctctccgaccaaatcaaagctctactaattcctccaaagttcaagaatccttcctggcatcagtacactgtgaaagaagtcgaacattcattacttcaaagtgcagaccaatctgcaaggagtaagagacaatgttagttgtagaatttccacgctgataggcttagctcatgatggtaccttaatctttcccatggattactcaatttaaggaaagatctaatggatgattttgggcaaccaattcgtttagtgccaaaacaaacctaatgatttggtagatgttatacaataagaagatgagtccctcaaggactatattcaacggttcttagaggcagccactaagacaaaaatacttagcgaggacacaagggtccgaccttcatctcacgtcagtctacactatgaatgactttcttgttagagcagatgactttatcaaacttgaagaatctgtcactctagctaagagctcaaaaaataacaagaagaaatcgctatattgcccaacccctaacaatggagcgcatagtagtgcaaagaaaaggaggctcaaatggaggaaaaagagccaacaacggagggagacaaggaaactcccttagtgagaagaaacccaaaactaggggcaagcctatgcaagagtatgaacctcatttcaccacctactctattctcttggctgtgagagaagagttctatacggtcaccctgtcaatgattttgaatgtaaatatcttcctttcaaagagtcaggaaagagagatattaacaatttctgtagctatcagaacaattatggtcatgataaaaataagtgtaaacagttgcaagacgagatagaattcttaattagacagaagcatgctgctcttcaacggtatgtatgacctaaatctctagttgggagcaatgcacctctccaacatgcgccaattgtagacagggtcaagattgtgattgaaggcccacaccttgttgggaattcgagaaagacctcagaaagatatgcaaggtccttacaacatgagccaaaagcagaattattagaggttttagaatgtcctctaatgtctcaacactacgagtgtgatccaatcacattcgtagactttgactcatatcatgtcagcttctctcacaacgatctcttagttgttaaggtacaaatagccaacatgatggtggcaagagtgatgatcaatgacagagcatcctcaaatatcttattcagataaaccctaatacggatgggtttatcacttgaagacctagagccatgcaaaaaactaatgtataacttcagtagagcagacataacttcatgtgataagattgaactatcactcacagtcggcactacctcaaggtagaccaccatcatgaccacgttcatagtggtgaattaacatataaaggaaactaacattcaatccgtcaggaaaattaagatttataattatagatcatgctcctaactatcaacattattagattcccaaaatagaagttgtgagaatcatcttctctgagaaactttaacaagtcaattaaataaactaataacatgaacaagagttcatgattgctctagattcaggtcgatatatcattgattatcattataatatgaattaggtctttattataaatgacatgtttgataaagacatcttaattaaatatcgatcactttcatatataatctctattatatacatcacattcacttaaatgtcatgctacatcaataatttgaatagatattacttacactgaataaggggcatcaatgaactgcactagcaatcattgattaaagattcttaaactttattatgttattaactattttattcatgactaagtaatcttaattctctgtacaatactgttgttggaggaatttagacagcaccaaataaaataatatatttaaaatatgaacaagattatgtgattacttgtgacagtcagtagtc

SEQ ID NO: 304127 - DNA, 1451 bp, Cannabis indica
atagtcaccaattcaaaaaaaaaaaataaataatataggtgcgcagtcgcgtgatacgtgtatatattgaatctcataatgagctaacagtttagctcgctcattaaagaattcagatttaatatatatacatcttgaagaatactagttaagtgagtaccgctacagctaaagcgactagcgataaattaaagtactcaagatcccctccaataaaagatgaatattttctcatcctaaataaaagagtgatgaaggcacaatacaaggaagatcatctcgcgtaatacaccccgttgacgagaaaaaggaatcgtaagttttgcctaagtccaaaatgccaaatattgatttggttacgtgaaataactaaaaaataacttataatgaacgactcggaagattcatgacttaaaataaatgtgctaaacttgttaaggcattcaagaacattcatggtctagatgttaacagggagagatcaaacttatctaaagcctactcttagtaatcaccttggaaggtttgtaatctggaccaaggtgacctacgaggagtctatactcatgcatgcttccaacagtgttttccccaaaaaaagaaaggtaaaccaactcaaccataacgtgttgagagcctatagtcaacaatcagttattttccttattttaaatgaagtatttatacatatcccgcatgttaaaagatatataaaatgtggggaatatctatgttctatatttgttatctagataagataaaaaataattattatcatactcttataaatagcaataacattaatacacaaagaatgaccaaattttcaacttagagaaattctgtcgaattgtatccatgtcaatattcatacacacccataaataaatttacaagttaactacaaaactacataaaaatttatatcattcttttaccattcggtatttaaattcactacatttaattaattatatttgttaaaaatattaattatcaaatctcaattaatgctaacaaatttttgagttaacagattcagttaagaagtttggaagaaaaaattgtaaaaacattaatccaatataacctacatagttccggaggctaaaataatcccatttaaaaatttgggctaattctatatccaataatccccgagcttcatgtatattatgatttaagtgataatgtaaaacatgcataaatggtgtgcatatacaattttcttaaaaaaaattacttaaatttataataataataatcatattgctttgagtaactctgtgatgatgaccctctaaaaagttctaataataatattttggaatgtaatttgatgataaaacttatcaaataaatatgtagaatatttatacgtacaaactatgtgtataatacatttcaattttttatttctttctttcattaatttctcatgttattgaatt

SEQ ID NO: 304128 - DNA, 4586 bp, Cannabis indica
aaagtagaagaaaaatatatgtatatatttaatagcaagacaagaaaagtgagagtgtaagaataaaaaagagtgggacctatgataattaattcttccttctaattatataaccaaacataataattgaaaagccatataactaatttattatataattaatgcatgagaagagatttaattacaacagaattattggtcaattgtaattgtcagatcgttcaagcctttttcaagaatgcacgtataaatatagtacttgaaaattagggatattagatttttataccaactttagtgtaaagggaaaattttatcaagtttgttgtattgaaaactataacccaacaatacccactaattttagacaccaataaatttattattgctggtatatataaatgtatttatatataaatgtgacaaaaaaaaatactattttaataacaattttttagttatgaaataaatttttttgttacttgtgactaaaatatggtatttaaatataagtaattaatttactaaaaatatatttaatcacaacaaattataatttttgtgactaatacatttaactacaaatattttaatcaatataataagaatgataatttataattagtcataattttttttaatttgtgactaaaactaaaaatttttacaacgtgtatatatatatttagtcacaataaattatgatttttgtgattaaatttttaattacaaatcttttaattacaatataaaaataataatttataattagataaatttttttaatttacaaaaatttgtaagtattatagatatatatacatttatttatttagctaactagatagcaaaaggtaaggtccaccacttgtgtttgttcatgtagtacttacatataactcttatctttcgaaagtactagctacacaatactgtccttacaaaatcgatggagaagaaaaaaaattataaatatatatttttttaattaattatattttttttatttaattttgggtcaacaaaatcatactaattgataaaataataattgaacaacgacgtactttaatatatatgacatgttcgagagacctattgatggtaggtttggaagattgttggctactcaaattctacccactaaaataaatcatatatatatatatatatatatatatatattggcatggacaaccctattattatgagtacgtaccaaccctagcaaaacaacaaaatgcatcatataaatatttttggtgcacgtacccaatattaatagcttttttatttattatttatattgatatatatacgtatgaagaataacttgttgataaattattaaatatatttgaatatatataggatatgattttgtcctgtgatatattttcatagaatgtatttcgtggtacattagatgagtttcaaggtacattaaatgagtgtcagggtacgtttctactttttaaccctaatcacccctagatcaatctcagccgtcagatcaaataactatctcatctgacggctgccgtacatcacgaattacaatcagtgaaagtaaaataacaggataaaatcatatccctatatatatattcaattggagtgatttaaaacattattgaatatatagtgatttacaaaattagatgttcattcattaatgaaaataagaattaaataaaaattcaaaactgtacgaattaaataagaaaagaaattaaaaaattagtcacatttaagttagatgatgatataactaagtggtacatcaaagtgtatcaacaaaaaattatgataagaatgatgattttagtcacaataagtattgtaatttaaaatatatttagtcataataaatataattttgtgactaatatttttagtcacagatattttagtcacaacataagaatgatgatttataattacttataatttttttatttttagtcacaaattttagtgtgactaaaaataagattttttatagtgtttcataaccatagcaaggtggtttttagcgtgggggcggcatggatctattatccgaagaccctcaacccgaaataagaccaattcataaggccaacaatagtttgattgtaaaatattcaatcatttttttcctagtaattaaaaaccatttgttgttaaaaaacttgtttaagaacttctttgaatcgtttcattttctaaaattttgtcataaaaacttgggacagtcctaatactaataactcatccattaataattacaacaatattctcttaatttcttacatatatatgattataacaataaaattaaaatgcaatatatagatagataaatcgtattcacaaattagacatgtaatatatattgaatagttttatttttaacaaaaaaaaattgtattgttattagaaagagcccatttaatatataaaaacaaaatgagtcagtgcatgcatgtatttatgtctaacaaacaaagctgcataatttggaccctaccttttgttattttggtcaattgaaaattgatactaattattgattacaagatatttgtttgtgaatatatatatatatatatatataatttattttgctgagtttaatgtgcacctatatatattctatacaaaactatttcagccacgttttctatttctacatacaaatctttgatctagctatatatgtgtaattttaaagagcaaattattagttgcctaaccccattaatgttatatatacactcaaatttaacttctagtaattaaatacataagtttaatttttggcaccgataactgtatacttaagttatatttttaaaattttcgtaagtacttactgttaaatatctaattaatggtcctaattaatttataagatcattaaatttttattttttacttaaaaatttatttaactataccattacgaaaatgacacttggacacacttaacagcaaagtacttatggaagttccagaaatatgacttaagtattattaccgtcaaaaattaattatatatatttaatttatctacaataagaaattaaatttagatatttatataataaattactctttgttaaattaaaatatggtgtttgacactttaaaatacttattagtatttctctcaatattttttaagtttacttctcacaactacatcttatgtaaaaaaaatttattattaaatatggattgctaaataatattaatataacaatgaattgatgagtagaacaatataatatatatgagttaggtaataattaacctaataactaaattagtcagtaaaaagggtaagaaaaagaaaaaaaaacacaatgctctcatattttcaccttttgcctttgtttcttattaatttatttatgttttggtaggtagatagacatgagtttcataaagaagaatcttttgaaagacacccaaacataattcaaaataatatataattccatattaattaattgatataatattttattaattactaattaattaataaaatgaaaatgacaaaagatcacataacttaagacctaaacttcaaataaatgaataaatatacaaaagcaaccgacgtacggcgcttcaaacctatattccaaaactttttttttttttcattttcaattaatattatatttttcatatatatatattaattatgccaaacactccctaaattaagcaagtctatacgtacgtgttattatcttttatatcccacgatttattttgcttttttgtctttaaaaaaaataagacaacacattgcatggagccgtattgtggggtattatatatatagaacaacaaatgtacatattgattgaataatgattgaataaatgtaagaaagtatagagtttggtcgttgcttaattgccaaataatatatatatatatatttatatatatatatataaataaaatgagtgaaagaaacgacagagaaggagattagggtttagtgaccgacaacaaacatgaaaccatagattctggggttcttctgatcatggtgacattgccattattgtcattattgtctctctcttcttattcatcggattgttattagattagctagggttagggttagggttagggttagggtttttatttttttactattatggatttctaatcattgacttttactatatcctaagtctatttgcacgtgtgccaatagtataagtattattctctttttctttttaatttctaataatatatatatagggatatgattttgtcccgttattgtactttcacggattgtaatccgtgatgtacggtaaccgtcagataagggagttatttgatctgacggttgagattaatctaggagtaattagggttaaaaagtagaaacgtaccctaacactcatttactgtactctgagatccatctaatgtaccacggaatacattccgtgaaagtacattacgggacaaaatcatatcccatatatatatttacaaataattaatggtattatgtaatattgcataattttcaagttatattaatcaaaaaaaaaaaaaaa

SEQ ID NO: 304129 - DNA, 4755 bp, Cannabis indica
gggttttagataaaattgtcacatattttcaattttcatatgtattcaatttgggaaaaaattatcccccaattaattcatagatattcaaatttccctatacatttataccatcaacatatataatagaatttttgttagaaaaatttacatgattgtttgaagaaaaattacaaaaatatatatcaacatgaactataaaaaaattaattttagtataatttttaatcacaatataaattttttacgactaaatataacttttaatcacaataaaaaaaattacttgtgactaaaatataatattagatataagttgtcactaatttagttttagttacaagtattgtgactagaaacatatttaatttagtcacaatatattataatttttgtgattaatacatttagctacaaactttttagtcactacataggaataataatttataattagttacaactttttcatttcagtcataagttttgtgctgactaaataagatttttttgtagtgatagaaaaattattatttttactttcaactttttatttataaaaatacatcttcagtaaaaataataaatactttttagatattttatttatagtttcatatagttgtcatgtggttgttaatctaatttcttttagttattttatagtttatttatagttcttgtgaggttgattttgttagtttataggattcatatcaaagtttcagtggaagcataaaataggatcaggtttaaaaaaatttgtgttgaatctattatgaaccataaatcttaagatctcaacacaattagcataaattgaatctaactgcatgaaaaagaattttacctcttgatgcctattaagggattctcgtttcttttcgtatacgaattcgatcatctattctaaagtagtaatagacttgttgaagagttcacaccagatctttcaaatcagcctcaacatttaggaaaagagagggcttatagatctaatatgatgaatgatttattacgtgtgagagagatgagggatagcgagaattcgaccactaggttttgaagaattcttagtttttcaatcatatatgtccatcccaaaaaacttgcatatattgtatatgttgtgtctctaatatatcagttttaatctatatatatttgttaacacagatattcgttaaccaaatatctagccttttacgtaataaatttactacagaatttaattataataatgaacacaagatattttaagtagttgtgtagttgaaatttacatactccatgagtccatattattagggattattatgttaatacagagtataaatctcagtaaataaataatagaattctctctctattttactgtcccttttcccattgattctatccctatttataggtgtataggttggcagttatttttattgggatcgattcatttacaactgttgatgaaacgtggacattctccatgtttcatttatttacacatggtataatatcttgtaactacccaaatgctctttatccttatccttaaaaacagttatgctgactaagaaagttgcttctcgctgagaataagttatccttcttttccgtatttagaggaaaatatgcttagtgtagacataatttttctcgcagcactctcatattgtagtgatgatgcgagatgattactatgtcgcataaaaagcgagatgatttgagcgtagttattttcaccttgctcatgtatgtggtcgatgagttacaagcttcttgatgtctcatcttgtaagcttttatcatatactctgtttatctcgagatggacatattgcctcatcaattatattagtttagtagttgttatttttatctcgcatatgattaagtaatcaacgagtttgaacatttctatcaactttaattaattggaacgagttatttaaatcgcatttaataatgccatttaattattatattcttcaagtagatacatattccttttgtaggacacgtgttagtctctgatgaacagccggattttgggtataacaattgcccaataaaaagtactttttgattaaaaagaactttttaaatgctcttaggggtataatcatatttaacctgttttgaaaaattgcatgcttttatttttggcggttcaaaacttcgaggcacatcattacccattttatgttttgaccattccattctcgcatagttctcacccattagatcagatttcctttgatcgaacaatgatcacttattaggtataaaattgaagtttgcacatcattttcgccacttttagctatcagaccttcgagcttttcgtcgaaatctctaccactttcttcccaatcttgcatgccttgactatctcttacatttttcctatgcatatcatccaattacaattcttgtaataccctaaagtttaataactggattagcaaccgtaactaagttaattaagtgtaaatgagaaattatattattatatgatttaatatgtggaattattatgatttattacattttaagactccattggtgtgtcagggaaatttttgtaattttgacctgagaatggtaaaattataatttatggtatattgtgtttatggactatattattatataatatgtttattctgtctttctgcatgtgatttttgacaagttgacacggtatagtcacaatcgggtattttgggccgaaccggattcggggcccaaaatatatttttgagatttaattatggtttatatgtgttaaatgagaatatatgatttatgtgatatatgtgtgtgagtagaaatgacaaatttaccctttaatgtgtttatgcctatatgtgtactttaggggcaatttagtcatttaactaaataatctattttcaataaaataacatttcagccaaaatagaaagtcattttcaaggttttgacaccccaaaccgcctctctctcaccctctccattttgtgttttcaaattaaattttagaagaaaatgcttggatttggtgtgatttttttgtgcatgttcttgcttggagcttgaggaacttgatgtagttattttttcatcccttttgcctattgttaatttctggatttaaagattttctatggtgttattggtgttcttaagtttatagttgcatgttattgtaattgaaatgaattgtggtgattttgatatatttttgctatgatttttatacttgctgcatctttgttgttttgaaaggctttggattgaactatgatgtgtaaattttgggttttacactttgaatttttgggttgtgctttgaaattttgactttcaaagcttgaagattatgtgctttcttgattccttgattacattccaaagatgagtttttgggtttgtttctgagctttttgctaagctcaatttcttactaaagttgaattaattttgtgttgagttaattttgagttatgcttggtttttggtttgagtttgggtaaaatcaaaggcatgaaaaaattgggtttttgtgaggggagcaggagctgtcgctgcggccacagcaaggctcgccgtggcgagctccagcaggttggaggcaccgcgatgagggccctattttcctagtttttgccataacttttgattccaaactccgtttcggacgttcttgatattggttgaaagctcattttgggctctatgtgttgatctataattagagttcaaattatgtatatgtgtgaaaatgaatttggaattaactctatttgtataatcctaggaatgtgtgactaggatgaccagcgcttgctcaagaacatccgggaatttggaatcttcacatactcggattagcaggtaagatagtaaactagcacatagagattagtgcaatggtgctcctgtatgttattttgtatatgctatgtgagaaacgattagggttattactctaaaatttagcggttatgtgatctagggttattactctagaatttaagtaaatatgattgcaatagtgtgctatatatgttgatataaataattatgtggttaaggcataatcaggttagactcggtaaataaaaccgagataaactaatccaaggccttattataaatagacatgtgagcgtaacacataggtctatgacaaatagacaatagatacagtggcatcaatacttaaagtgattttaattgatattcatattattttttatactgtcttacttggccttggcggggtaagtcagttgttgatcaaccatgaggttgagggctttacggtgcatttaacatgttcaggccaagctagaccacgagggttgggtctaccaggggaaaattcttgtaatctccacttttgtcgcttaggtccccgtgtactaattacttgtaatattttgaaaaagttttacgagatcccaaaataaaatatgatcttttggatgtttgtaaagtttaataattacaagttattatttttattcaatatttttttaaagtttaattttcactcttggctctagtaaatcccaatttagtaggattagtatatgtttattcattgtatgtggcatttcttaagttaggtcgttacaattattgttctagaaatcatcaagactcagttttacaaccttcagaacttcgattgcgaagcttccttctgcccagacactttcatcaaaacagtaagtgatacactctcttttcttattgatttttctttct

SEQ ID NO: 304130 - DNA, 813 bp, Cannabis indica
tttttaaaatttgaaaacaaaaattgttgtagaacacatttttatttttcaaaaacaaaattttcaaaacaaaaaatttacttttattttttgtttttaaaaataaaaagcaaaagtgttaccaaacgcgatcacaaaaagaaaaaaaaataaacagatttaataaaaggtcggctagaggctcatggctgcacaccacctgataaggaaggactcgcgccagacatccgttccacgatcgccgtgtaaagctcatgaacggctttcatgttccagatgaagcaggcttggtaagcactctcctttggaacttggcatctatgagctcatcgaagagggtctcggtggtagtgcccaggtcacggtttgacgccctgacccgctccaattctgtcactagcgcaccaacctccacggtggcccttttcgccagcaaggccgcctattaagaaataaagccaagtcagcaggtggaaacaccaaaatagaggaaagggaaaaataaaaagcaagcaccatgacggcttaccccaatggcttgccgcattacggagtgagccagtacaaaggcatctgcgctgctacaggctgcccaagtctgtgtgggaagtttagaggtgctcccgaccacctggtccaagagctccggggcgaagggagcgacctctcacccctttaggccagctggttctccagggcctcaacctttacaatctgccccattgggggcacaacatgttgggttttgtgccctaaataaaacccatttcaatatagtcagatttacaaattaataaagatcagaaatcattt

SEQ ID NO: 304131 - DNA, 1368 bp, Cannabis indica
cccgactacacgggttttaaattttttggcttttttcggcagcggatcggggcgggtggtcgggtgttcggatttgcgggtctagatgtgcagccctacctttcacgatctctgtaaagaacttgatctggaagaacaatctgacttagatctcgatggaaatagtacttccaatattgttctgaattcattgagttgggcggaggaggtcgaggagatgaattttcaatcttcagctaaggacactggagtaaatttaaagcaaatctggtaagtactccctctactcaattggaattcaaagaacctttgaaagtaagtgatcaagtagttgttcggcttgatatgaaagaaattgagatcgaagcttcctgctggaaaaattcaatagtgtgtattgtcttgggggctaatcctccatttcccgtatttaaaggtttcgtgaagagaatatggggcaacctaggagtagaaagaattgttaggatgcactctggtttcacattagttagctttatagatgaagctactagagattttaatacttgaaagaggagtcatccacttcgacaagaaacttgttgttcttcgaccgtggactagtgatatggatgttgtgaaaatggtgaggtcggtccctgtttggatcagattaaatggactagggctgcagtattgggggaaggacaacctcagtgccatggttagtaccattgacaaaccaataatggtagacaaagtgacctaagagagatcaatggtcaagtttgctagagttcttgtggatatggaaataatgaataatcctcctaagtctatttcttacttcaatgaaagaaaacaacttatggagcaaccaattgagtatgagtggttaccctccaaatgtgcggcttgtgatatgttagggcatcctttggctaattgtgacaaggaaagaggcttagtttggaagaagaaaatagataatgacaggttgggcaaaacaattgatgataaagcaaaaaacataacagatggaaagaagcaaaatgcaaaggaacagttgccactagctacatgttaccacagactagtccaaccatactctctatgctgaataaaactcatttcaatataatcaaatttactaattaatataagattagaattcgcttttatgttgcatgtttcacatgatttatttcatgattatatttaatgtgtaaattctataagttcataacatatatatttgttcatgattatagtgttgtcagcacagtgaaataaaatcatgattatatactcaaaaagtttaattctcatgatttttcagttcacttgatttagactgacatgataattgacgataaggtatacttacac

SEQ ID NO: 304132 - DNA, 1330 bp, Cannabis indica
tttttttttttttgtcatgatcatgtattttgtagttatttaggattgtctctaaatttttaaaaaattttaaataattttacattgtcaaaaatatagttttaatattttattacaagcgcaattattttttcttatatgcatattaaatactgtttgaaccttaatttcgtaaactattcagaattttttgtaaaatttacaagtagttttatatgactacaacatattcgatcactaaaaaaattaatttaaaaactattttagatgttgaaataaataagggatttaccaaattattcatttaagaggatgtactgctgaaatttcgtgcataatttagtgttagaatttaattgtaaatacaattttagactctgtgttttgtaaaagttatcgattgaagtctctgttttgttaaatgacaattcggatccatattttttaaaatgatagaaaatacacctccatattattttttttaaaaaaaaaatcaaaatccaagtccctaatctaagaaaagattcccagttcataaccatatgataataatttcacaaaaccaaagatgataaaaatcattcctttttttttttttttttcttgataacaaataaaaatcataactttaaagagagaaagagaaattgaaagagaaagcctttgcattttgcaatgagacaaaactctcctctccaatctacaggcacgcaagcaaggaagaagacacgttacaacatttctccctccacacaaaaaccccaaaccttaattcccttcctcttctattttccacaattttaacaacaaaaaaactataaaaggttgtacctttcgacttgggtttaggccaaaaacaacaaacaaccctccttatagataacaaaaccagcattgacaaaccactctttttctgggttttttgtttttcacaattttgatttttggggtttattagttagtttcattttatccatcgaatgaagtgtgttgatttatctctttacaataataataataataataataataataataataatacaagttcaggttcagctatatctgatggaggaagacactgctaatagtaatacttcttctactacttccaccactacaaacaaggtatatttttattccattgatttctttctttgtttcattcttctcagttttgttttccattttcctcaaatggggtaccttttgataagttaagactacataatttcatactactagtactttgatttggattaaagctaaatggggtttgggattggaaactttagaattgagattaagctaaatggggtttgagattgga

SEQ ID NO: 304133 - DNA, 2595 bp, Cannabis indica
acctagttagtttggatgaaaactaatacatttttaaatttccaaaaggaaaatttaatataataattgtttttttgtgtgatttgtagcaaaatgatatatagtgtggttgagaaaatactatcacaaattaaaaaatacaaacactaattatatgctctatttacacagaagattatattagctatccttttaagctcaatcaaataggtaaaatccttcaaggcatggagcatcagaggttcaaatttcagataggaacctaacaaagtaatttaagagatgcaaattgaaataaacgcaggatcaggataagggcaagcctaatactaatatcaattgaacaaagatatatacaaattcaaccaaatgattgagcctacccaacattgatctgattctttacacaatttaggagcaaaagtaggtagctatctctagacattaaattacttcatcttacaatcctcagcaacttctccatctgttgaagcaaagaacagcacagcaagatcgggttaaatcggtgaaaacaaaaatatttgatatcagataaagataaagatggaattatttgaattgagtaatgctagaagttcctcacccctaagatatattgcttggtttgcttgagcatcagcttcagagttatgttcctgaataatatgagaagtttttattacaatgcaaaaaatggtgcagatcaaattatgctaattttgatataataaacaccaatatagtgcttagtttcaaaacaaataagtcaatctcaacacaccctgtaaacatgagttatctgagacgaagaaaacttttccatgagctcctttgcctgtttacacaagttggccatattctggtttttggttttccactcgcctgtagtctgccaaattaggaaactgaataagaaccacaagcatgtaaactcagaattgaaaccgaaagcagttgggaaaggaaaaatatatccaagtgggcaaagttctactgcatttatacaggttaacaaataagaatttggatcaaatttgaatactttcataatcagttgtccaatttttaacctcacaaactttgattgtttcagcacaaagcaaatattccttttcttcacttgtgacagcagcataatgtgtcaataatgaattaaacataaaatggacgacaaattacatgtattttagggtacactctcaacaaacctgcttacagacgagcatagagtcaccctgacaacatatatgtttaaatcctttcttaagagcctgtttaagtcctaaaattaatgcacgatattcagcaacattattcgttgcaatgccaaccccttcacgcaactgccatacctgcaaagacgaaaagttatgatatggctaataaccaatagattcaataatcagaggcccccgatttatttagagcattataccacacttccatccccagcacgcaacacagctccagcacctgcttgtccaggatttcctttcgaagcaccatcgaattcaagaatacaggaatcctggaaggaacacaaacaacaatattcattctcaaagctcaattctgcataaattaattaggcagcatcagtatggaattaatattgtcgtatcaatatgaaacactataaggaatggggagacatgaagatagttcaccaaagatcttaacaattcatgaactattgtcaccaaaccagaaagaataatgtacaaattgttttacacatattgccaaattttccataaaatacgtagtcacatgactcacatacacataataacagtccacaagagcactaactagatatctccagagatagaaacttacacaacgagaagaaacattaaatttttcaatgggggtcatgtaactatttgatttgaaatctttattttgagaaattctaggtattgaactacagccaaccttctcctgcaaaaataaataataataataagtgaatcaatactgccacatcatgattaagccaaaacagaggctttcacattctcacgtcaatctgatcagatcaaaagaccttttaatcactacaaacatgaatcatagccaagtttggcaagcatctaagcacaagattcttaatttgcattcccaaatatgatactgaaaaacagaaataattatttgaaacttatcaagctaaaatagagacttcacttcacattatcatgtcaatctgatcagttcaaaaagccatttaatcaccagaagcattcgtcatacaagttatatatgaactcccatgtttggcaagcatctaaccagaagattctcaatttgtagatgatcctaaaaatagatataattctttgaaacttataaccgatagtttattatatttacatacagatctattcctaatatcatatcaaaattttcatgaagcacaaattgatgtagacttacagcaagctctactaactcaagtgcttcctgccatgcctctggcgaagagtcatcgtcttcctcaaaggaagctggttgctgagagaaaaatcagtagaaaacaacaccattaacacaacaatataagttcagattttagttatgacgtacaataat

SEQ ID NO: 304134 - DNA, 1804 bp, Cannabis indica
tgggaagggcatgtgtgctatgaatttgttaaaaagctgagattgatagttggagctttactatcgctgtgttcggtgtcgaggaaaaccagagagaaacggtggcagtagctaccccataagtatgttgatggatgttacttgaatgtgaaagtgaattctctgacctcaatcgatgccaatttgtcattttgttatgttttttttttctaacttcagtgattagatttcaattatggtgttgttgaggtgataatatttattcttaatagcaatacccatttttcacttttttatttctaaaacttgagatatgtattttcttcagaatttgagcattccattatagtttttttctatatttttcaaatttatctgaattatatctgttgtagtcaattcttgccttgatcttgatcgtagtcgtagaattggttagctggtagatctttcaagttaattcaccattcaagtgtattttgagacagtccatgctacagcatcgagtttttcttttatttgaatgctttttttctttatatgttctatgttgatgaattgttgcatttggatttggagggtttaggttgctagaagcagcagctagctcccataatatgtgaagttttgtggtgacatatgatattttggcaacggtcaagctgttgagtaatagtgatcgtaaacactgtaatgtattgatgtgaatgagtcacttgtgtgtttttaagagctgcaaaaaaaaaatgcttaatattgtactaggatcagcattacaggtttttgttgagatcatgtagtctggaggtttcacagtatatttggcaacataaaagaatttacaaatcacttctgaattcatgtcaggttatatgtaaaattctttacttttttggtagtttttttagacaaaatttttaatattgatttgaatctaaaatagaatttgtatcttgtatacaattgtgtatgtccacttcgttttgatcagatgaaaggtgaggagcctttaagtgatgagtttaactactgatgagaattgtgttcaattattttggaaaatttatcattattcactcataagttaatctatatattactaacttaaaattgtgaaaatatatttttactttttactggttgacattcttgaaagtcatcatttaacatttttttttacagtagaaagtgtgttgtctgaaacataacattatgaaaccattaatttgcattccctattttaacaactaagctggtttatctacttgtctaggttctttacatgtgtttaccaacactggctacacaaagggggattaaatatgataactaaaataagttcttgttgatacatgtttgtgcaaacaataagtattcacaaacatactttgaccaggttgagagaaatttataattaaaataatctcaatatgatacatttatgagtaaataaatataaatttgcacacacgcatggatccagttcaatggatttgatcatagaaatctctaatacattgatccagtttagtatattgttcatacaaatccactctctgtgatatatgtttgtgtaaacaataaacacacttgaacacacatacacaaacatatttccctggtcaagtagggttgatctttaagatgaatttttttaaaaagaaattcataaaagtatgttctaatttttgaaccaatagctaatcaatcacagggaaagttcgtataatttgtcctcctactattgttggtttgaattcataaaaattagtgcatgtttgacatcataactaaaaaattgttt

SEQ ID NO: 304135 - DNA, 3272 bp, Cannabis indica
attatacccactgtttaaattcatcctacacctgttccaatacctatttaaattaaagcgaggacggaatagaaattatccagtaggagaaggattcctatcgggtacccatagaaacatacacgggacatgcatggtgtggccggggatcgctcacccacccccatacccgaatcctaaattcaccctataccgtttaaataaaattaggagacagagcaaggattactcggtgggagagaatatccattcagtacccatgaaaatatttttgaaaaaaaagacctcaaaaggaataaaagaaaaaccatcgtacaaagtcattcaaataataactataaaaatttcattacatgaaacataaaaattcaccaatagccttaaaaaaactaacatagtctattgttgaaataaataaagtccataaataaaaaataaataatatcttttatggcaccttatcatcggtcatcataattttatcaagttataaagtttacataaacttggtctctataataatatataagaaaaatatattaaaacttataactattaatgtaagtagctaaactaaataatatttgaataattcaaacaataattacatcttcatcatcatcttttatattttcatttactgttgaatatgttggtatttttgtaaatgaatctaagaaacaaacataaaactattagaaataactaaaataagaagaaaaaaagagagcaagatatagcatacctaatctttcagcccataaccaatcttgtgcacacaccaaaacttccaaagtgttaggatgtagcctattacaatgatgagagacatgtctcccgctagtgctaaaagccgactccaaaggaacgatagtcactggtatagccaaaatatctttagcaaccctttgtaaagtaggatctttcaacacattgctcttccaccatgctaaaatgtcaaatttagaagtccttggcaaaacaacctcttctaagtagtactctatctcagacttaaaagtatcattggttgtgctagtaacgaacaaatcataaccagccaaatcatcaacaaattcatcaacatccttatcatgctcagagcaactcaatgaatgatcaatagtacttccctaattttgattaatattgtattcttccactaaatcaagacacaattttcgaactctctcaatttctattgaggacttctcaccataaattcgagggaagtagtattcaatcaatttcatcttaaatcttggatctagaattgttgttatggccaatattccatgtattatagaccaatacttctcaaatttttcaatcattttttgagccataaattttatctcacgacattctgactcaagacattcattaaacaataatctaatcttacatatcttaagcaagtgtctatattttttctcactgattgttaggcgactgaaaacatccttatgtatgagagcactagaaatcatcaagtaagtagaattccacttagtcttacaatcaagaactaattttctagtgcatgaaattttgatttgtcttgccgcttcctcaaacttttcaactcttttcggagttgcagtccaaatccaataaactacactctcacgtatgtttttaataacatctttaatttcatccaatccctctttaactatcaagttcaaaatgtgagcacaacactgcatatgaataaattttccacccaacatcaaatgggagcaagacaatttctcgaacatgaaatttaccatggcatcattagtagtacaattatctagagttaaagtagataacatacgatcaatattccatgaaaccaaacattgcattaatacttttgaatgcttcagcagtacgaggagaaggcacatatagaaacctacaatcaaaatgtattgaaagaaaagtattattacatatttcaataataaaatagaactcaaattatatgaaactataaattacctgataatgcgattatgtaaagtccatgagttgtcaatgtaatgggcagtcaccatcatatagtctcttttttgattatttgatgtccatatatctgatgtaataacgattctgccactattgccattcaaataattcattttttttttcttttctacctcatatatcttcatgatatctttcttgatggagtttcaagacacatgattaaataatggttgaatggagctcacaaaacttctaaatcctttacgaccaaccatactaagaggatattcatgcaaaataatctcttgatcgaatgaatatgttctaagtgaagtgcctccatattttttttttgctaggattcgaaattgattgctttatgtctctatgctttcagagaggacatatcttaaaatgctcgtgcaaatgcttagttccatttctgcttgaccctgctaattttttttcacaacaattgcacagtgccttatcttgtccattgactttttgctttttaaaatgctgccaaacaacagaagttagttttttttttccaatatccacatcaattgttggtggagttgatttatcagtcttagaaatggaagtgagaaattagtaaatgggacagatcttcacttatcttcgttagatggattacttcaggacactctctttgaaactattatcttctgccaatagatgtgaatatattccctaaaaattgaataatataattgttaataaataaataataacaaaatcatcatttaagtaatacaaataatctaataccaataattttatatatattatatctacagtaattaaatacatattaataattatcatttaaattaattatggtaatattatgcctacattaatatatattacgaatagtatatataaatgatgatcatttaagactaactgtagtaatatttaattaaatacaaattatcatctatattatacctacaatgtcaataatatacttagatatggtcaaataatattatatactttaatttatatatatatatatatattttaagaatttaaaattaattttctataaataaagatattgttactatttgaaaataaaagcaatcaaataaatttaaagtataaaaatagagttctactacaaacatgatatgagctcctttgggattgtttccaaaaaaacaaaattactcatagtatacatttatatctttatatattaaaagtgtctatctaacggcattttttggtttaacagaatatacttaaaaataaaagaatat

SEQ ID NO: 304136 - DNA, 3362 bp, Cannabis indica
aggttgtggtcttctgctattattatatagcagtggcctagacaaaaattaaaaaaaaaaacactacgagccatttgccactctcgtagagacaatacttttgattgaaacgttcgtttctttaggtggcgtcaagtggcagctttctgttgaaaatgccttgtcttgatatcaaaatttcaacttagtaggaagaaattaactttagatttaccgaattgatgagatattagtcattcgacaaattgtcactgagagaaagagaaagaaaaaatatataagaataaactaaaataacttgttttttttttttttgtaggttatagtaaaataactgttaaaacaagaaaaaccaaagaatgacacgtcccatagtaagaaaagatccattataactgagaaacgacttttataacacttccaattccaaagcaatgaatcttaaatgttgctgttacacggttcagtgtacaacagtacgtttaaaacttgatggaatttgatcaaaactcaaacaaacatggaaaaattcattaatttgatcaaaattcttggatttgttaacggaattcaataaccaagggtcctaagaattatgtgcttcatttaacaaaagccaaaaggcaagtctgaattcggtaacttttattactcgctttctgtatcgtaaggtccttccatccaagcacagctctccgtcttcaagatgatatctagtttttggacattagaagatcttcatctctataatcacaagattcacagctctatctgcaccataagtgatcaaaatcaaacacatacccataaaacactttatttatttcaattctcaactaagttcaatgtcagatgaattctatgcaactacttagaatttacttagtaaacacttttacctcatctgctatcataataaataaataagtaatgtcaaaaataaaaaataaaataaataagtaatatctctcatcaggaatttttcttttagattctaacaatgaaacaaaaaaaagttccaacaaatatgttaacatgcttttacctttttaatcatcgaagtttctcctttccactgctcctcttagctgcttctttgactttctcaatataaccctcaataggaggagttaaagttgccatgaagcgatttgctgggaatggagtcaaatcaggcaccattgcagctgctttcaagtgttcaggcaatgcctcaatcgcttctttcttcattcgtaacagtgttgattccgctgcttgtcttgcacgatgacgcctcatcatgactctactgtattcctttgcaagcctccgaccatcttcaactgtcagttcatatttaggtagctcattttcatcaaccaatccgagtgatatcagatccaaaccaggagtcccaataattgttggtgtctttgatacactcatttttcccttatctttcttcagcaactcaatctctcgctgtcgatctttgctaataagccccaatttctccctctccgcttcacgttctctctgtttcggggtcaagtgcctaacaggagtaggagcacttaaacattgatcataaaacttttctagcctatctttttcactaccttttctgcctgtaggaggagcatccccagcgccttttttcgtagttaccttagatctcttcaattgctgcccatctttcaacttacctttaccttttgcagttctactaactgagcatctttgcagcaattgatggctcgaactttcgaaatatgatgccaacggtttcgattttaatattcttatcatctttctcaaaaacccagtaaatgcttgggagaatggaaagggctaaagcctcagttcttcaatcaactcacttcagatatcactacatccacagcacacaaagcactcaagatggaaagaaacaacaacataaaatgtttttcagcagagttttcctagtagatagaggtttgaatttcatttctagaaaccaaaatcttgaatctttcaaaagcaaacatccaaatataagttgtataattatcccaacaatcacaaaacttcagacttttcccaataacgaaatgaaacagaataaaaggaatcaaatgcatatttcaaacccactaactaatgctcttcttccgaactatttttcaaaggagtactgacagtctcatctcaactattttttgatttaattgctttaacactgaccagaaaacatgaataaaactacagcatataaccatagaaaagaaaaacacaaacggagagacatcaaaaaattatgaaaagggaaaaattctgtgtggaaatagatgaaagctgcattaaagttagagtgccattgttccggaaccaatccacattggcagcctcaaaaccgtacctgtaagtgcagtcgcaggtggtaatgaagcggagttcgaaacccaacggcctatactcagcagcccagaaaagggattcttcctctccgatcagttagcaaaggaggttgataatctttctagggtaccggttgtgagttagtgacagaagaaagccaaagggccgaaagtggcgatggagagagaagttgaactatgagatttagaagccctaactggctttgggtctcctatcatagttgggcttaaataatacaacattgggcttttataaaaatattggattttgagtaaagatttatatttatactgcccacacggtaaaaattatatttttactatcttggcttatttttttcttttatatcgtaaacactaaaataaacgagcctccattgaaagggtgaaatctggaagaccaaacaaaaaagaggatggaaataggctgagaaaagaaacaacataacaaatacaacaaaatgtagggagctaggacacaataagagaacatacaagataaggcatcaaaaatagaaggaagcagaacaacaaaaaaaaactgtgaaacaacacgaaggaaaattgaacatatattaattggagcatatgatactaaagaaaataacttacatacaaatttcattatattcctattactattaaaaacagaatagtacaataatatttagaaaaatatgataaataaataaaagaaacaacaataaaataacattaaaaaaatattaaaacaataaaaataaatcattaacagaatagggtaagttggaaaaaagatggtgaacttagaagtacggtacagatggagccaaagctttgagattaaaacaactaaagaacatgaacttagtgagagtttctgaaatatttatacaagaagctcatcacagagcaagttctccatctctctctcacacacaaccacactcttattttttccaaatcttcttcttcttcttc

SEQ ID NO: 304137 - DNA, 3042 bp, Cannabis indica
atcaagaatcgtcacaactgctaggaagaggaattcatatttggattggttgagttcatcgcttaattaggggcagggtattaggattttatcgcaagagtagagagaaaattgagaatctgttattattttgaattttcctgcttaaagaaaataaatgtgtttggaaaaattgacgtgagaatctaaataaataataaaatagtattaataaaataaaaatttaaaatattgggtttaaaaaaacagtttaaaatattgttaatttaaaaaaagattgtttaattttttgggtttaattattgggtttatatgttaacgggagatcaaacctattaacatcgttaaatttaacagaatatttattttgttaaaccaagaaatgcagttaggcacttttaatatataaagatatgaggtgatcccttataaatagttattggttttttatatttattattaaaagtaaaataaatcgaatctaatattaaattacgaatgacactttattataaggttgttagagactctagtactttttagcattttttttttttataaaaatagataatcgtcgtacttaaatttatttttggctttattcttgctggtcaattcttcctattattattttttttttcgaggaagccaattctccctgattgtttttgagtttgccgttgagtaaaaatttcatttcccttaaaaaagattaaaaaaatgtattttgaataagagaagttattggaggtgctttaataaatgtatatgttaggtaataaatcgttaatatttatttttctatcttgtatggcgtagtttgaaaatttattcgaggtgttaataaagttttctaattattatggttgattgaaaagtgataataattaattttttttttcaaagataactaattgtgaaacactaataaggacttacatgacttatatacatgaaaaggggtcatatgttgacaatctacttgcaaagtaatcatcaaatataaactaaatttagccatacatatatatacaagtataaactaaattaagcatttatttcactaatagttctctactattgcataaatctctcaaagaaaaaacaaaataattgaatttgatgtaaccaaagaaacaagaataaacgtaacgtataccgttagctgaatgaaagagaagaaacacataaccacgtagtaacatacgccacgtcacttaacacagctcagctcaggtatatatagttagatattattactatttttgccataaattcattaaacggcgaccgtattgacgttcacgacgtattgagttcattcacagtcctagtagtcctagtccccagccccagcccgaccccattgatttttttgtcgttatctctttatctttttccctctcttgtaagttgttgtattgcttctctctcctccgcccccatctgttctctccacttctcctcctcctcctcctcttctttcttccattcttttttattatataaataaataaattcaacgaataaaaataaaaacaattttggcttttctgtcttcttttcttttatttatgttttttattcaagcgcataatatagacccctaactaggatctgatccagtaatctcttcttcaacaaaaaccgctccaactgtcgccgccggaataggttcccgactcctcttccctcaggtatcttcttctttctgatcaaagcttcatacgagaacaacttatgtggttcgcgttcgcagcacctccgtccttccttgctctccgattggtcaaagcctcgatctactctcgattcatttggccaccgttgcttctatgcacctccgtttttccccggatctaatcgccggtctgaagactgagctcgccgtctgttctaagtttccttctttgataacgaactttactttctgtttttagacatgagattagaagctgttgagtaggtttgagctacgaagaatttaacctgttatcttgtttttcggtacttggaagctttaggtttgtcgaactttagctcggacttgtggaagttgaagttctgtgattgaagagagaagagaaattacatataaattatatatttatatatttaatttggtatttgatttttatatatggctatggaggatcgaaggatgagtgtaggaatgtccgatgaggtactcggatgtgtgatgccttatatcgacgacccaaaggatcgcgatgccgtttcacttgtctgccgctcgtggtacgagcttgatgcgctcaccagaaagcacgttacgatcgctctttgctataccacaactcctgatcggcttagaagtagatttgagtttctcgagtctctgaaacttaaggggaagcctagggccgccatgtttaatctgataccggaggattggggaggtttcgtcactccgtgggttagagcaatttctgagtcttttcaatgcttaaggtctttacactttcgccgcatgatagtgaaggattcggaccttgaactactagctcgctctcgtggtcgtgagctcgaggcgcttaaaatcgacaagtgctctgggttctcaacggatggccttttgcatataggccgcttctgcaggtattcttctttaattacatggttttgattagaaaagtagaagaaatatctttgaataattcgattcagtttgtagattggtgctaattaaatttctttttaccaattttctaaattagttttataatgctgcaagaaaaattcagttcataatattcaatagactaagtgaagctttatcatgaagttttttttttttgaagaacatttatcatgaagttagtaattagccaaagtttgttatttgggttttgtaatttcgacatggtgagtctaagtaagtaagaaaaagattctttgttgttgtctgctttgggttgtgcagaagttatatgccattatcttaaatgcattgtagacgttatatgcagttttctttaatgcgtagtaaacgttatatgcaattttttttttttttatttt

SEQ ID NO: 304138 - DNA, 2551 bp, Cannabis indica
gcatatatgcagtagcactgtagcaactgcattcttttttttttaattattattattaatatttaatagcttatttttgtttatatatattgtttaatattaaaatatattatattttattaatataataaataaaatatattttttggtgtaaattttagtgttgtggttggactgaaaatactttttgacactaaatttagtgatagtgtaacaccaaatttaatgtgtcattagagatgctcttagtggaacactatagacaatattatatttattatagcttttaaagttggttggaatgatattagtgtgaaagctcaacaaatttgatattttagtgtattttttattcatacaaaatacatttttgaaaattttaaattacacaaatatgtttttcttaacaaaaagtaagaaaataattacaaaaaataacaaaaaaaaaaaaattcttatgacaattataaaaaaaatcagaaaataacttcataacaactataatacaaatatatataatatatataaacagtttattatactatttttattgaaaaagtatttttgtaaataaaaaaatttaaaaagtaaaaataaatatttccttattaatgtgtttttgtaattttcggtcagtaaaaatttctataatataaatccattattcaattatacggtatactatatacacataatatttcctcatattgagaattgtttatttgttcataaaagtattaattctggtagtataatttaatatcagattttacacgttttataatttagaagaaaaaaaaagttgatctctggattaatcaataacacatcttcccaaataacataacatggtaataaggagaactgcaaagctcaaaatcaattcaattgaagtgataataacatgagtgatcatccaaatataattatgtaagattgctaatcatttataaagccccatatatcttatactcatactcatattgtatgtagtaggtgggctatataataagagttgctataggttattgtatagcaatggccaatggtgatagtaaatagttagtgatgagggcatgtgttataataaataataagtagctacttattattatttctctgaaaactgaattgaattaggtcacatggggtccgtaccatccgtccagaggctgacatgggcatctctttttctctctctcttttctatattggaaaagggcacgttaacccatgtgagctttgttcccctccaccaattatatattcttcttctttttcttcttcttataatgtattggggggttttggattgggccccatctgagaggagtactactactgcttattattaggtcaaatatgagcccctttgttttttcatttttgatcagaatcttagctccaaagggcaggcccttaatggtggtttgctgacccaatcgactataagtacttctatacacgtaattcccatatagggtccatcatacgtgtatatatataccttaattattaatttatatttatattagaatatagttagacacaacacaaacacaacacatattggagaatggagatgtttgccaattaataatactagtcccaaccaaagttaattaatagtccatagtcctgcattctgtgatttttgatgagtagaaggatgacttttgttttgtaacattattattatcatcaatatcccacttattataaatttataatatatgtgtcacttttgggttgttgaaacctggcatgtgtaaattattctgatgagccaattttcttgttgattatatatgaataatgtgtgtacaccaatgatatgatatatttgggttgagttgagttgagttggggcccttaatatatatagtatcatgtgtagtatgatataatgtggataagatggatatatatgtagcctcatatatatatatatatgaatatgaatattagcttaattagctccttatgctgcatactttacgctaaatttactaataatttaggtcatacaaaatatgacacattcattggaattattgggagtcaattttgtctcataaaaaggtgcattctcctctattcacaaatcaatatttggttgataggataatgattaatcattccaattaagtttgaatatattcaattaattaatcaaatttaattacgttaaaatctaatttatgtaattaacctaacactaacactaacactaacacgtttaacaagatacataagaacaaaacaaatgcgtctctgaatgctaggcatattatatattttatacaagtgtaaccattaccatacatatacatagttttaatttttttctttttttttcatctctgtaaaaaaagaaagaaagaatatttaggtggtattactattaataaagttaatggtgaaagtagaaggaaaattatgggaagagacatatggtttggtggtaagtaagtaatggcccaaatttttaggagttaagactttgggaagctcatctttgagaatctatacatgttacactttgacaaaa

SEQ ID NO: 304139 - DNA, 2923 bp, Cannabis indica
ttaacttgcaaactggattatgtggaagctctctcttaggtttatagccttgaggaagtgacatgtacaaatcttccttgagatcaccatgtaggaagaaattattcacatccaattgatgcaaatgccatcctttaatcgcagcaagagcaaggacacatttaactgttaccagtttagtaactggtgcaaatgtattagtataattaatcccctcctgttggttataccttttagcaaccaactgatccttaaatctttcaacactcccatcagcattgagcttgattttgtacacccatttagaaccaataacatgttgtccctcaggtaaaggaaaaactatccaggtgtcatttttctcaagagcatcaatttcattgtccatagcattatcccatttaggaaccttgagcttgactgaaaactgaggttcaaaatgacttgaaatggcaagaactgtagctctgaaagtaggtgacaacttgtgataagacacaacctcaaatgaagggtaaggggtaatagaggtaccctgagatgaaaaaatgagagcattaacagccaaataacagtgataatcattcaaataagatggtttggtagtgttcttgcctgtcatagtatgaatctgaggagggacagttacaggctcagaaggaccatgactaagagataaaggtgatgaaagatcagaactattagaagtagggatatgagagaaaaaggtttcataagctacaggaagtcttttagagttaacaaaagggaatatatgctcatggaagtaaacatctctggactaaacatttttatttgtgttaagatctaacaatttatatgctttcatacctgtaggataaccaagaaatatacaaggagcagctcttggagagaatttaggtctagattgactcaaagtaaaggcatatgcaagataacctaaggctttcaaatgttcataggcaggtggtttggagtatagaataacaaagggtaatttgttcttgagattaggtgtaggtgtcctattaatcaaataggcaacactagctatacattctccccagtagcataatggaatgtaggattgaagaagaatagccctagatacattgaggagatgttggtattttttttcaaccacagaattttgttatggtctttgaacacaagagtggtaatgcacaatcccaagatcattaaataattcagtaaattgcaactcctttgtgttgtctgtcctaaaacctttaacagtcttatcaaattgattttgaacaagctttatgaattgaggaatgataatctaagtatcagatttttgcttgatgagattgatccaggtttacctacaacaatcatcaataatgtaatgaaatatctatatccctcaacatgaataagatcaaaacaattttttataatattgatataaagggcaattttgttttgtttggaataatgacatatagagcaataaaataaggaattaaaatctgaatgaaaattcaaagttttattcaatgggtgagtttttacaaaagaaagatggcctaatttatagtgtcaaatagtatcattagaaatcttataatttgaaatagatgaagaaccataaacataatggacattattagaatgattatagttgagatagtaaaggatgccatacttctcacccatcccaatcatcttgttcctgacagtgtcctaaatgacgcattttttatgggagaacaaaaaggtacaatcagcagtagttgttaaagagttaacagataacaaactacacttgaaagtaggaacatagagcacatttttgtttataagatcaggagttaggacaattgtcccaacacatgagattttagtatgcaaaccagttggtaaaagaacagttttgagattagaatcattgtaagtatgttgaaaaagagtaatgtcagggcacacaaggtgtgtggctcttgtatcaatgatccattgagagttatgaacaagagaattctaactagaaaaatgtgacacaattggttaatcatcagggatgtgaggtggtgtgttatcagctactttctgagcaagtaaggtcattagcttctgacattgaatgcttgataaactagacacaagatctttatcccctggtgtgcattctccattttcttcatccactcctatggaatcagtagaggcaaatttcccttgaggtcccttagcatttcgattgggaaattttccatggagtttgtgacgaggagaatagccatttaacttgaagcatctatcaattgtgtgtccattcatgccataatgagtacaattgtacttggatcaaaatggttgaacaatactaataaactatccagtaagattggttgaggatttctctgcttctctagaaccacttgatccattgaatccacttgttaaatttctttgtctttcttcttgaatcactgaatcataagctttatttatattaggaagaggatatctcatcaaaatttgagatccaacattgctaaaagagtcatttaatccagccagaaacttaagaagacgatcttcttcttgataggggtgttcacggattggtttgatttgaattttcatatgttttgagctaaactagtataacatttattttgaatattggataccaaaccaagccaataaatttctcaaatgaaactaaaccaaaatattaagaaatttttggtttggtttgaaaccacggtttaagcagaatttataattattcatatttttttaaaaataattgtactatttttaccaagcttttaattttatttttcacagtatatatttaatatgataagtaagatgtctataacatataaataataatattaaaacattctcaaaagtcaaagcataacataaaaattcaaaaatt

SEQ ID NO: 304140 - DNA, 3172 bp, Cannabis indica
caaaagaacatacaaaatatacaaataaaaaaaataatgtaacaaataaaacaaaaaaatacaacaattaaataaactaaaataataaacctaaaataactaaaagaaactattatttatagtaaataaatactaaaatacgtaaaataattaaaattcgtataaatagttggtttgtaatttttttttttttttgtattttcttaaattattactaaaaaaatatttttgtaaaaataggttttatgaaaattttttatcaggattggtcacacaagtgacctaaaattatgctgtataactataaaataattgatgatcattttaacctttgcaaagtgtaaatttaaaattatatgttagtttgacaaatttaaaaagaaaaaaaaacaaaataacaataataatataccggtaaattgtaatctaagtcggtaggtgattgatattgtttttcaataataatatatgaattaatgaaaaccttaattagttgttgtcttgataataaattataataattacagatataaaaaaaaaattataataatcagttggtttcccaatttttattcattttattttgagagaagttgttgtctaaaattagtgctatgtcggttttactttttatgtttctcaagtttatcggtttgatgaaatagagagtagaacttaaaaaataaactctaaccatataaaaaaataactctttattaaaataaataaaaaactctttaattaagaactccctaattttgttgctaaaattttaattaaaaatattattacctttttattattttataaaattatttgataaacgaaaattataaaatattactaaaataattaaatacaaattataataacttttttagctaattaaaaaacataataaaaaaaaatacccttagagatgttgttatgtaattgtttgaaatgaataatttttttatataaaaaaaacaaaaataataataatttatttattttacctacgtttgtcgtgatccctggaatctttgtagtactacgtgtgattcgtaaaaagaattattttgtgtggtccttaaacatttattaaacagataaagaaatatgggaaattattacataattgtcaccacttaattatcacatggtaacactgaacaaccatttattgttatttaaatttatattttaagcttttcaaaaaaaaaaattaagtgcactttctttctttcttttttcttctcaacaacgtttactcttgacaaaacaaccaattattaatgtcaataattttgcattatgactcatgaatcatgatggttttaggttacttttaatttttaataatatttttgtaaaaaaaaaaaaattgagtgaccattatatacataaaagactattgggtcattttcagtctgaattaagaaaataaaactaaaatgttaaacaatggagtcaggtgggttctggggcattattaaggaacagatatttaaaataggtggttcaacagtcatttgttttgttctcttctcacttaattttaattaattatttcttataacagaattttatattacattatttgttcataaaaatatcccaaatttattaaaccatcaatgatttccttggaagtatttttttatgaaattatatgcatggttgctaacttgcttaacctttattttaacaataacttgatatttcttttttttttttcatttctattattttacaataaaatcatttcagtgaagcaagcatttagtacaagtagccccatgtacaagggtaataggaaacaagtaagcgccacaactaacccaacaaaacataacactaaagtgcatgtttgacatcataactaaaaaactgttttttgtttttaaaaatagaaaattgttttttaaaaacaattgatttgtttgacattgtttttagaaaatgtttttaaaaaaaaaagttacaaaaaacaaaaattttgaaaacaacaaaatattgttttctgttttaaaaactaattggtcaatattatttttaaaaacactaaccaaacatgacttatttttaaaaatttcaaaaactactttttgttctcatttctaaaaataatttttttaaaaacaaaaaacagaaaacaatactaaacatgctctaaatttagtccatcaattttttataaattaaaattttaaatattttatctttttctccaatatttaatattttattatttgtatccttatatacttttattatagtttttttatcaagaaagaaaatttttcattaagcgacaaataactaccaaccaatgggagcactacaaaaaatacggctccacgctcaacaaccaccccattacaaatgaattatgttcaagtataatctttccactctagatacattcatgtgcttaacaatttgtaatttttaagtcactaaacttataatctctttaactcactgtattggaaaagccctcaaaaatacatttatttctgttgacccaaatgctataacaagtagctgcaaatatagagatatctatagcttgtagtaaactcaaagaagacagaaacaaccaattgaaccatcccaagtaatccaaaggccaagcatttttgcccagccaatcaaagacaagtctgaccacctaccgagacagagaacactcaaaaaataagtgttcatgagtttctattcagcaacacacactagacaatcaactgtgtccatcgcaacctgaaattttaacaattttactattattaaaagttgatgattcacagcttgccataaaacaaattgatgtttgggcaacgtcaatgagttccaaacagctctatggtagtacacttgctgttgttgatcaagagagttgttataaagtcttcttgttttaagtttaccagcagagactccagaattaatattgacctctgaaaatttaagtctcaaatgacagagcttgcgccaataccacttcgtgtcttgtttcaattcgtaagaccaaaattttacatttttattattgtccctataaattttatatttttcaatattatctcacacacttttatttttattcttataaaatttatattttttttttatctgataaagattatatttttttatataataattttttttctccgattaagatttg

SEQ ID NO: 304141 - DNA, 2849 bp, Cannabis indica
cttgttgagtctctaaatacactgccatcagatttcataatataattgtacattttttacctgtttttgatagtttaattagtatatttaatatctttcattacatagagatgttgtaggctataagtgtcttatgtaaaagtttgttctgtgatacttctatgattcaaatcaagctctctttctcatttttgttatggtatagaaaatccgtttcaagcacccaatattgcaccaggctgcataagaagcaagcagctctcttatactacttagatttagacattgtccatgagtgagttcttatgctaataaagttagaaatggtatatatgatgccacgtcctttgaaacaagaccccccttctttgttgggaaataacaatttttttattgtatatattttgaacttggaacctcctctttgtaaggagagatatagtatcattaggctatgtgtgatcacaacgtttgatagttatggctgttagctatgtaccatttctctatcagaggagcttaaaaactagaacttcactaattaacatcattgaactagagttttatcaattcataaatgtataagcacgcttcagggttctgaatgtttctcatatggatcccatatataggctcttaaaattcttaatgtacagaaatatgcatagctcacagtatgacatctaaattgttttttttttctttttctaaactccatctattacaaaattgtgatccaactatccttttgtcaaaaatcttcaatagagactatcttgttccttttttttttccgctcttgtttttgaaaaaaaaaagaaaagaaaagaaagaagaatctcttcagaattttctttaaagatacattggtgttgattatgtttctttatatttttgtcttgtttaacatttgttttcgcaatcacgatcatcatagtggatgtgtgcaatactttatatcttttgccctctgtatttcatagctactttggtgactacaaaaaattgtaggttgatgcatattccaagctattcataataaaggatataactgagctaataaacttaattctcccatcttggaaaggggtgcacttgtaaaatctgaatatactcagctcaaaaatatattaattttagccaactttcttaaagggattgtgtctaatggttctccttgaggatataccattttatcactatagtttactaatgaatttacattgttatagtttcaatactattatcagccgaagaaaaacaagattaactaaaaaaaaaaaatcaagttacacacacaacaaattagagttcattgttagtcaaaattaatttaaaataagttatttgttaaagtaatttatgcctttattaaatgtttaaaattatttcattattttcatttttcaagtagtgtgttttttcacaattattgaaaataaatatttcaataagtaaaataatatctttcccaaaagtataatatgctattcaaacacaatttttttttgaaagactttaagagtgtaagattaaaaaaataatttcatataaataaaggtgttactcttattaaattgactaaccaaaagttgagttagtaaatatgtttacttatcataaaacaaaggtgttatatatttttaaaacgatacatatgtattaatgtgtattcattttccattacaatgacaatgtaataagtattaattaggatatcccaagttgtctttaagtaaattctgcaataaattgattgaatgcccaaaaaaacactctgaatttgagactgaaaaccaattaaagactgtttttgttgcaggtattcaagaatgtgctggacaaatatttgagagttaattttgtttagactttagtagcagggatcagatgaggtgtctgttgaggcacaccactttaagcaaattgatccctccagaatcttaaggtagaaaatcgatgcatattcactgtagaaccttttcttctcttgcaagatattctattattattattattcttgcatgtgatatatattcaccagtttgtttattttttatttttttggtagaattaaaatcatgggtaactttgactagagctgtaatgctgtatgagtcagatgtccacatgatatctaacttatagatgaaaaaatctctgttcagttatgagatcaattaatcagaaatttcttgcagtttggacagtgcatatatataacttcagtttatctgtcatggaaaaaaaaatgatactttatcactagctttcttcagttgtttggttttttgtttaatttgaaatcatttgaggtttaggaccacaaacagaataggtttggtagaataattgaggaaatgatgtataatgtaagtataggatagtacaatatatatgtgccttataaaatctggaatgaaagggacattaaccatttgtggtttaagaccataaacatgatgtttctctctttcatttcttgttagttgattgacttaatctaattaaacttattggaattagattagaaaaaagcaggaaaaacatcatttaagtttcggattaggaattggtgatgcataaaaacatttaatttgaagggaaaaaaggagagaaaagcagagaaaaggaggagttgggtaataattaggactggaaggaaagaaaagaggcaaaaagaagttttgtggagaggcaagattctcttgtggaagatgacatatgcgagtaagttgtgaaaagtaaggaggagggaatagaagggaagcttttagtttgtctggttgtgcagccaaagtttttatatttattaatgtaaaaaaaaaaaagaaagaaaagaaaaagta

SEQ ID NO: 304142 - DNA, 2001 bp, Cannabis indica
ggtaataaataaaagatttgaacatccacataattattaatatttataacaaataaatatttctttttaatttactcattcaccactaattaataattttcattaattagaaattttttgacactatttatttatttatataattttaataaaaatataataattttgttgatttttgcggttttattttagcatgtgcattgaagcactattttataatttgagccaaatgtaatatatattaagctatcttttttagtaaaatttgctataaaattgacaccatgtaataaagattgtctaataacaggcatgctagtatctaataacattatgatcagtaacttattacaaaagattagcattgatttaaaatagttattaaattaaatatgtaaaatttgatactatattacactattagagtgccacatttagcgtttttttaatggacttttaccatttctttgttaatatatagtaatatgtataaatccaaattaaccagataacatgtagtcaatattgcttgattcaagaagttggatagaatagtgtataattaggttttgttggatttatttccccaagagttaatcattttggttttgatagacccctttttacttttattccaaagtttgactaatgtggtttcttctcccaaagttaaaaagaggtttttttttgaaattgcttaggtgagtgagccagagtgtgcaaatcttgttaacatgggatgtgttgcttttgggggctctggtttggtgggatataaaaaaatagttttggaggagttcttgtgatcttttcagttggaataataaaaatttcactcgcaccaaaagggagtgagaaaagaaacagagagagcttcgaaagttagaatattttaatactaaagcttcttagaatcattatcaaaaggaggagaaagagcttgattattttctggtctttaaagatgagaagtattgagcgtccccttctaagttttcttggcttaaagttggtgatcgtaatacttcctattttcatatgtttgctacatctaaaaaaaatgattaaaggtgtgtgtaattgtgggtgattggattacttcaacaaatggggttgagcaagaatttattaattattttgataacctaattttctctagtttcccttcgctgaatatgttatcgggaaattttatctggtgatgacaacaatatctgacacattgcaagaaagataacatctctgagttgagtagtctcgagtcatagcggtcgacctgggagaggtccctagccctacaccgaggttaacattaggaactctgaaataggtgtttggattccgatatcaattgacagctggaaggatgtaaagtctgcattccgcaagcaatttattgccgcaaacgagaaagacatggaagttgggtccttaaccaatgtcaagcaacaacctaatgaaagtctgaaggctttcattcaaagaatgatggagccagccagccgccaagaccaatgtcagcaatgatctaaagctgatggctctccagtcggggttggctgtaggttccttgttgtagggagagacgcagagaaagagagctgagatacactaagcaaatttatgtctaaggcacagggcataattgaccttgaggatgttggaatatttttaccaagatctacatttactaccatgtatgttatttaacatcctaatatgaatttataaaacaatgtaattgaaacacatataaagtttgagagaccttacagtgggtgcagcggaattaaatgactccttccgcttagatctctaacccttgtatcctttctgtaacagagtatcaccaagatctgagactgaaactccttccttgtgtttggattcttcacagtcttagatactatgattgagcaccaacttgatgtgtacgggcacttactcaatcactaatggctgaatttattttgtgaagaaaggcttagtgtttcgaaaatt

SEQ ID NO: 304143 - DNA, 5097 bp, Cannabis indica
agatctaatttagcaaccttgaaacctgcctgaatgactggttcagcataatgcaaccttgctgtaacattcagcttctacccatcttgaagcttcgcccagtgattccttgccgaagcttgaaaatcgtcattcccttcatccttcgttacctcgtccccgccttcttccttcattatctttgccccatctggttcgtccaccattgtagaagctagattcaagtctagggtttcttcgacaatgagggttttcaaatcgcccatctccttgcaaagctcttctccacctatcgccggtgactgttcattctccgtccgttcaagattcgctagaaaagcatcaaatcgcacccctgttgctggctttcgagtcgaccgtttccttctcatcgagagagaaccagttgtcttcgcacgccaaaactcatttttgtgttgaagaaaatctactcaaaaaaaattaaatctttgttgaagaaaatctggtgtactcatcttagtgcgtttgacacagatgcaagttagaataattgttggtcttttctcttttgaatctctcttcctttttgggtttcattttatgtttattgattagttttcttcatctttacagaggacacaatcgtcgtcataattgaacaggctgctcatacttatttgtgctctgtaaatagaaggtatgtatttatttattttttagtcttattttgtacaaattttatataggattttaaattgatgtgtattttgcttattaattctttttaatatttagactgattgctctattggaatgtcattatttattttggatctttatctttagtattgtggtttgaaagatttcaagtttatgtctatagtggtcgaaaaatttctgagttccagttgggtgtggagtttatctattgtaactcttctctcttcctttgttgttactgttagagagagaaaaaataacttgtttgtgctcaggtttgtgttttgttagagtaaatgtacttagttgtactatgcaaaactaaggtacgtgtgagcttttctgtgtattggagggttgtaaaaggtgtttgagtgtgtttgatctcaatacctagtgtgagcttttctgtgtaattcagagggtgatccctccattgattccatataatctcttgtagttatctcaatcatcaataaaaaggtatccattgctgttactctcctcttgtatatttctattatgttttgatttatatttagttatttttctcaatgcatgtcaaaaagatctatatagttggagcgggtcggagctctgatatggtagatcacttataatctgaaacattcagattcttattagatcccagattcgctctgccccgactaatatttttttttagatcggatctgatccgattcgatttcaatatattaaaaaaattttattcaagactcagactccagacccaaaccctttgggacccgaatcttgacccaaatttaggactggatccaaacccgaactcgagatcgaatccggacattcggtaattgtttttaattttggtatatattctgacgtggcacatgtatttgtgtaaataattttcttaaagatatttttgtaaataaaattaattttaaatatagtattaaaaaaactccataaaaaaagttatgcaccaaattattaaatttaaaatactattaatagtatgaaatttaatatataatatagtgcatccttaaacttaaatagtatgaaaattccactactaatttagtaggatggtgtacatatattcttagtaaagaaagaaaaacccagatttttacatagaaaatatataaataaaacaaaataaaacacagaaagataaatacaaatggatttcaagtggcttaagtctaagtctaaggaagttgagtttgactttgcaactgccaaatacagaggagtgcaggttgtaaaaaattgacttaagatgagagtgtttgttttctttctttagattccttatcattacaaacccttttaattaattattttcatttaatttaatctgaggagtttcatggagcctcctgtaagagagcttcaacttcaaagcagaggttagaaacttacctacaattcttctcacttgaattttttttttttaaaaaacatgttttctatgtaagctttattagtagttttcaattttattattctttatagtggggaaaaacaattcactttcacatgtgcaaatatgatataaaaatctgcaattcaatctattctatgccaataactgtagtagaaaacatgttccaatccatattcatggttttcgctctaaatagtatcaaaactcataaaatgataaaatttgtaatttccttacaagtagcctgcgcttagggccctcccagaacaaaagcttaaaaaatattttttaaagaaattacgtatatttactatattttatttgttttaatttttatctctaattttatattctttaagatatactatttttattgatgatattcttattaaattttttaagttaatttaaattatatgttagatttaagtagaaaataagagtatattaagcaacccacttaaaaaagtagatatattttaataaaatatgatatgaaattattttaaaattagtgaaaaaacatgttcttttgtatcaattttactcaagttattacttaaaaataaacaatccataagctatattctatctatttactatttgatcattttgcaagagaaaaacaaaagagagaaatactaatgttggatcaatttacttatgtcactacaccacagctgatgatgatgatcaccatggccaaaatccaaacacagacacctctgctacaccttcttctgtcactaatcgattttcgcttccccagctcattcactacaagtggtggtttcgggtgatgatctacatcgtttttataatcgcgggccaatctgcagccactctcttgggaagattgtactatgacaaaggtgggaacagtaaatggatagcaacactagttcaatcagctggcttcccaattttgatacctcttttactcttcttttcatcaccaataaaacccaacaacacaacaacacaactcaagaaaaaactaccttctctagctctcctttacttcttttttggcctaattttgacagcagataatttgatgtactcatatggactcctctacttgcctgtatccacttactccttactatgtgccactcaattggctttcaatgccttgttttcgttctttctcaactcgcaaaagttcactccttttatactcaactctcttgtccttctcaccacctctgcttcccttcttgcactcaatgcagactcagacgaacaagactcgagtagtagtactaaaatctctaagagaaaatacgcgataggcttcttaactaccctcggggcatctgcagcctatgcattgtacctttccttattgcaactatcttttcaaaagattttgaaggcagagacattttctagtgtgttgaatatgcaaatttacccttcttttgtagcaacatgtggttgcattgtggggcttttcgcgagcggggaatggcgaggcttggggaaagagatgaatgaatattaccaagagagtaaggtgtcttatgttatgacattggtttggactgctttgacatggcagatttgttctgtggggttgttgggtttgatttttgaagtgtcttctctgttctccaatgttataagtaccttggctttgcctgtaattcccattcttgctgtgattttctttcatgataagatgaatgggttgaaagtcatagctatggtgttggccatatggggttttctttcttatatctatcaacattatcttgatgacttgaaacacaaggcacacaaaagtgagagtagtgagattatttctaggagaatagttgaagtttgttgatgcaaaattgtcaaatctagagatttcaacttttactcttgactctttttaggggtttgattatagacaaacttcaaagttattgttttgtttgtactagtgttactggtttttatacaagtggtagaaaagtatacacttaccaaaatttgacataattaataggtttactttggatataattttgtttcagcaaaaaaagtcatatatttttggcattattactccatgtgagctacttttctttctttctttctttctttctttctttcttcaatgcctgaatgagagcgatagtaaatagaaggttaatttctatccaaagaaaaaaaaatattaatatctatgtataaataaataaataaatgaatgttaattagtaatatttttttgacaaaaaaaaaatgcatcttatttatgatcggacaaatcatctactaaaatagtttaaaaagtaatggggacaaacctcccactatagccatgacctaggaaagaacaagcgaaagtcaccaaccaattagctgccttgttggcaaattggttaataaaaacacaagaaacattgttaagatcaaacattaaaatacgacaatcagaaataactaagctaaaatgagacaataaaggagttgaactatacagagcaccaatgatgcttttacaatttgacttaacaacttgatctaggccctgttctttgatccaactcaaagctttcttcaacccaattgccatttgcagcgaattttttactttgccaaacaagtccatttcttactttctaaagagactaacaaatcattgcaacatgaaaaatcaatgtcgtcagaaatcctatgaccagttgataaaactatcttgaaaaatatgtggctgaaaggttgtaaatagccccatcaaccagttattaacaagctttggctaaaggcactcaactaaaatgtggaggattgattcattcataccttgacatatcaggcaaatgacgaccacatcaacatgtcgaccttttaattgggtcagtattggtaaacacccagaaaatgccctcctaagtctttaaccttaagatatatatatatatatatacagtagaacctctatccaagaatacacttgg

SEQ ID NO: 304144 - DNA, 1355 bp, Cannabis indica
actaccatattatttggaaattatatttggttgcccttaaattcaccttgtgtttagctttgaatttgaaggtagttagcagttggtctattataactctcttatgaagaaaaaaagggaaaaattgttggctaattccttttattagctcaaactggaaatcttgaaaaagaagtaaaacaaatattcttggtgggaaaaaactttactttctctttttcatttgaagaaatttaattgttgatatgtcaggtggagctgtttaaacatcctcatatgctgcttttgcaaataagaaactccatctttaagcttccggggggtcggttaagacctggagaatcaggtaaatcatatggcgactggctttggtatgttcaaaatcttaattaggatttactaacataaatgtttgactctcttcagagattaatggattgcaacgcaagttgtcaaggaagctgtcggggaacgaaaatagtgatggtacagaatgggaggtataacaccataattttttcttttacacatatcatattaatgtttcttattatctcaaaaactgaatacaattgtcaatttgtcatgtcatgtttaggttggagaattccttggaaagtggtggaggccggactttgaaacattactctatccatacttgtcacataatattaaaaagcctaaggtacttaattgctcttctcagtcatgtattttgcttcaagttctgatcagtgttagcaaaagctcttatatatgtttctctttgtataggaatgcacaaaactttaccttgtaaagttgcctgaaagtcgagagtttattgtaccgaaaaatctcaaattgcttgcggttcctttgtgccagattcatgaaaatcacaaggtaaccaaccaaacaaactacttttactatgcttctaagctcatgagatctaatttgctcttcttatcctaatttctaaatattcaagttaagtacttgtgtttcgtgtgcatggtactaactcatgtcatatgtcttctttatttcttttgatgttcttgctgttgtgttatgtagacatatggacagataatatcaggggtcccacaattgttatccaaattctccttcaacattatggaaacttaataactaagacacttttttcaagaaaaaaaactaagacacagagacgtatatatatgtgtgtgtttgtgtctgttgtatgatattgagtgagcgagtgagtttttaccttatataccttggtttcagcctttcagggaatctttgattatacatgtaaatttctttatgggaaaacgacaagtgagttgtattattttgtaagttttttttttttttccttt

SEQ ID NO: 304145 - DNA, 2000 bp, Cannabis indica
aacgctttttctcaaaaaaaaataattcgttggagtgtataacataaataattaccttatatccatatattctcgagaatagtcaattatttgaaaacaacaaactgaattacgagtaggttttgataaaacatagagtttgatatttattatcaacaaattatttagctatctccaaaatgaattaataataagttccactttacaaaatataaaaataataaaataataacacactctacaacatgaataattagatcaatacaataaatatcacattctctcttaacttgttcaaggtttttttgttattgtattcttttttggttgggactttggtttaattttcttgggtttaagtaccattggttttctcgatttcttgctcgaacattgcaaactctggacgttcttattaagagcgacatcaatagtaatagcgcagttgaccatgatggacttctttttcttcatgatcgacatcacttccactttcccgctcattctcatggaactactcaaagtcaatattccaagagtcaactcatcgctgtcttggtcaacattatttggcaatccggtcgaactcaacctaacaatgacattattaatagttttggtggacatggttttggccttgcccttaggaatgacaacttgtgctacggtggctccaccgtaggtgaagttgagggtggtgacttcgaatttgtagggcccgaaattggtgttcttgatcctaatttgggttgagaagctcttatcgaaagaagaagtattagtagttgttttcaatgtttggagatgagcattggttaataaaatgacccgtggagacttaacaagagtaaataccaaaactataaatgtaattagcacacaaataagaaaagcaaccacatatttggctattttgttcatcttctggcgtttgagttccttagttgataaatctcccgattcttgatcccctccattagttttggccaaagggtattcttcatccttgttctcacccattttaaaagaataaaaagaagattgtatataagatcactatatataataatatatatatatatatatatatgttttggtttgtatttattgatggaagatgatagtatttattagctgggtttgtgtgatgagatgagtatatagttatgggttaataaggatatttatagtaagtgttttggttgttttggtcaatttgattattaaaatatttgttattagtttttgggaacgtgattatacattgtatataataagagaatgagagatttgacttgttgatggttattgaaagaagaagatggctgctggggaaagtttagtattggaagtttgataataagaacaaagttttattgagtaatttaattaagaatgagatgattgacttctttaattgttattttgttaggttgaaatagaaacttaaatatatatatatatatatatatatataatgatgagttcttaattttatcatgtgtggacaaccccactacctctttttggattggttttataagtttattaatatatatgaagatgtcccgaggtttctaaaacaaggtttttttttagcataagactgtttccaagtcattggaatacatcaacaaatgttactatatatacacttcaacacttgtaatcttgtatagtatactaataatataatatgctatctgagtataataataatcacacttttaaaaaagctatatagaagttttcacaaatttatacatataattgtaattaaaactgttaatttgtgataagttctccctacattaattactagtatacatgttgttaaatgagatagtttctaacaagacattgcatgaatcactcgcatggcatagagagacgccccttgggtgggatgccttcttatggggagaaggattctcgagggcgagaaaagtagatatttggtatcataactaaaaataatttttacttttaaaatataaaac

SEQ ID NO: 304146 - DNA, 2252 bp, Cannabis indica
ttgtgattaaagaattggaacaacttacagaaatacgaaggtcagacttgagatcaagcttggcacctcttaatttggagctctctctacccttaatctccatatttccttcccagctcttcctcagagccttggcccccatttcaaatccctgaacccaatttctaattggatttcctgtggcggccttccttgcagcgggactcgccgaccgaaccacgctccctttctccaccaccttcgctgtgaccttaacttttgtctggtgttgcttgatcccactagcaaatttctcgaaagaagtcggcagcgaataaacactagtcggtgaagacggaatcggccgcgaattcaatgacttcatcctccctaatggctcctttacatccacattgatcgacagcttcgactgctgctggctcggctttgaccgaccgagcgatgaagccgttttcttctccgactgttcctccttcccgccaccattcgatctcagtttcgaatccgatttagctctctctgtcgttttcaaacccgaagttgaagacgaattgttacctccgttgagaaatccaagcgtgtgagtcgccacaatgtcttccggggttcccacgcaggggtggcgacccggaacgggcctaacgccgtggagaatcggaaccggggaagccgattcgagccgttcaacatggataaactgacccaattggattttatcgctgagaatgagatcttcatgttcgtcggggagagaaacgtaagtggcgtgagaagagtcggagaccttgaggtaaaaaccttggttcgcgaagagctcgcctccggctagagccgggacgatgctaacgacttgtaaaagagaagacctgtgctcaccggcgactttgacgtcagtgttcatatgctgaagaagcttgagaaggacccccgggacgagattcgccatttttgaagagcttcaataggcatcagtcaacttctaccgaagaatacaaacaaaacccagatgggaaaacctctcaaagaatcacgagaatcttgaaaaaagagcagctaaaagttatgaacgagagggctttattttcacttctttctctcttcttatttcagtgaaaaaacagtgatggacttcaaaaccagaagaaatttcttaccagaaaaggattgaatagtacgaaacaaaagataaaggtcatgcatttgttttgtacaaagaatcagatttggaggtgagcttgtttttggtaagaataatggatattatttttttttccacgattttggtctgcaaagaaagaaaaataaaagattttgaggccaacccggttgagatttaatcccaaaaaatacaaaatgttgacaactcaaggaggaaggttgttcgatgaatattcattatagtatattaatggcggagtagtacagcttcgaaaaagaaagaagataacagttacaaagaaaaactcaactcagtgactcaccgacctatcactgaaaacaaatacaggaaacttaagaaagttagaagctttgtcaaattaagtaaatattaattttttataaataataaaatagtgacaacactaagaaataagaaccatttctttgaaaaaaataaataaaataaacccaaaatgggagtatcatacaattacaatatttgggaacttggttggatggtattaattcggttttatactcttatggcaagacgcaagaagaatacaacaatgaatttgggttaaggataataccaaaaaacaaaacaggaaaatgggggaaaacaaaaaaacaaaaagacaactttttcaagggtgtgtacaagtgattagtaaggaaaatgagtttagactcttctttttcctgcactgaaattagggggaaaatgtaaatgataatggtaaaggaaatggtaatggtgctgaaaacttccagccaaaacaaaatgtaggaagaaaggaagaaaaggtagagagaaaggaataattgattgattggcaaagccaaacagcttattttattattaaaatttaaagagctgtcagtgtctgattcccaaacacacatttacacatgcgcttcctctataaaatcacacatatttttatgtttttcatttaggataaaaaaaaagctgacccactttgtgggtctttctctatcacactcagaaggtacagaaaataaaatgtaaactaaataaatgataacaagggcaactccaaatccaatggtaatttggggttgaaatt

SEQ ID NO: 304147 - DNA, 2924 bp, Cannabis indica
cctggatcagggccttgggagcagtagcgcaaacttcttgattcggacatccttggcaagcatcagattttccagcagagtctgatttcagtacctgggcaaatctggatatacccacaaaatacaatcagacagataaaatagaaaacaaaaggcaagagaccctgtaagcttcttatgaacatagaaaagtatgaaagcatacgttcattggcgttttctggaacttgaccgttctccatggcagccaatactgctattctttcttcctgtattcaccaaaaataaacaaataaataaacaacaaaaattgaattccataaccacttttaatctgcactgaagaagctttgtagtttataggacatcttcacagaaaaccttcctgacattaatattttcatttttctcagatttttattaaattttctacatgctattgttttttctatatcaatacttttaactttcaaaaataacagaaaaaaaaatacaaaatccagaaaacatcctttcgtgggattcagtggttttataaagagaacaaaaatcttagacctccttaaagaatttagttaaaaacataagctttaaatctttttatgagcagaaagggaaaaaagcctaattttcagataatatattaatggtcttataaacaacataagaaaatattgatagaccaccactcacttttgtgtactctagaaggaggtctaggaagggtaatgtggagatgacagcaggggatcactccactgtgtaattcggttagtggggttggcttgggtgaggtgggggtgcaggataggcctctggagtattagttaaataagggagggtttccttttattggtcatgcaattagaaatactgtaactactgtaaggagggtccaggctctcgaattcctggaaaagtctatcaatacaatttcatttcttttccaatttctattttgctgctgaatatttactgtggctaggaattttctatcaaatattactccttcctagcataggctgtaaaccgaatcatttccaagtttttattgtcttctttttcacactgaactctttgcaaccattagtttctagcttcagcgcccaaaaaagttattacactacgaatacttggaacaaagaaataatcattccatgtgactattctatttcgagacaaaccaaacacaatttcaacccccaaaaaaaaaattagccatacatacgcaacattgaattgacaaaccaatcaatcaaatttcaagacatttctcctggagataataagaaaatgatcgagttataaacctttttgttgctccaggagagatgtcttaaaatttgataattgtattataaactttaaactgttagccatgaaacaccaaatggcagagcatataaatgaacaataataataagggaaattatatcacgctttaatcacaataatctataatctatttaaaaaaataaataaaaacaaccgaaatcaaacaattgttgtgtaattaagaaaaagcttcatatttgaggattacttaggataaattcaatcaggcatttcatcaaataatatacaaacaccatctacaaactgaatttttcctaaacatatatttttttcctggtcagaatttttcctaaacattcaattcttccattgacaatatatttatatcaaataatctgctgctctttaaaaaaaaaaaataacatatttaaaatcacacatatgactccaatcaaaccagagccggttactccattactacttttcctcccaaagattttatcgacaatattcaagtataacttttggacattgattcaaagtacacgcacaaacactctttatacacaaaatcaaggaaaaattaatagtcagaaggaagaagacttacaagccctaaccttcttggagagtcgtgtgacgacagtaagcagccgctccggcgagttgacagacggtgaagcaagagcaagcaatgaaggatgaggaagcgaaaatatggagagagaagtcgagaacgagaggcggtggaaatataaaggaaagctcttttttatttcgcccaagccagttgtgtgctcgggttgccaacctagtcaaaaatttcaaaaacaaaaataataataataaaaaaaaactataatatgataaatttaactctcttgaaaataaatattttttttacggtaataatatttaagttatatttctagaatttccgtagataaccgttaaattttaaattattatctatgtgtcattttcttattggtatatttaaattgattttacttaatgatccgataccgacatgagttctagacttataacttatgtattattatcgtgaaaaattaaacttatgtatttatttacaatcaaaaattaaatttatatatttatgccgcaaattattcaaaattaaattcttcatattcttaatatgtgttaatttagtacaaaatagagtataggctactttttttataactgtgagtcaaatttgcactataataaatactatcgtttttatttgagcatgactattggacaccgagtattgttatttggcattagtagtgtttaataccttttaaaagtgggattctacgattggttagtgatatttcataagagctgttatattaaagtacatgggacaatataacaacgatgagtgtgcaaggcagtaggcactattgccttttagcatttctcaagataatatgagatttgatacttaattacaccaatatcgttatgacatcggggagagtgctagataccaaaagtacattttagcatttctctttatatttatccactaattaatgatttttattaattaaaagattttaaacattttatttattcatttacataattttttttatatagtttcaataaaa

SEQ ID NO: 304148 - DNA, 2257 bp, Cannabis indica
tagtgtgtaagactgtgaagaatccaaacaactaaaggagtatcaggctcaaatcttgataatactctgtgacagaaaggaacaagggttagagatctgagtggaaggagacattacattctgctgcaaccaatgtaagatttctcatactttatatgtgtttaagtttcattgttttagaaattcatatttaggatgttaaaaacatacttgttagaggtcctgttaaaatataacccaacaacattcaggtactgctatcaagcattcgattgaaaaatttactgttgggcatctggccaaaaagtgaatgccgaaaagtaagttctttccttttctccgaacatcctgccctcaactcaagctaatctacaacaaatcttacaaatgcctagtcaaccttgtcacgagagatttttagggccgccttcttattctggaagagacaaaaaggttttatttggggaaatcaaagataaattatgaaatcttatgtcctcttggcatgaacaaatgttttcaatagggggaaaggaagttctgcttaaagcagttgcccaatcgattcccacttatgctatgagttgctttcgcctattaaagtctcttataaatcaaattgaaaagatgatgaacaaattctggtggggctcaaactcaagagtatctggaattaattcgacaacttggaaggcactttgtcaatccaaggtggaaggaggcatgggttttagaagtatcgtccattttatccaggcaatgctcaataagcaagcatggcatatcttctccaatccttcctctcttctcagtcaaattcttaaatagagatacttcaaacataactccttcctagaggctgatcttggttgctatccatctttatcatggagaggtattgtttgggataaggaacttctatcaaacggtttgcgtcaaaaggttagcaatggtgattctatttgttgtgcttcagacccgtgattacctggtattgcttatttgcaaccacttgtattcagaaatactaatgttaatatgaaagtttctgaattaattaatgaaaattggaaatgagatcttcctcttctaaaatctctgtttttagattttgacgtggagaaaattctatgtataccattaaccatctttgaacaacaagattaacttatttggcatcaggaatctactggaaattactcagtcaaatcaagctataaactggcttctatccttgaagagcatcagccttcagttagtacattatctactacacagtggtggaaaaaattttggggcctttctattccttcaaaggtttgaatttttctttggcgagctatccatgactgtctaccagtagccgacgtccttcacatcaggcacattagtgactctgctatctgtacactatgcggttgtgaaagggagaccactgtacatgccttactttactgcagacgagtcaaatgagtttgggaagcatccaccttttctcttgatgatatcttatacaaacaaatgggtctcaagatgcttttattgtaggtgtttgaggaatggacttctctccaacttgagcaatttgcttgtattctttggggaatttggactgaacgtaataaagaaagacatggatctatgccaataccttttgatgtgttgcttttctttgctatgtcctccttagctgaattctatgctgcaaaattttcatctaaaaaagaatgcactactgcctcttcctcatcaagagcaacacaatcaactcctcattggatgaatccactattgggtaggctgaaactcaatactgatgttgtcattaactcaatgacacacacctctggctttggtgcagtattacgaaactatagcggtaagatcattgctgctatggcgaagccttttcctggttcttttcgtttaaaggtcatggaggcaatgactttgatgtatagtttgcaatggattaaagatctctagttacctattcactatattgagacggattctcttatggtgatgaaaggattgcagtctaatcaagttaatatttttgattttcatagtctgttagcggatatttctcttttagtgtccaatttctctggagttcagatctctcatgcctacatatctactaataatgatgctcatttgttagctaagcatgctcttacggtggacactgattgtacttagttggaggaaatccctcctccttcttttttttttttttgaataaaagcgtact

SEQ ID NO: 304149 - DNA, 2021 bp, Cannabis indica
attatacactacttgtggtgcttcaattctttattgttcaagaatctccacctcgttagcttgaatcgcatcaaccatgatgacaaccgtaaaagaataagggaaaaaaccaagcagttaataaatagatatagcaagggtacatgagagtctttctcataaactggttggagaggtcccccacctcaccccacatccgggagcaagatccttagggaacaatgcttccagattatcagatcgtgaacatagattttgactgaaagtgtataaaacatttcatctagaatcataagggttcccgatagaggattcaagctcaataaagttcaaagacacttcattgaatttgaatactcaacagaaacttataaaacaaaaacagagttcgcaaaacttaattttttctacaagcagtataaggataaattaacattcctatttcaagtaatgttcaagttgctcaagaaaacctaaatccaaattatgatctaccacactagacatgcaaacatcaaaaagaaaatcaaaatcgactagatatgctatcatgcaatttatttgtcttacacaagacctaattgcattttagaaaatcctaaactccataaatgcaaaagattacttacgtgttgaaggaaaaagtcttggggaaggaattttgatgtcatgttgtgggtgaattgaaggtacagtaaccggagtttgatcgagatacccaattcttgattgaagatcacgaacacaagctatgagtccgtcaatgtccgcttgaagatctagtggtttcaatggatctgaagaatgaatcgtacagtctagagatgcggtcttggatttgttcgcgaatgaattcgaagaagaaggcgaaggcactcgtcaaagtaatgggacattcaccaaaagcaattctcctggtttctctcctcaacttcaaacaaaaaaaaattcaaactcagaatataaaatggatgaaagtggcaaacagatgttttcgctttacttataggaaaaatggtgatctgcgtgcttttgagtcaatggttcagattatatttcaagaaaacaaaaattgcgtcttacggttcaaaaagcggaagggttaacatttaatgactagtaaggaatcgatataatttaaatgatgaaattttcctcggaacacctattgacatgatcaactgtcatttcgcatatttaggcctcacttgtttccccaacgcattaatcttcacgaactaagaaaataatgccacatataagtcatatttagaaagcaggaagttgtcatccaccacttattggcttagaatttaaaaagggccatgctttttaaacatccatgtgtcctcataccatctgaaaagaagactgcaagccttcgcaactctaaatttctaaaagcttaggagtaaacattattcatattgccgaaagagggacacatatacttctaagatctaaatacaattaacaaaggcctagtttataggcccaatcaggataatggacttaacttaagcagtcaggccattaggctttcagaatgacatctcatctaggcaaaagaatagtccagtgaagagaaaatcagtttaccttcaagtgatacttctgaaaaggtaattaataggcctctagatgtcaagcctaaatcaacactcatttaatattgaatcccaccatattaggactttgtctacgaaatcaagccaaagatcatgcatctttgtctacaaaatcaagccaaagattatgcattccataaaagaaaaatatggtttttgtcaatcagtcattaaattatctttactatatgcaaagatggcacacgtttcttacttgccatcatcaagcagattccacatgtacaaataactattgtctcgtgggttgggcctcaccaaatcggtcacatatttacttcttacaagctaaggctaaaattagggttcataaactagacaagaatacttgtgtaatactcaaagacttttctagccaaataatattgacttgtg

SEQ ID NO: 304150 - DNA, 2992 bp, Cannabis indica
agtaggctctgacagaagatctatgtaaaagataataaataccttagaagaatcacttaaaaaatcccacacttcatgttgttcagcaacattggcaattgacaagagatcctgagaaaacacaatcaagataaaggaataggaaaaagagatgcaagagaaattcttgaagaactgatgtcatacttgcagatatttgtcaagctgaatgcatctctgatgtacgaaagcatcctctgtgcttgatgagaatattctttttggcggtaaatgtaaagtgtaattgggaatgtctttaagttgtcggtgtaatctctcaaaatttctatatctgtagagaaacaaataaataaaagatttgagatatttttgaatggttgagacttaagatatcaaatttcaaacatcatattatggtatactattgtttctaaaacttaaattaaacctttagtgagacaaaagaaaaggtgtatccttttctctttttaacaatccttgcttttctagacataaaaaacaagcaataaaccagaaaaatagggtgtaactaccttcttttcacaaaccaagttctgctttctgcatctgtcactgcaattgaataaactgcaaaggactttgaactaattttttcaaaatatgctcccattacctgtagaggtattcatagacgaaggtaaatttagtttaaaagatatactaactcattcgcaatagaactgaagaagatactaataagctgagccattaatccttaaaatagataaaaactatctgcttattggaacatcagtatatatcccccattagtttaatcaggaaaatatactcacccgacacctaagcttgggattgtgttgtcccacactaaccactatatctgaaacgctcttaccgctaaactgttccctacgtctgccaaaatcagggctataaaactcagaaataatcagccctccaccttctgtaaaggccttttttgaatcaggttcaattttcaaagccgaagtgctattagatctcttaagacgacttttatttccatttgcagacacattaaaattactctctgattcatgtacaggatgcgttctctcaataaaagattcctcattaatgtcttgagagcattgtttctcattattatttccatctcttaattgtgaattggaacttgttccatatgttagcctcagaatcgcttcctctttggttactgtggaaactactggtttgtcagccaaaattggctttcctaaatttttggtgggaacagaactatttaatccaaagccctttgttgaaggattgtgaactcctcttttgaaattcttgttctccttctttttgtagttccttccttttgtccacatgttttcgagattttcaggagcaagaacttcagttcttctctgtgttgctgcctccagcattcgtgcccaatcagctgggcgtggctgcaaaggctcttcctgggatctataattacctgaggatgcttctgtctgatcatatattttaaccaaagctgtattattcccctgattaacagacggattcttcctagatgcagaatcatgatcatgtgggaccccggcagttgactgatcaccacccatgtacttattgttatcatctttcatagcaagcaaaacaaattcaatcaactcattgatgtacctgaaacagaaaaataataataaaccaattacttacaagatgcaactataaagtaagaaaatgcataaaatcatgcaaaagtttgctattaaaacaaaataacatttccaaaaaaaaatgttgcatcaatgagttgcagtagttaacatacgtgaggataacaagtgatgtgatatatacaataatatttaaacattccaagaccagtttcaccttgcttatagactagcattttttgttttggttttttttccaattaaaaaataaataaaacagtacaatgacattttataaaacataagatatagagaaattcctccagcagaactgagtactattataaacaaagttaagaagcaagaagaaacaatgagacataattctgaatgaatcatttaaagaacatacccagggctcgcaaaattcataaccggctgcattaccaagcaggttaaaagttctcgtgcaattgatcgaattacaggagtttgagcttcacgtggtcttagcaccacagtcaacagtccagccattaatcgctgaagaacctataaagaagcatggaacattgccttacatacaagtgataaaaatattagaaagaaagtgatgaaataaatctatttccgccagtatgcaccactcacaccttgtactcactctcaggtgataccagtgcaggatgaagctctttagaagccattagatggtgttttaacctttcatccctctcttctgaagacaatgttcccattacatcaactcctatggcagcttggtttcttctaaacaggtctaagtggtctcccactagatcaactatatccctgagacagcagagtgaagcgaatttattagttacttaaaaatacaaaagcttcttaaaaactagcaaattctttagttgtcagcacgattttaggtaccgtgttaacaagtcaacaagattgatctccttaacccttcctgatacttcaccaaggacgtccaatattatagagcgtatttgctcaggaaactctttgtccggtgttatctccgcgtaccataaatctacgacaaagtccttcaaaatcttgtcaataaaatcagtaattgcagcctctacaaccggagagtcaattttccttttccattttgaaggggtgggtgcagtagaaaggcgtgaatcatttacagacaactgtttcttctccaaatgagatagatacgtttggggacaaactggtttaactttccggcggaactccacctcattaaaaagaatccttaatgcgcaaaccaaaagaattgacattggcaaatttat

SEQ ID NO: 304151 - DNA, 3657 bp, Cannabis indica
tttaaatttaaattaaaatttatataaaaaaataattatttaattttgttgatacttttaaattaaatttaaaatcttacaaaaaaaaaaaatataatcaattaattaatttaactgtattttaaacgttaactttaacggaaaaaaaattattaaaccaataattttcgttaaatttctacatttaatataaggctctattatataggaaagaagaagactattctataagcaagtaaatctgaatttgcattggaagattacaatgaaaggtcctattctaatttattgaaatagacatataaattataatctgaataatttctgttcttcactatgtttgataagattatatggctccttggttagtcgcactaatatacagggccgtctctaagctaaggcgacgtaaaattaggagcccttaacaatacattttctattacattcaatgttaatagtatgtgcccttttcaagaaaataaccaataattacaattcatcccaaaagaaagaaactatgcaaatgcaatcttatgttgtttgtcaaaacaagattgtgtatatgtcagacattatcaaaattatcagcactcttacttgatgattcaacaaatgtttgtttcggaccgtttgttgctgcagcatcgtcttgaccaccaccaccaccaccgcggttgctgttgatcaccctatttgaggaggcaatttcggagtttcttcttttagatcttccttggtttttcgattcatcttctttttcgtcaacaaaagaaagaaacgtttgcacggttcgcgattgaaagcttctaccggatgtttgtagctcctcggtgttgcgcttgctgaattggcgtaccatttggatgaagtatattaagagagctaaaaaacaagctaaaccgcatatcatgaagagaccccaaaagcttttgagttgaagtcggtctacttcgaacttcgtgccttgtgaaatgcaagcgcttctcgtgagccacttgtcgtggattctctgaagatccccgttctcagaaagttttaatatggccgttgacatgtctatcgccaagggtgagtctcgaggaaaagcctgagtttatatacagtattaagttcttactcattatcaatgtgagactttctaacaactacctgcctgatgattcgagctacctttctcgagtcactattgcaatattttcaaccaaacacacaaactacaagaagaataatgttaaatacttacaaatccccagccagccttggtgaattcttgaccaacaatgctataatcgcaatgtgttgagagaaagacctcgacgtatgcgcgctcatcgacaacagctgcaacgccaccttttttaccaggaccgtcgtgcaacgctttagcataatcatcttgggagttcagagaaataagtcttgatggtttaatgttgtactcctcaatcaaataattcttagcgaatgaaccttgttggtacccgatcggatcatcgcctgaaattaaggattcaatgcctttaatgggagaagcaagttgttgcactgtgagtattgaggtcaaactcgctgtgtagctcgaatttatgatcaaaacaacaaacaaccatataattagcacaaggcgcccgagcgtgctcactgtattttcccctacaaaaccgaaaaatatgcaacattgttaagcaaaagtaaaatttagctgaatcctcttaagcttataagaaaagtgtcgattttcgcttactatgtgaaaagaacaatgttgaaaagctgaacctgcagaatgatatgaacaaaacagtaatcaatcaattgctacacattatctttttcgattcgacacaaacatcttaaagggagaatatcttaccaaagaatagtcacaagttgtttcctaggagggcctcgaaaatcatcgttgagtctgtgttccaaaatccaaacaactgcaccaataatgagaaagaacaaagcagtaatgaaccacatttctttagtaaacggctttaaaaacgcccacgcattagaattcatcttcctcacgggcgctaccactactaatcctgactcaatatagggttgtgtgaagtcagccattcttgttctattagtgattattgcaatgtcacctatggctgcatcatacacccctgctgtgatcattcgaacaagttcagttggatttggattcgtaacaccatccccgaaaggctgcaatttataggggacagcatatgggagcaaattgagtgcagcagtaaagacatcaatgcagtatccagtgaacatatctgtgccttttattggagactcaaattcgcgatagctcactctattcgggacaccaattctcaaatggcgtccgttgtttggaaaaacccaacctctaggccgttgtgaagtttgtccgggccaaattgcatcatggagattttgatttgcaattgaacgattcggtggcttcaagtatgtaatttccggtgaaacaactgataatccagagtaattagtccaataaccgatcttccttgtcccggtgccaaccacattgagaatatcatatgcagggttgatgagattcctctttgaatcaaatgcataagggccagtcaagcctgtcatgtttactttcaatatattctcaagtaacttgtctccttcatcgaagatactcatcgaatcaagattcaactccccactttcgagcttctgcaaccttgaatcatttgaaaatgaaatcttccctccttgtttgaaaaaactatcaagtccccgagcgagcaaccaaacagagtcataggcatacaaaccataagtgttcaactcaacgcgattctcgggtggaattttacttgtcaactcactccacctagaataaaagttctttttttgcttcgaatctggtgtatgtatacgcaatgcaagagcaccgtccatgctattcctttgcctttcggttaaacccaaagttggattggattccaatatattggcaagccaagtagtagcaatccaaacataaccggttcccatcatacctagagccttagctgtttcgaaaaccttcaaaccatagctagaataaacatgaagcacaattatacgagactcggttaaagccactttaaccaacaaatctgttatgtcatccttggttggaaaattcttaagaggagctttgtaagagatcttacaacgcttctctgcgagttgatcacctaatgcagtaatcccatttctcccatgttcatcatcaacatagatagcaatcacttccctccattcatagaactcaaccatatcagctatggcagccatctgaaacagatcattctgtgtagctctaacgaaaaacgggaactgaagtggcgaaagtgtagggtctgcaaccgaaaatgacaacaaaggagtttgaagctcatttgcaatatgggatatcacatgagctatttcagctccttgaggaccaattatagcaactgtgtcttgctccataaattttaaggctgagaaacaaaattcacaatccaaaattgtttcaacatattaaaagactataacaatatagagtaatttgcgcaaattacttaactttaactccggttacagataaacacttaagtttaattttaacggtaataatacgtaagt

SEQ ID NO: 304152 - DNA, 1960 bp, Cannabis indica
ggacagaaagtgagagaattttgatatgaaaatctagattcctcttggtttcttccttgagccgaaaaagagagaagatagaagagaaaaaaggtaaatttggtgtgtttgattttgcctagcttctacataatttctaacctatacataattttttctctttaaaaaaattataagataatgataaaaaaatttcagttaaactaaaaacttatttagttaataccttggaaattatagatttgcccccaccataaaacatgcgatttaataatattttaagggtaaattggtcattaataaattatagacggccatgattgcatgtactggtggactacaattttgcacagagttgctggcgtttgttgtttgggactgctagagcaagtgtagaaatgacatctcagcttggtggcagcagacagtttagaaatggcatagagaggagatagaaacgggggtggtgtgttgggtgttatggaagataagaaatgagctagtttagaacaagataaatctggttgttaataaggcaatctcttaacaaaacttattcttaatcaatataggtccactcaagaaaaagctacataaatcctctagtaatgatgacgtaaaggttttagagcagtggacgaatatgcaaattagcacgattaaagttaatgtagatggagccttatttgacagtgagggataatttagatataatatggtagctcgtgatagtgaggggggaatttattaaagctttccaatctagtttcagaggaagatttaagcctgatatggtggaggttgtaaggagcaaggaaacactaagttggattacaagataaggttggtctaaagtaatattagaatcaaattgcttgaatgttgttaatgcaataaagagtacaacctgtatggtgtctctatatagattacttattcaagattgtaagcagttattatctaagttgaatgatgtttgtaaagcaatcaacaaacaaagttgatcataatattgctagagcaacttgttttaaaattagttgtactattagcatgggcggacccacattagacgcgtgagggggcagtcattactgaaaagaagaagggaaaaaatgtaaatgtattttgattagttacaaaatatatttgtaactaaacataataaatgtaaatataataatatctttggcatgttgtttaagttattttacacattttatagaggccaagagttcaaatcctagtaaaagtatctttacttttaatattttgtttacttttttgcccctccctcgcaaagaaaaaaaaaagtataccccctcaagcctcaactttaaatttgatttgttactgactattattaataggggtgatgctcctactattagtgggggtaataattttttgggtaaataccattttggactctgtgttttgcaaaagttacggattggaccctgtgttttgtttaatgacaaaatggaccctatattttctaaaatggtaaaaataggaccctgagcttaatgttagacaacttttttttaatacaaccaacttgaagataattcctaatacgaacagatacaaaaaatgtaaacagttttgtcatagcacttttagatcgaattataattaaactttaaaaatcaattcagggtcctatttgtactattttagaaaatacagggtccattttgtcatttaacaaaacacagggtccaattaataacttttgcaaaacacagggtccaaaatggtatttaccctatttttttgctaattgtttatctttgttattggaagatattatttaatgaagattgaaattaattaaaaaaaactaataaattcatgaaaatattaacaatatctttgtaatggaagatatatttaatgaagattgaaattattaaaaaaaactataaaattcatgaaaatattaacaattttgaat

SEQ ID NO: 304153 - DNA, 2531 bp, Cannabis indica
tgatgctctcatctcatccaactgaactattagccttcaaccgaatcaaacctagttttcataatctgacaacaatagatgagagacaccttttatagtgatcgaacctcctaatgttcttcatccaattcgcccatagtgatagagtgtcatgcccacacatagcaagtcaagtacttaatcatagtacagaagacggtggtaaccaaacccaaaggagagaaagagatccaggttcagatcttgataatgctctacgacagaaaggaattaagggctagagatctaaacggaaggaatcataatattccgctgcaatcaatgtaaggttttctaaactcttatgtgtttaatattttcatcaaaatttaaagaggagaaatgaacttagggcggcttaccttgatcttggtttcaaaacctcctaaaatcctagctaaaattctattgaataccaattgaattggtctaaaaatctcttggttcccttggttttgtctaggccaagaaagagaaagagcttggagagagagagtgttccaattttggtttatctctttagctaaatgattctacacaatctaaaaactatatattcctcaataatataaaatttagttgaggataactttaattaatctaatccttggccaaattactaaattgcccattttcttaactactaagaaatcatgagttaggagtagaattgtcattaacgaaatactccacataatctcgaaattctaactatccataagtctctccccaacaattctattgatactaaaccgtaacgtagtgacactattgaccaagttttcgagtttccattgttactagacttaaaacatgaaaatataaaattttaataaatataacatatatgacacacctagagttcaataaaatctgtaatcaatatatttatatcacaaattctcattttcaacaataggccttattttgatattaatgcacatataattataatttactacttaatttattaatatactgctaataatctcctaattttcatgcttagtcatgtgatacaataagggtgttaagagaactaaaataacttgattactcatttgcactctctctctctctaaataggttctctagttctcttccaactgttctaggattttgctaactctaagcaatttaaagcttgaagtcccatatcttattccatcaaagaagctattagcaatctatgaaaggtttggagtaaagatcatttggataacattaatattaatgtggcaggctcaatgaagatttgatttccacaatcaaatttggttacttctaatctttatccatcttgtgtttatgattttttggttctccaatgttattttctttgagctctagtgattatcttatttctattgattagtttcggtgcaatcctatataattgtaggggatagatcatagctgctatgactttacctttttgaggtttttttgactgatagtgatgaaagcaatgactcttaggcatagtttgcaatgacttaaaatctttaactaccatttcactatatgagactaattttttttagtggttaaaggattgcaatctgcccaagtgtttgtttctaatttttattgtttgttaactaacatatctcttttagtgttcaatttcgttggagttcaaatctctcacgtatatagatctgctaatgatgctgctcatttgttagctaaatatgctctttcggtgaatgctaattgttcatggttagaggaaatgtctcctcctcttatgtctattacattataatttttttgttttaatataataatattttatctaaaataaaaagaaaatagtctaaattcttataaataatgttcttataattgtataccttatttttttttatagaagcaattatatttgaattctacttgttaagacatgttcttcttttctctatgtaatcttgaattttagagatttattaatttataatttgttgtttaagagaattttcattatttattttgatattttccccacacctttacaagtttttaaacatattttatcattacaagcattggaaccgtttttcactttctttttttttttttttgacatattcacctagtctactttgattaagattttagatatatagttttgctttcctactattgtaagatttttcttttcaagtatttttctttcgtttttttttttttttttaaatggtggataataaactttaccaaatcgatttatttctaccatttttgtttactttaattagtcaataaaatgatgttattactgccactaaagaaaaattgttgttattgttaaaacaaataaggaaaattgaattgtattatttttgttaagaaaaaaaataaataaaaatttatatgggaaaattataagagtttattttttatggcataaattaataatattatgggatcatgagttttttttattttttttaaatttatatagatttttttgtgctatatttttgtaa

SEQ ID NO: 304154 - DNA, 2166 bp, Cannabis indica
agactttaaaaaagagggtaaaaataaaagaagacaatataaaaagggtatagagtgtaatttcctcctattttattacaatgcatattttgtgtgtatagatcatatttcgtacatataattggcctaagaatagcctaattcaatcttcatgattagagttattctactttgaggcataattatttttttttatgggagggataattattcacatttaaaagttataaattaaagaaagtaatttgataaaataaatttatacttgaaaaaaataagaaaaatagataaaacaagtggaaatgacattttatgagttgttacacaatgtgtgcatgtacatagacttttttttttttaaaaaaaaacaacaaatttcttaaagaaataacaagttaaaatacatggagaaaatagtttagttaattacaattacctcttttagttaactagttaccttatattgtatttcccatatttttttaacttcagttaccttttacaatatatttttttttaatacttgcagcataaatacttaaatttaactcttagttgaagataaatatttaagtttaatttttgacagtaataatacttaaattatatttctgtgtatctaaccatgaagtgtcaagtcaatcgccacatgacagtctctaattgatctaagtcattaaaattttaattttatttaaaaattaattaaaatataccaataaaaaatgacatgtgaataatgacttgacacttagctatcaagtacttacataaatttcaaaaatataacttaagtactagtaccatcaaaaattgaatttaaatatttatctgcaacaagaagttaaaattaagtatttatggtgtaaattactcttttaaaaaaaatccacaatttaacaaatttttgccctaaaaaccataaaatttcaatatctccataaaacaacttttgaaaaatgggccaaagtttgggacccatttcaaaattttcaagtttaaatgcccaattgtgttggcaagtttatcagcccagatggcattttagcaaaatgggcccaaaaaaatcagtaggcccaaacacgatgaaatccaggctcaaattccaggcccaattcgcagaaacccaaacaagcacagtttgtcttcacagctcaaatttccaattccaatctctgatctgaaaccaaaccttccgacgatatcaatggcgaaccaaaccctagctttaatcgccatccttctcctcgccgccgcgccggcctcggaatcaatctcctacacacagtaccgtacactcttctccctctcccacacgctcttaactcgagtggcgaacctacgcgccgccaggggcgacatctctggcgcgaaccgagccaggaccatggcggcgaaattggagcgaggaatgggcttagggttttggagattcatatggtcagccggttgggattacgtcaccaactatgcatggagggatttgtcctatacggagctcttcggcgccgtttccgattccaacgagttgctgaaatggttgggtgagttgtctcgggctgaatcggccggcgaacgcgccgcctggattggacgaaattaccaaaatgtccttagggtttctagctcgatgatctctaggcttctcaaagtgtttcgtcaatcggtacgtcgtcgttttggcatttacactctttttttttatttgctgtagtaacctttaattatggtgaatttgattattacgccttttgtgtaatgttattttgcagaaaagggtatgtttgtagtttttttacaaaatagtcctttttttgtgcattatttggtaattactttggaaaaagtttgatcatgaaatatagtaactttcaagtatcgaaaatctgttaattacacctttatgtatagtaaattagtgataccacctaggaaaaagtttgattctgaaaaaaaaactagaagcccattttgaaagacttcaactttagtcaaaatgtgaaatactaaaatttacaaaatagtctgaggtaattttctctatgcgtgaccagtgtaaatctatggctcataatgtggctaagtgggcttttttccatcagaggttcggctccgtgtcaattttctctatgcccaatattatattttgtaatgaccgcgaggtct

SEQ ID NO: 304155 - DNA, 1912 bp, Cannabis indica
aaaaaactgattaaaataattttgtacaaatacatgagaaactcataaaaggggagtttcagttgataaaagagatgaagatatttataatgtcctttggcaatgtaaggctgttgcatgtgtgtggaattatgtaggttatggtcacaattacgaaggcagcataaggaagataatagatatgatctttttccttactaagattgcaatcggtatgtatggaccaaggagatggagacttttgagtattttctcatagtttcttggcatctttggactatttgataaaggtgaaccatgaggtggctattgtcttcaagctagtgatgttgtggagtagtgtggtcgatacttgatagaatggaactacaagatgatgctcctgtggaaggaaagaaaagaagacaacgagagaagctgctatgtgggaggcaccacctgatggaaccttcaaaataaatgtttatattatatatatatatatatacatactgttatagtgtgaattttcacctaaaaactcgagagtagtctcctataaatttgacacgtggatctaattctcaaaggatggatgaacggttaaataatgactctccaagagttgactttgcttgaaccagactcacgagatgatgcggccctaacagagtctagttgcatactatgtcttgcgtagtgtagtataagcaggaccgagaggatttatataagtcacacgtatatcaaaatatatgcgaggactaaatattcttctcctacgactagataaaaatcgcttttttacataacgattagtccgaatgataaaaagtgttcgacgactcgataaggactcacatgtcttatgtggtcaacacggatctctaacaaagcgactaagatagaatgcatacatcctagtagtaggctcgttagccctttttcgaatatagaacgcacctaaagccagcaagcttgtgtgagaatatgaacaggcagctcgcactctcgcactctacaggctgcatacgttgctgcacttattgttagaatggattaaacagtcttttatttattcttttacgtttattccgatttaatgtgttatttattgtaaaatagttctataatcgattagctatgtaaatttgaaagcacacttgttttgtatacttactttactttacatgctttaatttttacctttatttacatattttttaagatacacctacttttatagataatgtctcaattatacttctcaagttaatgtaaatttactagttttaagtaaaagattagggtatattagacaattcactcataaaaatgaatgatgaaatataatataatggtatttttaattaatggaaacaaaaaaattattccttaacttatctctaataaaattatatttgggcggattaccaatttaatcaaattccctacccttgcttctagatggaagtatatcaaccataggatttaaaaaaaatatatatattttttttccattaatttaatggttcaaataaaatatattaattttttttgaaaaaaaatatgaaattttgatgatatatttaaaaaaaaaaatagaatataaaactttcaagtaaaataaatatattaaaattttcgtgattgttttccttttacaggagggcaagctcatggtgaggaaagtgtgggataacagggaagtctagtgtaaaagtttgaacccaaaacataactcttgacagtagcggcatatgtttttccgtaaggtaaatactattttggattatgtattttgcaaaaattattaattggatcatttgttttgttaaatgacaaaataaatcctgtattttctaaaattgtacaaataggattctgaattgatttttttctaaaataaaatttaattataatccgatctaaa

SEQ ID NO: 304156 - DNA, 2435 bp, Cannabis indica
ttttatgccgttataatgtccattttagtgttttattttagtcaatttttaatattatcacggttttaataattaattattctattagtattaaactagtttataaaatcacacacgtggcgtccctatagattagggcgttacaaaacgtgtcctccaagatgagtgtttggaatggtaaattcttttctaaagcttgtaaagaaacgtttatcaaagcggtcatccaagcaatcccctcttttgcaatgttctgttttaagcttcctaagaccagctgccatgctattcagcgcttaatctctaagttatggtggggttatgcttttaatgaaaaaaaatccactggaagaagtggtttatcatatctaattcaaaattcttcggtggtcttggttttaggtctctaaccaaccataaccatgcccttctcgccaagcaggcttggaaaatttggactaaccctacctctctcctccatttgcttcttaaatccaggtatttcaaaaattctgattttcttcacgccccaaaaggttacaatacctccattacctggagaagtcttcttcattgaagagaccttatgagaaaaggcctttttttggaagattggcactagtaaaaatattccaatcacagccccaaaatgaattcccaatatcacacatcccacttttctccacgagcttgatcctatttaatacactgtctctttcttcctgaatccaaatagcacatggaatcaggaaaattttttgtattatcttccagagtaccaagtaaaagctatcctccaaactcctcttgaccctaacactcaggatactctcatttgggggcaccacaactctggtatccttacagttaaatcagcctaccaccttgcttgttccattaataacgcgaattctccttccacctccaaccctaaagccttgcagcattggtggaaaagtttatggaaccttaaaattcctccaaaagtcaagcattttacctagaaagccttcaatcatatacttccatgtgctttcaatcttttccacaaaaaagctctcaatgacccttattgccatttttgtagaggtagaatggaaactgtcactcatgcacttttagaatgccccagagctcgttctcattggaagcacttttctctcaaagatttttacatatcaactcaaaacagagacattaaggatgtttatattcatggttttgatactttgagcaatgacgactttattttttttatttgtatcctttggcttatttggaattcaaggaataatactcttgttaataataatttggctactaatgaaaatgtgaaggactttgttatcagattcttgcaggattataactaagctcagaagcttaatgaagtggccaacaccaattcagttcaaactcatcactccacaaaaaacaggcccagttttgccccttgtatccccaacgactgcatttgtttgtgtgtggatgcatccttggaccaaaaatcgtgtaaaacaggtttggaaatggttttgaagaaaggccatacgcaagtcatatcatctgcttccatccagaaatctggagctccttcaccgatctttgtagaagctcaagcgctcctgaaagggctcacatagtgtcagaactcccatttccagccattgctagttctatcggattgtcttcaactcacaaatagaattaatagcaagtggcaagacaactcggcactctcaagtctggtgctgatgattaggcagtccctctgtaatctctgtttaggggttctagctaaacatttaattataaatatatgataaataaataagtcaaagcttataatataatgcgtaataaataattataaacttaatataaatattgtaaataaacgtaattatagcataatatgtatgtaaatgaacgtaattatagcataatatatatataaatgaacgtaattatagcataatatatatattataagcagaaattatatgtatatattgctaaatacgcatataagtataaatatatgtatagaatatgtaacacacaaatttaagtagttcggcagaaaatcatttgcctacgtctacggtagcatttaagctatattaggttttattaataaaatggagatttacagattaatggtctcaactgtgtgtaaatgggtatttttagtgagatagaaacagtatcaacgcaaactgtttttgtgtagagagaaataagataaataagaaaggaaaagaagaaggtaaacaaagagcgtgcatataaacacactcttcttttggagtttatcttttctgaaaggtttgaagtgagagattaagagagtttgtatgcaagcatgctgtttatgcttcgacgcttacaaacagcctctacagcaaagggaatagaaagcaaagggaaaattt

SEQ ID NO: 304157 - DNA, 2146 bp, Cannabis indica
ctctctctctttgtactctctgtctctgtgtttgatttgatctggtggcttcgttcgttaacgttttgagacccaaaagctaaatccaatttaactcttcttccagctcactcaatctcatcaaagaagaaagacagaagcttcgtcgtcacgctctggtgcttctttcactctttcgctttctctttcctttattgcacttggtcaagcacaatcttcgaaaaaaacccaacttttaattttgtctctctcttatcgaagctgtatctcttactgtatatacatataaaatacatctacacgcttcctttggtgtttcatgatctgggtattgctcgttttttgaatttgaatccttttccttatctgggtctgagttcaaatccctacttgttcaacaaaataaactactatgaggaagagggagagggagaacccttgtggggtttgtgggcactatcacaaatatgaggaaggagaggtttgtgggatctgtggccatcggattccggtctcttccgagaaaacctcgatccaagttagcgctttcccatccgagatcttgccggactttctttatctgggtagctatgataacgcttctcgttccgagcttctcaagactcaaggaatctctcgtgttttaaatgtaagatttttgatcaatttattatatctttctcagtcgtaaatttttgtttgtttaggtttcgtaaatgctattcttattttttgatcttgcagagtggtttcctgtaaaagttagtatgaccatgttgagtattggattcagtgttctatggctgtttgcatgttttgatctgagttgtctctgatttgatattgctgtagaattctgcagtatgcattataaaaagtgatacggccttgaacttcaatacgtgatacatttggtatactcatataatatgatgaattttatttggttagagttagccaggaacaattgttgaggagtaaaagcggttaggttttgaatagtaaagtgcttttgaagtggtagtcatatcaactatggatgaagaaaaagacaataatgattggacacattgctatctgcccacccatgcgacctttccttatcttatctccactcataataagctgtacgtcaaatgtaatgcgtggctgatctgatctgatggaagacaaatagaatataaatcagtaaacaatgtcacttcttgtaatttgggaattggtttcgagagtcagattggttggttaactcatatgcagttcaagaaagtaatacaactaaactttttgggctgttctggggaagcatatacatatagaaaatatctgtagagcaaacttcttggtttaaattattggtgtgatcattataattgttctctggtagcttctatgatatttaggctgccttattaacttaggctgaataggtgcccgggtttcaggtttcaaccaattaatatgaattatcaagttccagtcatatacaattctttaaacgctagattttggtaaatgcattgtctcacacaaaataatatatggggagcttcacacaggtttctttgtctgtattcttgcatattaatcatgaaatgcttgcttgcagataagctatatgtgcatctaattttacagttttcttttggctgaattaatatacagtacagtattcaagcaaaagttttctattcattatcaagaaacaaacaaatatagatatttcttttctgattacaaatttgttggtctatgattcaaagcttgcgtttatagctatgtaatctgtgtacctgttcacttttttgtttgctttactatttgaagtttggtagcaaacattctaaggtgctgttaagtaaactgttcaggatcttggcttaaacattctattgtgttgaaattgtttgacatgttgtaaattcagtcagctaattgctttggactgttggttttaatttagttatgattttccctgacttgtgttggtttttgttgcagcttcctgcttaattcatttctatgcttatatctaattttcttctcactgctttgtgcaatatccgcctatataagaatctgatccatactcttgatttttgattttcttttgattttaatttgttcagttgaaatttatttatga

SEQ ID NO: 304158 - DNA, 1690 bp, Cannabis indica
cttattttttttctaattctctcttcttttttttaatttttttctcaaacttaatttttttttatctttgtatagatacataatattaaaaatatatttataataagtgtaaattattatatcttgtatttttttaacacttttacactctctcacaaattttatttattattaatttttcaaaaatataaaataaaaacacttattccttctttttatctcttttttcattttcttacttttatatcttgttcttgatcaactttcaatcaggttcttcatcattctgatgaaaccttttcttttgatttgtatgttcatttggttggaatatatagattgtttccgaaagaaccttctttctattatgtccagtatttacctcatcttctttcttttgtagatgaatccaaacaacttttgggaaggtaataattgaattgacaatgtccttttacggttactcttcgaagaccagctgagactctgggcatcacaccctcgccctctaccaacaactcctcctctagctttgaggagttggaagtttcgagcgaggaaattagaccttctatcccagttgtccaataccatatctatttggaccaaatcggtggagacgtgtatggtaggtttattttggagaaaaattttggttggaggaaatacttttggttcagctggatatacgttgtccgatcaaacatcccaaatactttgctagaagtataccctcaaccttctctctgccttaaggtcgaggtggaaattacaattaccgtcgcagaccatcctttagaaagttattcatttcactctagaaacgtggctcgtacaaaccaaactattttccaaattggcccggccaatgctagattcgcccaactaatggttatgtgtcacgaacaggccaagccaaactctgagggcgaggataacttgccaactagggatcctgaagtccaggagattgaagactatgtcgacaatcgaaggtatcccctcatgccctttcatggcgctagttggtggttggaggacgaccaaccttatgatttttgtggctggctcttagtcttgggtgttgattacacgaatcaatttttgtcggaggaaatgctttccatctagcttgatatacgttgtccgatcaaacatcccaaatactttgccaaaagcagaccctgaaccttctcttcgccctaaggtcaaggcaaaaattgcggttaccgtcgcagaccatcctttagaaagttattcatttcactctagaaatgtggctcgtaaaagcaaactgttcactagattggccccgccaatgctagattcacccaactaatggttatgcatcacgaacaggccgagccagactctgagagcaaggacatcttgcctactagggattttcgaggtccaggagattgaagaccatgtcgacaatcaaaggtatgccctcatgccgtttcatggcattggttggtggtcggaggacgaccatgttagaatatgttttaccaggatctagatttactaccatgtatgttgtttaacatcctaaatatgaatttctaaaacaatgaaattaaactcatataaagttttagaaaaccttacattaggtgcagtgaaataataatggctcattccgttcagatctctaacccttgtatcctgtctgtcgtagagtatc

SEQ ID NO: 304159 - DNA, 3390 bp, Cannabis indica
tattgaaattgtccccaccaccgccccattaaccactaagatggggaatccccaccccattaggggcgggtccccgcgattacccatccccgcggtataaatttccatctctaaataggtgcacttttaaattttttaacacgttgaacatcacaaggcttggaaactcagttacagtgctgatctaattgaatgccaaaacaaatgtcaatggaggagtagtaaaatgaaaacaataaagaaaaagaaactagttaaggagagcgaactattgacatcattaaacttatatagtttccaataacataaataacaaatgtagttgtcctttgaagcaacaaacaataaacaacctggaaaagaacgagaataatatactctgctactattacataatctagcaaacaataactaagtagcaaagtatttatatattacatcttttgatttgattatactaaaactgcaaaggaggccggttatgcttgtgagtctttattccacaacacgcattttatcatacagtttgtatgcattataaatctaaacatttttagcatataattcaatcaaaatcattccctcatcacttacacctacttcccaaaacagaacctataattattaataaaaggaaacaaattatatacagagtaataaactatcaaacaactaaatatgatgtatatattcaagtaggatatttacctttggaagcttgggaagtcttctagtttcattgctttccacaatctccttcactttgatcaacaaactatcaaactcaatgtcctttggatccataaaggataaaagatcttcaacccatttctccaataaccctggactgccacaagcatctaacttactcaatctactcataatcaactggatcataacactggtccctttccccataaccaccttctttttcttctcactcttcttatcaactttcactttctcttctccattgacctccacacttttactttcattcaattcagcaccttcaagggaaacatatgcagttatggcctcccaagccacaattttccacacaaggcccagcaaaacattcacttgatgcgctaatttgtcataattctcttccccttcgaaaaccagttccgagaccagcttaaactcatttttcaaggaatcattactcgggcatttcttctcaaacaaacttcccaaactcgaccgcaaatcattgctacccattgaatctaaatttgatttagaacggtcaaagctacaagtacccaagtcccacaacactgcagccaatggcaatatcgtagtccggaccatcccggctgcccccgcaacgctcccaggtcctcctctgccagctttaacagcagaattcaactcaacccgagtcttggaatgaaccaatttagcttgctccctcaaacagccgtgaactttggggattttcgaaactgcgttaatctcaaccttccccgtcaacttagacccattcagcagtaccttcatatcgccagaaacaccaatctcatccttcgcagtatagccatccccagaatccatcaaattaaaccctgtcacatcagctttcaaagcttcacatgatatcgccgccactgcatcagcaatcgtcgaaagcgccgccgtttggtggtccaaaagagctaaaactccgtacagagaagaggtaagccccgatgtttccaaagtagtaacctcctcttcggtcaaatccaacgattcaatctctagcttctgcgagttcttcgtgttcaatgcttcagcaattcgaactgggagaactgtacggatgctggccgagccggagatgatgagaagcttgttgaggagtaccgcgacaaaggccctggactcttccgcggttaagtgattggagaatttgaatttgtagtccttgatggtcggggtacggttatcgaaggcggcaagcctgctaagcgccgaggagtcgattcgtacttgtgcaaagccattggcaatggcatagacggaggatgaggacagagacgatcccttgccccctagcgtggtaacaaagacttggactttctcctccgccattgccggagctcagagagtgacaacgaagggagtattatttcttcctgctgctgatattttagggtttttggtttctgaaggaaacgacaacttctatttctacatgaaacgacttgtcgtaaactactatacaaacgacttgatgatctttcacactcactaaaattaatgctcaggtgaatcaaaattggaaactttgtagttctttgtgcctggttatacgaaggtccttcgttttttttttcaaaatcttatccatggctggctgattgatcttctacaaaatttgttaaatctaaagaaaacaaaacaaaacatttcttgaaaaggaaggaaagagtaggcaaggaagatgttctgcagtagagttgaatgatatcaaaatggccattctgaattatatgaagggatgtttacataaatatatgaaaaaaatatagatatatatggtgagaaaattcaattaccatataaaaatattaaaattctttttatatattttttttaaaaaaaaataaaacaaatgaaactagagtgatcatcggagttgttactgggctagaaaagtcgctggaatttgctatcggtaccgaaaaagttgtcggagtagttgttgatgttggaaaagtcgtcggagttgttgccaacgccagaaaaatcatctgaattggcattgtcgctagataaatcaccgaaaaaaatcaccaagaaaccggtttcttcatcaagaaccgatgtctttgtgatttttccagcgacaatgccaattctgatgactttttcgaagttttctgtcagtgccggaaaagtcgccaaagtaactattagtgtcgaaaaagccattggagttgttgacaacgctagaaaattcgtcggaattgacattatcgctggaaaaatcaccacgaaactggtttctacatcaagataccagttttcttcatcaagaaaccaatttcttggtatttttcggtgatttttagatgatagtgccaatttcgatgacttttctggcactagccgtaacttcaatgacttttccgacactgataactactccaacgacatttccagcgtcatcagcaaactctggtgacttttttaacactaatgacaaataaaacttcttaaaaacaaataaaaacattaaatatggagtttgaaaaaagggttaatttcacaaatgcacaaaaacaacaaaaaaaataacaaaaatacggtttcacggaattttaaatatttttacgatttttttgattttatttacataaaatacggtcttttatgttgaaattttgttcatttgttgtt

SEQ ID NO: 304160 - DNA, 2033 bp, Cannabis indica
ctttgggtgctttgatgtggcatttatccctatgaacaggggcagaggcagggtctaataagaggggaggccaaccattaaaatttaaatattaaataaatatcttaaaatacataattacatttaaaattatgaatacaaattgtgtatttgtacttgattattcattagtttattttttactaaactactatataattattaaaatttatcttctttattatagaattgtagtttttactacattttttataaaataaaatattttgattgtagattttttttttttattttaagaaatgcgagaaagtattactagtggtgtgcatcaccagtataaggtgtcatgccattttaatataattaaatatcaagttctatatattataatttaataactattaaagaatatcataaatcatttacaacaagctatatggttgatattggaaaaaatataaacttagattttttttccttctatttgattatttttatgagataaaattttattattttataaaattcccacttatatatatttactcaaaaagatgtttattaattgatgtaatatttattttgaagaaaaaaattagtgtatattgtataattataatattggattattttgttttaaatatttaatttgtaggactcacactttaaatgaatacccatcacgtactctctaatgtctagtttctactatctcatttgtttttcttattttttatttttattttatttgtttatttattttaatggagagagccaattgactacttagtatattattttttgtactattttaatgcttcttatatattttttgaaaaataaaggggggccaaggccacccttactcccaatgtacatccacccttgcttatgaacattttatgtaatgaccgcgaggtctaactttatgtttaatgaacattaatcttcaaaaaaaaaatgttgtaccataagaaaatatggatcatgccataaaaatatgaaatgtttcatgccatgcaataatttcatatggtaagcctgaaacggcccgcaaatctaatagtttcgtgtcgtgcttagattcttatcgtgctttattcggaccggctatttttcttaaatagacgaacctattttcttatacaaactcaaattcgtgctctatatttttgtatttttattaaaattgatgagctaattactaaaatatatgtgtatttatagttttaattaattttatatcatttttcaacaatagttacacataatcatattaaaataataataattattataatttaaatattactatcattttaattgataaataaatatttatcattgttattattatcgagctttataatatgtcgtgctattgagctaatctatttatgcttacgtgtcgtatttttgggacttatcgtgttgtgtcacgcctaagtccatatttttttttcgtgtcatgtcgtacctaagtacatattttttagtgtcgtgtttgtgtctctcgggctcgtgtcgatttatgccatatcaaaaagtctgatctatatttataataccaatgacagttctgatcatgttgcaaatgataatcaaagatagaaagagagactaatacatatttatcacggaaaagtgagagaaagatggagagaggtaggaaaaaaaaaagatgataaggttttttgatgaaaaaaaagagtgggttaaaatgtttttattactatattattttaatagatttaaaggttatacataatctatatactatagttaaaaagaaaaatgagggagagagtgttagggaaatgtaatattaaacttattatttaagttgttgagatttttctaggtgaacatttgataagttttttttttattatttggttataaaatgtgatatattttttctcgaggaaattacactctacactctttttatattgtcctctttcatttttaccctcttttttaaagtctatcatttttacctctttttttaaatattgtaccaattttacccc

SEQ ID NO: 304161 - DNA, 1146 bp, Cannabis indica
taacgaagtgaacgaaaagggaattttcgtggaagatctaacaaggaaaccctcaatttcggatagcaaactaaaacaacgcaccaaaaatttcacggagtttctttttcttgtagagaagctaaactgaaaaggaacaaacaagataactaaaaaaaaccctaatccaatcttatctacaccaaaagaatcaaagaatttaatttttttttcttcactgttcacccaatttcctcccttttttttcttttctcttttcctttctaaatctaaacctaacagacctagggtttacagtaaaagcccgaaaagaaaaatgacaaaatggatcaaaaataaggaattgaaacacaacggaaaaaacaacccaaatcgaaatcgaattgaataaaactgatttaccagaaaaccctaaacttcagtcgacagatagcgatagaccaagagccgctcggtattgaatcgtcccacaataagtcaataacgacagcaaagaagtaatttttttttattattttttcatattattttttattattttcctgaaattgagattggcagaaaaatctagggtttctagattgaaagaagaaggtgatgttgtgtggtatggtatggtgttcctctttctcctgagggaaattcgacctggagagaggtgagagagacggtcgatcgagtttgggaggagagagaaagagaaagagaaagagagaagtaaaaatggtgaggaaatggaatataacgaaaatagatataaattattaaaataaataaataaataaatgcaacggtgaaaatttgagtgaggagaaatacacgtggcagttttaggaagacttactttgtcctttggtattaggatgtggcgggagaccgtatgctctttccctccctccattctttttgaattaaaaattaaattaaaaatacaaacaaactacacaaatctatttttattttatttcttataaaaaaaatgtttttttttcattgatgttatagattattttttttttgagatattgttgttttatatttataaaatactacttatttcatatttaattaattttttaggcaatgtatttattagttgttttttaaaccttataaaaaggttttttttatttttgtttaattttt

SEQ ID NO: 304162 - DNA, 1343 bp, Cannabis indica
tttttttttttagaaattatatttctattatttagtttaatctaatttgtattatatgaacaatatactttctgggcaatattctaagaaaacgagctagtttatggtaaagatggataaagcttctgttatcttattctcacaaaaataaattaacttcataacatgtgcagcgttcttgttcaacgagagcaaaaacatgagagaaaaggacgagtcagagtacgagaaagagcagctgaaactgatgaagattcaaatgctgcaatcatggctgccactgctttgcagggcaagcaatggcaccgaggctcccgtgttgagcgcgagcgagagagcagaggtggagagagtgttggaggagatgatagagaggttggatgaggagcatcaagagaaggtattgaccctttggctccaccacttcactagttgcccctcttcagagtggcctaatctccatgcctcttacattcggtggtgtgactctgctagaaacctcttgcttcaccaagatgtactacttcttaattaagaataataagttagtacactatggcatccaatcttctagcattagaataaaattcgtatattatttggttctatactatttttttcttcttaaaatgtgttaaaatatattctttatagaaatattggtttctagaattgtataaatgtatacacgagtttaacttatttttttttattagaattaaattattaaataataagttaacactttctttcataataatagtttaaagaattaaattattaaaataaaaattattaataaatttaaatatacatctatatatttataaaggaattcacaaaaatagttaagtggcactgtatataattttcattttatttttcttttttcgtgagagtttaatattttgtgtttaaaaaacaagttacataattcttttattaaatttacttttgtcccacattgtttagaaagcatattggtcttttaatatacattataaatacatttgttaacgtaaattttcgttaactaaatatataaaccttttacgtagtaaatatactacaaaatttaataataataataaatgaatacaagatatttaatatggttttgtagttaaaatctacatactccacaagtttgtcatccattttttcttggattattcttttgcctttatcgttaaacgtttatgttgactataaaggttgtttctcgctaaatgtgagctgtctttctttaccgtctttgtaggaaaaaatattgagaatagacatgtttcatttcgtagtgctctcgtattataatgatattagagggcgagatggatgaatgt

SEQ ID NO: 304163 - DNA, 2190 bp, Cannabis indica
tgatttaaactaaataaaaaaatatgctaaaattaacctaaatttaatactaaacataacctaacaaaattcaacttttttaaaccatgctattcacctactatcacattgactcacaatatattttcataaaatagaggacatcagtcgagatacgggaaatttgatcgagacacatccagcgagtgaatttagggttactcatcatttttgtttgctcggatgcttgacgaattcaaagttgaggtggattctggttgagaagaaggcgttcgagatttctagaagaacttgtgatcgttataaaaagtagttgttgcaattcatgcaaaaagggagaagaagcattgttattggaacaacaaaggaatttgcagatgcaccattgccattggaggacgccattggagaaccttcggtcttctaatatcaagttgagaaagtaaagagagtgaaagaattttttttattgcggtacaaaaaaattttacttttagtcacaacaaaacttgtgactaaaaaaagtaaaaaaagttgtgactaattataaatcaccactcttatgttgtgactaaaaagttcgtggctaaaagtattagtcacaaaaattataatttattgtgactaaatgtgtttttagtcacaatacttattgtgactaaaactaaattagtggacaacttgtagctaaatattatattttagtcacaagtaactttttgttgtgactaaaacttgtatttagtcataaaaaatttatgttatgattaaaaagttgtcactaaagtaactattttttgtagtgtttatttttctgaatgaaaagattaatagaggctgcaactatatatgtatatatgtatataaagttagctaagtcatatacacagcttaaaaatggctataactaactttaactaattgaaattaccatcgaaactaactaacagacaacataaccactatttaactaacttctctagttaacactatgctcaacatcgtgccatcaattttttatttagttttgttcttttttaaaaaaaatactaagatgtatattttttgacactattattatctataacccccgaaataaatatattaaaaagaaaagagtagtaccatataacaaattaatgtaaaatattacttaatttcttgctttagttaataaacatgaaaaatgaaaactttgcagtagaaattaagaaattgggtgctcatataattcgttatctatggtttcaaactccaaccaatccagactaaattatttgaggtcggaccaaataaattcggtgtgaatgatttgatcaatccaaaccgttttaaattctctggttcgactacagttttaaaaatctcggtagcgattcaaaccaaaccaattcttataattattatatatacttaatatatatttttttagacaaaatgttgatttggaaacaactttaagtagaatattgatattgagtttatattattacgataataatttttattgttatttatgtattataaacttattaaaagtaaaaaaaaaaactaccgaaaaaatgaacaattattgtaaaaaaaaaaaatagaacaactacaaaatacaaaccaatatatttttgagtggtttgatttggtttggtttgatcatattattgggttttgaattttaagaaaactgtagtagtggttggtttggaaaaattgaatatctagaccaaatctctagcagaaatattaattcataatattagagttagtcccacattgtaatgtgatgaaataaattgtagtatataagatgaatcagttactctttcaattgccaattggtttaaggatgctacctcattcattttatcctcaaattctaacattaattcattaattaattttttttaaaaaaaaaaagaaccaatacagaaattaacatatactagaagaaagttacgtgcaaggcacgtatatttagttttatgttatgtgttctataatttaattaagaaaaattcaataaataatcatataatttaaaatgatttaaaaactaattttaattagtgtgtgtggttatttgaaaatcaatagtgaaaagtcaaatttaaaatttgcagaaagagaagaggagaatggagattatcttgaaatatatttaaaaaataaataatgctacacacttactatgga

SEQ ID NO: 304164 - DNA, 2052 bp, Cannabis indica
gcatacgcgaggcttccaacacaacttatatatgtgaccttctccatgttccttcttttctcatctgtttgaggtgcttgattttgtgtcaatctgaaatgttgtgccaaagggacaattactggtttggcatcctccattccaaatttctcaagtatcttcttgagataacttttctgggacagtttgatataactaggcctctccctgattatgtccattcctaaaattctcttagctgcacttagatccttcatctcaaatctttcttttaactttgctttgagtgcttcaattactgctttgtcttttccaacaatcaagatgtcatctacatatagtaatagatgaatctaactgttaaaatagacataaggatcataactactcttggtgtagctaatttttgtcataaatgcatcaaagcaaatgtttcattgtctaagtgctttctttaggccataaagggatttctacgaaagacaaacctgattggggtcaccattctcaaacccttctggttgtgtcatgtatatcttttcttctagtttcccattccaattgctcaacttcaaggttgaatcttgcagctatggacatgatggcccttatagatgcttgcttgactactggaaggaaaatttcagtgtagtctatcccttccttttgagtgtatcccttagcaactagccttgctttaaatctagtttgttcaactcctggtatgccatctttatgtctgaagatccatttgcatctcactagtttctagttttttgggcttcttcacaaccttccaagtcttgttctctatcaaggagctcatttcttcatctatggattttgccctattcttttccaaactttcactgatagcttccttgaagctagtacgtcccatttgttctaaacttgagtcaccttgatttgtgaattcatctcaagattcagcttctcagtcccatctgtttgaggtctggcaacactttaagagtcacttttcgtggccatctggtcctctctaaacacaatatctctacttattctgcacttctttgactaggttctagacaccataacttgtaccctttcacatcattagggtatcctaagaacatgcacttaagtgccattggttgcaacttgtcctgtctgatatgagcatatacagtacaaccaaaaatctttaaatgctcataactaggaggcttaccagtccaagcttcttgtggtgttttgaaattgagtgctactgaagggcatctatttatgagatagcatgatatcttgacagcttctccccaaaaatgtctctctaaatgagcaccttgcagcatgcatcttactctttccaagagatatgttcattccttcagctagtccattttgttatggtgtatccctatcccctgtgtgccttgtaataccttgttcaacatagtattggtggaattcctttaagaaaaattcaaggccattgtcagtcctcaaattcttgatcttgtagtctgtttgattcacaattagcttcttccagttgacaaaggtctctaaggagtgattttgttttcaacaggaacacccaaacctttcttgtaaaatcatcaactatgttgagaaagtatctttctcctcctagtgtttcaactcttgaggcacccctcaagtttgagtgtatgtatgcaagtttgttttcttgtgtgttgacttttgttgaacttcaatctgcaagccttaccaattacacattcctcacagaaatttagttttccacttgaccctttcttaaacaacccttgcttgttcaactccaggaatcctctttcactaacatggccaagtttgatatgccatagtttgatcatgttagtttcatcttgacttactacagggaatgtattgccttgaatggtctttccatcgaaataataaagaccattgtacaatcttccttctaaggcaatctttgaaccttttgttactgtcaatactccattattcaccttaacaaacatgccattcttatcaaacattccaatagaaagtaaattt

SEQ ID NO: 304165 - DNA, 3112 bp, Cannabis indica
aaaaaaaaaaaaagaatatacattctaatatataatgggaaaaatgccaataaccctttcagtttttctatcacatagtttttctaccctttggatatgacattgcactgaatactacactacgtatcgataggtgatatatcgccctgctgtctcactcggacggattatcttcacaacttgaccacgcttcagtccataatatctagccactggatcagtcacttgaatacggggaagctgaacaaacaacccatgaaaaacagtgagcaaggggaaaacaagataaggatatccaatgaaaccttctaactaataaatgcatgatgacgagatatgtaaccaaaactatcgtgacaagagcaactacacaaaatgcaactagtagagacaacatttcttaagtttttatattcagcaacacatcttgaaaaacgtaggatagtgatcaaccgtatgtcagcaccatatatctagctagcagacaaaattaatgtctgggatatacttaaaaaataatacaatgtacaaacctgggtttctttcacagtataccgctccaataatgtcttcttttcctcgtttgtgaggacctgatgctcaggaacaagaacatgttctttgatattgattaacaattcagcttcctgcatgaacgggttaaaaaaaccaaggtagagtcatgttagatagagaacacaaatagttccatatcaaatatcataggcgttctatcaaacctttagagcaaaatatagatccaacttgcaaaacaatttgatacttaagtgcatctaaaataaaattatttcaaagggcaaaaaaataacctagttaaataaaacttattgacgaggttagtcaaactacactacctatataaacagcctagtgtatgtattacacgatatgatctcccaaccctagtctaagaactatagtacaattcattctattagaaagaaacaaaaaagagcttaaaataaaagaaatttaggcaggttactaaaattgagatcacaaacttcatataataacaacattgacctgaaaaacctccaagtggaacttggaagatatctcgcttatacaagtgcgagcaaaaggggtcaaattctgctgaacaactagcattgctctgacaacattttctgacttcatccggttggtgtaactcttcattgtcttgacacccaccttaggttcctctgggaaaaacacataaatctggtacataagaacacagattgatttagtatcataaaattcaggccatgctaattgtaacagtctgctatatagcaacacttaaacgcagagtcaaccaatgaatatttaaaaaaccataagaaaataagcaaaactacctgatcagaactatcgttcctcttagctttactgatggtaaggtcttcccttttcatgctctcaccatacttgtttctgaattgttctctggtcatgttaatctcaaaatctccaactaaataattacgatccttaagcatttgcatcaccgtttttctaaccctgaaaagccttgtaatttcatcttctggcagaaccatctctccctttctggaagagggtttttctaattagtaagtatgaaatacttaaaccataagtaaagcatctatcttggttttatcttgttcttccgaatatgaaatctcaatgaatcaagaaatctactacataagtttatgacattcacatatatacaaatcaaagcaaccaactacaaagaaaagccccacatgaggaatctaagatgcatcaacagaaaatacttggaatgagtacgagagaaccaaaaaatagggctgatgtctcaccgtcgtctgagaaaataatcgccaagagagaggaagaaatgcggctttgacgcagcgtctgaagagactcgtacgagagagagaggctgggctgggacaagcaggactaaagattagggtttccttcttcttcctcttttcttttttctcttatatgcgttaatagagcactcctcttggaaaattttataatgcagacctttaaaaggcattcatatatttctatttattttagtattcgaaataattttaaaaaaattaattttttatgcatcttatatacccaaattaaaatattaaacataagtatactaaaattgtccaaataggtcagctttttcctaaacccccaaaatatccctcccattttctccaactgtccttctctcttcctcttttctctctcaaattttccatcccaaaacccataccgtaccggtcgaatcaccacccacccacccaaatctcttcctcgtcaaaccacccacgcgatccctctcttccacgccgatccctctcttcctcgtcgaaccacccacgcacggcgatcaccacccacgcccatccatctacacccatctcgaccgaaccacacacgccgatccaccacgcacgccgatccaccacgcacgccgaaccacgaaaaccggccgaacaccaccggagatcaaaggcaaactcatggccgaactcgcaatgtcagccaagattagattttatggtatttttaatttttttaattgttgatttagttttaaaatgctttttcttgatagatttagggtctgtgatttagggtgtgattggggtctgttccatcaaggaagaagaaggtccgatgtgggcccaatagtcggtccgatggtcatttagtgagtctaatgcaccaaaatggcttgcaggtccgacgggcccgatacatagcacgatgtcctatatgcaattttaatgcatcgggcacgatttttggcacgatggtggccgatatatggcccgataaacaagagcaatttgaatatcgggcccgattttgcacccgatggtgcccccgatatatggcccgatggtcatgtagaagttgaatgtatccggcccattttaggcccgatggggcccgatatagggcccgattggctttggtacaataatatatatcgggcccattttaggcccgatggccttgcataattgtaattagttttggcccgacatatggcccgatataattttttattttttattgctggattgtattgtgtattgttaattttttt

SEQ ID NO: 304166 - DNA, 1993 bp, Cannabis indica
cgatatagcgacatttagtaatatttcacgacattgtcaaaaactaaaaaaaatgcaaaaaggggcgagttgaaactatagtgatgggtttggaggttttgaggtagttgggctcataaattttaagattttgggtggaaataacaagactttagttaaagtgagagaattacagacataaatttttttaaatgtaaaggtatttttttttaaaaaaaaaaagatattaaaagattatactttacatttaaccatgttaaattaaatttcctattttttatatgtaaataatattcatgtgtcttacactggttctagtggttcattgacatctattctctgtcctaatgaagaaaaatggtgtaaaacgaaatcatgagatgttgggatgcaatggaaatccttcttggaaagtttattgttgaactatttggatactatatgtgcacacaagacactcataaatctatatatgtataatgttatacatatgcttggatatgatggggtagaccacaccttcacgtgagcactttctattgtctctcaacctcatcattaataatctctctaattatgttagctctttctacaatttataatttatatatatttatcaatgtggtttcaatgttcaacttctttcccaaaaagagatgaaagtaaaaacaaaagagtaaacagaagattaagttgtatacttttgaactttttatttctacaagctaactatgtatctatatctatatatatatatatatatgtgtgtgtgacttttatatataaactatatagtacttgttgtcacatgtgagaaaaagatataaagtgatgacaaaaataagaagcttcatgtgactaaaaagcaatgagagataacaacgtgtaaacataatacattacattaaagttaagaagcattgattaatatttgcttgaaatataaatattatttttattattaaccaatatgtgaatgcatcattcatggaatgtagtactacattttattggatatataatatacatttgtaataataatactgccaattaatagttgataatattgcttcggccgtgaaccaggttaatattattggcccgtttatatattgaattattagcttaaatattataagtgtatgattactaaataagttatcatataatagcactagcttagataatcataatataatgatgattaattaaaataaaaaaatgagcaggtttgaggtcatatttaacacaggctctacgtccaaagcatcaggttgttgaattaggtttacctataaataaatattcaactctcatttccatacataataataaggtggtagatattgtcattatattaaatatatatatatatattatttatgtagtttttcttacaaaaatgacattgagaagtaagtatttatctactagacattattgaatcaacatctacttgtcttaacaacaggggaagaaaaaacacaccattccatgcactacaaaaaaatattatttttgccagcacaattcgctaatgcgttgataaaattgcgctgacaaaaaggtcacaattttactagcatacattttcgttgcaaaacgtatttttactagtacaactcatatttatactcgcataagaagctatgtaaaactcttccccttaatactttttaccaacacaaaagtgtgctaataaaaattacttttgcataatagtgtaatgcactcgcaaaaatctcattttttgtagtgatgtgatattaaattcgttaagagaaaatgtttgatatatatcaactatatatatatggctaaataaaattttttggcccctaaatttgacatgtattaaattatatttcgaattttttttgttgttaaaaatttttctctgaattattgaaattgttaggtttaaagatttttgtctaattgcattcaattttactaatttgataattgtttatatactaaatcatgctttcca

SEQ ID NO: 304167 - DNA, 3527 bp, Cannabis indica
ttaatcacataatcttgattacttttcattgtgtagataacacagtaatcatgaataataatgtgataagaatttaaatgaatttataaataaaacaaatgatcatgaagcaaacatgtgaaccaagcaattgaaacaagagataaaataattttgtttctttattgatgattgaatattccattgaaatagagttttagttagagcataaaaacccaacaaaacctacttaaaaataaagataacaatataaatcacaatttactgttaagattgtaatatgtattgaaaaaaatatcatagatgctattaaaatataaataagaatatttaacctttattatatgaaaatgtactttagatttacaaaacaaaaataagaatattataaagtttgcattttgtaaatctagggcacattttaaacatgaataatgtcagcttcagccccaatccaacattttgttgtagacttgtttttgttgtgctgtcaattttccagttacaaacaaatttaaatagttaatatgcaatctaatattaagaagtttgataaaagagaacaaaaaaacaagaaaataatcacctgagtgtaactttatcagaaggtcgtgcaattacattttttatagcatcttccatgatacggttgccataagcttttcataaaaaaacaccgccatttattgcaatatctatgctcaacttcatagcattagacgcaagaggaatgtgctggacatcatctttcgaattatttgaataaattgacaatttacaataatttaaccagattaactctaattgaacattttgaacttacaactgcatttgtaaatctttttaacaatatagcatcatttcaatatgaaaaaaaatatatgagaccatggttattgcgaagcagaatacaattttagatttatttgatttcatgtaaacgagtacgataattattgttagaaggaacatgaggattggattgatcatttgacatttgattaattttcactcttcattctgagttgacaaattcaatttttaatttctataagatgagaaaaataataattacagtacattgacacataaaagaagaaaaatttggactactcaattatcccatatgaaaatttaaggaaaaatatttaagataaaataaataaaaaaggaataagtgtcttgttttacaacttagccactgccatactcttccactctattctatcatcgtatctcatcgtaaagaacgatactaactaaattagtaattaattcaatcatctataagtagtgacatagccgatttaaaatcaaagtaaaaactcagatactatcataatgatccactgcttcaaccagattacatagaaacacaatcacaacccaaaaatatctcaggaaaagtatgattaattctacattaatttagtctcatgataaccaaaaattataaaaaatgtaagacatatataagggtaaaatttatgtagtgccaaaatattttataatcgagtaattagtatgaaaatttttagtggtgtaactgagtaactcttccgataagcctttattttttttcatgaccaagcacatttataacaagatctttcctaatacattcttcaaccaaatcctagaaaaaggaaaaggaaaaagaaccaataaagtgtattcaaacaaatgagtatgttaaaccaaatacgaataaattgtgaaagaacagagttatagaaaagcttctgccacttaagagtttactggttcaccgtttttcttcttaggtgccttagtccaatcaacagagaattagacttgaatttctatcaatgaacttctattttcaaacttcaacacttctctccatagcaatctcaaaataaaattaaaccagtgaataattaaaatgaaaagtgagactattgtatttgaggaaaaatggtgtattagtacattaagatccaaaattcttttctttcaaaaaatatcccgtaaagagtacaatatcatttatcacacaaactctactttctatacttctccttctgcttttatttctttctttctgtacttgtttatttttcagcaaaaaattctttcaaatctttaatctcacaatcgaataattttcagtttcatctagaattctactcatactgccatgatcttatatgttgcaaaccaattatttgtcagttaattatatatgagtgttgctataagatatcatgattcatattaaagccttcccttttaagtttcaaaatagcccaaggtgaatttatcataaccacaaggtagctgcaaaaaactcgatatgaatttaacagaatattctatcaaaaagacaacaatagaaaagttctaaaatactaaaaagcataaacaaaatcatatgtgacaaatcaatgctagtaaaataaactacagaaaccaaagagtagaaacatatagacaaactcttcaacaaaacaaaatattatctacctacaaaaagataggattgcataatttgagacacaacaacaccaaactaaacatgtgacaaaataaaagaagaaataataataatgtgacactgaatacaaatcaaattgatataagaatgacttttcatcatgttctaaacataacatcattatggtttatcttcaaagactatcacatcattctttgaggcaagccaatgcattaaaattctgttaattatccttttttttgtagattttactatggtgacgatccgataatacttgtgtcttctttagtgttatacatgaaattaaaatatatatttagtcattatgtataatatctcatataggatacatacaaggaaacattaatgatttggctagagatcgacattcatgttcaactgaacgaagttaattatgaggattatgaaatagttaaaattattgttattttattttatgttttatgctcaattgagtcgcatcaaacaacacaaaaaaaactcaaagttgtaaagaaaattaaaccacataaacaaacacattacatcatcctttaaaaatagtggctagaagttggataagaagttggtaaaattagaaaaagtactcgtaaaggccaaaataaaactagacacaacacagatggagagagaaacacaacatatattctgtctatactcatgttagtttaggtgccttctagtacttgtccatgtgtatgtactatgaattccaaatgtcctaactctcctttgtttgacagttatattcagtaatttactactaacaacctaagtgtataaataagttcaaggctcaattgtaaacatagaatcattcattttgtaatagatacacaaactaataaagctacttagttttctctcatttttttcttatgagttattgcgttcttcgcaagaaggttttgttatcctattttttacaacttaacgtggcagtaaggatagatgacatgtgtcccaccttttcgataattgggcaaaagaaagtatccctagcagcccataaatgactacttaacat

SEQ ID NO: 304168 - DNA, 2966 bp, Cannabis indica
aataaaactaacactacgtgacttggcacgtaacaatcacctagtatatatatatatatatatatatatattttagattctgagcccaaactgattagttttgatatatgggaaacaattcctaaacttgtgcactacatttccttgcaaaagaaaaagtaagttgaagatgtgaagatagacacaacaagaggtttgaaatgagattagaaaaggtggtaggagtcaatcaaaaatgtattctgagtatcaataaaagattcatctcaccatggtagttggagtgcagattaatcctcagctcattcttgcccccaaacctatttgagaaggcagttcttatcctattattacactatttacatataactgaatacatattaatcgagagctggtcttaaagtatacggcgcctgagggaaaatcaaatttcaaggtccctatatatgtagttgaattattattaaaatgatatttctaatgctttagtgtaatggtaaagctttaaaaaattcttaaaatttaatttttcatagctacacaataaaaaaaaaaaaaaagagattattttagcttaaagttatacattttaccactacatcaaataatatttgttttatgttcatcttatttaatattttatcaatatattaataatttttattttataattcggggcctgatcggtcgggagcccgaagcacacgcctagctcgcctactctcagaaccggtcctaattaatcctcaagtcattcttgcccccaaacctatttgtgactgtcttgaaatggtattccacgggtcatgtatgtgaatgtgaccattgtggggttggacttagtcccgatgggctgtccaacttattcgttggctgaccacgtgggttaatatgagccctcatccttttgggcttaccatcttgtgggccttattatttgtcaattacggctaatggaagcgatgtgggtcgggttgtacaacccataattaattaagcttgtatgattggttgtacacacaacaaatattattatctattttgagtgtgataatcagaatctcgtgatctgtagaggaaaagagcggtaagctgtgtaattctatattatttgaggaaggttgagtgtgattattttaaaactgtataggtataggtctacacagttaaagaatgcttaaataaattgatgggtactacccatgacaacaagatgcatgttcttttctgtaattcatcacttaagaactcaaagttaagcgtggttggtctggagcaatcttggaatgggtgacctccggagaaattttcccaagaggcgtgcaagtaagaacaaagcatggtaaaaagactcatgttgatttgcaaggccagtcatcattctaagaagcagccaaagtgacgtgtacccgtgtataaaatctataagtctgtagcaggatgcccaataaagacttgaagcgaaatcgttacatcagatttgttgttctcttaataactaataaattatgggcttattcaattgggctaaaatctaattgaaaattttaccctgcaccttataaaagtcaatactatacaaaacataaattaacacattaaatttatcttaatctcaatccaaattaattccatctaatgcaatgcaataatcttaatcaatcatatacaccatagaaacccattttggtttttttttttttttttttttttttttttttgagataaaagaaaagacctcttgaatattgctagcccaatctgaaaacaaaaccttttcatgtcacttattgggacccaaaagtttagttttgctacacaaaaataatatctcacacactaattatttgtggtgagtgggacattaataatctcaaatcataaactttggataggattgccaaaggctgttcttcctctttaccaacttttagatagtactatagatctctcctcaacattcatttatattataatatatgttcccaaacaaaacaaatttcatgagtattatcatgtgtaattatgttgtatataaaaaaaaaaaacttttccttttgggtccaaattaacttctagtgaaacactttggatcacaatcagtacttagatgtatgagatggggactcttacatattttgttatctaaaataaacaaaaataagctaagaataatgattggggaccaaaacttttatatgggttatccttgaaaaaagaaatttggtcaaaaaatgccaaagctgtgattatcatcatgatatttttctcttgacaatattttaaatattatataaataaatacttaattaccaaaaaaaatatatatataaataaataattatattgtaattttgtggagtccattttcatgagggtgtgagttatgttgttgggtctcatcaaaatattgcaactaataataatcaattaataaaaggacaaatcatttatgcaagtaacaactacatgggaaaataaaccaaacttgcactatattttattgaaaaaaaaaagtgatattttattataagaaaaaaagtgtgaaagatatgtggtgttcctccatagaattcttaatattatttattcacaactataatttgagatttctccttttggggagtacctagttttgtcttgttctttatactttcaaaaatcttgagaagggcttcctcttattttctttttgtatgatttttataattaaaataaagagaaaaagatatttcatgttaggttaggttacatataataaactaataatgggaaaatttcttggtccaaattaataatgggaaaagatatttttcaatataacttttgaattcttctctcaactagaaagagcaaatagtttttcttctatatgtatcactaatttttgttttaatatttatatatatatgggtttatatctcaccctgaagtataataagtcataagaaaaaaaaaaattgagc

SEQ ID NO: 304169 - DNA, 2034 bp, Cannabis indica
agatcctggtaaaataattcccaacaataccaccttcagatttataccagcagagacgaggccaagtatactagtgcttcttttttttatctgggtcacccccaaccaaaatctggcacacatatgatgaatctcctttacaataaccacatgaatctaaaacaatcccatggcataggtgagaatgacttgaactaccgactttaaaaggacctcacgaccccaaaagagaaatgatttgacttccaaccaaagagattgttccaaatcttgtccttaatggattgaaagagctcctcttacttttactcgcaaagcaaggaagagctagatacttgtcgtgacaactagagaaacacccgaatcactagccaaagcaatacacagatccctaagaaacgaggagagaaacacaccgttgattcatcaagattcactagctgacttgaagcatcttcataaagcaaaagaatctcccaaaatcgaatacaactctcctgagttgcttcaaggaagaggaagatatctttggcaaacaactgatgagaaatcattagactacgcctcccacaaaccagccccgcaatagtattttgaccaatcttgcgcttgataatggaggagtgaccctcaacacaaataagaaaaagaaatggggagagaggatccctttgtctaagcccaggggtagataaaatattaccaatgatgttcacattaacaatcacaacatatgataatattgtaatacatctcataatcataccaatccacctttaatgaaacccaaccctcaccatcatgtctcgactaaaattccaatcaacccgatcataagtctttgctatatcagccttgtaagcaaggaaaccttccttaccgtttttatgacatttaataacattcaagcacgcagagccaatcatggcattatcagtaataagacgactaggaatgaaggcactctctcctttgaaatgatatcatccaatacttcatgaaacttattagtaaccatcttagccacaatcttgtaaatcaccttacacagactaataagccttaaattaactagctaacttagttttttttttacttaggaatcaaagtgataatcgtcacgttgataaaagcagctgacccggacctgtcaatgaaacccaaacacacctgacacacatcatcattaacaacatcccaaaacttctaataaaagtctacccccataccatcttttctcgagatcttattaggatttatttagaacagggcaacacgcacataagcttccaagaagggcctcatcaaaatattattcaagtcatgtgcaacctgagaaggggccgtagacaacacatgatccatggtttccaatgaaggcatatgtgaagtgtacaagacaccaaaatattactcaaacacatttgttataccacgaggctcctccacccaaagcatgctactatcaaagatacccaaaatcagattcttcttcttttgataagtatcattttgatggaaaaaaacaaaattcttatcatccaactgcatccataaattttttgctctcaaagccagtatttctcatctttatacaacaaagtgtcaagatctttttcagtttcttatacatatgccatgtctgggaattcaaaccgagatcaagagacaccaactcgacctccttttttttaatggcaccccgagttcgcttgaaaactttcccattccattgtttcaacacatgagtaacattatcaatattattttgaatctaaaaaaaatcaccaccataatctgccatttaagcgtttgacaccaactcaagacacttgccttcatcggcccaagccacctcaaagtgaaaacgaaccaacactcgaggttgtttacgagcctcaaaatcaagtaacaaatggttcaacaatggcctatggtatgaaccataaagcttcaaatgagaaacaaaataattagggaacaacgagtaccatgcagtattacacactattgtacaagttgctattgcaaaaa

SEQ ID NO: 304170 - DNA, 1681 bp, Cannabis indica
ataccacgtacaaatctcttgtgtcaagtgatttaattttctgcaagtatttttatattctgtgtgttctgttttgtcgctgcaaaattagtttctgcagtaacagaattatattctgcatctgcaagcgtatacagttttatattttagtatttattattggcatttgcaaacacttggtttttcaataatgtttggtgggcttgaacaccagagcccaccttttccccatttttttgaaagaccatccaattccacaacataagaattttcttcgtgatctatttcttctcatgagttctcagtaggcccacctctaattgttgtacccacacgcttcctttttagtttagaaatggataagtacatgttagaagaaaacaaagcattattttctttgaccaaaatagctggctcatttatatccataatttttttgtgcttgcattcctcagtcatgtggacaatcagtttctctgacatggaaatttttatattgattatttttcacgatttactccctaacagtatgcaccatatctaggataaaatttacaccagataccccgtcattactctcttcggagttgattggcaagcctaaatcactttgccagagctatggagaagcggtacggaaattttttctttttggtggagctttcatgaagaggtcgtatggttttgtaatattttctaatggagtctcataaaattttccttggaaattctccaagtggcctataataccatagatgaaatagaacgtagggactttctcgtatttaaaacttaccccaaaggctttactgtctcatttctgaaatttcattcaccttttcaaagttttttccagaggaaaagaaactcttactttgagataatcatgccaaacgcctttaaaattattcggatttgaactgttgaacacgtctatgtctttcctgctttttaaaccacctgatctatcttaaagctagattataaatcatgtatttgaatatacatatcaattacttttgatcataaatccacggactaccgttaagaatcctttgaatatcaatctcatggtagaattggaataagaactggttttgctcaaggatctacactgtaattcccttgcctagctttcatagatcaactattatgttttgaaatattttatagtctgagatcttccctgagagtaattgccctgccaaactccattgtgcatcaaactcagaaatatcatcctccacatcatctagaatctcttctttttcctcttcttcctccagacagattgtatcccatctgttttcaaggtccttcattgtaccattactagacgccatcacagaaagagaaaacaaaaatttggaaaaaacattcaagaaccacaaaagaaaacaaacaagcaaatgaccaaaaacgctctacaatagagagaccatacatatgtcaagggacatgacttttcatagaatataccttaaaatctattactaaagcactttcttgttaaatattttgggtaacatatcataaaatttaggtaatttagccacaattaatcctaaataaaactagataaaaaatgtagccacaattattctatgattaattaaaaatttaatcgttgttggcatttcaaatatcgtttggtaacaattttgtttttaaattttttaat

SEQ ID NO: 304171 - DNA, 1078 bp, Cannabis indica
agtcctttttattttatgctggcaaaagttctagtaccaacattcatttgtcaacccccttttaccaatacattataggtaaattctattttaccagcgtagtactaacttttgccggcacaaaaatgtgctgacaaaagtgacatttcttgtacgagcttaattaatgaagactttcaaataactccaaagtatctcctggttatatatttagttttcagttttaaaaagaagaaaatggagagaatttgaatgaataatgagtgaacttcattaattgagagatgaagtccaataggaccaactatgctcggttgagcttatatacaattataggtagttagtttactgttaacatactagtagaacttgcataacaaaaaacctaataacactcaatcacagctcacgaaactaactctcaactaatctaattacaaggaaaatgttaatactttccctcaaaatggaataatcaaccccattctgtctttgagacgtttgaactgtcttggaaacaatgccctagtgaaaatgtctgcattctgctcctttgttgagatttgagtgtcttgattaacccttgttgtactttctctctaatcaagtgacaatttatttctctgtcttttgttctctcatgaaaaaaaagatttgcaataaaatattgtgctgccttattgtcacattgcattgtaataaatccattgttttcaatttttagttattggagtaaggacaagagccaaataatcttctaaattggtattggtcattgctctgtactcagtttcttttgaagatttagagactttgtattgattcttgcttttccatgaatttagagagcttccaaggaatatgcaaaagccagttgtggatctccttgtatcagagcaagcaacccaatccgagtcagtataggcctccagcttgactttagctagattgagcaaaaaagaagataccatatatttgcaacccttcaccatacattagaaccttttgagcagttacaaggtgtgtaatgttgggttttatgctctaaataaaactctttacaatctgattagttatc

SEQ ID NO: 304172 - DNA, 1834 bp, Cannabis indica
aaatcagatgtcacaaccatccgatccttgtgagaaatcgttctcaaaatcttgttccaagcctgtcatatgtgaaggttcatctgattcattcatgaacaagggttttccttctccacatctgatggagggttgtgcgcaaaaggtcttttctccgcactattctttagaggctattaacgacgctttagaggtgaatttgaagccattcttctcgtttgttagcttatattcattctttcttttcagaaccatataaggagtatgttgttgaaaatgtaactaatgtgttgtttttaatgtttttttttctttctcagaaaggagatatttttaaagctgtatttcgggtcaatgcacacaatagacttgaggtttgtgacattctgtttctttacacacacacatatgtgtctttacttctattttcctattgtataatttgggggtggattgtgaaaaatgtttctttgttttcttcttgtaggcctattgcagaattgagggagtacctacagatgtgcttgttagtgggattgctgctcagaatagagcggtaagtcgggaagtctgtttaatttgttttagcgactagtttcttgtgtaatttcttttggtgattatatatgggtcaattgattagttttgacatgtgcatatgctgtttcaatgtttgatttaagatttaattcaaatttgtttgattaaacttatttataattttctcatgatgttggaaggctagtgtgccttggttaagattttgtttgatctgttagttttgtttttaatcagttgcttatgttatactctgtaattcgtttgggattatactagaaagttaaataacatagaagaagatgtgggagttatatggggtaacagtattaggggacaatccctcgattttcaagagttgggaattcacaaatttgtccttttctatgctactgtatgattggcagatgtggcataaaaacatcatggctgtgttatgtatattctagttttgtttatatttatactggccgtgtaggttgtgtaactcagatgatttatattatcttttatcaatacatatttgctatatctctctctctctctctctgtatcaagtaaatggtttatataaacttgatattcaattaccacctccaagaaatagaacctgatattctgattcagctaacaaactctcatctcacctattaatgagtggaggacatgacaatatctctagcttatgcgcagagaaatcatcattttttgtttattttaatctcataaatatatatagtttttaaaaagaattttttcttaggatatgtcatgttttgaaaggcggaagcaggttttgaggtgtttttccatagtaccgtgagacgtaagcctcgacaataagaataaaaaattcataaacataatatatattataaaattcataacaaaaaacaaataatttcataataaagtcattaaattcatgaaattactagctataagttttaaaatataactaaagttttaaaatataactaaaggcataaaaggttcaaaattaaaatcctaattaatagacaaatgataaatttgaagtctaaagtttcaaacataaagattaaaagacatattccaagtttcaagggagagaggagagccttgtatttgaagagaagggagaaaggagaagattatcatgcaaggcaagttgtggaggatgaggggaagtaatgaatgtttagggttttatttagttttgggcttttaaaatttacaaaataaaactcaaaattgctcaagaaaagtttaaaaaaagctcacttaaactctttta

SEQ ID NO: 304173 - DNA, 1353 bp, Cannabis indica
ttttttaattttttaattagtttaaagtaagtaaaaggtagaaaagtatataatttgcatctaatttgttaactaccataccaaattaatagttaaaagttattaattttgaaaaagttattaattaatgagaccaattaaaatttaagtgggggttactttaggtgactaaaattaaaattaggttcttttaactaaaatagaaattatacaatacaatacttactaaaaatttaaattttacaaaaaaaaaaaaaaaaaaacttacaataaattttaaaataggcaaaatttttagaatagtgtgtaatgagaccacaaaattttattatttttttaagtgttaaatatatatttgctcttagtttattattatgtatgttatacattataaaaaaaatatttatatattatatttaaattgatgatacaaaaaaggtcattttaatataggggccatgtataatggcttaactaattatttaatgtatattcaaccattctgaattacaagaaaatattacgtttttttagatgaaatattacttttttctattatatatatttttacatataattttttaaatttatatttctacacattaattttattttaagaaaaaatttattaatatattatacacattaaaattatataaatgttggttcaatgaaattagatcttatatcatatcacatcaatcgttcatacggtggttaaaggaggcatgaacacttataattcttgatagggatgcatgttgggtgagttttttcaagtttcaaatttgtgttttataggtaccgaacatgcctgtgtgaaggactgggttttcgagtgtcgagtccaggtgggtcaggtgcgggttgagacgaatataatgttgaatattttaatgtgtcaaataacaatattttttaaataacctaatctcataaatccaagaagtaaaaatattaattagtttaataataatccgtatgaaggactgagttttcgagtgtcaagtccgggtgcgtcaggtgcaggttgggatggatatagtgttggatatcttgaggtgtcaaataacattgctcttttttattgaactagaataacagtgctttttaaataactcaatctcataaattcaagaagtaaaaatattaattattttaataataataatttacagtgtaaatacttaagtttaactatcagttacaaaaaaatacctaaatttaatttttgacgttaataatacataatcaagttattatccacgtgttattttcttattgatatatttaaattagtttttaaataaaaaataaaaattgaattatcaataaataaaatttacaaaatat

SEQ ID NO: 304174 - DNA, 1259 bp, Cannabis indica
gtttgtacacaattctgttatttttattccttttgctttgcaattatgaggtcatgattggtacgtctctttctagatgattcttttgtaataaccctagttagtataaatgacatagtagctagctaattgtttgttgagctgagcattttcttctcttttcgtgtcttttttgtttttagtttttctgtggttttcaaacttggtatcagagctatatacacacaggtggtgttcctctttgctcattgctccaaggctaaacaaactacgactcgttcaggtgaaaagagtgctacaagtgcagttactcagtctgcaaatccttcagcaagttctggtggaacccatattacaagtatgttaaatcaaccattcgcccttaagctcgacagacaaaattataccttgtggaaaacaatggtgtttgccattgttcgtggtcatcggcttgacggatacgtgaaaggtaccaaggttaaaccgattgagtaccttcctacagatccatacagaagaaggaaatgttgtgattaacccagagttcaagacctggattgtcaatgatcaacttcttcttgggtggctttatgggtcaatgattaaaaccattgctacagaagtaatgggttgtgatgcagcttcgagtttatggcaagctttggaaactttgtttggagctcactctcgcgtgatgatggatgagtatcgcaccaagattcagacaaccaggaaaggatccatgtccatggctgactaccttcgacagaaacgacagtgggcagatgttttggcccttgcaggtgaaccatatcttgaaaagcaacttgtctcaaacattctctctagtcttgatatagaggacttacctattgtgctcccagttgaagccaaggtttctacatcctggcaagaattgcaggatatactcttaagtttcgatagcaaactcaacaggttgacaaccctatcaggagcaacaaagaaccttaacctctcctctccttctgcaaacgttgctgcaacaaaaccttctggttttccaggaaaccaaaagaccaatcaagtcattttggctcagggaattgtggaagtcagtctcaacagaaaggaggaaggggttctggtagattcagaggcagaggtggcagaagtaacaacaccaaccaactgtcaggtgtgctgtcgttatgggcattcggctgcttattgctacaatcgttatgagaaaaactacatgggttctgttgggctttatg

SEQ ID NO: 304175 - DNA, 1670 bp, Cannabis indica
aaaagggtcgtgacctggctcattggtggtcgtgactactgatgcctctcgagcagatttttccatttttttgccagtttgtcccgtcttttcaccatttgactgaatttgaactttgacaccccgggaacctgaaacaatgaaaatcaagcgtaaaatcgctccaaaagacaccaatagacgagaaaatgcttactttttagacccaaaacataggctaaatataacctaacagaaagcccaaggattttttaatatagaggtggcttacacccaagcctttggagtagctccagcactgtcgaaagcagcaagtgtatcaagatacactggacagttctcgactctattaattacaccttctggaatccaatttaccgaccgtacaatctacagactcgctgcctcaaggtatgcacctacataggctacttttcttgggttcaaagcagcatagaccggatgcagtgttgctcccagacaggcacaagcaagtcaacaaacggatgcttcaaaatcgggaataagcagtcccaaaactaaagaaaaaactcaaagcttgagcgagcctctaaaaaaggaaggatgggatatgaagcccagtacccaaaagatatcaatttgatagattcccatgagaacacgtatcgggaaatttgtaacactgttcactaccagaagccacctccactgtacaagggaggtaagcacaagagaaaatctgaacaagaaatgtcaatatcatggtgatgtggggcacaccaccaaagaatgtgattacttgagggacgagatggataacctgataaaaaaatagatatctccatgagtgtgtgttaatccttattatctttttgggacaaaaggtaggccaaggataggtgataattcttagacaacatggagcgaaaaatcctcctcgagggatagtttaccaataagcttcaagaataaaggcctttcagggggccccaaatgtctaggcacctagaaacatgcaagctcccaaaagtggaaacccataccctccgggtatagctctaccacctgttgacggacatgtagcaaccatttctggaggacctcttattattggtagtacaaggaatgcccataagaggtatctcaatgaacgtgaacaagaaggggagatgtgcaccttagtacaaatgcctacacaaaggttgcgtatgatgagcctacccattactttcacgaaagaggatgctagacatgtacattttccccataacaactcgttggtgattaagactcagattgccaataagagaatgtctcaaattttggtggacaataggagttcaatcaatatcctatttaaagtcgcattccaggggatcgggttacttaaaaaaaccttacaccttgcccaatccaaatttagggctttaatgaagactcactgttgcctatggggaagatgcaactcccagttacattgaatgggggtatagctagaagtaacacttcatacgcattaaaatactagacatttgttgtaatatcccaaaaagtgtgattatatttaattggacatattttattaaatatgtagctatgagaatattagggtaagattataatcttactaaagccaattatgagataattagtgacttttgagaaaatgattaaatgagcgtaattta

SEQ ID NO: 304176 - DNA, 1250 bp, Cannabis indica
acagcactcatcatcagactgcaagagagagaattatggagtaaggagcagaccttatatacaaacagattcaagttttatatgctttacaactataactatgatgctatagcagcacaaataactgcaacataccgcttctgccccaaagcatgaaccacaatatgtttcattatgctcaagcctgccaccatgcctctgtaggggtttctcaatctgcaggatccaagaacagggcaagaaagaggtaagagcatgtcataaagattgccagatagataatatattagatactgtagtaaaataaatcagctatttcaatgtttttgacataaaatgaaaacttaatagtaactagtagtatcaacaaaatatattgttcttcacaattataatgcaaaaataaacccaagaaaggagaagaacatttaaactgcctatgcatttccttgtgctagtgttacatttgtagtttgtactgcactcaaccaaccatacccagggagcaggaatcatctgatttctttttttatttatttttgaaacagaacttgtgttacaagcaaatttagagaataaaaaacattactagagtttttaaactctatcaaaacaatcattgaagggatgctcataaaacatttaaatcctaagcatatcagagaaaatctgcttatattatggtatccttaatatgtgagggttctaaaacaattttgggtggggtaagccatatacattcgacctctgtccctcttctcaaaaaaaaaaaactctctgcttatatacgaaaacatattgctaataggtatttaatcttatcccacaatacttcttctgcagtttccttttcttcaaaaatcctgtaattcgtctcaaatcagatcattggtcaagttcatggccacagttatcttcaagtatgtacccctttacctttgaaactttatcaggccagggtatttgggaatgaaattctcttattttcgatattataatcataacaagttttttaattaagaggaaaacaaaaaattcaacagaaggggggagtactcctgctttaagttgtatgtatgggcatgattttatgcaactctttttctaatcaaatgcttatctaataccaagatgtatgaaaacagctgctaaaattgaataatttataaagtattaatcccagcaaacctttggtgcaccaattccctcctgccttgcttcaattagattaccatgagcatcaattcttt

SEQ ID NO: 304177 - DNA, 3168 bp, Cannabis indica
cccactatccgcgcgaaactccggctgcaacgaccaagaaatatgatgaggaaatggaaatcgtccaagacatcgaggaagaggtgaatgcaaccacccactatagaccaaaagtttttggtttcagccgcactacgacaccaccacttcatacttcctttaccccaacacatatgaaagacacataccaaaaaccagtcaccgatacctggaaatataccgacagtcagattcaatataagcgagataagggcctttgtttttgttgcgatgataaatggtcattgggacatcgctgcaaacaaagagataaatgtggtaattattgctgatgaaattgaaggtattaattcagaacaaggttcagaagaggctaacgagggtgtggttgatttagaaatggcagaactcaagggcacagtggaggtttctctacaatagcgggccttttttcaaataacactatgaaattgaaggggttgatcgaacaatgcaaagtggtcatcttaattgatccccgcgcctcacacaattttatctctgaagtgttggtggataaactcaagcctattactaagactagtcaatacggtgttacaatgggcaatggagattccatgcacgatgaaggagatatgcaaaaaatgtccacctacatagaaatttttgatgatttcctacccttaaaatttgggagtgttgatgttattttgggaccacaatggttggcaactctaaggatgacacacacggattggaaacttcaaacaatgcaattctaaattggcaaccaacaaattactatcaaaggagaaatttctcttgagagaagccttatctcactcaggaccatgtctaaaaaatgtatgttgaggggaatggtcttttaattgaattcaattttgggggcctagaggagaaccaaatagccaaagatacttcggagttccttcaaccgattttgctcaaacatgaaggggtttttgctcaacctagtggcttaccaccagttcggaaccatgaatatgccatcaatttacaatgaggtgcatctccggtaagtgtgcgaccctaaccgatacccacattttcagaagtcagcaattgaacatttaatgaaagatatgatgacaactggcatcgtataacccagtagtaaccctttctcaagtccggtgctattggtaaaaaggaaagatggctcatgtcgattttgcatcgactatctggcacttaatcgtgtcaccactccaaataagtaccctattccagtcattgataagttacttgatgaacttcatggtgcctcaattttttctaaattagacttgaaatcaggttatcatcaaatacgtgtcaaggctgaagatgttcacaagacaacattttggactcatgaagggcattgcgaattctcagtcatgccttttgggatgacctacgcgccaactaaattctaatcattaatgaatggcatattcagaccccatcttcgccacttggttctagtcttttttgatgatatattggtgtatagcaaatccgtggaagaacaccaaaaacacttagatgaggtcttgcaaagcctagcctaaaattagctctacgtcaacaagagaaaatgtgactttggaaaagttgaaatatcctatttaggacacataatctccaacaaggtagtggtagccaaccccgaaaaagtgaaggccatgttggattggcctacacctaaaactttgaaagctttgagaggattcctttgccttactaggtactacaggaagttcgtggaaggttacactctggtggctccaccactaattgactaattaaaaaaggaccagtataattggaacaaattggcagaagaggcattccaggaactcaagcttaagatgactcaagttcctgtcctatcgttaccaaatttctcaaaactgtttgtgatcgaaatagatgccttcgatcatgggttaggggctgttcttctgcaaaaccatcaacctattgcgtatttcagccaagtttcaagggcccaagctagacgaaaatcaatctattaaaaggaattactagccgttgtttatgctatttccaaatgaagaccgtatctaatgggcagaatttttttggttagaattgaccaacaaagtcttaaatacctgtaaaagcagcgggtaattggaacgaagtatcaaaaatgggtctctaaactaatgggcttagattttgacattgagaataagtgtggagccagtaatagggtcgctgatgctttgtctcgccaaacagatgtagctgatttgtaggttttcgtgacagctgaatggccgctttggctagaaattcagcaagaaatagcagctaacccttttcttgtccaacttcgtgacggtcttcaattgggccaacaccaacaccatgggtttaccatcctagatggcatcctctattacaaaagcgtctggtcattctaaaaaaatctaacattattttacatgtattgaatgcatttcacaaaagtccgattgggtgtcattcgggtgagctgaaaacttacaagcgtattgaagctgaattgtattgggaaggaatgcgttgtgatattcgagactttgacggtgcctggtgtgccaacaaaataagctcctcaccacttcacctgttggattactataggcgctgccactttcaacacaagtttgggacgaagtcacaatggatttcatcgaggccttcccaaatttgaaggaggagatacaacaatggtagttgtggatcgtttgaccgagtatgctcattttctgaggcttaaacatctctttactgctgtatcagtggctgacctttttatgcgtgaagttgtccggctacatggtctgcccatttccatcattactaatcgagataagatttttgtgtcatttttggacccacctatttaagttgcaagggacattcctcaaatgaagcaatatcatccccaaaccgatggtcaaaatgtcacgttcggtcttttggtctcttagaccatctccaatggaagatctaaaatttgtgctaaatttggcataaaaaatgaatttgtgctacatttagctcactatttacaattgtgctccaatgcacaagatgtaaaataaggaaaaaacaattaattatattgat

SEQ ID NO: 304178 - DNA, 2712 bp, Cannabis indica
acaattgatgaggatacaagtcgcggaataacttactgggcatccaaaagacctcccatactccatcttgctttaactcaaagaagaagttttctttccaatgcttccccacattagaaaggacacccaccaccgacgcatcagaaggaactttcttataaaagtaataacaacccctaaacgaggagttgtgctggaagttgtagacgtaatgcacctctctggccgtgggagccctgctagcggcctccatgaaggctatgaagaggctggtcaatatgatctacccgttggacaccaactgaaggggagctatgccaaaataatccaaaaccctaatgaaaaagggtggagtggctaagccacacccgccttgagaatagactcactgaaggccaccatgttcacgggtggaaagtttatgcagtccttcgataagggttcaaaaccccgctcgatagcatatccgttgactatcctcttaatgtcgaactatgttattgtactcgtgacatcagccatcccatacgggagtgatggatcacgagtgggaagaggcacactaggctggcttgattggcatggtttgtccatatttgcaaaagtgcaaggaatgttagaatgggacacagtgcacttcatgcctttcatctgacgagcaagagcctttcggctcgacttgggcctggtgggagctccaccctctgcccgatagatgggtggctccacggcagaaggtatgggtgaacaactaggggaggatggctcaggcgggaacatgcgctctaagtgagcaaggttacccgctatgtcagcgtaaatttgcttgagatgggaaatacgggcatacgtgtggacgtgcccttgattgtccaaaagcttaatctctcttttaagtcaggccaaacgttcttgggattcgctaattgcttccaaggactttaggcgctcagacatcgattggtgatattgcgcccaaggatcgggaccttcctcatctgagtcggacaaaagttcaataaaaggaactccatcggggacataaggtgatgtatgattttccataagtatgaggaggaaagaaaaatgctctagtgggaaactaactactagcaagacacggatgcaggcgatataagataaatgagtaaccgcaaatgtaacagaaatacaaatatatgagaaatgaaacaaggcgtatgggttaagaaggtacctgttggaataaacgtaggcaaaggtaagcctgttgcatcaaaagttgcaaggagaacaggtgtcgaaagcctaaggatgtaagtagagctcgaaggaaataaagactagaaggtggaagcgaatacagaaagatgaagttgaaacaaagctatgaaagaagagagggctatctatatgagggggagtgattcatcaccgtaggatcgaaataagagcaacaattaagatcaaacacgcatgcccatgaaatatcacatgtgcccacctaccttattgaataatcccatcaatgtggcagtgtgtggttctagacataattccagatgaggagcaccacaaaaatagagaaggcaattcacttacagtcaaaaagatcacccttttggacttggggcaagtgttaaccacagaaatagaagaagtaaaatttttctataaatagcaaatggagaggtgaataacacaagatattccatacaaacaaaaaaaggacaaaaagcgacccccacctcctttatttatgaatcttctttagtcaaatcgaattatctcttggaaacatccacgcctacggaccccgcgctcttacctcgcccacacccgcccctactcgcccgcacccgcacacgcccgcgtactcacccgcgcccgcgcctactcgccccacacgcccgcgcccaattgcccctgctctcccgcgcccgcacacgcctgctcacacgtgcccgtgcctgctggctcccgctcgcatgtgcctgcgcccgtgcctgctcgcctgcacctaccagtgcctgctcgtgcccactcgcctacgcccgcgccacttcacccgctcacaacactggtgcccgcggcttcaacactcttcctatccacctttccttcttgacaccactagatctaatgagaagatgtcaggagggataacgacggcacaatacacttacataatgggaacaaacttcagttcgtctgaggtacaaaatagaaggggcatttttagtgtcttttaggattctagatatgtcaggtcacttaggatgcggtgtcatgataaatgaaagtgacaggacatagggtgtatgggggcatgttgagggtacaaggagaaggggatgactataaataagactctcaagtccattgtaaggaaaggatttttgaattttctgagagcaatgaaactataacacttggaaaaatttatgagatccttatttcaaacactctaaatattcttaacttttttctttgctttggagtgaagtcatcttttaaggttcaaaaacttgttgtgaaaattcgtatacgcaagtgcacacaatcgtaacaagtaatcaagtgataaatcgagtatcgtctccacaaggattgaaaattggaaattaatttataaaactaattactaacaaattggtttcaacaaaaaaaataaaataaagtgatgagaatatgtaaaaaattaccaaacacaaactatgagaaaaaaaataa

SEQ ID NO: 304179 - DNA, 1239 bp, Cannabis indica
atactaaaaataacctaacaagaccaatctaaaaatgaagcataggttggtagctcgtcaaaagaagcaagaggcaaattttgttttgtttatagatgtttcttggcttcagggaattggggaatggcagctattgtgtttaatcgatcagatgattcctgggctgttaaagtgcaaatcacgaaagctgcctatgttttggaagcagaaactcgtgcgattctgcttgctctctcatgggcgcaccaaagtaattggagtgatattcatgttctctctaattctcaagtccttatgaatgctttggcaatgggaaggtgtcttccggagtgggcttgtttaaatgtttatttgaaaattttagatttgtgtcctaattttagagtccgtaatatttctttattaatcgttcctttaactcagttgcaatggcttagcaaaaaaagctagaatgtctacctgaccagctagtttgtatcaaagaaagggacatctcattctcaactatcttttctagttagtgaacttgaagttcttcccaaaaaaaaacagaggtgaaatttaacttttcttctctaaagtatatatttttttatgagtcaattcccagaaccatgtgcctgttatatgggcttcatggtaccgttaatgttatataaagattttcctaaaccattttctaagataggttcatgaattgagatttcaggtgtatgtcaatcttcatatatacaaagttttgttctttatcattaatagcccttagaccatacgtaaccaacattgattacttattaccattataactagctattgtgggaatgaagaaaaactaaggaaaactctatgcaattattactattatatgaacttataataattttttatgaccatatttttaagaataatcataacttattgtgactgataataattaattgacagttactacactcaaaaaatcattgatatgaaatcatttcctcctctttatttaatgctcttaatttcattaataataacattgtttctacaaaattcatttaggctcatgaattattaatatgtgctttgtgggcgtaatatatgctattgctaactttcctttatcatcaatttagtataaataaatatttatacgttgctttcagaaaaacaaatatatatgggtgactattcaatggttacatttttattgtaatatgattacatttttctttaacctgtaatagcaggtta

SEQ ID NO: 304180 - DNA, 3722 bp, Cannabis indica
accttatcccaaattctaacaaacatcttgaggggatgttttgagatggaaccccattaaacaactgcataaatttatatttttatattatatctttatatagtatgtgtatgtataactgaatgcatatacaagaacaagattgttgggatattagtttatgaacggattgatcatatctgtgctttgatgtagaaataatttcagaagaatgtagctgataactccttttaagttgttggaatgcttatttaactctgccttttgaccctcatatatgtattgttgggctctcaaatgaaaaatttaaacccagctcatgatatgatgacttggtctatttgacaacattaataaacaaaaatccacatttcttgcacaaaatgaatgatagtgaagtaaatagttttcacaacattttgacggaagggttttgatgattattggctgagagcttgatagtaatcgtctaaacccttcattcaaaatgatgcagaacttgaaaccggcatggatattgtaggactaggagatttttcttacatagttcaaatgttgtggcattttggtcttgtttcctctcacttgtagttggcccttttcaagcattgttgtgactgataacatcaatcatcattctattagaactgactaatgcagtgtattatattttatgtaagtgtatattttggcaatagttagctaggttgttgtaattatattttctagactatagtttcaacatttttgcttttttttttttttccaagttatgaattgtcaatttatcataatctttaaattggtatgttgacctcattggtcatataagatggtgcattgtaagggttattaattatgcagtggctatcataagggcattttaattatatatataaatatataaatatatatattctacttgtctatatctctgaaggctgagcttgatcgtacaggttttaccctatttcttggtttcattattgaccgaatgcatcattatcttcgaaagctcattgggttgaggagtaacgttggagcttcaaaggaagaacttgagaagcttcagaaagaaaagtcacaacttaaagaagaggaggagaaacattccaaggaagtaaagttgctgaaagaagaaatttcaacactaacgaaaagtttgaaaaagctcaagtcagagtctgatgagaaggataaaagagttgaaactgccgaagcacatgttgctgccctccagaaacaagctgcggatctattactcgaatacgatcgactcttagaagacaaccaaaatctccaaaaccaagctctaggatacaagagttaacagaaatttctaaagagaaccttaagtcacgcatcaaggattgttttaggttggctcgggtatttttgtcaaaccatctgctgccaagggtggtcaattgcttgtttgatgttaattttttggtagttctaatgaatgtagaattttgtcagtttgccaatctttgcattgttttaactgattaaattgcatttgcccatttgcatacatgatcctgagagtacttgtgtctaatattgaattagtttctaaaggaggatgctaacgcaactttttcttcagatactgaatgaatgttctcaaatatgtgttattaccatttgaacagttgctcactagctaatatctctgtatttttgtcaggcaaatggtgtaacaaactttgaggatagctcatcaattaaaaatgattagtgtgattgtgctgttaagatattctctttgtaattatctttatttttgtgccttgctggcagagatcacccatcctttttagaatattatttgaaatcattgtacggctatataatgaaaggtctagatctcaatctcattgagttgaggaaaattcaatttcactattagtttagaaactttaacttggtatcagagttattgtgatggctagttagatctcgatgggtaggaatggtaatcaaacaccagaggttacagttgaagttggctcagttgctacaagaggaattagtgcacaaaggactgctcaaaactctgctttgaatgtagttgcacaagaaaacatcaaccaaactcaaaccccaaacattgcagtgtctcaatttgaaagcacactcaaacaaccctttgtcctgaagttagattgaagaaataacttgatgttgggatttatgccctaaaagcaagtaactgatagataatatattatagaatatataaaatataattataaaataaatgaatacattaattacagaagtataattaataaatatctgaaaatttcttattcatatggagatagtataatcttgtaaagtcgtacaaaaaaattaaaattatacaatatgaataaaacaagttggtggtgtattaaagtaaggaacctttaatatggaattatcaagcatagtttactatactattctctagtgtgtgcgattttgatttgaatcacatatgtgaatagacatgtagtaaaggtgttgtgtatcatttgattgtacatgactagaccgatatggaataacatctttcattaacatgtcatttaccataaaagtgttattcatatcacagtgatgatctttagtagatcagtctgaatcttgggtatacatgaactcctatttgtgttcattgagtttgtcaactgaaaaaatagcgaactgactcggagtcaaataatcattggttaatcaccaacaaggagtcaggaataataaataaatataaagaacactaggctttatagaggttcgacccccttgtatatgggtaatgacttactccccttttagttgtattgattatgagataaaaccgagcaaatcactaaggaagacaaagtaaattctagctacggctctcaaattatttacgcagaatatctttcagcgatgtgctcttagatgggtgagtatgatttcagttctaggtcccctccccttgtgaattcattaaatatttataggggcaaggttgttacattttgctccgtaaaaggagtgagcaaaaaataaatatccctatgttctagggtgcagttacgatctattgaaactcctttattctcggatagatttgttggatccgagtttggaggattcagtttgagatatttgtggaagcttgttgaagaagaaatcaaggctcacgtagccttgtccggtattcttgaaaatattccttctgacatgcatattggtcacccggtcaggcctctctcaagacttgtcttcttttgtggaatcactctggcaaggggataggcttcacaagccaaacaggttgagaggcctgttgagcaggctgtgaggcttgttgagcaggctgagaggcctgctgagcttgaggaaagggctcaacctacctaaaggcccgtcaaagattgtgatgttatcacagataaccccttagggaggtatagtgaggcaagggagcctctgaatgaagatggactgccatcttgtgctgggactgatcatgctgaggaggaactggcaccctggagcctttgcctccaagaggggagccaaacgctacttgggtgtctccttataatgtcctactgattaggcacgctacagtgactttctaattactgtgctcacctttgctaatttaatgctttcttgcaaaatgtgtcaaatttaaactttataactatacatatatatatatccaaataaaa

SEQ ID NO: 304181 - DNA, 4582 bp, Cannabis indica
catgctggtttggctttaatgtatgggtatgctgctaaatatgctccatcaacagttatagaggccagaatagatgcacttgttgtatgacatcttatcctctctctttgttttcaacaattgatagattcatctgagagccaaaatttccctaaaagatatgttttatagtttcattttatatttacatgagaggaaatacatacattgttggtttgagttctcatgctgacaaaattgatacattttgctggtgtagtaaactttggtatcaatattaaaaatgtaggaaaaatacaatttgttcatatgacatttaagcttagctattagcaaatatcaaacttgattctccactttagaaaattttaatgataattattattttataaaacctaccaagattaaattatccacatggccttattttttccttttgaataaacaccaccttatatttttgtcataaataatatagtgttaattggtttgttatgttatttatttattgaaactaaatctaaattactttttttgaaatctcatgtcacattttagtattagtttcaaataaataaataaataaaaataataatttagttaaagatgtattaactgtacaaggataccactcagataagtttgttcaaaattaggtgagagtaaattttaataggttttgtggaacaaaggcttattattggaatttgaaatagaaagtaaagtatgatatcattatcaatacttctctacttttacattaatatgtatttatcttgtaggggactaatatgctttcacggcttcttcatgtgcgtcaccctaccgcgaagcaggcagttatcacagctattgatttgttaggtctgttcaaattattacggttttgtttactttaaactgtaaaaaaaaaaaaactagtaggtgtgtactattttaatcacagccaataatttgaaatacccgagaggggtagctcaaatagtaaggtatgcggtttgttctaataaagtttgaggtctgagtaactcttgggtacctacatagaagttgttatagtttcttgaaagaatatatttgaaatagtttcctttgctcctatgttttgtaatttattatgctttctacttgtatgtgaaatgaagatgggagacacaactcctgacatccgtgggttcttaagaataacctctttactattcaccaagagacttacatacataaagcaaagttttaccaagagcaacagtgtcagtagtgaataaatatgagttataatccttcaaacaaccaggatttgtgtcgtacttctgtgcaaagtgataagaaatattggatgcttctttctctgtcttgagaaattagagtaagcccgagtgaaatctcaaagagtaaaatcaaaaaaagttttatgtgccttttactacttactatgtgctcacccaaacaatacattgcctttaaagtatgtattttccaaagaaagtgatatgtactatggatgtatagttcaattgtagacaatcagttttcactagtatacttagagaattggttaatggtcacctttgacatcatgcaaataagaatatgtggtgtttcaccagctacttgtcctttgtaccgagatatatattggtagtctgccttttgtattggaccaatgccctgacttgaattctacttaatttgtatttgtatcattgtattatatttattgtaatatagaaccacaatgttaaccatgtagggcgtgctgtcataaatgctgctgataacggtgcatcatttccactgaaaagaagagatcaaatgcttgactacatattaactttgatgggacgtgatgacaacaatgaagactttgctgattctactcttgaacttctgcgaactcaggtttattaattgcttttgagtttgagagatccaattttatagaatttactaaatattttattaaattgatttattaattaatgaagttgctgaataaagctgtcctggttgttgcaattgggatagtgagttgcataagaagggttattggttctaacatgaaatacagaaataggagcagtaaagtaaaagattgttaattttttaatgtggttcaatttctctctgtctatggggcatgcccgtagatttgacttaattaatggttatgtaaaccatttcaagcaccaataggcttaaactatgaaatacttcatctttaacatagttgcacggtgttgtatcatttctcatatacatctataatatataaaaatcacgttcatattgtgttcaatcttaattaggagaatattcaccaataatgaaaataattcccttaaatatctaatctaacttgtggtgcacaaaacagtaggtattgcaaaatgtttttgttgcaacacaagttacacaacaataaaaccagattacacttgagttgttggagtatcaataaagatttccattaaatgtcagtttggaaattttagagctgttcctcagcttaatctcattagcttttagtggaactatggagctatttttcactctttttccttcacttgtatatttgaaggcccttgctttaagtgcttgtacaacattggtttctgtggagccaaaactaactattgaaaccagaaatcatgtattgaaggtattatctcatattattctgcttttcctttcccatatgtattggaatttattcttaacatactttgtaactttgccacctgaattttctttctaatgacaggccaccctagggttctttgctttaccaaatgatccagtggatgttgtgaatcctctcatcgacaaccttattactcttttatgtgcaattcttcttacaaggtatgacaaatatagctttgtcttaagtttcaaaaaaaaaatataactttgtcttaagcatgcatatagcattgtctgaggactaacctgtgatgtgaaatcaagtgcctgttctcttattactcttttatgtactattcttctcaggatcattagatgagagaaatgcttcagggactaacttgatatgaaatcacaagtttagagattagatattatagaaatagtttaggacttacaaaatattcaaggaagattgaggatttcaagagcatgctatttactctatttactctaataaaaaaagatagtttgttatactataagaaattctctagacagaggacttgtttccttgttcaatcctgtagaaatctgaaggttgcagggaatgatagaaacatttaaaataaaaaaggaggaaatgaatattaagtattttcttggatatgcaagaaaattgttggtctcaaagttgatattatgctagctttgcacattttctggagatgttctcattatatgtacatatatgcatttttgtttttcttaatggacattgttcttttatatgtttaattaccatgctgctgtgtctcatttttaacattgtggtttcctggtctaatcaatgtcaatacaatttagtggagaagatgggaggagtcgagcagagcagttactgcatattttgagacaaattgatttgtacgtatcttcatctgtggattatcaaagaagaagaggttgcattgcagtgcatgagatgcttctcaagtttcgcatgatgtgtatcagtggatattgtgctttgggctgccaaggaagttgtacacatagcaagcaaattgatcgcactttgcatggaaacttttccaatttaccatgtaattcttcccgatcataactttttaaaatatccatatttttatgtctctgtatagcttccttgtttattttgtttttaaaaaattcaaaattccagctgcatttgtactgccaagtcgtgcggctttgtgcttaggggatagggtcattgcatatttaccacgctgtgcagacactaattctgaagttagaaaagtttcggctcaggtatgctttgccatgtaacagattttctcatacataattctcctatgtggactctagtccctcgaataagattacgtcgttttgttttttcttgttagtctttgtattgtttcttttttcactaacacatagcatggtgtactttttatttggatagattcttgatcaactctttagcatctccctttcacttccaagaccggcaacttctaaatttagtccagatatagaattgtcctacagtgctttgtcctctttggaggatgtaatagctattttgaggagtgtaagcatccttctacttacttatctactattatagattattattattattattattattattattattattatagaaagataaataattgacagatcacatttttgaatatgcctattttgccctttctcttttctataatttaatataaggctaattagtaatttttccccctgaactttgacatatagtaaatcgtgcccctgaatttttttggccgttgaaaattccccccgaactattgagattgttaaatttaaggacttttgtttaatttcattcaattttactgtttcaatgattgtttatgtctaaagcatgctccccagactttgatat

SEQ ID NO: 304182 - DNA, 3551 bp, Cannabis indica
taacctaaattccaatatttttataaatttttcataaaagaatatgtacatatcggcatcggttaccctcctaaagtgcatgatagaattttacctattttattatttacttttgttaaaagttagaatgattactgtagttttgaaggctttttagaccaaatttgatgggccaagttgggtttttcagcccaggctcggaaagcccagcttaattggagtgggttgggtttgatgagcgcatactccacgtgccgtttggtgcagcaaccagcaaatagggtgggaacgaacccggacaaagttggccttaattcattgattgataaaataataataattaaataaataataaataatcggcaaagtccattttgccactaaaatgaaaaccctcttgtcttctctttagttttcttttctcactttctctctctaaaaagataacaaaagaatagaaaaaggaaagaaaaaaaaggcttttattggcctcctactcagacgagtccaccacctattccttgaaaattcccaattccgattcctcccgcatttttctttctttcttcctttcttcggcaggtaatctaaatctctaatccccaattcactttgtttctttcaatttcattgtttttaatatgatttattccggaggattgaaatttttatatttatatatattaatagaaaatcgaattgatcgtttcgtgtttctaaatttccgaaattgttcttcactgtctaggttttccttttttagatattgagttttatttctatatatgatattatctttatcggactccttatatgtatgtatgtatgccttgtatatatatacgtctttactctttatgtgaagtggttgttagagctagtgaaaattaacctgaaagagcttataattctatggctcgattgcttctaaattgtgtgctggaaatgaagctacaattatgaatcgttataggttataaatttattattactttgattcatctcatgatgactggtgattttatgatgatattaagggattatggttttactcgaatttggattttgtttgcaattctcgtaccaatattttaaattcgtgttgccttttactcaaaacggctgtttcagatttgctagttttgctgggttttctgtaatacgctgtcagtggctgcttcagattataaaatttggttgatgtgtgtgtgtgtgtgttgagattaaattcacctttcatatcaattatttaataatatatagttatatttgtgtacatattgtcaaattttagtttttgtagatttcgtatatgataaaccttttaggagtgaagactcattgttgtttatttgcagaagctcttgtggtgtcttacttgattgagaatttgcttcgaaaaagtgcagattttttcaaggatattctattgctgtcttatattataaagtttcaattggcctatcttagtgattttttgacggaatttgttcgaattattttcttctttcttgtgctgaagaggacatgctgcatgatcaagtgacaaaagttttagttgcgaagcagagataagtaaaagaaaatgggaggttgttgctgttgttcctctaaaggaactgaactcactagtgcacctacatactattatgtcagtataatacttcgcttggattagatgactgcctttctttatcttgtttgtgtcattcagataatttgatctcatgatcaattcaaaatgattatgcattaccattatcatcaattcattcaatttgaatctttatacagtatccaaggacatcagaagagcacttgcctttgtcatcacatcgtaacccgacatctacactctctactggtctcttggtggatactaatttggatacatccagcccagatacttacagaccacctcctgcaccagttccatatgatgtgcctcttggacgctctaattccccaccaggtgctcaagaaatttgtagtgataagaatggagcagtggcacagtcaacaaactcggattctttccaagaagcagctggtggaaatgggcaggatcgttctcccaagtgtgaagacttgaaagattcagacggcaaggcgcaaagtgtttttgaagttgagacagcaaaggacttggaagttgaactttcaaaatcagtggaatctgttgttttgacagctgaggaagaagatggttgtccaatctgtttggagggtaaactgcatactgatttcttttcctgctaaaaccctgcaacttttttttctatcttaatctatgatgcgtctttctatctgtgaataatactcagattttagttaatcagagatatatcatttttttctgttttttcttctacattgcagagtatgacaaagagaatccaaaacttaacacaaaatgcgagcatcattttcacctcgcatgcattctggaatggatggaaagaagtgagacctgtcctgtgtgtgatcaggttagccataccatgttgttttgaatagcaaatgacaaatgtataaggtgataaatccagtgatctccataatgctcattagaggatctgttttctttctgatgcaggaaatgatatttgatcctcctattgattcctagcggtgaacagcatataaataagtcaacttcatttctcgaaggtcttacactttctttttatgtacgcatttagaagtggcagccacatacatggttattgattggttttgttggtcagatcactgtgcattcatttctttttaactttgaagcagaaaaaaaatgacaaggcaacaaaagaagttagggtatttttcggggggtctttgtttttgttttttggtgggtaggagggaggaaatgggaaattttgagaaaggcgtgaggccattcttgagtttcattttctattaagtcatagttattgtccaaagtgaaaggtttagttgttcaagcatataggaggtgaaaactgaaaagtgaaaaaccatatcttcttcttttttcaatatatgttttctcttaatgtgggtatagtgttttgtgagtctgtttggatactagtgttttttttttggcttcttgcttgaattggttggtcctgtaaatggcatatagtttacacagtgggttctttgaaggtgggtagagattttgatgagagtattggaaaatgaaaggttggtatgataaagtacattggctgtattttcagattattgatgtaaatatgtcttgttcttcttgtttttttgtttcattgtttttgtttctctcccttacctctttcgtggggtgcaaatcacatgaaaaatgtctcaatgttaaaccttgtgatttcactataattaagttggaaagccaattacttcacaaaatggtttcaaagaagataaaaaattgaatgaaaataactcagtaaacaatcaacaactaagaatcaagctagagtcgctaatgtgggcaagcactgcaggtgtaattttgggcagagatgaacaaggtaaagataattattatcttttatattaccttttgtatc

SEQ ID NO: 304183 - DNA, 4366 bp, Cannabis indica
atgagtttttttatgccatatttttgtaaaaaaaaaaagtagaaatctcatatttgtaaacaacaataagttttgcggaaaagttagtgtcgccaaaaagtcaccaaaaaattactgccgccgaaaaagtcatcagaagtagatgtctcatatataactaaaaatataactgattctatgaataaaaaccaataactcaaatcggttataattaaaatataactggttctgtaacataataaataacataaaataactcaaacaagttataattaaaatagaatcagttctataatagtgttataatgaataaaaaccaataacacgaaataactcaaaatcggttataactaaaatagaaccggttatataatataatgaatacaaacaagtaacacgcaataattcaaactgattacaattaaaaaataaaggagaaatcagttcatgaaacactgaaacataaattaaaaataaaactagttctacagtaaaaaatctcataacacataatacctcattaaaccaattataatttttttttttaaatagagatcaatttcaaaaaatattgagacataaatatgaaaagaacacttccataacaaaataaataaacacaaataataatacacaataactcaaaaataatataaagaaaccaattatatttattaactagttaaaaatttaagatacaaaaattagttccgtaaagcaactaagataaaaactcacacacaaaaaccagttaaataaaataggttaaacaaaaacattcattcaacatgcttcaacccaccaattaattacacccataccatatatacctcaaaaatactcatttattatgttatataaccggttctattttaattataaccgatttgagttatttcgtgttatttgtttctattcattataacattgttatataatcgattctattttaattataattagtttaagttattttgttttacagaaccagtttataatcggtttgagttattgtgttatttttttattcattatgctatagaaccgattctatttttgtttatatttgagacatatatttctggtgacttttcctgtgactttttctagcgacggtgactttttcggcgccgatgacttttccgacaaaacttattattgtttacaaatatgagatttctatcttttttttaacaaaaatatagcataagaaaaacccatataaatgtaaaaaaaaaaaaaaaaaaaattcataaccccttagtattatttatttatgccataaaaaagtaaactcttataatttttctatatattgtgtaatttctactattgatattgatttgaatataaatttatagggtgcttctacaatacactccattaaaataggtgtactgatgcaagccctaactatttcggtatttataagaatttttttgtctaaatttttttatagttgtgtacgttataattatttaagatatcctgcaaaattttgagaaatttagaataatttacaatatagaaattaatgtttaaaccgtctaattcacacacatataaaataaaaaagttacgcatgcaacagactctttgaataatattttctacgtgttaatttttttttaatttctcaaaattctgttagatgtcttaaatatttataatgtatacgaccataaaaaaatattagactaagtaattttttagataccgaaatagataaaggtgcattaatacacccattttaaggggttgtattgtagaattttccaaacttatattatgtaaatacacacttttaaaaggaatgtatggatacatctctatctgttttagtatccgaagtaattttttagtcaaattttttcttatggttatgtaaattatagttatttaagacatcctgtaaaattttaacaaactcaaaaaattttaacacgccaaaaattgtgttttccacacgcaactattttattttatacacttgtaaactatttgaacattattttgtaggatatcttaaatagctataatatacatgaatatataaaaaaaaatttaacttaattttttttctagatatcgaaataaatagatggtgaataagtacatccttaaagagtttataatttataatattaataaaagtttattcatcaaatttaaattcaaaatatttaatatcaatatttataattttaaaatacaaattttatttttcttaggcaattaggcattaggctttgttaaggttacgcgcatggccgttttgcttaaccgcttaacgaaattacgcgttattaaaaaactattctaggcaaacctagaataaaaataaaaataatataataataaatgataataatgactttccaagtcggtttccactctgtcatcatacgagtcataccgatatttccttccttttttaagtcccctactatatacatccacactctttgatttttcttctatcaaatttcactttctattttctcagaaaaaaaataaaacaaatccaatttctttccatcctaaacactcttttttcttctctgataaaaaaaaacgattagaagatttttcaccattaacaatggagtgtagacctttagaaataaccctaatctccgcttccgacttgaaagatgtcaatctcctgtctaagatggacgtctacgccgttgtttcgatctccggtgacaacgccaagaagcaaaagactcccgtcgacaaagactccggttccaatcctaagtggaattacaccgtcaaattcaccgtctacgagagcgccgtacaacagaacatgttaaccctcaaaatcaagctcgtctccgatcgtagcttcggcgataaagagatcggcgaggtccaggtcccgatcaaggagcttctggataattacaaggacggtagtggcgagaagcgcatgagttacagcgtccgcttaccaaacggaaaagccaaaggtaatctcaacttcgcctacaaatttggggaaaaatttacggctcaagctccagttcagccggcttataaggctgcggctggagaacctgtcatggcttacccacctggtcatgctgctggacccagtcacgggtacccggctcctggcggatacccaccagccggagcgtatccataccctcctcaagctgggtacgcgcctcctcatcctcaagctgggtacgggcctcctcctcctcaagctgggtacggatatccaccggcggctgcacccggatatgggtacccaccagcttacccggttcaacaaccgggttatgggtacccgcctcagaagccgaaaaggaatggtggaaacatggcgcttggattgggggccggtttgcttggcggtttgttagtcggtgatatgatttctgatgcttccgatatgggtggcttcgatgatggaggctttgatttttagattttttattttttttagtttgttttatttttcttgtcatcagaaaaagcgtgcttttttctaattacgatgtaaatgatgggaggttttttaagtgatcgaaaggtttaatcgaataacttatcatagaaaaattgattcttcattttttttttggttggtatctttcattatattatggaacaaatattagaaaatttgggaataatagtctcatctcaaccattctttccgtaaccagcgaatcgcaatttatttataaactatgagcttattattttaaaattcatcagactaaataatatctgcatcaatatcaatatcgcaatttatctgcatcaatctgaaaaagaacaaccaaaaaatcaatcttataaagttttttttttttttttttgaaagtatgtatattcaactcaacaaaaactacaaaagtttaggcaagtctgccattatataggcagacgcaggataatttctcatccacaactcattacaatttgaagaaagagccaatttggccaaagaatgagcagccaagttgctttgatgccctgtgtgattcacagcaatgcagtgagaaaatgcagaggagtctcgaatctcatcaagcaacgcactcctattttagcttgaatgtctcccttcaaaaaactagccacccgaaggcaattagtcttgattatgaacgggacagcctctgtttttagggccaaatggatgcccattcgcaacgccaacacctcagctaactccaccgaataattcccactcttttgttgagtttcaacagctatcacaacaccagcatgattccttataatagctcgttgtgaaaatttatattgatttataattgcacaagtgtacacaatcacaaacaagtaatacaataataagtaatcaaagttcgtctccaca

SEQ ID NO: 304184 - DNA, 1431 bp, Cannabis indica
gggcacaaaacccaacagagtccacgtgtccaataccgaaaatgtggataatatttacccttcaagcttctagattgatgcgcatggtgaaagcttacatcactctcttaatttggacatgtggaaattaaggaataaaattgtgacatttcaaatgccactcgaccgcggaagctgattcatctgtgataatgatatgtccacgtgttagtcgcgcatgagtgacaaggtgcaatcatattttggcccaaaaaataataaaggagcgtcttcatcattgatttacacctcagttttggagggtattaattgcgaggatgcacatagattattggactccccgatcttaggatggaacatttatggagagaagatcgtggtcgtctatctcttcttcatgtggattgcctttttgcgtataaataccccttgtaacttttgtttaccaattttctttctttttcaaccctttaaagcatacgaatatctctgcaatcccctgaactacaaattgaattcgaaacaaagctttcttcttcaatctagaaaacgtcgtaaatttttgccttcgtttgctggtgaagattaaggcacaagagttcccacaccttccatctccagtgatccggacgtttacagtagaagaaatcgtgagcctagattttgacgtagaaattgattcgttgattgctctagtatcttgtctttgcaaaaggtgcgatcaactcccccaggttgatccagcgacgatcaacataacttatccattatcaatatcaggtatgttgtttctttgtctatgagttgtatttctttaattcgtcgtttcaactatattttcatgttttatatatacttatttcttgcctataaggtgctattttgtttgatatatactaatttcttatttttcatatttgctagactgtcttccccaattgcatttgactgtggagttagaagagaggataattttctacaaatccttttcatccaaatagttgaaagtagagaagattgtgaccactaaaaacctccaaaaagtaggtcttataggatgtgactcatctttccttgaaggatacggtccaggatgctctatgaggtgacctaaacaaggttaaggggaccatcatagttattattgctatagaagctctaaagacagtgaaggctgatgagcaatggctggtagattggaggagacaattccccgaggctaaaggactcaatatccaattcaaggaggtagtgcataatgagggtgctccaggagcaagcacctccagtagtggtgagacacccttccctataattaggactcccactataattatttcaacactgtcagtcaatgtggatttgatccatatttcctaaaattcactactacaaaattgggctttagaggcggtttttaagggctttcag

SEQ ID NO: 304185 - DNA, 4696 bp, Cannabis indica
tcatttcgtactcctcgtcgttttcgttttgagaatgcttggcttctgaacctatgtgttatcagcttgttaaggattgttgggagactcaatcgaatgctagtacatcgggtaagatcagtttgtgtgcggatgctctagctcggtgggggaaggagataacgggggacttcaagtctcgaattcaacaatgcaaaaccaccatgtctattttgaagcctaagatggatgatgtttcggttcaacaatatactgaagctagaaaccgattatttgaaattcttgagcagcgggagacgttctggaagcaaagggccaaacaattttggttaaaaggtggtgacaaaaatagtaagtattttcataaaacagctagtagccgtaaacaacacaatactatcttgcaacttaaagatgatcatggaaattgggttgattggaacaatggtctagctaatgtgataaattcttatttcaactctattttttccactggtaacactcactgccaggaggtaattgatagtgtctcggttattgtcccaatttttgcaaatgaagagttatccaagtcagtttcggaagaggaggtaaggaaggcaatttttcaaatgcatccggataaaagtccaggtcctgatggaatgacccctgctttttatcaaagatgttggcaaattgttaaaggagatgttactcaaatggttcagcatttttttcagaatggtgttcttgaggatgaatgtggggaagccaatattgtcctaatcccaaagaagaaaaacccacaacatatgcgagatctacgcccgatagctctgtgtaatgtcttatacaaagtgataactaaagttatgaccaaccgtatgaagctgttcatggatgctattattgctgattctcaaagtgcttttgtgttggggcgtttaatatctgataatgtgctggtgtcttttgaggtccttcactacttaaaacggaagaggaaagggaaaacgggtttcatggcgctcaaactggacatgagtaaggtgtatgataggattgaatggccctttcttgaagctatgttaaggaaaatgggctttgtggaaaattggattcgcttaatcatgacttgtgtttcgacagccaagtacaaaataatccatgatgcctatgagtttggtccgatttatccttctagaggcataaggcaaggggatcctctatctccttatctgtttattatctgtgcagagggtttatcatctttactttacaagtatgaaagaaatgggtggattcatggttgtaaagttgcaaatggtgcaccaagaatatcgcatatgctcttcgcggatgatagctacctttattataaagcaacactccaagaagcacaacgaattcaagagttagttcataaatttgagtgtgcctcgggtcaacaagtaaactttacaaaatcctctattttcttcagcatcaacactgaccttgttatccaaacgcagatttgtaattacctccatatggttgtggccgaagaaggtagtttctctttggggttaccaagtacaatgaacagaaataaaacttcagtgttggggttcttaagagataaggtgaagaaaagactgcaaagttgggaaggaaagtttctttctaaaggaggaaaagaggttcttataaaatcagtcgttcaagcgcttcctagttacgctatgaatgtgtttttattgcctcttgagatcattaatgatattgaaagagcaatgtgtaagtttttgtggaaaacctcataagatgataacaaaggcattcattggatggcttgggataaactttgccttcataaaagaggaggaaggatgggatttcgtaatctccgagatttcaatctctctcttctggaaaacaagggtggcgcatgcttactcgtcctcagtcattagcttctcgtttgttcaaagctaggtattttcctaatggtaattttcttaatgctcaattgggttcgaacccgagttttgtgtggagaagcatcttggaatctcagtcgcttttacgacatggtattagatggtgtgtgggtgatggtagtagaataccgattctaggagagccatggcttccccatgatggaaacccccaggttgtatcttatcacccgttcttggttaatgccactgttaatgctcttatgaaaataggggagttaacttgggatgatgatattctgtgtgatctttttgaggaaagggaccgtgatttgatcaaagccattcctctcaacattactagaacctttgatcatctggtttggtccaaagaaaactccggcattttctctgttaaaagtgcctatgctctcttgcaaaaattgaagggatattggtttgatgaatcagacgatgcattttggcggaagttgtggcagcagaaacttccttcaaagatgcagaatctagtttggcgggcgtgtaataactgcttgccaacggtggtccaactgcgtactaagcgtgttgaggttagtcctttatgctcgatatgtcacaacgatcaagaaaccataatccatgcgttggtcacatgccgtgaggtcaaaaaatgctgggatcgtgttggaattggcaccattgtgaattctggtgcaagttttttcgactggtgcactgctactttcagcaacaattctgatgttgttaattgcagagttgtggccatttgttggactgtttggggagccaggaacaacctgatttggaacaataaactgtttatctttaaagacgtggttgcttatgcgtttcgctaccttgatcaatggaaagctgctcaggtatcttcggattcatcgtggcctattcttatggctgccgatgttggtgagcagtggacacctcctgctgataatagtgtcaaggtaaacgttgatgcggcagtctttgatgatggaaggagcttcagtttgggtatggttgcttgaagttcagatggtctgttgcttgaaggaaggatgaagtacacttcggctcaagtggatgtggctgttgcagaagcaataggcattcgtgaggtgctgagttggttgaaagagagtcaatggcctcaagtctacatcgaaatcgattctctgtgtgaggtgcaagctcttcatagttccattgatatgatatccttgtttggtagcgtcattcaagattgttaaatgatgcttgcatctcttaataatgttgttgtgtcttttgttaaatgatcggctaatgtagtggctcacaagtttgctagagctgctagattatatcatgatcgtacttttagtttggagactgttccaactgaattgctacattgtttggtagctgatgtgagggtttaatttcagtaataagatgaaatttccattacaaaaaaatatatattttttgagtttgatttgtagttaagaagtagaaagagaaagaaataatttgaagtcaattagaacatatagaagaacttgtattaaagaaaaaaatttaacgaatttttttttattttcaagtaccattggaaagacttttacaaaaaaaagttgttggaaagaaattataatgctacccgcaatcagattattcaagtttttaattctaatatttccaaactatttcgaacatttagtcttcaaattcaataatattattacaatcacaatgagaattaaggcaaacctcaacattcttcatgttaacaacgtcgaatattccttttcttatgttctttcccacatttatttttctctctttcaccatctactttatatttctttctttttttagttgccaaagtattattcacaagttcgacatcacttacatataaaagactatgtttctttcaaaatatatagcaaatactatatttgaaggaagaaagactaatgctaaagaccaacattacttttactcataaacaatataataatgttgaagactagtttctttaattaaggatatagaaggaatatgaaatcccaatacacacaaaatctctcaaaactgtaagaacattctaatcaatatattattgataatgacaatgattttccttatatatggttaagttttaagaaaaattaagctttgaatttttttcctctcttcctttaaagacagataaatatgtacataaataaaaattaggtggtttgtgtaatatttggtaaatatactcacatgggtgagtacaacaactacataataagttaatagaacgtggatatatttagttggaactggaattctcacatcattgaacatttgcgcgggctctatcattattggtttggtagcttattttatttttcaattcaatataatttagttagggaattgttaaaaggtattactagtaggtacttagtatttttattagtgtcatattgttattggtgcaattaaatatcgaatctcatatattttaaaaaaaataatttttaaacaaatcgctaatcaattgtaaggtatcacttataaaaaaatattgtatatataacaataattatttaagtatgactactgagacacagtcaaaaaaacacttccacgcaccaaattatatcacacatacacacagggacggagggactttagcccatatgtgggctaaaaccctcactcaaatataaacatcaaattttttatatgtagatatatacatatattaattc

SEQ ID NO: 304186 - DNA, 1547 bp, Cannabis indica
tttttttttttttgaaatagggaatgtgtgatttttatttatttattcatttatttttataaatgtgtgtgtgtgagatgttcaagtaggtatgattctgaattggatggattaatgcctttttgatggagagagagattctttagaaaataaattttcctatatagtttaataaagaaaattccaaattttggattctttgccacttcccgttccttgttcacttctgacttttatattattattatttttactttctacttctttttcttacttaaacaaatgttaaatccttatatttcttcttttcaaaaataaaatccttatatttcacccttgaacgagatgctttgcttcttgttcttcttctatagatctaaatatataatatatattatatttagatgaagaaaaataaacagtgagtacaacaattgatttcataatattctcttcattaaagttattcaaggagacacttggaaaggtattataataatatacagaaatagatagagcatatatgaccttaaaaataataaataataaataataaattattgctatatgctttgcttgtcctgtgtactaattaagaaatatacatttgtgtaattttttttttataaacatacaaacttcatagaaaagtcaaagcaagagaggttaatgatggaaacaaaaggttccacctagaaatattcccatagtaactaaaattcacaagacaattaaccaagctaaaaagctctctgaaacaaaaacttgtccctccaacttggacatctctattaggattagttataattttttttttatttctctcttgaattaattaacattcggttaggagaacgggcttggaatctagaggtggtttcagatatattcaatgatcgagataaagagattatcattcgaaccaacattgatcaggatacccccattgacatttggtattggcataaggatcttcatggtttctatactgtcagggaagcatatcggttgctgcaccattcagagatcactagtactagtgagtttgagattaagatatggaaaattgcttggaagcttaatgtcctcccaaagtgcaccaactcatgtggcgtgctttatctggctgtttggctactaaggttcaacttactaccaaacatattcctctagaccaaatttgtcctatgtgtaatcaggtgcctgagaccattttccatttattggtgcaatgttcttttgcaagatcttgttggcatctttcggttaaaaattggagtcattcgcctatggagtctttttgggattggtttagtcacattctgctacaacactcatccacgacccagcaagagctgctcatggttctttgggcgatttggtatgcccgaaatgaggtggtttggtgagacaaatcaatgtcagcggcggaggttattctattggcaagagtagtccttaatcaatggagaaatgctcaacaacggagaatggggtcttacttgttcctacggattcaagattggacttagagcattggggtgaaa

SEQ ID NO: 304187 - DNA, 3348 bp, Cannabis indica
tacactgactcagattgggcagcctgcccagatacaaggaaatcaaccactggtttccgtatttttgttggatcatccatcatctcatgggagaacaagaagcaacacactatttcaaggtcttctgcagaagcaaaatacagagcaatggctaacaccacttgtgaagtggtttggcttctttctgttttgaaggaattgaaggttgaacatgaaaggcctgcagtaatatattgtgataacaaatctgcccaacacataacagctagtttcacgagagaaccaaacacatagaaactgactgtcacttggtcagagaaaaggtacaacaaggcatcatcaagacagttcgtgtttctacaaaagatcaaattgttgacatcctaactaagccactctttcctaatcaattcaatactttcaaagacaagatgggattgaaagacatttgcagtccatctccatcttgagggagagtattaagcttgattagtgcattgattagttagttagaaagttagttagatggttagctcaatcacggttagttagtttgttgttgtatttatttctcttgtaatctcagctactatcaacatattgtaacattcagatttgatgaagtacaatttaattgattcttttctctcttagtttcttttttcctattctgtttcaagcttattcgagttaataaaaagataaaataaaatattatatttttatataatgtgaaaatatattattattgaaaatacttttaatatatattttattattatgagtgtaattaaatattaaaatctatatatatataatttaatataataatttttataaatataatactaaaattacttttaattttaactgcaccaacagtgcctaacaggctaatctatatatcaattcttttttatttgttttggtttagtgcggcgtttttgttgtttgatctgagtatttggattttgggaaagaagattagggttttgatgacaaacaaggtaacccatgttttaaatgtcagattgtgtcataataagaagatagactcttgactagttttggttgatgaaaagagagtactagaaaaaagataagattttttggatttattatattatgatagatttgggggagtgttcttatttggtatctcaatcataaataacatcaacccaaacaaaacaaacaagaagatagaattaaaaaaggaaacaaagagagatatagcttgccagattaggaaaatctctattgttatcattattattatttccttgtttggtatcttgtcattattctcactaagaaaattcttaagacagagagagaaagagtccaaaagacaaaagaataagctaattaagaagctaaagaaagagatcaactctactttgaatttgttgtttcagaacaatatgactacaaatcgatggtgggctggtaatgtggccatgagaggagtggattccatgtcttcaccaccaccaccacctccattgcttcagctcagaaacacagatgaagatcccaacaaagatgacgaccaagacagtggcaacggcggcgacgacgacgaccccaattcaaccggccacgaaagcttcggactaggaggaagcagcagcaacaaccgcaggccacgtggcagacccccaggttccaagaacaagccaaagcctccggtagtgataacaaaagagagccccaatgctctaagaagccacgttttggaaatcagtagcggaagtgacatagtagagagcatagccatttttgctcaaagaagacatcgtggggtttctgttttgagcggtagcggcatagtcaacaacgtcactctccggcaaccggctgctcccggtggcgtcgtcacgttggaagggaggttcgagattttatcgcttaatggggcattcttgcctagtccttctccacctggtgcgactggtttgaccgtttatttggctggcgggcaggggcaggtggttggtgggacggtgaccggagctttggtggcttctgggccagtgattgtgattggtgcaacgtttatgaatgctacatttgagcggttgccacttgaggaaggggctcaagtagtggaagagcaagaaggtggagtaaatcctatgcctagtggtagccatgatcatcagccatcggttccaattttcaatttgccaccaaatttggtgcctaataatgctcaggtgcctcatgacatgttttggggttctcctcctcggccaccacctcctccttattaatcactcatatcagaattatatataaacagagaaagtgacttcttttttctttttttttttcatatttttttggtcattttgaaaaatgttatgttgatcgttttaatctgaagaaaagaagttcgaggggtttattttctcaatagaagatatttctttgatggttggatccatggatgaatgcaatattggccaaatcttgtaaaatattggtattggtgtttttggtatgttcatttgttctttttgtgtttgttgggacatatgatatgatcatacccatagtataggaggttagaatagtggatagttctttggtgtaacacatgcattttctacatttattgtaactagagaaatttagaagtgttatcttattatttcaatataagtaatatatattaatatgtattagcaatcattggtcaaggagttatcatgagttcagattttcaaatctatatgtaatcattaaattattatatgaaaaatagtaagatttcttaaggcttttctcaggtaatgggaaatttcaattcttcaaatttgctgcaaagttaagcaacagatctgttatcactgcagtcaaggatacaggtatgtttcctatttctccatcctaaacttgtacctatggaacatctttgttgtgatcaccaaatatttcatcataaaattccatttttccccaatggttgtgaataatctgatcatcagatggttgtgatatgaaagtagtgattttctggtcttcataaatgtcaccagtcacagaacagtttggattgtataatcctcagtcaatctaaatgatattgttagaattggggaagtgtatggttgaggaagtaggaataggtgagtgtatggtaaggtgcacgagagtccatctcaaaactaattggcttgatcacaagtggcgctttttggctcactatatctccgaatcagaagcggctctttttggttcatctttagcttggctctgatatcatgttagaattacagaagtgtatggttgagaaagtatgaatagagtgtatggtaaggtgcatgaggttccatctcaaaa

SEQ ID NO: 304188 - DNA, 1899 bp, Cannabis indica
tattcaaatagaggtaattcctctcgttatgcctttgatctccactgaatggtgagtcgtgcggtgctggtggatttgggattccatggccctcccttcacttggtccaaatgcaacaacaaatccccctaggcaggatcaattaaaaaagcccgtctagaccgtggtttggcttctacggattggagaatcctcttcccgagtgcggtgatcaaccacctatttgctatggcatcagatcatagaccaatcttacttgataccattgttggtgttaattgtaagggacggcagtttaagtacaaaaatatgtgggcaagggataagcgttgtttttgggtggtgaaagaagcatggaccaaaagactccacctgaatcccatgataaacttccatcgaaaggttagaaacacttgtcgaaaactgagtcattggaacaagaaacaattcaagaagctcagccttcaagtgcaagagtcaactgttgcgttggagaatgcggagaaacaccacccggatggcttgaaagcaattgaggtagccaaaaacaacctcaatgaagtgctgaccagagaagaaatacattggaagcaaaaatcaagaattcaatggcttcaggagggcgataagtgttcgaaattcttcatcgcctccataatcgttagaagaaggaggaactacatccaatgtgtaaaaaactctgtagatggaaactggatcagagacgaagatgagattgctaagtgcttcctggagagtttcatagagttatgcaagggtcaaccgcaccatgcaaaacctgtgttatatgaagtgtttaccacaaacaaatcggtgaacaagacaacctcattctcaatgctcttccagatgcagcagaagtgaaggctgcaatgtttgaaatgggaaaggccaaaagcccaggccctgatgggctaccaccaagtttctacagacatcattgggaaatagttaactatgatctagtggagatggtttcttacttttttacccactctgaactgcccaattacattaatgacactttgtttatgcttgtgccaaagaaggacaacccgacactaaccaaagactaccgacccatagccctctgtaatgtagcatataaagttatatccaagataatcgcttctaggctgaggggtgtaatctagaagatcatatccccgaaccaggcatctttcgtcaaaggaagaaacattgccgaaaatacgatgatagctagagaaattgctcaatccttttccaggaagaaaggaaagagaggatttatgatgataaaactggacatggaaaaggcgtatgacaagatggagtggaaattcattttgagtgtcttaactcacattggattcactcaaccttttactgaatgggtgagagcttgcatctctattaagcaaattaaactctttctcaatggtgcaattgtcagaaagtttgttcccgagaggggtcttcgacaaggggacccgctatccctgaccctctttatcttagcggcgaaaacactctccagacttctccaacaaaaagtaaggagagggttgatcaaaggatttaagattggtaggcaaggaatgacggtaaaccatcttatgttcgcagatgacatcattctctttggccaagcaacaataagagaagtgaaggcattccgggaatgccttgatgtttactgtcagtggtcgggacaagctataaacctacagaaatcatccatatgtttctcaaaaggggtgcaaagaggaaaagctcaggctatatccaaattttgggagaataggaagatgcctcccaatacaacatacccagaccttcctctattcagatcaaccaaacgtacagagtgttggaagttattttaccaggatctta

SEQ ID NO: 304189 - DNA, 5072 bp, Cannabis indica
ttgctcgcacaaagtcttagttcgtgtcttcctgggtacctacataggaattgctatagtttcgtcgtctccaaatattgtaatctattgtgtaaccactccgctacaagtgaggttttccaataaatttgagcggggatcagtctaagacaagtgacctctctatctcttttcaagcgaaattttcttttgtatgaaagtaaaggtctttataaggggtctctcaaatggtggtttgctttgctcgcacaaagtcttagttcaagtccctcttgggtacttacatagcaattgctatagttttgtggtcccaaaatattgtaacctgttgttagacagcagatatattccgctttaacttgaatgacctatgtaatcacagttttcctttgccacaagtgaggtttttcgataaatttgagtgggatcagtctgagacaagtgatctccatccctttctaaaaaataaaaaaataatctattgtgttggagtttcaaaagcataacaagtatgcaaaattttccatgctgaaactaatctctgaacaacttgtaacttagagttgtatggtatgaaagtaaaggtcttttataagtgtatgaacttttagaaaaggataacggtttgtaaaacgacaacagttggaggaactttagcatatttggactgctttaatgtctaatgtatcagaaaataaccagagaaaaagaaaaagaactgagaataattatcaatgagggactgataagatatattactttgtaggatccctatgttgggtgcctgccttcaagggttgttaagtgagtttgggaaagtagaaaagtgcaaaagagtttcccttgtaattgctgtctttttgttgctgagtgctgactacccttttgatttgaattcatacacacttctgtctgtaatttacatgtgggttggattttcaaattcaaaaagagcttattgtttgttggaacgtagttgactggtggtgcatacatgtttacttttctatagaatctgtcactgtcgtcccttttgattgttttcggttttgttttgcttggaatgtcatctttgttcacaatctgatcactgtgcagatcttaacactcgagaacacgttaaaatgaaagccgtgttggtaatcaacttagaggtcaaagacaaccacgaggaggcagccgtaggagctaggcttgctatggaactatgtcaacaggtatttatactgctatgcaatactttatagtaaggaactatgccatgtattatttgtcttcataagtgattaatacataccccttgattgaatttcgtacatagattgaagcacatgaaatgtgggaagattccattgatgatgttgtgattgcttttgagaaacagcatcggcggaagttgttatataccgtctccttctattgaaaatcgaaaatttagtatatattagtgactctcaacatgttgtgcttccattttgaaataagagtagtgaaaattgaaggtgtgtgatttcaaagtaactttagagtgtttcttctatcattacatgtgtatcaatggactaaccacaacatatagacttttagattaagttttctataatgtgaccttttgatatgatcaaaagcttaattgccattatcatgataatgtttgatatccctttaaatctttggaatatgctttttgattctgagttcttaatggttattcaattgaagttggtcccattttccatggttttgtattatttaaaaagagtaggaaaacataatttgtaaccattggcatcatggcatgtgtaatgccctaatgcatgtgcatctctctctctaaatgaataccaacatttagtcatgttttttacttgattttctcccttccaaagagacatagaggacccctgttgggctcatgaatcttgttccaaataaaaaacacattgtagtttgtgttttgtgttctttctttttgtttttttcttaagttacatacattcatacatacatggaacttgattgattcttctcccaagctatccatcatcaaccatgtgactatgtcactatccttcttatgacacgtggcatcataagataatcactaccatcattgccctcttgccacatggcaatccttagttgaaaatggtgatttgattctaaactatggccaaatagtaggttattaggactactttataagtgtttatattggtgcttgtcaagattaaatggagtcgtaaaatactattttataaagataaaacaagaaagaaagttaactgttggcaccaatgccaaactatttaattatatatataattttttttcgattggttatctgtagtaaatagtaatttgtggggtctaggtaaggtgtctctgttggaagaaatgttaaggagtatcttaagggtcaaacaccacaagagatggtatgctgttaattattggtgcatttcaatatcgggtaaatcactgatcaattataagataccatattagtataatgttgaataatttaaagtgtcaaatagtaatgctttattatattgacataacataaggtggtttagtatttgatctttatttgattgagaattagatctaaggtataagccatgtttattttagttccttttctcattatcattataatgtcttacattacaaatctaataagccaataataattgttgtttattgaagtgtgacacaaggcttaatgtgattgagcattgtgattactttaatagccttatggtctttttggtcatggcattttcagaaactttttcccctcttttttcttctttctcattcatatttggattggttattgtatagaattagaataggcatttattcaataatagaatagaatggtccaccaccaccattgatgccctacttctaagggaacccacccaaaacccaagttgcttatgttgtggggtttgcttttttgtttttccaaaccttatcctttttcttcttcttcttcttcctttcaaacccaagtcttagaaaacacatctccacaaaataaaaataaataaataacgagggtcatataatgtccattcaaaatgagagtattaagaagatatatatactaaaagtcaacatcttttgttgcttaacagctataaattcttcttattatttaaatacttgtttgtatattttttttttttcccaatttagaggaatctttcaccctcaaaagagtaaagatgtgatttttattgattgttattattattattattcaaaagccaaatttccaaactttattattcactcactaattaaaattccttaaacaagtgattagagagagagagagggacatgacacgtggcggtaggtgattggaccgtgagatgagtttgactgacacgtgtgaagaagaggccggacatcaaggctttgaatgtgtttgggagtaaagtctttgtttgggctattattctttgacatgtatctctttcttgctcatccagctcatcaatctaagttccaaccccccttttatttaattatttttaataaataatatataatttaattgcaattttacattaaattttttaatcataataataatagtaatgggatgatatatctctttcgcatttgagttttattagtgtagtacaatgagaatggcatagccataataataacgattatattaagaatagtaatgggaatgggataatattataatcttttgttttagaaggtaatgtgaatgagtaatgagtagtttaatgattattttattttatataaataatgtaatattttttgttaattttttaagaataaatagaatttatctatcgaattatgatttttgtagagttttgtctcttaaatttttttctgttacgaaaatttcccttaaactataaaaattattacaaatatcctattgcaattgcattttggtcatttatttaaacagactaacataatattaatctagcccaattcaagaatctagataaaaaaataaatacataaataacaatctactaataaattataaaagtaggtatgtgcattcttagagcaactgtttgtatatttaatactaataaacggaattttaagtagcttaaaattattaaataatcttgatactacaattatacatataacacatagccacataagcaaattatttttaaaaagaacagaatgtaactaaaaagggatatttgtaatgatttgtattgtccgagaaaaaaatttacaacaaaaagaaaatttaaaggccaaaattctacaaatgttataattcaaggacaaaaatcatatttattcacttttttaatataattaactttgaagtctcaatacatgtaaaaagaaaaatataaccaagatgaggttacaattaaatttatattatcaaaaattgagcttaaagtaatttcattatttaatagagagagtcttgcataaattttttataacatacatgaattatatactcataataatttataattcattttaaataaataacaatagtaatatgttccatcctttttgattaaagatataacaattttagagaattttgcttagataatcatattctttatttagaattttactatttcactcatataaaaataaaatacatatatctttttcaatatatactcttaaattaattttttttttttattgaacaaaaaaaaaatgactgaaaaacataaatgaatttggtatttgtccccacaaattaaatcttactattaatctcaattctcacccttaaaacaaaaaatactataaataaataaacaaaaattcatgatttaaaaattataaaataaaaaatagaaaaaagaaaacgtacaattgtacaaacacgcagtaatcgtgaacatttaaaacataaaaatgattaaatttaatttaatttaagttattgatttaattaataaaaattaaaaaccaatctaataaagtcaaaggaactataaaaagcagcagttgaaacttttgtccaaaattaaatttaattaaataaattttttaaaaaaaaa

SEQ ID NO: 304190 - DNA, 1784 bp, Cannabis indica
tatgtataattaacattaaatagatataataatttaattaaccagaatataattatatattaccctatacaaccatactcagtttacacgaaagcatatttttgtggaggggatcatcatgccctatttctcattttttatatctaaagtattttaacaactaatattagcaattgtaagaaaatcctttcgagatgttgatgtaggtgatttttttagctaaatactattttgaatcatgtattttgtaaaagttactaattgaactctctattttgttaaataataaaatgaaccatgtattttccaaaatagtaaaaataggacctgagcttaatttttaacaatttttttttttttatataattaacttgaagacactccttaacaggaacagttacaaaaaatgtaaacagttttatcataacacatttatatcagattattattaaattttattttgacaaaaaaatcagtaaaatacaatattatattactttttttttttccgatggaaatgtcgaagtgtcgtgattattgtgggcgttttgaataattacttgtcgacactagtaaatcagtaaaaaaaaactatgaagaaacagtaaatagaaaatgaactaaaaccttcgtatctgttgttatatataactatgttaaaatttaatgggactacaatgttttaacaagcaacacaaaataaaaggatgatgtgaccaaaaagtggatgagatttatacatctgttaaaattaacgaagatacaatcacaacatatgccagaaaaaagaaaatagctatctgaacgaaaaactttggattttctctcatgtttggggatgtaactgccctgcacaccaccacataataattcacttgtcaaaggtccaaactattattttctttttgagaggatcgaaaccattaaacaaacagactatgagcatcgaatctaacctagtttggttaaagggttaatctagaatgatcaattacctggcgatgcgttgagaaaatcggtggaatggcaaactctggatgaagacaataccaggacccgttagaacagctgtaactagattttcgccctgcattttttaccacaatgagttagggaacacagaatttaaactgcagcagcttagaactgatttgaacctagagcttctggaaatcagcacaccatatacaggttactttccataaaggtggggaaaaaaactatacagaggatccagatataacttataattcggttaaagatcttctaatcacttctatctaatgaggttgacacttgctcttgtattattaaccttagcatcccatggggcaaccttgctcattaaaatttaaagagcaaagagaagttatttagattaaggcttgagctatagtacatatgtgctaaacacactaaagtttgttttctatttcttgtcggatgagcttattgtttgtttgtcgtttgttctttgtgtaaatgcttagatggccctaatgtgatcttgcccagggacagacacataaggaaaaaccaggagcaaatttcagttgcctttgtttacgacattggcctatgaagatgtaaaaaggaaaaatgcgcccagcatggaatgaaaatgcattcttaacaaaatctaatcatgcaataggtcaataatactcccaatacacaaatcaaaaagggctcttacaccttggtgagtctacagtccatagatcacctaaattgttatgtctgtgtcagacttaacagttggacttgtagctcaaaaaaaatta

SEQ ID NO: 304191 - DNA, 3292 bp, Cannabis indica
  modified_base (2882)..(2882): a, c, t, g, unknown or other
tggcagcaacaatctctcccataatattccgtaatatagtacagaaaccaaaagtttgattcattgtgtggacatcaacatcggtgttataagtttcaggcgacctaaagggggattcgaccaggggacatcccgtgaaattgccaactgtgaatctgaagcaatagttgtggctacagtaggaaagactttttgagcagccttgaattcacccaggtaggagagagcgtagtagagaattacatcaggcggttttgacttggtaccatgtctctccttgttttttttctgtccgaacactccacagaatcgttgcaaactattcaagttgtaaagatgacctatagtggagacatgaagcaaaaattcctttagattcatatggcgtgaaagtgactcattaatcgaaaaagcagaggaatgtcacactcgtcttggacgtttacagtagaaaagagcatgagaaattgtctcattttctttagtacacaaagaacaacgagctgagtcagagatgtgccaagtatggagaatatcaacgactgaaagacattcatgaatagcacgccacaagaagatacgaatcttcgtaaggagagtcaatgcccagaatttttaacaccattggagagattgaagactgcttgcagaaggatgttgctcttcgattttagttgccaaagaataacccgatttaacagtataaataccgttcgattcatgatgtcatattagttggtcttattgatcaaaaagtgttaaagggatactttggaattttgtaacatcggaatccaaaaacatagaagttaactgagcatgatcccattggtgagaatcaagaagaagatatgatactctcataggtaagcctttgtaatatcccaataagcctaatggtaagtaattaggagttgtaattatattatgagttaattaagtaataagtgagattatgatcctactaaatttagttcaacataaattttaaattcgctataagtgggtaaataagcataatttataaattacagagatttatatagcatgtatgaatgtaatgtgagttatatgtggaataaaaatattttcaagtttagcgaccttggagacttcatcggaataaataaaaattagatacaaagttttattaaattattaaagttttattacaaacaaaagtaaaattaaagctatatagaggaatcactatcatttccatcattaactaagttctcgttttcatcctcaacaagttcaactagtaagtcatcgatttcctcagctacataatcttcatcaaattcattgtttttcccctcagcacccattgattggctgcaaggttcaacaattacagctgtttcatcctattacaaaatcaactccatgagatttgatgagttcgaatcatgtacaacatcaacatatgtcttgtcttcattatcattaatgttctaaatttatcgatggttagcatcttcaacaacattccaatcgcgaactctaagtgaatcttgaagatagaaaacttgcttagcttggttaacaagtatatacgactcatcttgataccaaaatcttcttatatttatactcgttatattattttcagtgattatttttttttcttattggattagtgttataccactcgtattcaaataatctcactgtatatgcaacaaacaatgtcactgctaagtgaaagagagaaagagttgatacaagagaaaggtggggaccgagtgtttgtaaagtagtgtcagtcccaaatcaaaattctaaactagtctttttgcgtcagttttggacgttgatcgacgtgttgaccgacacaaaagactattttatagtagtgaagcttctatctttggtgccaagtaatttagcctttgttgcaagcaccatgattgcaaagaacaccatccaatcccaaaatgttcttgattacaaaggcctgactatatcctccaatcatcctttaggatcacacaaagttgttggccctaaagacacaagagaagtcttattaccatctcaatctcataaatacatcatacaattaaggaattcccatcctctcttagccatccgctcaatagagctggtagagcacaccctagctaggaaaggagaagaaatggaagagaaagtcttaaagtggttaatgcaaaaagaacgaaatgtgtggaaaaaaagagagcgacttacgaccggtttgactttgtattttattttttatttttaaaattgtgcttttagatttgagaaaaaaattagttttttaaaatagaagacgcatttggttaatattttctaaaaaactatatatatatatatatatatttaaataataacaatattactttattactctatactttgtacctcaataagaaccctagctcaaccaagatccaaaccttgggaccaggcctaggaacagaccaaaccttagcctcggctttgaccgacgtgttaactaacacaaaaatactattttgtagtaatgaagcttttgtcttcgctgccaagtaatttagcctttaccgcaagcactatgcttgcaaacaacactatctaatcccaaaatgttgttgacgagaaaagcttgactatgtcctccaatcaccctttcggatcacacaaagtgtctttacaagagaagtcgcactaccatctcaatctcataattgtatcatacaattaaggcataccccatcctctctcagccaaccgctctccacaaattttagcgccaaccctagccaaaaaatgggaagaaacgtaagaaaaagccttagtgtggttaatggaaaaagaacgaaaatgtttagaaaaagagagagtgacataggatcaatttgactttgttttcngattttttttttttaaatcgtgttttcagatttcaggaataagtagtttttaaaatatattatgtgcttggttaatgttttctaaacactatttatatatatatatatatatatatatttaagaagaatattacttcattactgttggataaattcccatactaattgtctcataaataagttacaaggaaaaataaaataagacattttattaagcctcaacagaccattataactcttggagtagtcagttctgttttcataggcttagatcttaagctctttacatataaagaagtaaataacaatatctcaagactctaactaactttcagcaagacaaggaaaaacaataacagttttctaactgttttctcagctcaaaaacacaacacatcacagccaacaac

SEQ ID NO: 304192 - DNA, 1569 bp, Cannabis indica
aagtctcttaattaaaaaattgacctcaactagtgagggaaccatgggcctatataaccgagctttcaataagtatatcaacttattaattttgccttgcgccactatagatttagaattgaatagcactctaagttatatagaacgctctatatgtaccacgatatagatacaatatgattatccattgttacaatcctaattgtcaaaggtcctctatagatgaatagggacaaatttaccattctacccttcaatgtattttatccttaaaacacttagcaacctataaatgatatttcagtaaactactataattactgaaatgagatctcaattatttatctctattcagccaagctcgaaggaaatcatcgtttcacttgtaaatacttataaaagttatagattccatacctatgatcagcgctcccacactacaagaaaatggggtctttacctactaattttaagtgtaggaaaagctacacaattggtagggaataaggtttacctgcaaataaaaatctgtagagatgtgtagctaaaagttcgtggggaaagggtcttcacctacacttattcatattagtaggtaaagaataaagtggaccccacttagttatgaatcagatgatgagccatcaggtgatgtgtttgatgatgtgtacacttatgtgggatgacatgttataatatgtggcagatgacatggttgccacgtagcacacacgtggcacacatcactcggtccacatggcatgaatttattggtccacttggcacgaattaattagttcacgtggtttatattgattagtccacttgtcacaaattgataagtccacatggtgtgaattgataagcacacattgcttcaaatggttggtccatgtgatatcaaattattggttcacgttgtatcgtcgatagtctacatgccaattgatatttttgtcaattttaaaggttatgtgtagctagcataagccacgaaaagttcaagtcaagattttatattagcatccctttgttctcttttgatttttttactaaatgtgaacactcgtgtgtatcagcacttaattcttatttatatcaagcactcctaaaataaaatattattttgaataagtttaacatttataattttaaaactagttgcagtagctttacaactcgatttgctaaataattctataacatttacagaagcagcacaataaaatcaaagaaaatgagatgaaagtcacaacaaaaaagaatagtgccacatgagatagtcgaccaccacatgatcttagaatccaaatcattgactttaaattcttgtcaaactaatactatatatgagcagagacatgtgctacatatatatgataaaataataaaaaataaaatctgtaatgaccactttagtaatttgaattagtaaagacaattagcactaatttcttttaggcttatgattatttatgaaattaattatttgtggaccccaatattagaaatgagcattagagttataatttctcaatttcagagattttattaaactctaggggtatt

SEQ ID NO: 304193 - DNA, 2033 bp, Cannabis indica
tcggctactggtgcttctgctgttgtggacagctcgggtgctggggctacttctgccttggaaagctcggctactggtgcttcttctgccgaggaaagctcagctactgatgcttctgcacatgtgaatccttaaactgttttctattttggttcatttgttcatatacgatgatggaagtagttatgatctcattgcatataattgtttgtaagataaaaatgcaacaaattctttcagtataattggttagttgaggtaggaatgtaataccattgatttgcattttatcaagaagatcagctcatcaaataaaaatgtgtttttcaatttttgacttctcatatatatttgatgtccttttctctctttcaagcaatttccctatgtttacagcaatgaatataaatgagaaattaagttataggctttgaaatgctaaattctattaatagatgtcatctctgttaagattttttttcgatgataagaaaaggtatttttagtacatagtttgtaggaaaattaacggaatcttgtacaatttttttaaaaaaatcttaattataaaataaaataaacaaaagttatttgtgacaagttcaattatactattagtgtcaagaaaatcaaagctctggaaaataatttgcaaaaccaaagtttgaggacaaataatttgtaaaattaccaattattttaaacttttgtcgtgggatattgtttaatgatcaattttctgctttcaaaaaattaaaaaaaataaaaaaagatcaattttcttttttaataaataaatccgcaaaccgttaatgaataatagtgaaaaacaacaccaatacaccatcaagaaatcatagttgggacactagtttgacccaaattaatgataagtgaccacttcaattattatttctttttggtgtgaacacttgaattatgctaaaaaaagtataattagaccttagcaaagtcatatgagtaagtacagactacgattgagaatactgattttagacttgtgatttatggcctatctatggttattattcttcatgatgatggctggggacccagtgacggaagttgatgacattgtatcgatgacaagtaagttgggagtagagcaggaggaggattaggaggaaaattgtgaggctgtgacttcgcttgggggaagttctttggtggggagagtcatatctaaacgtgatataggtgaaaggttgctgctgaatatgttggaagaatgtggaaatgaattattgactgggaggttaaggtgtatgatgaagatggggattcgtatgttgtgggattctcatttaaatccaagaatgatgcatctgcggtgctatccaaacaaccgtgattttttaacgggggcttttgatcttggaggcgtggccggatacgggtcagtggaaggactttaaattagacaaaatctcatgctggattaagatgaaaggaatgcttctgaagatgttcactcaggaacctccggcgtttaggtgagatggcaggagagattgaggaatttaagtggcataatgatagaaggatgtttttgaatggatatgtccgaatgcgtattgaatttccattgaataggagtttgtttgttggccgttttattccgagcgaaggaaaacatcattgggttcagatcaaatttgagaggctttctatgctttgctatggctgtgggaggtggggacatgagcagaaagaatgtgataagctggtggtaatggagaaggatgtgcagggccaactggtacctaaatatggctcgtggttgaaggatgatgaccctagttcgaattgttttgtggccttcaagcaagctcaattagccgctgttactgaggcgcatggagtagtcgagatggtaggaggtgcgagatcgttgagacttgatagggacaaaggagatcaatcttttgggaactcggatggaaggtgttgcgatatttagcacacacaagtgtacgtatcgtttcaagtagtagactcactaggagtgaggt

SEQ ID NO: 304194 - DNA, 1139 bp, Cannabis indica
aaccaaaattgccgggcccaataaaaaatgttttatttcgaaattgatatcctcggtactcacatatcccaaaataatctccgtaattaataaattacgctttttatttcattgagtaaattctcaatagttaccctaagtaagatcataatcttacttcattaccaacataattacatatttaataaagtatgcctatttaaatattatttattttccaggatattacatcaagtcccctcatcttgtcactcagatgatttcttaggtcactcccacgtggcctttcccttttgctcttgtacctcttgtactttgcatccaatcatcgttgtaagtttgttgtacaccaactatctccagaatgactgatatgaatcctcccattctgaaggacggaatcactaaaaggatccacttgtcttctaggcttatgaactttcacaacttgtcctttcggtgcaaccctatctcgagggttagaagggtgtccaggctcaaaattgtcggtggccttctgcatcctcgagggtttcttgactggaggcgtgtctttacaatgaggtttaggagcagattttcatgagaggtcacccacttttcccttacctttgtccatctgagggtttggggttccagctttagtttgctcacaggctcgccctttaatcacctcttctacagatggttctccatccgtccaagtgaaaccatcaagcttgctctaaagttgctccatcgtagctttcatcttagcaataagcctttgttgcttatccaaggctgcctgtgttgcctccaactcgcggttactcataccaaactagggtcatgttcataatactgaccttctctataatatccatctttataatagtcatcttcatcgtccttgtcataatcttctatattttggccatcaccacgaccttctacgatgacctcggtgttcctctcgtgactcttagcagtggtgttcctctcatgctctttaagtgcagcaacaccttcttcatcattttccacatgcgcgacggctgcatgagaggtaccttcaaccatgaccgtgtctaacagagttcctttgtcgtattttcttttgcattttcactatgatcaacggatgatgaactactacc

SEQ ID NO: 304195 - DNA, 2676 bp, Cannabis indica
tcaccaagatctgagcccgaatgtccttctcttcaatctggattcttcacaatcttccacattatgattgagataccacttgatgtgtgtgggcactcactctatcactcaagggttcgaaaattttatgaagaaaagagagaggtataggttgggctatcactatagagtaggaggctcaatttttctgaagacataaaaatttcatccacatcaactgttaactgctccgagttctcaaaaataaactttcgttgaatttgattatgattctccaagtatgtctatggtttgtctagttcatgtcccaatgaaaattttgacccatttgctctaagacagtcccaaaaattgaaaccctggttaggatgtcaacgtcggcattgggtaaaaccctaggtgcccaaggtgacttttgaggagttggttcatgtaatattagctctctagcctgcgtttggttgctcatgtattcatggtatagcatactaaaatatagtgagaaatgagttattgaagtctaaacttccattctagagttcccgaagtcaagctgggtgcaaggctagcgacccttctcaggtcgacttgctaaaactcatgactactaaattctgagatgtcatcattcttgccacatgtcaaacattgatgcccacgtcatcatggtcacttttggtgtaaacgggcgatattgaggggggtaataatttagttactctttatataagaaacgttttattatctaagttatatatgttaaataattaatatactttttaaaataggacatacaaaaagctcaggggaatgagcgaatttatttgacatgcatctaggaatatcacaagtagcttgccaaaaacaacctcaaaattaagaatgtggactttatattttgaaatacaccattgacatcgacaaagctacaaatcctaccagatacatagcccacacaaaagatgtaagttttaattattaattatcttatttataatattaataaaaaaactaacatatacactaatagaaataaatattttcatgttctttttacagttgatgcaaagaacatatacaacgtaaaaaatgcgttgttactgctacagtgacattggatagaaaaattgctcggggtgattcacggtgatgatgagtagaacaattgtataagtattttcttaggtttaattggataactcataaacaattaaagaaattttagaatgtttgtttaatatatttacttagagtaatgtaaatatatacatttatttagattgtgaatttaatttttagttatatgaaattagtatattaatttaaatatcttaataaaaataaaaaaaatatatatatttatctctctcgtggttgatactctcagctcgacgccgatcagccgcctccgatggcgattggccaaatagaaggccacctcctgattgtcccaaacggcctaaaacttgatgcgacatcatcgtcttcatgcttcacttgttacacctccctctgttcttcaaagaatcaagtccatcaaatatatcgcctgtatcgagagagagaaacaaagaggaagagggggaggcgctagagagaatgtgtgcgctagggacaagaattatgattccatgatcatattcgatcaccttggttgggattcaaccgtgtgcctggccatccgcctgcaccgagagacagaaacaaagagacaaggggaggtggctaggatgaatgagatgagctaggtttttttttttgtttagttcagaagaagaagaaaaataaggtatacccagttgaaatcttttaatttagctttgtaaagttataatctttggagcttaggtgaatgaatcatggagtaattatttttctttagcttgtttggaatgtgtttattggttaggttgttaaagtacaacttgtcagttttcaagattcatattaccgtgttgtttatcattggattgattaatttcaactcatgcattcaagaattggattgagaataaggcagtaaagcacacaatgatttacaagcttcatctgcattgagaacacatctgagccgactagtgcttgggttccccgaaccagggtaataacatctactaaatccaaaagattcgtattacaatatccaattcactcttaggaatttaatacaatctttatagcaactagtaatgaattaccaacaacagtcaataatcttgattgtatgaacacaatcccttgtgcaacaacggagtttgtcttcgacacttctgttcaatctgaaatcccttcagatctgatgacactaaactcccttcagtctgaactcagcaacctcaggctctgatctctctgctatagatcaccatcttcaagctatgcgatcagacttataaaaacaacaacaagaaaagcaagatactatgctaactcacacgatgaacctgaactaaccaaagataacaatcagatagctaattcgtttgtagaacgaaaaataactatttatatgcaatagttcagtcaacctaacaaaaactaacaccaactgttaagtcataacagagtgacatggactataacaaaaagcaggggtgcagttataacagactagaaacaccagatacgactagtctcactattaaaataatctgtcaaaataatgacacttacaat

SEQ ID NO: 304196 - DNA, 2808 bp, Cannabis indica
ctcctcttcttcttcttcctcttccaagctcagcaatgcatcgatatcatctgagtcttccttcagagtagaagacagttctccaacctcattattattcctatcaattcctccgaaatagccttggacacaagctgagcccatgtttaaagcaggactaccgaatttgttggcaatagcagggtggaacataatttgactgcgatgatcagtctgatcaaatataatgaaattcttggggcagacctcagagggttgaaactcaacaccatgaaaatgtttaaggtggttaccaccaggaggtaaagctgctgccccgaaaccagatgcaactggaacatgcatttcattattgcccgcttgatagtcaaggggaggtggttttttttcagtgtaaaattggtggttgcgctgcatcaggattcaattagtagatgaacgttcggttttcagctttttgagtagacaaattattaggtttcaactggaagaaggttcttaagttaaacgcgagatcacaagacttatgcaatgaatgaagaagttattgccactcaggtacagtagagagccaaaatactataagttcttcttatgtataaacaaaaccagagggcagtccgtcccaaatcccaaagtccgacgattacaaacagactacgtcacaggtttaagcaattgacggaaatactcagcctgcaataaacaagtagtatgtaaccaacaacacaatgcatattctataaggcaaacatggttatgacaacagcagaatattgttagatttcgagaatacacaatagctttgttctgatcaaattatcaaaagattaaacgaatgcataatgtagtcttgcttgcatcaaagtttggtaaatgcaaaataaatagctagttctccctaactcataaaccagaggattcaataatagcttctcctgttccccaatacaagataacatgataccaaaaccttagcaagttaaacacactataaacaatattgtctttgaagatacaataatgaacatactaagattgacaagaagtacaaaacaaaagtaaacatagaaaaatgctaaaaagggagtaacaattgtacctggcaaacttgcatcagttggtaataagcaataacccccacactcattttaatttttccaacttctttaactgctcgatatcttttaatggaaatggcaatgaacattctcacacctccaaccagcttttgtaaaattcaaagtaagaaagaacaagcaaacaaatcgaatataatactttaacccccccaaaagcaaccacctgcaaaacccaataaaacattagaatcaaaagctaaaaataagcaaaatcttatacatataacacatatatatatatatataaacaatccaaaagggtctcaccaaaatgaatcaaattacagaataacacgaaagaacaccaccaaacgaacacatttgctgcaataagttgaaagggatgacgtccaaggcatcttgatttcaattcttcttcaattcaaatatcatcgaaaattgaatcaaagctttcactgtatacacaaacaaaaaccataaatataacctaacaaataaagctcactcctttttcttcttcaaacaaaataaattcaaaattttctcagcaaccaaacaaaatggtacttttttttcaatcaaatcaacaaaaacccgcaaagaaaaacaaagatctaagctcaaaaacacaacagaacaagctcaagttcaaaaccctaatttaaaaaaaaaacaacaaaaacatacagttatctaagaagatcgagaggtattgacgatgaagtttaaggattgatgagttgttcagatgaatttccctagatttgcgctggcgaacaagatctatatcacaggatatggttgtagagagagagagagagaaagaggttgaagagagagagaaagagtagagagagagttaagggagtgtttggttagaggggtatttatgtaatttgaatgggtttggatttttatggaaatatgtgccgggtttcgagacagtgaggagtcaaacccggaaaatgagagccgttggattagagagagaaatgaacaatctccgtctattgcggattgaatatgaaccgttggattaagcacgcgtgcgagggaacacgtgggggcccaccagctttgacgaaaacggaacgggaaaaaccacttctttactaccctcgtgtgtaaccctcgctttcataattattaattattctttattattattatattattattaattaattaattaattaagacatttgtttttttctgaagaaaaaaaaataaaattggaaattaaaattagtctaatctatgtccactatttttattttttaaaaaaaatattatgtattgttgtgataggacaattttcatgtgttttgcattgatactttttcactttgtttcaaaagttttatatatacatatatatatatttatatttatagagtataggttagggactcataattttcattatcataaatcaatatttaggtctcttttaactaacttatttaattttgtgggattattttaatattttgcagtataaatattaaattaaaagaaaaatatttaaggtgtattggtaatattttcttaattaattttttatttttaaaaaagtgaaaatattttttaaatcatgtcctgaaaaattgtttttacttttcaattttattattaagaattaaaattttaaaaattttgaaaataaaaaaaaaatcactttctaaaattttttaaataatttttt

SEQ ID NO: 304197 - DNA, 3025 bp, Cannabis indica
taaatattataattaaatggcttaattgttaaaataattagagtaaggatttaaatataaataaaaacattatttataaatattaattgctaaaagaggtcttgttacctatttaattaattattttaagaatatagttaattatcattaattaattcttaaaaagaaatgtttacctattagtaacctgctattacaggtcaaagaaaaatataaccatatggttataataaaaatgtaaccattgaatagatatatatattaattaagtaaacattttcttaattgttagagagttttgatacatatcaatgttaaacactagctttaattaaaatactattttacttgtgtaataaacttcaacacaatgttttcgacatggtaaattatttaataattcaaaattttgttgtaagaaatttcaaataactatattgtacatcttgtcgtataataattttttttttgaattgaattgtaacctatttgtgtcaaaaacacgaaaaatataaaagcttgcttaatacgtgaaatagattgttttgagttgaaatccttctcgcatcgtaaaatatttaaaactttacaaaaaatttgtaagaaattttaaataactacatatgcattcttatataaaataatttatattgtaatttctcaaaaaccgaaaaacttctattagtgagaattaatcaaaagacatatatattccgaccaaataattttcttacatatatgttgacatacataagtaaaattgttatgctttgtatttttttatttttgtttgttattttgtaataaataatattaaaagaaaaaaatgggtcgaacaaaaatagtgtacagtgtataatgacaagtacatgtgaaaagcaaagcctgataactaaatagggatacccactcaaagacttcattttcattagtatattttaattattatttaggtcaaatagctttcaagtgtgaatgaaaaattcatgtgaaactaaagaatattaagcttggctgtaaagtaattttgtttttggaagaagaaaaagagacccaaaagaatttcaaccaattaaggcttcaaaatctaaaagttacagaatgtatgtgctttcttctcattatatatttatataaaaaatataaagagaatgagaagtgaggaatgtacaatttgggattggccaatcacaaaacataaaaaccttaaactcccacattaggaaaaaatgaaagaaaaaaataagaaaaaacaagaaaattgtaaagaggaagctctataagaaccttcacaaaaggctttcagtttacacaaagtgaaaattctttgtttcatgttgtctttatcatgggagatagctattttcgatcaatatgcaatttccacgtgtcacattggcatttcaacacttgggaaattaaaatttagtagtggaatttagctgaccatgaaagaaagaaaaaaaaaataacaaatgaatattttggaaggaatatatatgtgaaactcacactaaagtgcactaaagaaatgggagaattaacacataagtgttacaatttgtgatgattgtaatatttgattggatataaatatggcataaaagacacccccaacttagttgtattgtagaacaaaattgatactaaccttatattaattctccaatatccattgactttaaaatattcttatttgttaattaagaagatgaagtgaatttagaccctttttttccatttattttgttgtgtgtttttctttttgtagtgtgtaaaattcaaataacttagttgtgtaaccaaaccactaagcaaaaggagacataataaatgtaccactaatggcatgtagaagtgattactacttttggtttatttgtgttatatatcaacaaaaacacaaagtgggcatcattgaaatgaatataagaactaaataaaatgtctatttatatatgtatatgtatgtatatgattgacatttctacgattgtaaaatgtcaaactaaatgaagggattgttgttgttgttgtggcccttggtgcatatgggaaatgtttaggaatgtagtgagagaaaataacaaaggtgaaagagatgggataatagagaaaaacagctggaaatgattgtctcatagtggatttcttttaatctatttattatgaaaattttgtcttttctttagacgagttgtaattggaattgctttgctttgctttggcacgtgtgggacccttttgctacctctttatttatgatggctcaaagttgaagaaggcactttttggattcttatgatgagaaaaagggttttggttttgatgcaaaatgcaatacatggaagtaatgtatatatattatgtgtgtgaagagactgaaataaacgacaaaagtgaaacaatgcatgattttgaaaggtttaatttgatgggttaattgagttggaagttgaccaatcattttacgtgattctcactcactaatatatgctaaactgctaaaagggcattcaattaaactttaaatatatttaaattggtacatgctacaattgtaaataattaatacatatattcaaatatctaagttgccataaaatgggcaactaattgaacaataaggcaaaccctttaacatatgggatacagtgggacaaaacttatgtgattcattcacgaatttcttctcttctggttctatgcatataaggttattaatgctaccaatatagttattattcccgaaaatacaactgaaagtctcccaatttcgaccattcttgttgtgcaacattacttacaagatcatctcaaaaattattgttaatagaatcaggctcatcttatcctgtataatttgtcccactcaagctgcatttgttctgaaaaagagtatgcatggtgataatattttagttgtaaatcaatcaattatttatgttggataaaattcccatactattgtcatataaataaagttacaagaaaaaataaaattagacctctttataaagcctca

SEQ ID NO: 304198 - DNA, 1711 bp, Cannabis indica
ttctaaagtcgtgacaaaagtaaatttgtatggccaaatacgtaattataatataatattaattagcatttcaattgaaacattattgtttgttttgttaccgatgtattatagttttagtttgataacaaatctacacataggcatagctactagcctatatattctttttttttttgtttgatcatgcctatatattctttctaaacaaggaaaagtcattttttatgtgaaaaaaaaatcatttttagaataaaaatatatattattataaaaaaattatttatttattatttattgacataaaagaaagtgaagaatatttaattacatttttatttattttacaataaaatgtaataaaagagtatgctgctattaacttaaaatttagttaacataaatgaggtactttgatatttaatgatatgtaataaattctatttagaaattaataatttttatataggcaacaaatttgtatatagttttgtagttaaaatctacataactcacaagtcactcttatttatgatttttctgattataaaatacaacttggcgtatttcctcataatcaggaaataattcaccctccctttcacaatgattttggtccctatttatagggatcagtgatggtaattatttttttttatgatcttatctaaatgatgcttcatgaagtttagacatatcccacgttttatgttgttttaacatacgagaataatacttataactgtttaattttgaatcatacactcaataaccgctacttttgatcttatctttgaacgattgttgatgaaccatctttctattcgatacttgtcctcctcacatataacgtgaacgaattggtatacatcatagagattcttctcgcaaaagaatggcccgttaaacattcttctcgtaaaaatttacctcaaattaggttttagataatttttgtataatccttataagcaaactcttttaaattgtatctcttgtgcttctcatgatgaaagcacttgtcttgcaaccaacctagcttttcttttctcactgaactcatttatatttatacgagtctctagaaggcatattttgtatgtatagtgtttctcgaggaggctgtaggtctttcatatcacttgccttctactttatggccaatgaatttgacttatctttttgactaaggcaagacttaaattctgagtcatttgagtattattcgagacgcattaaattagcacatttaattttcttgacatgcgatcctacttatttctgggttcctatacacgtgtcgtgaccatatttattacttaaaatatgggtataacagctactgtaaaagttatatatagcgatgggtattgttgactgaaaatttagtcaaccgacgcagagtcgaactaagatcgtagcttatgactgtcacgtgtggaatgataataaatgtaaagagacacaaagattttatagaggttcaaccccttttatttacgtaatgaagtttttgagggataataccaagcacttgacaaggctctctttagtattacaatgaagtttccaagtgagaagtatgaaaagagagataacttctagttatgggcaagattgcttgtgcaattcagacttagaattcaagttgtggtcttgagatcaagaagagaacgtgtccagatcccttttactgttgggttttatgccc

SEQ ID NO: 304199 - DNA, 1575 bp, Cannabis indica
ggatgttaattcaacatacttgttagtaaatttagatcctcgtaaaatattctcaacatatttataatgtaattcttggctggtagttcccttgtttgctagtttgaagggctactattgctgttgccttttgtttgtagctttgtgttggttttagtttgaataaattttcttgtttggtcaaaacaaaagaaggattaggatgaaaggaaaaaattatgcaccaatactacaaggattattacttttgtcggtaaatttcatgcaaataattaatagttgtatttaaaaaaataaatagaagggttaggatgaaatgaaaaagatatgcacacactacaagaatcattactcttgctagtgaattttatgaaattcgtcggtaaaagttcatttttctagtgaagttactagatttgttggtataacttagtcaatattttagctatatttaaaagcttttcagcacataaattttctagcaaagcttatctataccaacgtttttctctaaaaaatatcggtaatactgtgttgtgtaacaacaagaaggggcacctttaaccagttatttcggcacctctaattatgtcggtaatgatgtgttggactaatgaaagcatgtcatgtatcctcttaagtatacttcaaccatacacgttggtatttaatacttgctcactaacagaatagtgaatagaaaaacaaaatggtagttgaagggttttacctccaacaaattagtttgtgaggttaagtgtaacaagatgatagtttaagtaggactactgccaatattataaatcaaaaactccattctaaacaaattgaacaatcacgatggacagtctaaagtctctgacctctagtgaatggtaacacttccctctctctaatatctagtttttagtaaatttatttgtgtacaagtgtatggatgtatcatatatgtgcatatataaatgtgtctgtatatatattatatatgtatgtgtatgtatatgcatatgtgtatgtgtaaatatttcaacgacaaatataattgcgttggtaaaactttctcgcaaaaaactttgtttttgcaggaaggttttgcaagcgctgcatgttgttggcaaaaccttctcatccaaccttaaccgttgagtaaaattcaataggccacctttcataggaaattattttcacaggtgaaaatcacctatgccagtgacatcgtagttgtgccaacaaacactacaagaaagaagaccttttttggcgcaaatttgtgctagaaaaactaggcacaatgagctgacaattcatgatgtcaataccttgtcggtaaaaatagttttgccagtgcaattctgaaatgcgtcggcaaaactactttacactggtacatttctttgagggaaaaaaataactgtccattgttaagtgtcggcaaaattattcatgaaaacttttaccagcgccggtgaaaagttggcacaagttggcacacttttctcatttggctggtgaaggtcttaccggtgcaaatattgtaaagcccgcttagttaatttggaaattagcagttgttta

SEQ ID NO: 304200 - DNA, 2026 bp, Cannabis indica
ccggtccaaatggagatagacttctccacacctgatgagctctcctcccttctattccattccactgtggtgtttagtgaagattattaatcaatgactttaccaaaatgagaaagaaagaaaaaaaaacaatgtgaattgaattagctcttggaaagtcttgtacaagaataacaactcacctagtgcagatggatctgatgaacctgtgtctgaactcttgtttgtatacttttgccattgaaatttgcagaaccaaacaagtcctatgaccactaaaatgaatgctattgcacctgcagcacctccaattatggttgttgtagtttgctttgacatgtctcaaaactcctcttcaagtctttgacaataataaaaacaaacattgaacctctgatgtaagaagaaactggctttgagtagtgatcattgatcaacccaattaacttaaaacaagctaagaaaagtgatgagcatccatctctggtgccaaaactacataaacaaaaatccaagactatgacaagattttgacatctatagaggggaatttaacatctaattcatcctcttctggtttgaaatggttttggaaatactctgaaaaagtgctcataagtcataaatgcagatttgttgatctcaagaatctactttaggagagttgtataaaccaatagataaacacaatgccacatttgttttgttttttgtttttttggagataccccactttgctgtccagcattcatgagcatctcaacaagttggcactaagagaatccctcaacactgaagaaattctatttactggtttgaaacacaataagatatgtgtatgtgtgtgtgtaaatacataaaacttaagggtggtctagatttggcattgcttagtaaaagaaaggaaagtgtcctatctcaaaagaaaagaaagagaaataacatacaaaagatgattaactttaattaaacagaaaaaaaaaaaaatactttggttaaagatgaataagatgattaagtttatgttatcagttgtaatttagttagttacttacaagaatgtaagtaatatatgtatatgagtatatgttttagtaataggtacgtgccatatgaacagaagaggtgagaaagtgactttaatcaggttgggattgctgacaccagaagacataattattgaaatggatcaaaagaaaaaggtagtaatacatatatatatgtattccaagtctcttacctgattcactatctcttcctttttgcctcttttttgtcatctgatctggaaagaagaagaggagagttgcttcctgttctttttgtgtgtgtgtacagaaaaaaaatggggactattcctcaaatggggtcatgacagctgagcaaaaacaagacattacctcagctagtttaactcctcttctcttcaatctattggttttatcatcttaaaatcaatatatatatatttctcttttgacaaacttctttttttgccttcaattcttctgtgtttgtacctgttgagatattcatatctctctgtattataattctatatttattgaactatggtggggaagattattgagctgtaatattgtatctctttctctgtctctctctctctctctcatatttatttattttgttttggctagtgattttgtaggcttgtaagtttggctggaaagcagaagggcattggtggaaaggagatttgtcatgttgtggtggacacttgattatatatacacaacaggcccatatcagaaaagccattccatgaagaaattaatatacagattagtattatagtatatactatcacaaagaagagttttttaagtttaaagatgctttctttctttctttctttttattattattatgactaattcatttggttttaccttgagaaaaaatgtgtgaaaaaaaaacacaaaaaaaaaaaaaaccaagtaaaagaaaagaaagtactatgaggaagtactcaaagaatagtatacatacatatactatacat

SEQ ID NO: 304201 - DNA, 1265 bp, Cannabis indica
actaaaagtactagattagcttgtgaaaaatgtaaacaatgtaagcatacctttcttcggtttcctcctgaagtatctttcttttgggatgtagacaccatttttctcccgtgcagcataaacctctgaacataatcagaacattcataagcagtaagatacacaggatgtgtgaaacaattcttctaacaaactgaattcaaagactcacctgacttaaggcgctcaatttcaccataaagatctttaataagtgttgatttcatcattttttggttcacctgcaacaaagaaaaataactaagaaaactgtacagaactcccaaaaccaatcattttacacaacaagaaattaaaatatgttcacaaatcagacaattggaattaaaatatacatccactgcaaggactaccttaaacaaataacatcaaaaaaaaacattgccacaacaaacctcgggcttattccttatattcttcgcacggtgtgcataatccagagtactcaaggtttcctcaagacaatggacagccggcgaaactgtagctatgatgcatgttttggttcttcccccaagcgagtcacgaagcaaccgtgttaacttactatccctgagatcccgagagagtaaatgtgagaatctaaaagacaattatgaaaaagaaaaactcaaaactacaacccatacctatatggaatatgtcccagatgctccaccaaagcatttattacccttcctaaagtcagtaaacttttgttaatctctccagcttccctagcacgaccctatcaaaacattggcagcataacatacagttataacatagcgaaaaaaaatagttatgacctctagcagaacaattcctgctaagattattaattaaggaaaccaacatgttaacgtgcaaatgataatgagtcttatacctctcgagccccggaacgagaaatattctcagaacctgccaaatcaactagattcaactttccacacttgattaattcttcaccttctggtgtagcttctttaatgtgaatggttatggaaaatagagagtgtgaccgactgagatgaagaaaaaaaaattaaaagacaatggacttcagatatactataatagtgcacaatgtgaatatggaagaaattaccttgactgcttgttcaacaaagtttccgcagtgcgtctttttgcagaccctctttcaagtaaagtaaaaaactttcatttgcacttgtcacaatttcctcctccaaacctctaac

SEQ ID NO: 304202 - DNA, 1067 bp, Cannabis indica
gtgagaagagtaagttagggagggaaaattaaaataaagggtattttgggtagttttggaaaataatggaattaatttgtataaattagtggaaggtataaattttgaaatgggatattttattagggtcaattaatgaaatttccctttagctattatccttcttgatttatagtccaactacatatcacataatcctaaaacatcacttattaaatagaatgtaactataaatataaataatagtgacccttgtagagttcaatcacatagaagcaaactagtggttccaatttgccatagagtccctattcaagaaagaaaaaattaagcaaagagtgttttggagtgaccacctcatggtcatgtcatggactaataatggtccatggagagagagagagtcactttttccttcaaaaattattagcctatttcaagcattttgtcttttctaattctttataatttatttacacatctatatttgtcttttctcctatactacacacacatgcaacgcaatctcaaaattattaataattcaaaatatataaaaactttattattattagtggaagataccaccaaagctaaagttataataattattctatagtctatatttaattacaccaacaaaacaataatcataataatttatatataaattgcctgtatgcattataattttaaaatgttaatcatacatatttatgcagttttaatttacgtaagccgtgacgttatataatttttctcattagcattattattttgtttctcatttttagaaactttttttctgaaatttgttttcttcggttgttttgtcagtatgcaaagtctggtctggtcgtctttatattattgtatattatactgtatccaatccatgcatgtgacttgttgttgtgaggactgtagtgaactctgttcatttcaacagaagaaatctacatctacaaaggtacggttatcattgattattctgtttttattagttttcactgtttggatgctgagaattatgatgggaaaatgtttgaacaaaaaaaaaaaaacta

SEQ ID NO: 304203 - DNA, 3054 bp, Cannabis indica
ttttccttttacatttttataatgacatgaagcttatttatgtattttttgaatgcaagcttatttatgtatttaaaaccaaacaaaatggaaattttcattaacaatatatataatgttttattaactatgcatgtacacgagtgaaaaaaaaatatccaatagaataaacatataaaaaacttactaatacaaataaaagaaagaaaaaatcatatcatctcaaaagatggtaatagtgtaactaagtggtaagagagagtgagtcaagtcccctcctcaattaccacatttccatttagaggttggcacacagcttaggtaatggcaccagctgcagtgcttgctcccattctctcctttgaatagcatcaccaaaccgactgtaaacctgcaccgttcaatggggacaatggaaattagagacagcataacagagttcatgaatagttaaaacttagaacattttgtcttttttggttttacttcaatttttgctaagcttaccagacaataagtaatacaactgcgaccaacaagaggatatattggtaagccttatgcttagatttgacgcgagcagttgctggaagatgacggccctccaagtatccaaactggggacgaattaacagaatgaagccaaggagaaaaccactaatgaatcctccaatgtgggcgaagttgtcgacgtggggtagaataccaactgctaagttaatggctatgatgataatgagtgtgaatagtgctgcagcctgtaagggaaaagaagatagagaattagtgaccataaaagtgtgtcaaatttaacattaagcttttctaaagataaatgcatagcagcaaaccttgtttgtgtaaatagtccaatttgtaagaagttctgataacatagctccaagaagaccaaataaagcaccagaagcaccaacagagatgttgctttgaatgaaaagggacgatagtatgcttcctcctaatccagatattaagtagattaacccaactcgccctgccatattagattgatcgagtaagataattgtaattggtaagaacaattattgaaaatagtaaatactttcacaagagttgcaaacaatatgagctgattgtaatcatgcttgtggcaaagtgatacatagagcttaatgataatggttgtgtttaaaaaaagttctcgaaacagtgacataccgaatccaaattgctgctcaaggcggattccaatgaagaccaagctcaacatatttgcaagcaaatgaatgacaccagcatgtaaccaaatacatgtgatgagtctccatccttgtttcccatggacaaccttttcccactccaaagctcccaacttttccaatctgtgcaatgaaatagaataaaaggttattgaaactgaaaatggaactgcattttaagccaggttagctcgcttaaaaaggctatcatcaccaaaacctaaagctgcaaatacttctgaatgcaattctataaaaggttaaaacacaattctattaaattctttttgttaattgccaattaacagaatagctttagagggaaaagtcaattatttactttgcatatttggcgttataataaagacaaactacttttgtattttagttttgcaatatcaaatcatcatttaagaacttgtaatgctatgtcactataaattgaccagctaaagaaataaaattagttcaacaaaagtttcattttcaaccactcctattacaagcagaataccaactttcatgagaaagatatcccaacaaacagaaaaaggttaaaaaataaataagtatttttctattaggggaatgttggatccagaaaaactttagccaaattttcaagtaaacataaccatctccaaacaaatcaatggaacaaattcaaagaattagcacttaacatagccaagatcaaactaaacccacatcacaaaacatcctatgatgatttagattagagctttacaaaaacccagaacaaaatggctcaaacatttatctaatataaaactcattgattcttaacaatggaaaaactcaaaacccagtaaccaaaaaaaaaaacaaaaaataaaacaataataataatattaataattgagcaattccccaatcaaatatatataaaaaaaaatataggatcaaagcagaacactcacgtagaagaagatggaccaaagagagggttctctttaagaggctgaaacgaaagtctaccaagaaacttggcaacacaagctccttcaaacttaagattattccttgggcagttattgacatacatggccactataaagacagcaatattagccaccacgaacatgggtatcaaccacgacgtccattgatgctccgaggtctctacatagtagggattcgtgtaattcccatgtggattttgatttcctcttgcctttgttcctcctcgctctagatcctggttagacattctcacctcgacctaaccttccttccttccttccttaactctctccctctctctagaatgacaacaagttgtggaagttgttatatatagttgagaaagatgtaatttttgtaaacaaagatatggaagagaaattgagaagtgggttttaaggaagtagaagaagtctgaagaaagaaaaataaggggaagaagaattgaatagaaagataaaagcttttgttttggggttatatgtttgtaaactgtaatgggttgtatgtagatttaaccgttgagttcttcttcctcttcttatattctctctccctctaaatcagtaaaataaaaaaggaagaggttacggtttatataatgataatgatctttctaatttctaaaacgtgtttgccggtggtggctacaaaaatatccctttttaaagttaaaaaattaagggaaattttatttacaccccaaaaattgttaagtacaccccattttaataatttttattttatataaaatttatatctttaattttactaagtatttttaatttttttcttttaatttatattcttaaaaaatatacctattaaa

SEQ ID NO: 304204 - DNA, 3325 bp, Cannabis indica
atttgcaattatagtagtttttgcattccctcccaatgaatcctgcagaggaaatcagattgatcagaagctctttaaaagcttttaatctttcactatatcccagaaatccctgaaaccgatttggtagacttgatttttatttattctatttttctaaaaatgtgctaataatgtcatcaccaccaacctgaagcagaaatgtaagctttgagtcccgatacggaacatggagtgatttcccatgtgacatgtttaccaagttcataataacaagtctgaaaatagagatttaaaaatcaattgaaagttttcattgccgaatcataaaatttaaaaaataaaatgagaagtcataccccaatgttgacagggatttgttgatattagtagcttccctaagacgttcaccttcagcaccagaactcttctgtctgtgatcaacaggtcaacaaatcaagaaaaaaaaaatcaatttatttttggggagctgagtttaggaggaaagtgtaatataataaggaaataaaacactaatgtgagtattatcatctctcaaaatcttccaaccagatgagtacaagaagatttgtccgcttgccttcaaataaattgaaaaaataacactatacatcactatacctttcagatcctgctaaatcgacaagattaaggcgggcaaatcgatgatgagttacaccttgagactcccactaaaaaagaaaaagatatgtttggcaaacttgaccaaaaagataaggatgataaatcaacaaaacaaaaacaaaagcaactaaaatatcgagcagaagcaaccaaaccactgtactgtctaactcaccttactttcaattatgcacgtaaacacactatgtgaacgactactggcacgattcatattagtggccgctacctttctatttgctgcaccctagaaagcaaaattaatgtaagattgtggccaatatacacaatagtcaatactaaaataaagccaaaaagaaaatcaattataaacacttagacagctgaaaagatgaaaacttgaatctaaggacataatttatcttatacttgaataagctgttggataacatctcgagcacttgtaacttctatctccttgagattttcaacatgaatccctttcttcacgtcctctcgtatctgttacacatccacaatatttgtacaaaattataaagtaaattaacaagaaatgattttagcagaaaataacagagccaagagaaatacgtgtgtcacaaatgtacctgcaaattgctagatgatgggtccaaaagatcaagaatttgttcattgtatatctccagaaatgagcatttacaattgaactttattttttcatctctgcgggcttccttttcctgttccaaaaaagattccatcaaactttcgcacaagtttcgggcttgatgtatatataaaagaaaatttaaggaagacatataatttgtttttcgacatagtgagcttctataaaaatgatcaacaccttttaaacatgttggaaaattatagtggcataagattccattcatagattcaaaaggaagaaaagttagtttctttgtagaaatcaccacaactgaacacaaaaaagatgcggaagttcattcctatgcataagaaagattgtgtaacaagtttctctaaagtcaccagataatacaattttagtatgggtttgtaaagttaaaaaccacaaaccttttgaattcttgaaaacaaatattcaaagactctaggtgtcatcccacagttaacactgtgtcttcgagtgcctccctcaatgtctccaagcattgtgtgagtctttccacttccagtctaaagttacaaaataaggtatcaccaaatcaatgattctactacaatagtatcttattatgttctttaataatctaagtagaagacataaaaaatagtatatcactcacttggccataagcaaacatacagctgttgtagcctcccatgcaattttcaaccatgggcaacccagctactttaaatagtttttcctgttatgcaaccccaaatgaaaatcacagagccaaataaaacaaaaaaatacaaacccatttaaaacaatatgccaattaaaaacagtacctgggtaacactctcatctgcaacaacatcaaaggtaaaacgcgattcaggatgccctgtccaagtaatagtctgagcgctctcttgacgaacacactttccataaccttgcaatgataattcagcactactaagaggccgaatcctaattataacctgcacaaaaataataaaaatacttatacagcgctcatgaccaaacaaaacccgaaaacaagcttgacccaacatgcatagttgaaataaaaaaattgttctttataaacattcacaattagtaaagtcaattatcttccaagcttatccaatgcagaaatgaaatcatagaaaaatccaaaaatcccaacatgcttagttgaaataaaaactgttctttataacattcacaattagtaaaataattatcatcaaagcttaaccattgcagaaatgaaaccataaaaaacatccaaaaatctcaaaacggaacatttagatacacatttatccattagagcacttaaaaccataaccacaagttatttaactacctgcacattgtgatccttccagaacgatggatcctcggaaatctcgaagtactgggtcgatgaagacgccggcatagcgccaccaccgacactacaagtgtcatcgtcatcccagtcacgtatgctccgtacggccgaagtttgagagaaattttctttggatgcagatttgaagatatcaggagtgctccggaccgaaggaagtgtctccggcgcgtggtcatggaatccgaaccggctcttgatggcactcgcagcgtctgatatgaagggcatgttttatgtgagaagaaaggtttgagttgagaaatggaggtcggatcgagtgaaattagggctaagaaagagagtttttctctgtgactggtttggggggaaagaaagaaaagaatttgaattttgggaaagaaagatgagagatggtggtgatgatgatgaagatgatgatgatgctgatctgaggactgagatccaaagtgttcaaatggacggtcgagatgtgattaaggttaaaataaaagtagtagtagaccgttggggactggatttcaaaattttgaaccgagccaactttttcaggctaaattttatttacagcaaaaaaatttttaaagacaccttattttaataatttttattttatttaaaattaatatctt

SEQ ID NO: 304205 - DNA, 2575 bp, Cannabis indica
ataattttttgaaaacaaaaaaagaaaacaataccaaacatgctcttagtttccaattctcacctagtggaaaatctttttttttgttagtacatgaaaggtttagaaatcaccaaaggtagaataccaaatgaagtattaaaatgaattataatgttcacttgtgctaaataattcagggaacactgagaaattacaaaacatcattgtgtaattatagtttgataataggcaactccacatgactatttgaaagagatgaataatagtctgaagaggataataaaaatcttgaaaatatgctgtgccgttttgaggagggcagccaatattagttgttgtaaggcttttaaaagagaatagctggtcaatcatggtgttcatgtgaaatgagttcatgcaataattcaagaaataaaattttatacgtataatatattaacattgattacatcagataagaaactacaaaaggtttgagactctacactcatctatgactgactttttaacactacatagataatcacaacctgaataggaccaaaaacttggtaacactacattttccaatttctaattttctacaagaattaacataagaaaaatatacaagtataatgctgcaaccctatgtgtcagtgagaatattttttaggcagtagacccttttgtgagtatgctgaacactaatgaacataattgttatattttgaagcagttagacgtagtaaaccataccaacttccagcaaagaggtgggaggcacgttcagagcaacatcaggccctctggaattcttactcagaaaggtatagactaaatctatggcaattttcttgaaaatagatgatgacttctttgatttcgcataggaatggccgagaatgtatgtcacaccagattctttggcttttaaaatctgaatagactcatgtttacaaagagaattttccaaacggccatccacaggcttagtctcttgggaatcacacaaaggctgcactctgttctcttcttgatttgagatcatgaaagtctgttctggggcataaaatgcttcagaatctgacatgttgaagctaccctcttcttctatttctacaaattgtactattccagacaccagtttattctcaaaatcatagttttcctgttgtagatctttgtaaccatacctcacaatgcacctaaacatgccatactctttaggccccattctactgatgagaaggcgttcgtcttcacaaacatagggaacttgaacacatttcacacaaatgaaaactaacacctgatggaatgcaggcaaattagtcacaaagtgtccaaaaacagctggaaccccactggtgagattggtgtaaacaagtccaattccaggtacccgaaccatgccaagaccaggccccatggacactaatcgattcatggagaccttgttttccacatcaaattggtgtttcttcattgttccatagttccatatgtacattacagccataaaaatgaaagacagcacaatagggatccacccaccttctggaactttgtgaaaggaagctgaaacatatagcagttcaatggatccaaaaaacaacagaaatgctatggaatttatcatgcttttcttccacaccattatcatgattagagccatcaagcaggtagttacaaacatcacagtagtcacagccagccctacaaaaccaagcaaaaatggtcaaagttttattcaacaatatttttcaaaaacactctagtagcttagaaatgtaccatatgcatgaccaatcatatttgtgtctctcagacctattgtcacagctaaacataggcacattaacatccaattgacctcaggaatgtagatctgcccatatattttgcttgaagtgtgaattactttcacacggggaaagcaattcagtgcagaacattggtttattatagaaaaggtagcagaaattgctgcttggcttcctacaacagctgcaaaggtcgccacaatgaacaccggccaaaacacagcttctgcagaaatggaagcattagaatcaatcaaaagatggaaatgataataatattactgtatgtaatcaatttgataactctatgaagttcttacctggtatagctttatagaagcttctctgaatatcatcatggtgtttagagaggaaggcagcctcacccatgtatgcaagaatcagagaaggataaacaagaaatgtgaaggctatctacaatttaattgagacaaggttattataaagggcatttttacaattttgtatacattattttaattaattacaaaatatgtgcaaaaaaacttattatcattttctcatacactttttatatataattaaaaactttttttcattttttttataatatatatatggtaataattattgattagtatatatatggtaatattggttatgtttatttttatgtttacaattaataataaacatactaataatataaaacattttatatatgtatttattggctatgtttatttttatgttttacaattataataaacatactaataatataa

SEQ ID NO: 304206 - DNA, 1369 bp, Cannabis indica
tacaaaataaaaaaaaaatgtcgactttaagtttaagctagtctcaataagatttaagtgaaaggagactatactacacattttaattaagtcacttaatataattactgttgattccatctctatggatactaccatactaaaattggcatattaactattagtgaggtataaatatgaaatacacaatatgattttatgggaattttcactgtttagattatttaggtggttgttatgtaggttgctatttgaatttaaactgcaatttaaattatttcattagttgttatatggattgttacatgtgaatttttgtaaaaataataataaaaaaattattttaaaatataaaaataaaaaaattccataatttaattggcccatacatattttttatttgatcgaaacgattatacatatatattgtgagactccaatccaaaactccacacacaccctctcatgtctcctatagtgagttgagctaggctcttgtggtaaaaatttggccatttttcgaattgtgcgtgtgatccctgcgcagggatcatggattattagctattagttatgtacaaatatgaaatatgagatataatatagtcgcgctacatatatctctatcattcgctaaaatttgcgtattagctattagtgatatataaatatgaaatatgtgatataatgttattggttcatgtatcttatatggaaaacatcacaaaatcatttaatgcaatgggtcgtgattggatgttttattactgagaacgtaatgaaaatgaaatcatagcaccacatgcataataatgtgatgggccagtgattggatggttttctgtaatgaaaatgcgaccagaacgctatatgcatataaatgtgataagatatagtaataggaacgaacataagctgaagaggcttcaatgtaagaaacagtagttccaagcattagtgtaaattaggacattagagagtatatgttacgcgattaggttcaaccaatatacttaatgcccagaaaagatttaacgtaacagttgatgcattatgtattgttatagtgttaattttttgcaaaaacaatacgagtacaatcttgtaaataattgacatgtggactccatttctaatgaaaaataatgtcatgtcaataaatagctttagtagagctaatctcgtttgatgtgaacttgcaagaagatgcaaacgagacaatatctagtcgcatattatgccacacatagtcaaagaataagcaggaccaagagaagttgatactgatcatacatatactgattatatgcactgatcaagtaaatctccctgcgatgagtatgttggaagttattttaccaggatctta

SEQ ID NO: 304207 - DNA, 2788 bp, Cannabis indica
cgagatttgcttggaaaattcttggatatattgaatttaccattgagcaagtcttcaacaaactcccaatcaatcatatcataagctttgcttatgtctactttcataagacacttggtggaaatgttcttcctaatataccctttaaggagatcttggaagatgaggatattgtgagtcagaaggctatttttgataaacactcctggttactgctaactcataatttcgttaacataaatgagactcttgataattaatgatctaaagtaattattctaaggaaattaataatatatttataacggcaacaaattacgtagttttgtagtaaaaatatacatactccgcgagtcactcttatttttgagtttgttgattacaagatacaacttagcataaatcctctcaatcgtgaaagaatttcaccctccccttttgtcactatttatagaaatttactccagttgctattttttctaatctatctatatgatgattcatgaaatatggatattttccacatttcttgttattaacatgccaaaattataatgataactatttaaatttaaataataccgaataactaccacttttgatcttatcttcgaacattattcaccaaactatctttttgtttgatatttatcctcctcacaaataacgtatatgaattggcatatactattaggatgattctcataattagagtgattcattgaacattctcaaaaggatatatcctaaatgaggttttgaataatttttgtttgatccttctaggcaaacttcttcaaattgtatctcttgtgtttctcatgatgaaaacatccaatcttgcaaccagcttagccttcctcttctcgctaaactttattttgtttgtccaatatttcccgagaagactatattatagatctttggcctcgattacacactacttaatgaccagcacatttgacttacctttatgacacaagaaaagactctaaattttgtgtcatatgagtattattcgacacacgttaaacaccacattatttctccttaatatacgagcctattgaattttgggtacttgtagatgtgttgtgaccatattcattgctcgaaatatgggtataataatttctccctaaaaagtgatttctgaaattgaaatgactatttaattatgacttgggggtaaactcataatatctcaggtgtattgaacacacttttatcttggtggttttatattaccgagaatttgtcacattagcatttaaacagcatcacctcaactgacccaaggtttgaacaccgttaagctaataatcattaagatctaatggtgtcccttgaagattttttaaacctcattcatttttttctttacttcattctttcttgaacaagaatttgtagagaagaaaaaatatcttccttcattctttcttattgcatgcccttattatcccttacctattttcttcgagaatcagcaaccattttttcccaacctcaaaatcgctacatacctgacccctggtatcaaaaattcccagtgagaaactctttcagactgccatttattcgaagacctagtaagttttcaatttttcctcctttaattatcatttttttttcatttttcttattttatacatctgggtgatttactgggtttaataaactgggaggcaaaatatttttagggttttttactgatctttttgaattttcaattccacaatctcttcccaaaatttcgagatattttcctgttaaaagacctcttcctgaatttgattgtgaaaccccagaatttttagaacacgaaatccattatttaccaattttttcctttaaaccaaaaaccaagaagtccaaaataaaacttgaggaaaatagtgaaaaaaaattagggcatacaatgacaagcttaagcgagctgatacgtcgactcgctatagacattttattaatgaaatcattgaaagaaaatgtagtttcttacgagatgcagctttgtttgaattaaacgatttgattaaatacccactggtgaggcccttatttttaccctctgttattgttcaattcgagtctaaattttttgaatcttctattacctctattgcatcagaccttttctaactatgtgtggcataaagcaaggaaatggctttgtatgctggtctgttgaaaaagaggagaaaagttgctttcctcctaatcgttttaatagggaaatcgaatgtagtacgagcggttcccctcgcattgctatgggagcttggagtattgaacatatctaagtcagtgaaattcttccacataaagatttttacaattacgttgagattgcccatttttaattaatcccgaatggttatagaattatggcctctctgcggtctctttaccatatgatgggatggtaaggtccctctcccttcaaaatcactttcttatatgcatcaaaagaaacctagggaggaagcactgcttgtgaggttttattatctcgagggatactctgatgatttcaaaatccttatcagacccccatcaaaaaaagagtttaaagaaaagtttttataaacgattggcttccaccctatcaaccatacttcctttcaaaaaatttgtaagttctagacaccttttggcttcgtgttattttcatatcccttgttccattcttttttgacatgccttatatttttttagcactactcttgctgtaacgttcccacttcaagcctccattaggtccttatacccacagaatgatggc

SEQ ID NO: 304208 - DNA, 891 bp, Cannabis indica
ttatctattactttttttaatatatatatatatatggtgattttgagtatatggtacaatgataattaaaacaattcttccgttgcgtacttgatttagtaccataaaactaacttatttatcttctagagtgagaggagcctttgacaatgcctatctcatatctgcctgagcagtccactcactagacaccacgtggaccattctgcgcttccatctcaatcaatcattaggtggtaacacatattcttcccaaaagtatggacaccatctattatcaccacttgattattttttttaaactaacccaaatctacatctctcgtgattgttgagctcgcaattaatttttatatttaaattgtataaattttaaaaataataaaaaacaaagtccttttttcctctcttaagtgatgttggcctcttcttttctaacaatagaaaaatccaataacaataatatatatgatcaatgatgacgattttcaccatgaggggaattgtgagatgtttggaatttaggttgagtgaggaaaataaagctttagacgatggatggtgacaacaagggcaagtgaggattttctaatgctttatgcttcatgagcatgaaaccgttcaaaaaaatggtgtatttaaatacaagcatttcaatgcttacgctaatgcttttgaattgggaatgagcatttaaatgtttgtttgtaattaagagtagcaatataaattaaataaactattttacatgaactaaattttttggagagttggacctctacgaaattaagactcttggtggagacattggagcccaacctacttctaaaaaaaaaaatagaaagaaccactcctctcaaaaaagaaagcttatcgaaggctctacttctc

SEQ ID NO: 304209 - DNA, 1500 bp, Cannabis indica
tttagatattattaaaaaaaattgtgagtaagttaagaattatgtaaattattttaattttaaaaataatttttcacaaatcttttggaataagtaaaaaaaattagattgacttttaaatttaaaaaatgattttttattttttaattttaaaaactaaaaaaaaattacaaaaattaagccaaacaaaattattatccattgctttacatcataaaaattaatgggtgattctacaatgtactcatttacaagggatgtactgatacacactttatctatttcagtatttagaagaaatttttagtctattttttttcatattcgtgtacgttatagttatttaagatatcttacaaaattttatgaaattcggagtaatttataaaataaaataatcacgcgtgcaacgcactgtttgaatcttgttttcagtgtattaaattttttcaaatttcttaaaattttgcaggatgtctaaaataactataacgtacatgaccatgagaaaaaatttgattgaaaaattatttcaaatattaaaataaatagaagtgtatcagtgtatttcttttaaggtgatgcattgtagaatttttcaaaattaataacaacataaaacaaaatataagtttttggtttttgtttagtaaaaattgactaaaactaagttgtattacaccaatgttaaatttgtgttatacaattatttaaaggtgtttatagattcaatgggaaatttattttggtggttctactaaagatttaacattaaattagagtttgataatttatttgtttactactttattaaaacaaataatgatatttgcgggtcaccaccgacagttttgccaagtattgtttttgtttatttatatgaatttaatgagagttttgcatattacatgagatataatgaccagaagccacctaagattcacgtgagatctaattagcttctatgtacttttaatagaattcccatgtggattatgatctcttacatttttttttcactctatttattattagtaatttagttgtattaataatcaaggaatttttttaaaaaaaaaatgtataaacaaggaaagttgggtttgttatttataacattttgtgtttgtattttcaatttcattttgattctcatttccattattttaacacaactaacggcattatgaactttttgtagacatgtggtactgaatgttatattatttttaacatatgtgtaataaatcgtaacatacgataatacatttttttttttggtaaattgtggcataaatatctaatgttttagattttatacacttaaatactttatttttatttttggaggaaaaaatacataatgttacaattttcttataccgttactaccagtatttttcgttaactcataaatatagacacgtggatggttcagatgcattacatttgaaattccgtattttaatattcctagtttgattatttaattaaatgatt

SEQ ID NO: 304210 - DNA, 2049 bp, Cannabis indica
attttgatggaccaaaaatcatagttttcttcaaggaaaattggaagaggtagagaagaggtattggactttgaactcatgttgatgagtggaaaaaattacacccagtgatatgatcgaatggagctctgatacaactgatcatttgagaataaatttgtattggtttagatttgaataggtggatatgagaaataagtgtttaatagttgttatggtaattgaagtagtgatgttgatgagtagttcttgattcagtatatgagaatagtttgggcttagaagagagggttgtatgagaatgtagtaagctttattgatagtttggatgttatttgttgggtgtgttggttacaatttggaaccattgaagaggtatttatagttgctcaccccttgcactttatggttagaattatttcttctagatccttattttactagaaggaattatgtccaaacaaatctaaatatttctagagttcaacataactagtatattgtatatttaatctaatctaaaattctcttaagttcttagataatttttctacaagtgtatagaaagttttagactaaattgtgtagaaatgtataccaaattctaatactaaacaaataaaattctattcttgacatttctaagtattatctttacaagtaaaataattcttgttagttttagggaccaaagccctttattccgagcactccaaacattattttaactaatgaggcaatactcgagaggcagaatagagcctcttgagtttattgattttttctctgaaaatccaccaaatagctactgaagtgaacctgtagcaatattccaattaagccactttttgacttcctgcagacaccttttacttacatcacaatcaaaaaccaaatatgcaatagttttgcacaataagcaaatatcatcatgaacaatattgtctttaaacaatttgtctctagtttttaacgtattttgaagaactagccatgcacataataaaactatgtttagggagattgaatctaccaaaaacttccttactccaatgaagtcgatttagttcaggcgagataatgttatagccatcactaccacaaaatgtactttttgtatttgttttaaactgtcacttatacctatagtgtcagtatatagaaccaacacctattccaccgagacaaaaagtctcagtttaggtgtctgttataaaccgagactaatgagttttggtgttgttttaaagtgtgcatatatatttttccttttagtgttgatttataattaactgagactaaaggttttttttagaagtttttagtaatgcaatttaatattatttagttcattttataaattatttagcatcatcctagttagtaattattttcaaaattaccaaattttagaacccatcaaactctttaaagtcccattaatttttataaaatttttgtcattataacgaatgcaaagtggatgtttcccatttcaaaacttattaaaacatataaaaaatatcccaaaattccaagacaattttcacaatcattggtcgatcgaagccatgccgaagctctagagactgacaaaggcataatggttttgggggaacttaagatattggttttaaagctcatggcaagtggagaaaggatatggaagttatttttattgaaggggttcagagttgctcagacctaagccaagatatctcagctctgaagagttattccatcacgatgaagggggagaaagctcgaggatcgcaagccttaggggtttcagggcttgtggaggttagccatggcctccgtttaggctttaaacacatataaagtttaggaaatcttacattgggtgcagcggaatataatgtctccttccgctcagatctctaacccttgtatcctgtctatcgcagagtatcaccaagatgtgagcccgaatgtccttctcttgattctggattcttcacaatcttcaacactgtgattgagataccacttgatgtttgtgggcactcactctatcactcaagggct

SEQ ID NO: 304211 - DNA, 4216 bp, Cannabis indica
atttatatgtatatatatgtgtgaatatattagagagagagacagagagagtgagagagaaaagacttactgagatgaagagagagagctgaagctgcctcgatgattgctggaagatgactgtgacggccgctccgttgaagcccattgtcctactctggccacaggctctgaaagatgcagaccccaatattagattcagctccgtttagttgttggtagctcagtaataaatcaacacttacatttgtctttcataaaagtaggagttcggctaaattttttacttatatattttaatttattttatcctttaaataactattatattaagttcttttttgataaaaattacttttaaaagtgtcgatatcattaaaaaaaattgtgagtaaaataaattattttaattttaaaaataacttcttaaaattccttttttaaattataaattattttaattataaattataaatttatttttctaaaagaacttttaaattaaaatttaatttttaattttttatctaaacacaaaaaaactaagaataacttagaaaaactaaaccaaagatgctgttaaaataaaaaggaaatgggcttacggccgaaagtccaggcccgttttgaacatttattactagtcattgtgattttagaggatccaaatccaatgatcctggcctaagtagctgactgtttcgaagcaccaccagtcagttaacattctagttatgatatatatattttatgtttactaagaatactcattaaattatacaagtaagatcagattttaaatttagtttaactatacataagtacagatcattctatggcacgtgggcatactgaccagttaaccgcccaaaatagtattttccagtctggtattttcttctcataattgtaagtttatcgtataatatggtaagactatttatgacatgttcgaacaacacctttgatgcattacattacatataagtagaatcttacctacaacaccgggtttgtctacgaccatattctccttccctgtctttcccttcttcaccgctggttcttcccacaaagtgaatccacttccggtaaaagaactgcagttggaattctcatcatttttgtcagtactacttgcttgagcagctggataaaccatcccctctggttttggaaccctgctttgaatttgattgaaatatgaaatgtggcttatactgtaagtcccaatcccacccgggagaacgtgctccactggaggtggcgccggaggaggtggcttctcgcttgttgatatctccactgaggtttcttctttagcacaggtagccttccctactctttcgagtggttgtaagaaatcatgagtcttgaggtaacctcctgctaataaatgagaaattaagaaaaagaattacttattacgttcatcagcagttgatataattgttgcctaaacattctgcatgaactttagaagtacacaactctaagcttaagcttataagatcttaccctagaatattttgcttttcgggccaacttttactatgctggccaaacgtacgtcatttagaatttggctagtactttatctaatctataaacacaaattaagacatttgatccaaaatataaacatgatcaatagattcacacacacgcacataaatatatactgttaaatgacgaactatatatatatatatgttgtaatgtgtttaatcttcgtacaacgaaaaatatgtcgggctatgttgtactttagctaaagatttttttagataataataatgaaaggattaaatagcaagacttgtcgctaaacatatagctttacgccatgtgtgaaattgaagaaacggatatcagctaaagcgataaacctccgcaacatctacctccaacttccaaataaaaaatctttgaccagagaaaagcaggaaatgtacacaaatcattcattttcattttctggaatatttccgttttcacgtcataataattatttagaatgcagagcggttcaaatttagatgataaccatattatagtaccatgtgattaatctcataaaattgaaaaagaggggctatgacttagaaagtgaagtggatgatgaaaaagaaaagaagggcgtgcgtatgagggtaaaagggaagggagagggagaggtggttgaagaagagaatacagaatagtataccatgcacctgcgcatatgtgatatgtcaaatcatggggtaagtgggggccactaaaacccaaggcgcaatctgatggtaccctatttatggcctcatggcccagatccatgatccattttccactcacgtgcatcccttttccttaatttttttatttttttttgctgaaacatccttttccttaattaactatactgtactcttaaatttctcacaccactatgtttttgcttcccccctaaatttcgcattgttggttaaaatcaaaataaccagattaaaatggaaaaaatgtacataaatcaatattttggaaacattttttttaaaattaaaaaaagaaattataaataaataaatagaagaggaatggaataccttgagaagctggtcttggatcttgttgggcagttgaatgattgtacagtgacagaaagtcgtgtgttggttttcttcctgtgaataaacttgcaaaattaaaaaaaataaaaataatttcttaaaaaacatagttaaaaatcatagagaggctaattatttagttatttttttttctaaaaataaatatataaaataatatgaagaaaaaaaacctgcttcgaaaaataccttcggttccgtagggtcgaggttgagaaagctccatccacagcttagatgctattttagtagatatttttctgtttcaaattctgaagaatttcgaaaatgaaattctccggtaatagaattgctaatttagggataaaaaaaaaagttagaaatgttcgaattctgacgagggccttcttagatccgtgatagagtattttcgatgagcaatttccccttcagatgaagatcaaagacgcattaagtacttttttttatccagtcaacaattttctgaggaaagaatcggaaccaaaaagctgatgaaattttgcagtagctcctcaagagattttttctctaaatgcttatttctggagaaaattctttctccagaataatttagctatctcaattattgtctttaggtactaataacgccaaatcgagcaaatctgcaaccgaattatgcaatcacgtacccaaaaaaaaatgattatccaaatatttaaaaacgatatatatctgaatcaaacatttatatcaaaacaatcgatgattcatctagagcttggatccgagaagtattaagttaaaattgatgaaataaatgaaaatttagaaaaataatgtgaaagagtacctgttcagcttctacacttccttaggaaaagttcaccaagagagaaaaagaaagataattttcaattctgaattgtgagctctgaaacacatgagcagctattttcagaaatgggaaaagcaaaaaattgggtgagaagaatattctccaaaataccaaccctaaatggtttcacagcaattcaatctctctttaaacttccttttcttcgttatcagatagcgaacagtgctctagtagtctgggcctcaggtcgcactttctctctctgtgcgtgagttcttcgattgaatatctttttatacagttttcttgtttgctttgctttgctttgatttctgttatttttctccttttttttcaaatcgttatttatcgttaggtagaaaacgccgtttacttagcaccgtcgaggctgatctaacggcgtgtagtgtacctgtttagcgccgtttattttaaccgtgtctaacgctttgtactatatcacggaactcaataattttagctgttttgttttttaatgagaaaaaagaaattgttttcggcaatcccgattagtatgtaaatattttatttatatatttttttaacgatttgtcaatcccgattaataattttctttactgaagccttctgtctttttgcccaccgaagagaaggttctctttttcaaaataaataaataaaacttctgaactacacaatttttttttcttctttttttaatgactacacaattactttttaaatttttttttttttttttttc

SEQ ID NO: 304212 - DNA, 3555 bp, Cannabis indica
tatatatatatatatctactatatagttctattatatacatttttctgtattatacatatatcttatatcatatatacactacattatatatatgctcttatattaattttatacttatatgtattttgagcattgagttattattctagtactctgctaatctcttctatatacttgtatttttggtcatatagctgtaacacttatttttaagtctttgtatttgtcgcatagagttgaaattttttggtcatattgttcatcttttatttacttggttgatatctcatatattgtctaacaagtaatgaaacattttaaacaatttttttttttagattttaaatctaaaatttgcagatttttgtagaaatttaagggatttcgatgcagctcaatgattgacgatgattttatgaaaacataaattttttcatcaaggttgagagtcctaatgaaattacttctcttcttggaagaggctttattatggaagaacttggtaattttatcccctgccttaagctaatgaactttggatctttgtttttaaaaaaattcttgtttataaagaagactatcttattgagattggagtttagaagcttcaagcaaagtctccttgaaggcagggagagaggaaaaaatgttactaagctctttgtctgttctattaatcctagtagctaagctattgaaataattattccaatttttaattgctttaacacagttactttgtttataaaggaaattatacaaaggctgattactagaactaagatcagtatggctccaagagttactaacattatcaaaaaaggaatgatcagtaagccaatgattttcaaaattaaatcttttatttttattttatgcatactatcatcagctaaaacaagctttaacaccctatgatccgagccataaaagctgagatgatgaagggtagcttgaggataagaatctagccacttattattagctataccccaatccaaacgctcataagttgatccatatttccaagtgaacttatcttcaacatagtgtataggggataaggaaaacttactaacaaaattttggaaattaatcatagcatagttaaggggtgaggaactactactccgatcgttaatagagaggtaattgttaaaatcatcgagaatgagctaggggagaagaggggcattatcaaaaagtctatctaaaagtttccaagtatgaattttatcattaaaataaggagaaccataataacaagaaatatgattagttatattatcttcaaaagtggcaatacaatctataaaatttaaggagtaatttaaaatactgatagtaacctccttttccaaaataacaataaaccaccacttaaaccattcctaagaacttcaaaagcattgtcaaaagagagtctagccctaagaacatcacaactacctgccaacaatttagactccttaataaagagaaaactagggttatgattttttacaataagggagatatttcagaatgctcggggactccataaccctctagcattccaacacaaaagactcatttttctgggcggggttgctcagcaacacctgcctgattcgaagaagaaacaacaattgataaaacttcattgataacagggctagccgttgctcttttgagaatgttccttagagaatctcccaccatgacagagcaaggtatgaaagctaaacatttagctcctagcaatgtcctgaacgggatcaggatcaacctgaccatgaatatgcacagtgatagcagtagtgggaggagcagtttgagaggtatcacaatgaataccaaccagagcaacaccatggaagtctaagatagggacataactctgagcagtagaaaacatgtcaagatcaagattatcgagagtagaaataggaaggctattcaggagcccttggggatttgtctcttcccttctgatagccgagccagaggaagaagaaccaacacccatcctcagtggtaaggaactggctaataacagcagccaagctttgatcaacattaccataaggcagaggtggctcttcaaacaaaaaggagttacataggtcaaaagggttacatttgaactttgatttagcaggagctttcaagggaattttgtaatgaagtagatgtggataggcaagatcattacattttttcaggtatgtaatgcatttagttaaagtgtggtcaaacatcccacaatgaaaacagatattgggtaaattttcatacttaaaattcaactatttttccttgtgaatgtttttgaaatcaactaagatacctctaggaatcagtttggaaacatctaaaagaactttaacccacaaaaatagacctgaaactttgaaaagggtggttttatctacttcaagaaaatccccaacctcatccccaatcattttagccaatttataggatttcataccgaaaggaatagagtgagcttgaatcccaaatggagaatacctgagttggttgggaaggagagtgtcaagaccagcaggatttgcactggtgaccaggcaatggtcaaagtgccatggctggccttcaattaccctacgcatatctccctcacaaccgaactcgaccatgaacatcccattaccatactcagaaaatattataggagcttgagtgatccaagcatttctcatagtttctttgaaccactcaattttgatagttcgtggagtgagaacacagaagaccaaacaaaaatccttcccaggttgctggtcccctcccatgttatcaagaagctcatggacagtagcttctttttccagtaagatttaaaacatgggccatattttcagtaatttcctctatttcccaaaacagaagacagaaagaaaaatggcagtattttttagacaaagaaagtaaaagaaagcagaagagtaaagatctccaaagtacctacacccttaaatagttgaaattagaaagatacttgcatgtccatggcttacataggaagtcagctacggagatctccatccaatcgtttagaaatcataagctaaatcttcggatcttaggtataatcatcgtttttcttcttgaaagagctaaaatggcggcatcgtttttcttcttgaaagagctaaaatggcgacatccatttatggttactttttcgattttttattatttttgttaagcataatttctcaaattttgttttagaaagagtaggttgaataaattaaattgaatattatgtcgtccttgtttaggtgtgataatatttagtattataaattagatttaaattaatttaattcacaaaaagatgtaaataagaaggcggaactattcgtattggtactgcatcaaccaatacaattcttgtgacaccgtttatccatttattttatcttttcaatacaattgaaaagtcaaaagaaaacaataataataataataagggtaaataccattttggaccctatattttgtaaaagttacaaattagatcttgtgttttgttaaatgacaaa

SEQ ID NO: 304213 - DNA, 1831 bp, Cannabis indica
ttttacaagagtttgtgattagtcttattcagttcagattacctctttatatagaaattatgtgtacttttagattacataacctgtcaaacaagacattttttacattaattacatttaattaagaaagaaaacatttaaagaataaatgaaagagcaattttgaccgttcttgattaattatctgaacgtatgcaacttatgaagtcacacattgaccgttcatcttccaaacacacgaacttgcaggcttgttggtgtttatttgcgtataaggtctttggagcaaaaataacctcggggttattttataaggtagaatgcatgtgaccgtttggtcgcgtactggacatttatgtactaacatagaacttgtgaattctaggtgagttgtcgtacacattagtcacttggaccagatgtttgttaagatgcggtttgtacattagtcgcaggagagatgcccttgggcatcacacataatcgatatatgcacgaccagtgctaacttctcttgatcttgcttttactttgactatgctaggaatagtgtgcgactagatcctgtcttagtcacactgaaagtgctacttgtcaattttcaagactcaaattaccgagttgtttatcttgaattgattgatttcaacacttgcattcaagactcaagttaagaataaagcagtaaagcacacattgatttacaagcttcatctgcactgagaacacatctcagccgactagtgcttgggttccccgaaccagggtaatctcatctactaaatctcaaaagagttgtattacaatatccagttcactcttaggaatttaatacaatctttacagcaattagtaatgaattaccaacaacaatcaagaatcttgatcgcaagtacacaatcccttgtgcagcaactacgttcgtcttcgtcacttcttcaatctgaaatcccttcagatctgatgacgaggatgacactgaactcccttcagtctgaactcagtatcttcaggctctgatctttcagccatagatctccatcttcaagctatacaatcagacctgtaaaaacaacaacaagaaaagcaagacactacactaactctcccgaagaaactcaactaactgaaaatattaatttcaaagatgattagtttatagaacaacaaagactatttatatgtagtagattagtcgacctaaccacaactaactctaaccgttaagtcataacagacacaaccgaactttaacagaaggcaggtgtgcagatgtaactgactaaaaccgccagatacaactagacattctattaaaataatctgtcaaaaataacgacacttacacacaccttctcgtaagtttctgccatgcgaggttagctctactagtgacacatcatctttttctaatcgggaaccgggtccacatgtcagacatgtacgagactgtactcgtatttttaggccaaaattttgcactataacagatacccctagtttcgtgatgacaactgtttgtcaagtggcgcaactatcttgagggacaggcaaattgagttgtcacaatggcaggtgacgtttgaatgtcttactgggggttatgaaaagacagttggtaattattggttacctttacaaaatgccacatcatcaaaatccttcggggtctgtgcagatgtgtctcgtgacagtcgttcaatgaggcatcttttggtttccatatgccacgtgtcacgatcgtagcggtggattgtgattcctatttaaaccccaaatacaaaaaaaaaatgagacttctgttggaattaaattttaccaggatcttaga

SEQ ID NO: 304214 - DNA, 607 bp, Cannabis indica
ccaacactttattagtcccgagattgggcctaattgtgttgtttcttcaaagaacccttttggatgtatcccaaacgcgcatctagagcgtcttgactgcttcttttaaagtggggcgaggttccctttcaaatttagagacatctggttccgatcacagatttcttgtatcttggatgcttttgaggcccatctcttcatatagtctttacccattatcttgctgaagttctgagtgggccttaatcaattaattttgtattgaatgccacatgtcttcctttcaaagatatgaataatatttacccccaagcttttagacttttgagagttcaaaggctttcagtcttctattcgggtcgttatggacacgtgagtaattcaaaaaatgatctttccagcttttgcttaaaaaattctcaaatactttttccttagtgaatatctaatgttacctcagagatcttcaagattcttattcatttctatttgtagttattccccaacgcacccttaatctcaatgatttatccgtcaaagctttcggtgtcatcatctttccaagcaagcttctgttgggattttataccctaaataaaatatattt

SEQ ID NO: 304215 - DNA, 1188 bp, Cannabis indica
aggtaaaaattaaaacatctaaagtaaaatgggtatataattataatgtaatttcctccataaaatcacttgaaataatttcccccaaaatcccaaacaaaaactggacatttctcttatatagcccgaaaaagagcccaagtggcccaaaaacccttttgtggatcaaagttgtaatgtatgaaatggagattggacccctttttttgttctttaatttttaacaatgaacattttattaaaaaaaataataaataataataagagagagattgtcctcttaattattatttaaataaatatataaaaaattatccatgtgaatagtaatctgcaaacagatatttctttgattcatattttggttgaagaatgatggacatacccaaaaattatagataatgatgtatatttaattttttccataaatatttttatttctgaaaccccataaataactttaagtaggaattgaattacatctcttttaattatgtggtttatattaattacatgtcattgtgtagatagttatgtacaatttgagtgtgtccaaattatatgtttaactcattaggtgggtaattttacaaacacgagtaatgaacaattaaaatgttgtatttaattggttactttatgggaatatttttaaaattgacaaaattctactaccaatcgaaaatctatcacaattttctatttataatcctttttcgaaattgattaatctttaataacgaattttaaaaatatatagaataacttgacatttgttaagaggattttactccttaactatggttattagaccattttcatgtgaattttcctttgttggttgaaaaaaattgggctaaaaatttaacatgtaagtgtcatgttttgtgtggcaaattagatattgcttttgttcagtatttattgtctctaacatctgttctgtagttagttgcatctgttttcactaatatcattttagtgccatgtcagctttctgctagtttgttagggtgtgccagctgtactttgttggttggttagttagtctggtttattatctttagtatataaattcgatcagaaccgttgcactaactaactctcttctgttagaatcttcttcttgattcttgctctgctagggcaacatatttttctgtttttgttcttgtttgtgcagattga

SEQ ID NO: 304216 - DNA, 1180 bp, Cannabis indica
tctcatttattaaattgtttttcatcttctaattttcttcctaaagttaatagtatcttttatataagtttagtacatgcttttcttatgtaagttatactattaattatttaggtgtatttattatattgtatgtcgtttactgcattccgccaacaatggtaatttgtctatttatgatgtataatatgatatgctgttaagttagaggtgagattcaatttattcaagattatttgatttgtgctcataacatatatatcttctgggttgtaattaatagtgtagaattacaactgcgttctgaattaatatcaatattagaataggatttgcagaactacatctctaccttactaagctctttatctgatcatcccctttcactcaccattttattatttttaattcattcacatttctatcattttcaatttactaaactaatctttagtggtaatttgcctctctgtagatacgacatagcccgtttactaacgcgaccgcagtgtaactaattgggcgacatcaaccaccttatatttgaatagcctctcccaagtctttaacctatttagaatagccagccaaatcataaaactatgcttaggagaattgagtctagaacatacctcattacaccattctatcttgtctttaccatgttcaaaccaacagtagccaatagaaattctatattcattattagaaaacaaatgtggctgcactacctgcttgattttgtctctgatttccattatttttctccaataccaactgctgctctgtggagccttatactcccaccagtcaagatgcttgatatatacacaatgcacccatttaacccacattatctttctttttagccacaatccatacatgtttagccattgttgcaatattccatgtagcagcgttcaaaagtctcagacctcttgcctttttaggattgcataatttctcccaagcaatgttacctgcccctgtcatcatatttttacctgtccaaaggaaaattctgcaaatagcttcaatttccttgatgatttttctaggaagtatcataatttgactccaatacatgtatattgtgagtaacacagagtttataagcactagcctacccgcaaaagaaaggttcttaatgctccaaaccttgaccttcgcagtcattttt

SEQ ID NO: 304217 - DNA, 3966 bp, Cannabis indica
ttgattcagaatccagatatctatttgaatgcagtttttgacaattttgtttggttggacaactcaactctattagtttccaccatacccctatcgaggggagaccctccaaagaaacctattgttcctgttggcccaaagatacaatctaatgagcaaaagaatgttattcaagttagaaccttccaggatttgcttaaggacgagtatgatgcagatttgtttgactactatgcgacaagtcaattggtattggcctccttggatgggacagtgaaggaatttggttccccagctgtatatacatcaatggatccatctcctgatcaaaagtacaccttaatttcttcgattcaccgtccatactctttcattgtaccatgtggaagatttcccaagaaggtggatctctggacatctgatggaaggtttgttagagagctttgtgatctgcctcttgcagaggatatcccaattacaaccagtagtgtgcgaaaagggatgcgttccctaaattggagagcagataaaccatctacgctatactggtatatattgcaaaacaatatgcttatactctgcatcagacttgtatcattgctatgataacgtccaactgcattttcccagtttcatttgtagagtcggccaaggtctttagtagatttctgataattaaacaatttatgcatgcaactcgtgcttttgcatatacatacgagtttaactatttaactcttgaaatttagggttgagactcaagatggtggagatgctaaggttgaagcctctccacgtgatattgtctatatacaacctgctgaaccacataatggtgaagagccagaaatcctgcacaagctagatcttcgttacgggtttgaatttcatctaaattctaataatttcttttgttttctaaatggtaacccagaatatgtttttatgctataattattttatttcaacagagggatctcttggtgtgatgattcactagcgttagtttatgaatcatggtacaaaacacggaaaatcagaacctgggtaatttctcctggatcaaaagatgtcagccctcgtatcctatttgataggtcatcagaagatgtttactctgatcctggctcacccatgttgcggagaactcctgcagggacttatgtgattgctaagataaagaaagaaaatgatgatgggacttatgttttacttaatggaagtggtgctacaccagaaggaaacatcccattcctagatttatttgagatgtatgtgttttttaaaattaactcgtatcttttatcgacaaaaactattactggtgcaacagtggtctaaaccaaattctttcagaagcacaggtaacaaagaacgtatatggaagagtgacaaagaaaagtattttgagacggttgtggccctaatgtctgatgagaaagaaggagatctgcttgttgatcagttgaaaatattgacctctaaggagtcaaaaactgaaaacactcaatattatatcatgagctggcctgaaaagaaagcgcatcaaattcaaatttccctcatccgtatccgcagttggtaaacattgcagaaagagatggtcagataccagagaaaggatggtgttcaactactgcaacgttatatcttccacctggctatgatccgtcaaaagatgggcctcttccatgtttgatctggtcttaccccggggagtttaaaagcaaagatgctgctggccaagtccgaggctctcctaatgaatttgctggcataggtcctacatcagccctcctttggctagccagaaggcaaggattacttcacttatattgcaccttataattataatatgttttctgacaacttttttattgctccaaatttgcaggtttgcaattctatcaggaccaactattccaattattggtgagggtgatgaagaagcgaatgataggtattttgattttcccttaatgaataatatggatgtgattagtggccaataaggaaaggcataaaaaagttcaatgacgatgaagtttcctctgctagatcatttggtttcaagaattcgtattacttaagctttttgatttattcattccattggatatcaacaaaatgtgttttgaccagatatgtggagcaattagttgcaagtgcagaagctgctgtggaggaagttatccgtcgtggagtaagctttacatttgatttcctgctctcttacattgtgatttgaagctcgactctttcaaattaaactcttctggtactatgcttattaggtggcacatcccaacaaaattgctgttggaggacactcttatggtgctttcatgacagcaaacctattggcacatgcccctcatctttctgttgtggaattgctcgctccggtgcctataacagaacacttactcctttcggtttccaggtttggacaccagttagatacctgatatgttaccattgttataattttgcagatgactgtatacgtactatgaaatttagtcatgtaataattttcctaagttttatatctctttctctctatggtctgaattcttcaatttattgctgtagaacgaggacagaactctttgggaggctactaatacttatgtagagatgagccctttcatgtcagctaacaaaattaagaaaccaattttgctaatccatggagaagaggacaataatccaggaactttaacgatgcaggtaaaaggatcctgctctcattttttctaggggataatctttgagctttcgctgaatgcacattatccttctttttcttttatcccaattgtaagcttgacatttatcctgtatcttcatcctcatgcagtcagatcggttttttaacgctttgaaagggcatggtgctctttcccgcctagtaattcttccctttgagagccatggttatgcctccagagaaagcatcatgcatgtactctgggaaacagatagatggctgcaaagatattgcgtgtcaaatgccaccgatgtaaatgtagatgtagatgggagtaaagaaaatgtgggccttggagcagattctgaaaccaaagcagtcgctactagcggaggtggaggatcagaagagtcgaatttcgaggatgaagtgttcccctcaagacaaaggtcattattatggtaagtaagttattcatcaaaacttctttcacaatttcttaatgttattattatcttttctgtctctaatatctgtgggagtatatataaccaaccagtgagcaactccaagggactccttatattttagctaaattcgaactaaaatagctaacaatttaattttaggaacttttattcatctcactccaaccatactccttattttaagtaaagtaattgtgcaatatttggaaaaatgaatagagggagcttcacacatttagttaactctttatccatttatccaaaatagagagaatcaatttgatagtggttggagcatagtttttccaaatgagctatatagttacagagccactattagggagccccttggagatgctctcttcttcttcttcttcttcttcttcttcttcttcttcttcttcttcttcttcttcttcttcttcttctttcttactttaaattcttgcatcttcacacacctcacaacaacttgggtttaatttgatccatgaaagcaaagtaagaaaggctatataactttttagttttacccacagacaaacctatttctttcacctataaagttctttccttttggggttcccataccccttttcatatactaacctcagcagaatcttcaaatcttgtcagccttactattactttataacagaatacacaatgatcataaagctatttcatcactagtaatcttcttgaatctattgcatgtatcaaattggctttatagtttatttttattataattatgttgccacc

SEQ ID NO: 304218 - DNA, 2039 bp, Cannabis indica
ttttttttttttaatattaactccttaaggagtgaagttactaaaactttgaaatagtagttatactgaaacttttttaacatgtcacatcacatattttgtattttcatttatatgtaaatatagatattgaatttttccttcataattacaacatttataaaataaataagaaataattaataaaatatttttatttcttaaaaatatatataatgtttttttaattttaaaattttgaaaatataattctataatttctcataatatttttttattttattaattatttagtgtaaataatgaatattttatacacatttcgtaattcgtaattcataatatttttcactttttttttataaaattaaaattttgataaaacaataaaatataataaaaaaatataactaattaggcaagattgaattaatcacaaaaatacattcaacgacatactaatttcgtgacaaataaaaataaagaaagaaatattttcttatacatacaaatatagcacccaaaatagttcataaaccatgtggattcttttcaaaacaaacatcatattatatcaaacttacgcacactattttgttctcgaaatgtgaaaatatcaaaaattagtaaaaataaataaaaaaaaaaaacatatagaatgccacctaacactatttgtgctttcctttatataaatatatagattattatttttagaattgaaaaagtctttgtttgaataaaaaagaaaaatcatttttcaatttaatgcagaactctacaataatgataatttgtgagtatgaaatagttacatgaacttcttagcgctccacgtcaatattttttgtttttaataaatgagcatgatttgacaatggtaaatagttaaaagaaaatttttaaacaacataaaaatttacataatagtggagaaaagatcatattttttagcacatttgtttaataacatttttaataggtgttaaattagtgatgaagtgctaaattataacacacaaacaaaaaataaatactctagatctagtatcaaaaagataattacataagccattattttttataaattttttacctttttacattcaatttttttatatatttttacagttgtttaccgagatttacatatatgagattaagtaagaatttaagaaattaaatagtgatcaagtaaataatatggaggatttttacgtggttcggatgttaattatcactagttcacgagtcagtgtattggccttttaggttttgaaatgtattacaaatgagttttacaataaaaaaaccctaacccttgctatctagtgatttctctaggtttctcttggagaagtagaaagcttagattcaaaccagcagagcttcggctaaaattctcccccctccttgcatgaattagtactagagtttatataggctagaatttgggtatgggcatacccgtgacccattcaggctttttgcaaagcaaatccactaatgggataaaatacacaaatcatgaggcccacaaagatattcaactcgtggggtgaaggttctgtactgatgaggggagcgtttgctgcaggacacgtgttgcacgcagaggacgcttgttagacaaagttgtcaggggagccgttagaaaaaaggttatatggtggtgagcgtactaccatggtctgacacaggagacagcatctgatcttgtgtcaaagaggtggacacgtcattctaggggacatctggttcttgatccgtggtaagtcttcaagagtcatcctgtggtaggcgtccaggagcaccttgcgtggtctgcctcttgttctgtcttaatcatcgttcaaaggtctttgttcgttccgtatctcagaagattaggtgcctttcgggtcttggaagaatgttatgccctagaggtgtagcccatagtctttgttgggctttggccaattccaagtttagcttgggcttccacaagcaggaaggcttatgtaacaccctaactaacataggcgtattacgtgatt

SEQ ID NO: 304219 - DNA, 1509 bp, Cannabis indica
cctcatatgcccgccctactagtcccactaactagtagtagctcacttggcaccaaggtgccctggggtggtggagagctaacaccaggtactcccccttaaagagcattctaagcttttagccttctaccaagaacatacatgagtttggctctatagacatatggccaaaccatatacaaaatcacagagtttctcaaatctgattgcaccattgtattcgtatacccaaataaatggtgaataccaagtcccgtctgaatctggacaatattgaagatatttacgaaaatgtcactgccgtacaaactaagcatcagcatgaacaacaacatgcgccaccacctgatcgccacttggccaacttgtggccatcagatagcttgtaacgtgccatcttgacatgcacgttacacaccgcaccattttttgcagtgcagtttctgcagttttatagtttggcagtgcgggtgcggttcgaaaagtaggaaaatttgcatgtgcgggttggtttgaaaaaatagtcaaaaactgcaccacccgcaatgcaaacacccctaccaattatagtaggcctgtcactatctttacaaaagttccaagagttctatatctttttttgccactttatcaaagataatgctctttgctcttctctttacatcaagtttaattctttttacaataaaatatattgtgtatatcttcatattctatagagttccatttcttgtccaccaaatatgatatatggttgctgccagtgtagctatgaatacttggcacccaaacctatttattttagcatttgagatctatctcatcacgccatgaacactattggcacgagtagtccaccttatccaagtcttgacgctagccaatacctgattactaaagtaacatttgaaaaaaaaaaagatgctttcctgtttctttgttcagcccacatattaggccttcttcttcttcacatatattgtatttaaataatctagatctcaatcttagcctatttaaaatcacaagccagaaaataattctatgcattggtatagacattcgatccaacactttcccttgccagtatacagttgggaacttagggtagaaacatctataagcatcattaatcaaatacgtatgtcttgaatcttttggaaaggtatttagctccatcaacttctttttgactcgaaccacttgtttctaataccaactactgttgggaggcacctcatagaccctctagttctcctcccttatgtaccttgtattcacccatttgacccatagtgtatccttctttgatttaattgcccatgctaacttttctgttgccgcttcattccattctttgattcttctcaaccccaagcccccttcctttttggttttgcataaatcatcccatgccaccaagcccggtccacttgtatctactccttttcatataaagcttttgcaaattgaattgactttttgcataacttgttgggttttatgccc

SEQ ID NO: 304220 - DNA, 3066 bp, Cannabis indica
gtgcggattttaaattttccaatccaatccgcaaagtgcggatatccgtactttgcagattggattagattggatcgtgcggattggattggattggatcggatattttatgaacacccctaaaatgtaacaactttctccttataaatagtaaatgaattcacaaggggggaaagcagggttgaattcgtattcatacatctaagagtactttgctaaaagatattctctgtaaacactttgagagtcgtagctagaactcactttatcttccttagtgatctgcctggtattatatctcataagtaatacaactaaaagaggagtaagtcattatccacatataagggagctggacctctataaattttgtgtgttctttttatttacatattaatcctaactcctcattggtgattaaccatcaattatttggcttcgagtgagttggctattttcccggttgacattttagtgctttcattgagatcttcaactttcttaggaagatcgtctaatctcttttcacctggaacatcatggtcttaacaaggaggagcaagaccacagagcctcaagattcgatgcctgtggaccttaatgtccaggttccaccaactggtgacaacccggccaaccctgcctgaccacctcaggcagctccacctgcagtgtcaagacccgagggtccagtcaatgttgggcaggatccaacaggtgtcggacaaatattggtcaatgctggacagcttgcccaaagtactacgggcgttcccatgacaaggcttacccactaggtatatgctagagaaactaggccaggggttgaccaacttggcatcaacgaaccccatgtagacttggcaaatgattctgaactggctaggctgagagaagtcatagggcaggtttagggtcacacaaacatcattcatcatgaacaagaaaaaacacgcactgttgtgagtgatgctttcacccagtaaagacacgaattccaagaatagatggatcgacaggctgcgatcctacaagcccatcaggcggagctaaacctctgaaatagaggaaaagacccttatgtccaagaggaaactcaacgccctagggattgcgggcaaacctcacggccagtggggccaactgcatcccaaacaacgccgactaaccatcagcccaatgatgatcaaatcttgctcgaaagggcatatggaaggactgaccgatttcaagctctgaccagagatgaagagaggaaggaagatatcccactgagacaaggtcgaagtaggtttcatagtgggtagttttatctcaatctcaatgaggacaacgccactagtcaccccagtcgtgagcgcacaaattaaaaaactcctaattatactgggtgcaacaacgaagttcctccccggaacttccaaacccgttctgaccccatgcccagggattcagtgtttgataaagtgggtcctagagtgggtggagacctttgaaatgacttaaatcgaaggagagaaaatcaagacggaaataatctaccccaaagtaaccagcatcctgtcaacctgccaaaaaggctggccagacaaaggttagatggagtagaccctactatgcaatcacagttggatcaactcaagaacatgatacaaggcatgtctgacccaaagctgtcgaacttggaacttgacaggacttgaggatcgcctttctctacacgtattaatacatttcccctgctaaccaagtccaagatgccagcttggaaaatgtacacaagaaaaaaagattcgctggcccatatcaaatattttgaaatctagacgatttgcaaaatgtgatagacaatacccattgtaggattttttcagcaacgttatctgaaactgtacagcaatggtacttcaagctacaccccgaggaaggttcgattcttaagacgcattcgttgttgagttctacacacaattttcgttctccaaataaataacatcccaactagaagacttgcttgaaataaaacaaaggccttaagagtctttgaaagtctgcatccaaaggttcatgagcgaaaccacgaaggtcaagggcctgatgaaagaagggcggtatacaaatataataggaaatatcttacctctaagtgacctttggaggacatctggaaaaggtcagccaacaatatgaaaaagtgtttagactaagctaacaattttataaaacttgaagaagctgtccagcaggtacaagttgacgggcaaaaaacagctgctaccagcaacacacctgccacagctagggccaacaatatcacctagctccaaactaacaacaataatggaatgaaatagaataataatagttttggccaaggcaatggcaagaagaggaaattcaataatccccctgcacagcagcaccctcgggaaaaggaggagaagttcacatgcttctccatcctgaagaacacccaagaggccatcctaatggccacacaggcctttgttctgtgcaagaagcccctccgatgaagaaagacttcagcaagagggatccaaccaagttctaccaattctataaagattttgaccacgacactaatgagtgcaagaacttaaaagaagagccaaatttgtactctacatctaagagcactttgttgaaagatattctctataaacattttgggagtcgtagctagaacttactttgtcttccttcgtgatctgcccggtattatctcataagtaatacaactaaaaggggaatagattattactcacatataagggactgaatctctataaatattttttatatttattttattcataattcctcattgctaattaaccagcaattatttaactttgagtcagttggctattttcctagtcaaccaattaaaataggacaagtactacaagtccttatcagaaatgtgaaaaaatgaacataaaaatcttttgttgtatctttggggttaattatatgactaaattttatacaatgatgaggtgcttactcagcatccaatggattctaataatatatatatatata

SEQ ID NO: 304221 - DNA, 2937 bp, Cannabis indica
tttgcctgaattttatatttatttaattcaactcatttttatttaattggaaaattttaattgtaaaaaattaagggttgtaacccaacccaacccgacccgatcaataatgggttggtttgggttgggttataattaaaacttgatatgaatgggttagaatttaataggccgatctcattgggttggcccactaaaataacatcaacccggccaacccaacccatgcacagtcctaggttttataatgtaatgggattacaatatattatgtaatggtcattaaattgtaaagtcaccacaaaactttaaaagttaaaacaaacaatgtaatagtaataatgattctattacaatccttattccatcataccaaacatattcttagtataaattaatttaaaaaatcgctaactattcttaacgtgatatattagtatgatattggacactataatgtccctaatagcattcctcaattggttagtagtttttattaaatttattaaagtaaaataattattaaagtagaataaatgaaattcaatataaaattacattaataaggatattatatctcacagataaatagttatgttacattatctttatttactttcattatctttgaatgtgataataatgaaagaaagtagtgatgttacattcccactttctcaacgtttctttctagttccaaatagaatatcctcctcatcaatgatcatcactagtggacggtgccattaacaaaagagaaatggtaaaagtacctatcacttggtgtttatcacctttgtgatatataatattcttagtgtttgtttggtacgtcgtattgtattgtattatactaaattgtattagtattagtattatttaatacaatactatgtttggtattgactgcttgtattaatagattgtgtaaagttacaatatatattcaatacactcgaccccaacatcaattacgggtccgggtccgcgtctgagtcccgggtctgggttcgagtccgggtccgggtccaagtctgggttcgggtctgggatccgagtctaggtccgcgtctgggttcggatcccggggctgggtccgcatcccggtctgggtccgcgtcccgggtctagttccgagtctgagtccaggtccaagttcagggttcaggtttggggttcgggttcgggggctgggtttggggttcgagtctagatttaaggtccacgtccgggtttggagtcttagtcctgggtctgggttcgggtcccgggtcctgggtcctaggtctcggtcctggatctcgggtctcggtctgggtcccaagtccgggtcgaagattggtgttgaccccgaatctcttgcaaatattataacagaagctaatacggactatttgttatgtattaaataatacaacatacattgtattaaaaattttagttgtaataattaatacaatacattgttttatcaaaacataatattatttattatttaatacaatacgacacttatacggtataccaaactaaccttatttgtataatttcatatggagtatcagatatattaatttaataaaaattataaaaattcactcactaattataagtgactacaatactatcctccacttggacggcacagttagtattatagttttttattgaaatttgaaataaaataaaacaaagtgagcacgttgtccatgtgcatgctcttactaaaattttcaagtaaaaataaaagtcaaaggttgactcactgtggagacctttttgttaattggccctaatcagttttttcctaataaagttccaatttttatgttcttttagtcagttaacacttctaaaaaaaatgatatttactcttggagattgttcaggctcttagatcagatccaatctatgtcatcaacaacaacaatggacctttctttgttcactcccacaacccaaattccaaaccatcaactacccattttttctaaaccaattttgagtcccaaaatcaccttttcagttcccagaaagataaagcttttaacagttacaacaacagcaatgaaaaagccactcatcgaaggtgtaagccatgagcttaattcaattgcttctcaaaatcttgaccaagcccctgctcgtagaagggttcgattagctttcactcaagttcaacaacagcttgatcattgcttattcaaggttgtttttttattaatgatttgtttttattttcttttatgattgatgattttgatttttgttgttttgttttgactattggactgttattgattggtggatagttggctccttctgggattagaacagaagaggtaagcatcaaatatcatttgtgtttgacaattttgtttattttggcatgtttttctttttgttcttgttttaagaaaatacccaacttttattttgctcataaaaaaaacacccatgaataaagtttggacctttttgttattttattgtagtggtatgagagaaattcaaagggactggaaatcttttgtaagaaatggataccagaagaaagtgttgcaataaaaggtgctttgttcttttgccatggctatggtgatacttgcactttcttctttgaaggtttgttattattactcctttttatgtaatctttcattattcttctttcagtgtaatcatgaggaattaaaaaagggaaattgaatctttatgtaaatacattctattaaccagttttttagaaattcattttctattgaatgtcgttataagtgcatttaaaatgcattttttttttccaatcttttaaatccacataccattaggaagattgaaacaatagtatacgagtttttaactcaattttttactgcattatgtatatataagcagttttctttcacttgtataactatttgatttagttcatct

SEQ ID NO: 304222 - DNA, 2216 bp, Cannabis indica
taccactagaactagattcaccactagcaccgacaccaccattaccaccaccactcccactaccttgacctccttttccaccaccaaagctaatataaccactggaactatgatgaagaccgccaccaaggccaccacctacacctttactccaactagcagtagcaccatgcttaccaataccaaactcaaatcttccttgtccgaaaccagtcagtgcacgagctctacccccaccaccaaccttgacagggattttaaacgcatcataaatcgtagacatagatgacacaatcgccaaagcattgctagtaagcttgtcagcattagagagaccactcaacaaaatctccttcttgagttgtgaatcaaatatgccatcaagacaagtgtgttggtaagaaataacagcactcaaccaattgagaagatcaactcgtttgtcatgcaaggcatacaaatcacccgatcccacggtagaaaagcaattcttaagctcatccacagcaaatccaagcaaatccttacaatcttccatgaagatctttcttgagccaatggactttgctgctatgccaccagacacatctcttgcagtgctcacttgtttgatggttgattgtaaagccgcttggagaaaatccttggggtttgcattgttattggccacaacagactcaatgctctccatacatgcctctttgtgatcacatggctcacaaaatgtggttgctgcagcagcatgagatgaggatgcaaccaaaatgccggttagccgcgcgtgaagagtgccatcaacactctcatcgctccaaattccttcaggtccaaactcaaactcaaattgagcattaataatgccaatttgaaaattcacaccaatgacaataataaaaatcactaatccaaccgtgaatacattattattcacggagactagtcttggtatttttactttcccactcataaataagtaataattaattttaataattaagtgttgtaattgatcatcatcaatgtgttacatatgtatatataggtgattaatatgactaaatatagaatgttgtgataataaattatgtggtctacaaacaattggagctatcaataaggtagcatcgatcactaactataagatctcttaataactctatgcaccggttaataaggttggtcaacctcattcctctcctcattattttcatctctaatttattacttcttactacatttgttttctaataactaaaataacttttactaattataaaaacttcatatttgcaatgtacaaattttagataggtatatattattttactaaaattaattagaagtttggttcggacaaaattaattaagggtcattttaaatacagaatatataaccctttaattttatatatgccatttgtaccattgttagagaaaattttgaatcttattctagtcaaatgtttttgacaatttcttttttaaaaaattacaaaatatatcaaaaaaaaaaatttttaaaaaaattatataaatacgttaacacggaaaaattttcatttgtattatttaaatttttatttataaaaatacgtcttcagtaaaaatagtaaatcgtttttgttttttttgttttatagtttatttatagttgtcataagtttatttttctaattatttttgtatagttttatagtttatttaagttaatttatacttgtcgtgagattgatttctcgtttcttttaaattttgttgaacaaagtgtatttttgtaaatttaaaaatttacaagtatatttttataaataaaaactttaaactgtaaaattgtaaataaaacataaaaaaaatatatatttttgaaaatttcctccctttttaatgaaaaaaagtataatttcattgaattatagttaaatgatcttatttacattttatattttaaacgtatttttcacttattttaaaagttgattatttcgggtaaattttattagtaatctacaaagttatgttaagtttttttgtaaactacaaggttcatatatatgatgtttggtaacaacatataggtataaaatagtataaaatctaatttaagctatacaatttgagtggttttagagaactgttaattccatttttggcatatttaattgacaaaaatattttattatttattgcatatttcggctggcatatattgatatggt

SEQ ID NO: 304223 - DNA, 4284 bp, Cannabis indica
aaaacataataatatttactgtgcaaaaattcaatatttccttccacatgtgacttatttttacatgaaaaagcacatatggaatgccattaggtaatgctaatatcgaaaggataaatttgaaagatgctcacttgagtagcctttatcgtataaatatcagggtggtaactctcattaaataaagaggcaaatttttctctggtcctgactccaaaatcatacaattcctcttctcctttaataattaattctccacccttcactttgtctttccaaggagactcccaaccctgcaaccaagcaggaatttcctctaaagacaaaccttgttctttggcgtctctcacaagttctttgagatgagcagccaatctgtctaaatccctcattcgttttttagtaggagcacgagttccatgccttgcctgagattgtaaagttgcatcactaatttagtaccatttcacattttataaatacaatgggcgtgacatcaataaaaccaaactagcctctccaaattcaaaatgtcatattacacaaaaaagcgaccaaattaagctttcaaaaattaagttattttaatgtaaatgtgtagcaacaagaagcacacactgctaataataacatctcctaaacctggtaattaaatatggaagagggagacaataccacaaggtttaagtggataggagtacatccatttggaacatctgaaggttcaaatgtgctattagcaacatttttcaccacaccatatctgagaggaaagttgcaaaacagaaagatcagaaggattaacgaaaccagctacaacaccgtattacctaatcataaatccacattcataaaacagcaaaaccccatatattttgtccgatataacaagtaacaaccgatagtaatcgaaatttgggtttcttttgctggccatttcttcataaaactattgaattcatctagaagcatccagtttacaaacagtgagattaagcaaaagcaaaaccctaatcaatggtgaaaagagagagtatgtgtgtgtgtgtgtgtgttcccaaaataaaatcgaaactaagatgaagattcgacctggatacagtagagagataattgcgaacatcaaaatcttcttgttgagcatttgaatcagccaaaattgagaagaataggaggcaaacaatggtcagagcattcttgttcttcttctccattagcgctaaaacaaaatgagagtgagttgagattgagaggagggaataaataacagctttattacctgtcccaacccaaattactgtctcactgcctgcctgcacaactgctactaatcagccattttttctttctttttttatttaattaattattgaaaggcttctttcttcccaaaaaaaaattcttggtgctttgcttgtaagagtatctttttcaatcataaaatttggaataaattgtttggctcgaagtctaagctattctcttttcaagatcacgaggttctcctaaatttcgccatttaagtaattcttacctatgctatgagtttacttcggcttccggttggtattataaataaaagtcataggatgtgtgcacaattttgatgggggagtaatgatgataagcgtaacactcattggtctacatggtcctaataactctgttgtcacaaagcgaatggtgaaatgggttttataaatatgtttttgtttaatcagtcgctcattgccaaacaagttggtcgtctacatgattgcccgaagtctctgccagctagagtgatgaaaggcttgtactacccaaatagaactattgtggatgttgaggtaacaaaatgggcttcctttctttggaaaagtttcctttggggcatgaattatagaaggaagaggtgtgctggcttgttgggaaaggtgatatgatcaggattcttaaggattgttggatatccaaggatcatgtggattgtgctttctcatttaatggtggtgttgaggttcaaatggtgattgttttaaagttggagtccggagggtggaatgttccctacattttggctcattttgactctttggaggcaaaggctattctatctattcctattcctactcctactgttgaccgagaggacagacttttttggaacttctataattatggttgttatacggtgaagagtaggcattggagtactgtttctcgattgggttgggggcatgagacgtcttccactagttcctcttggtggtggaagtatttttgggctctcaatcttcatcctaaggtgaagaattttatttggaagacctttcttaattttatccctacttatgttaatttggctcaacatggtatgagtaccctggatgtgtgctcgatttgcttgaaatttaatcaaacgacacttcatgatctttggtaatgtccctctctcaaaggaattcagaaagggtggggaattcaatggttggataaggttggaatggctacttctttctatgatcttgttgttggttgtatggcgttccttcataaacaggaagttgaagaatttcttataatttgttggaggatattggcatcgtcggaggatatgtcactatcattgtttgataaagcatctaataagtaagaaacttatctgcggtttcaagggagtaattactcattcacaataaccgtaatgactgtatctttactcattctcaataacggtaatggttgtatctttacctcgatcataatcgagccacacactataataatagttttctcacttaacatgcttagcagtgcaaatagcttttcttacctcaagtccaaagtcaggtgtgcagtctgacctgagtggaacgatgctcgacaatctcgtgtcctatgtcacgacaaaggtaaattaataagggtctattccaaaatactgtctaaaacccgcataaaataacctagggttttctactaaatcttatggtaaaaaccctaaaataaaatacatcttttcgctctgatctatgtctcatactttagagctctttataagcttcaaaatggtatatcaaatgtctaaaatagacactcgagtgaaaagttatggctaaaatacgaaaatcggggaatcctggaaaattgaccatccggaattctgattggtgcagccctgtaccatccaaaattccggttcaccacaggagaaactcgaaaatttcaaatctttaaagtcccaaaacttgctcaaaacctaaccaattattcccaaacttaacaaaacagttctataacatgaatacaacatatctcaacactcaaaaccaacaattaacttaaaattacaaaaacaccattgttgagtgagttcttgagttcttaaactcaaatcacctaaccaaagcataacagtcccctaaaacttgaaattaaaactttaaacaatctttaattaaatccaagaacatgctctgaactcaacaaaacctacagatttccaaaatcaagcaaaatcctcaaaaatctcaacctaaaatcctaaaaatcattaagaataagtgaagaaacttacctcaaattttagacagctcctagtgttgattttcagcaagaaatgggctgaagttggggttggttttgccttgattctgctgggttctaagggcttcgaaagggaagaagagtgtgagaaagagttatgtgacttttcttgatttttgatttttctatacttatctatctaataaattaaaaataacataaatctaaaaaaaaaaaaaaaaaatctatttcagcctatagaagacactaaagacaaaaaatactataccactctataaaagactaatatgcccctccattacatacttaaaaaaataaagcctaagggtattttggtcattttctagctaatcctgctctaccaccaaagcaacaagaaccaaaacagtcaaggcgcaagaaagcaaagacacaacaacaataagagcattattgaatacaaagatacaatttcaataaagaaaacactatattagattttgtaagttctaaaaatgatttcaatatttttttaacatgaactatatcttcaaacagtattgattttgaataaaatgaaaattttaataacattgaattgccttaaaaaataaaattacaacaataataaaaccagttatattcaacatgcacaaaaaaaaagtaatcaatgataatggaaccggttatattaaagatgtaccaacaaacataatcaataaaaaaaaatcggttctatataatagatactaggat

SEQ ID NO: 304224 - DNA, 4913 bp, Cannabis indica
gtatattttattacaatttaatccgaactccccaagaaataagccgccaataccgacacaaatacataaaaaaatatttaagacaaaaataaaataaaacaaatattaaaaaaatggtcattttctaataattgcttaggggactttcaacttgagtttcaggatagcacgaaaccataaacaagctcagccatttcttagagagagaaagaaaacacccaaggtagttgtgtgagcacgttttggaagagagagaagtgttttcagacaaaagggttgatatcttagcaagaaaggaagcttttttcgtcttcttcattgtcttatgtcattaagcttcaaagttatatatatcaatggcaaagaaccagacccagaaagactttccttttcagcatcaacagtaccaccgccggcgcgtcctagtctaacactcccccctagaccttcaatggaaacctttttcagcgaaggagctggagctagtccaggaccgttgacccttgtctctagattctttgataatactaacccagattcagattaccgttcttttactcagttacttgctggtgccattgcctctcctttagctagacccagttttaattttgagaattcgtttgataattatgggaaaggtggagatgggagggacaaggattcttctgggtttaagcagagtaggcctatgaatttggctgttggtgctaattctccattgtttatggtaccatctgggttgagcccttctgggttgttgaactcacctgggttcttttcccctcaggtatatttatatatataatctcttgaatccgatttggtctttgttgaattttgagttttgggttagtacttaaaattatgtgttgtttgttttgtggcttaaaagggtattgttactattaaccccatctttatattttgggatttttattagactgaaaaaatatggtctttgagttgaaatttgcacaaggggttgttcaagtttccattttgatgattcattttttttgtctccatacttagacacattggtagttatgtagttcatttgctttgtgttttcatactaaagagttgtgtaacacgttcaaccaggtaattatccagtaatcatgtagtttgaggtaattgagaggccttaactatactctccaattgggtgtaattacactatgtaattattaactcatttgctaaacatgaaaataagaattcgtatgttgttactacttgacattcaaacacacattccattttaaaataaagtgtaattaatctaatttgtaattagacagttacttccatacgcaccctaagggattgttcaattttccattttgatgattcattctttttctatccatagttagagacacaagtagttatgtagttcatttgctttgtttgtgttttcaagagtccatttggaatgtcacaccagcaagccttggcacaagttactgctcaagctgcatttgctgctcagtctcagtttcctatgcaacttgaatataaaccttctatagtatcaacagcagcctctactgggacacacacacagtcaattgagccatcatatataaaatctgaagtgtctcaacagcaacagcaacagcaggctgtgccttcaacttccgagcagatggaatcatcggggccttctcattctgataagaagtaccatgctcctcctcctcctcctgctactgctgttaatgataagcctggagatgatggattcaactggagaaaatatggacagaaacaggttaagggtagtgaatttcctcgaagttactacaagtgtacatactcgaattgccctgttaagaagaaggttgagaggtctcaagatggtcagataactgaaattatatacaaagggatgcatagccatgaaatgcctcaatcttccaataagcgcgtcaaagatagtagtagtagtgatgcaaatggacatgggaatgttcacgtcaagtcagaaatgaattcacagaacaggaatggtggtggaaatttgcagaggtcaaatgaaactggacaatcccaactggggtacgaaagggatcgtgaatctgcacaaggcgttcttgtacaggtaccgggctcaagtgatagtgaagaagtggttgatgccgatgtcagagaagatgaggggaatgctgatgagccaaatgcaaagagaaggtaataaagtaaaataaacatcataatacttgttgtacactttttcgtatcatatgtttcttagtatggtatgaaattcaattgggagtacaggaacatagaagttggaacatctgaagtgtccttgtcacacaaaacagtcacagaaccaaaaatcattgttcaaacacgaagtgaagttgaccttttagacgatggctacagatggcgcaagtatggacagaaagtagtcaagggcaatcctcatccaaggtaggaacttttttcatgcatttgtgtacttttattatatccggatagttctaatgattgtcttataaatatttcagactgcttagactaaaaacgtttcttttttcaccgtgatagtattgttaaaagatcttattttgattcagtttactagttttaagattttctgtgtgcccatataatttcctttagagcttttcacataggtagactagatcccgaatcatcaaattattaggtgtagttggatctctggtcaaaatgtttccaattggtaagttctgtcaactattaaaacataaaaagtattgtttgaataaatagaggaatcataaaagagatatgaagtaaaaatagtgaaaaatatcctattttcttactttacttcccattgtttagccaattacaccaaagagatggtatgttttctttcttcttagcaagatattgcctcagaataacagctgaagtaatgaattcatctttggtttgttaaaaaaacattactttagatacatggtttcaacaacagtgaaggtggtctttaatggaatttcattcaatttgaagtcttttgaaaccttgtggctaatgtggattttgctttcttttcctttcaaaacagtttcacctaaaataaatttcaaaaggtttctttattggttacgcatttaataggccagtgctctgtatgtacctaccttatctaaatctttagtgttgagtgtcatcaataatgaccccatttcatatggtgggttccttcccagaaagttgtttaccgagtaaattgctttgctttgcgctgtagtgttgctcgttggcatgatttttgtgatgcttgtctgtttgtttctttacatattgagtaatttacggtgtaaatacttaaatttaatttccggttacagataaatgctattatatttttggaacttccgtaaatatccgaccgttaaatgccaagtcaatgaccacgtggtagtctctgactggtgcagttcattaaattttgtttttcatttaaaaattaataatttggatcaataaaaaaataacacgtagatattgacttgacacttaacgattaggtaccttacagagttatagaaatataacttaagtatttatctgtaaccgggaattaaacttagttattcatgctgcaaattacccttcctcgatacatttcctctcttttcctcaataaaaaaaacttttcattttcaggagctattacaaatgcactagtgcaggctgcaacgttcgcaaacatgtcgaaagagcttcaaccgacccgaaagctgttattactacatacgaaggaaaacataaccacgatgttccggcagctaggaatagtagccacagtacagctaacaataataatccacatagttaaaaaaaccagtcaacaaggatgaaaaacaagtccttttgcagcaactgaaagatgagaaagagcaaaagttacctcttttaagtggaatagtcgatttcgatcaactaacatggggcaacaaaatgaagaaatttaggggaaaaaatgagatcattttgacaggtttttacaaggggtaatagttgctgatttgtatgtttcctttgttttctttacttgtttatgcacagccacaataccttacttgaggtcttgtacattattaatatacattatgaaatgttgtttatatatataaatttatatttattattattattattacctactagaatgggagatggggttgtttactttgctgttcttaaggcctagtttggcagttgaaatcaaatcaaaattttctgtaccccttttgaatgataaacacctattacagttctaatcatttcaattattaattatcatttctttctttctttgttgtgtaattattaatagtttattattttgtttattaaaatcacagaaaaggaaattagaatattttattttgtttgcatagaaaaaaattaatcaaaatgcatttacttgattatattgttatttataaaaaatataattattttttatttataaatttttgaagaagataattatctttgttattattaattaataaaaaattcaaccaatttaaataaattaggaaaagaatgtcacaccttatgaaattaggagtagaacttttccttttattttctctttaacttagttatgtgagtccaataatttatcccattattaaagttaaagtaaacaaatatagaaaatacaatacgattctaatttcttttaagtaaacatgaatgtaccatatatatcaggaaaaaaatggctaaatggcaaaattgtacaaacctataaaaatattatttaatcctatatttttttttgggatgaattataatactatactactttttttaaatttatagtttgaagttgttccggtaatttttaaagtgggttattaatatgggactttgattgcaaattt

SEQ ID NO: 304225 - DNA, 3380 bp, Cannabis indica
aataaaaaaataatagtttttgtatattcttaataaaatattaaataattattaatataataattttttcacggatcaaatatagcctttttttttgtgtgtcaaatttaaaataaatttcaaatcttttattagagatggtctaatatttgtgaaggagaaaaaaatacgttaggtgtagataagaaattattataatagaatgagaatctgtatactctttatgtaattttatggatgtagcaaaagtaggttaatactaaaattataaatgcattgagttttaatatgtaatgagctgtaaagtaatatataataattagtattaaaggggaagaagatggatatttatagagaggtcacgtgagtagagtaatgtaatccagggtagttacgcgaagatagcacgtgaacactgaaatagagaaagcaaatgtaaataaaagcaacggcaagggcatagttggagtggaaaagaaaaccatctacgaagtcggtggttgtatacgtggcaacatctggttgtgcaatggggagtataaaattacgagggtgagagaaagagagagtaagaggagaaactagaaagagaaagaaagagagagagagagagagagagagagagagacatggagatatggagatagagagagagagaggttgggggttgatatttgattcagttaccagcggtctctaattcgcttggtgcaggtcggaaccggttcgcaatgggattggattttttttttggagcgaaatggatcccgccttgcatcaactgaatcggagaccgcggtgaggagggtttcctatgcttcaatcttcgtatccagattcatatgcatttttcttctttcttatgagttcagatctcatctcaggttctattgatttaaacttttttcattctttctttgttttgaattttttgtttttcgatttgcaagatctacctacttcttgattacgttttcgattcaattagacactgcgatttctgttttcttgcatttatgtgtgggcgcggttgtcggagtttggtttttgatgttattatactgataagctgcctttaatttcatttggaaagggatttatgattttgtttgctcttttttataatttaagagctgactgactgagcatcttattctttgtaaatcgaatctattgacttctcactcgtactttagcaaactaaatgtgaaacagaaaataagtatataccaataataataataataatataatttagtagttttattagctaaatcaggccatctattatttggcaacattttttcatttcggttcttcttatggtatgagttgttaacattagttaattctttttggggtcctccgcctattttccccataaactcacacagctcatatgccattattaaacattgctgcttttttttaggctgtaacagtcgaaaacagattcaaataagtgattacacacttggagcctcattcccactttggggaaattcttttcttaagcaatgaaacaaagaataattaatacgaatagcattagaatagtagccctgattttattaatttatgtttgtatttccttttacttttcttagtttcttttttatttttatttttatttttcttctcattgttattaatgttttcatgtaaaaaatagaaaccttgtcagacatttagtttaagcagtaggcagtcggcttttaatacatatagcatatttatatagccatgtgtgtagaaaatccgagtgactagctcaaatggtttttttttttttagttcaaaatttttgtgtgcaggagaggactgtatttgtgctttttttttatgctttaattttagttttatgggggtatactacattcaaggttgtccaattattatgttatgtggaattgaaaagtacaggtggtccaagttttctatttcgtgctggacaatgcagcaatgaagcctcattgtcttggtaattagtatcggtaccagtaagtcgtcattgcgtatatatatattttccacttgtttggtttgaattgtcaattacttttcatcgttaccatcagaatcagctatcattacaacatgtgcctttgaaaaaataaggctacattatctatgttaaagtcaaacatgtcgaccaagaccagtagaatagaagtaaagaaaaatatgatgagctttactttctgtctcgctcctataattggaatttgttatttattatttatggttggatatataacaggggaatggtgaagacttaacttatggttccctataatacttcagctctgagaaaatacccaacttgtgccaaaaccaatgcattatattaatataccaaaccgaaagatggagtgagaaggagttgacaattgacaaagttggaatttcaactcaaacaaatgatctttccttccaatatactaagccaccttgttccatgaacaaaaaaatctataaatgggaggcaaactttacatatgtttgaaaaaaacgaagagcatttcctctgcacatgtgtactgttttaattcctagtttaaaacatatatatatttatatatttatatatagagaaatgctaaagggtactagtggtgtctagcatcttcttatgtgtcagtattgctattggtctaactaagtatcgggttccacatagtttaacatattagtttttaggaagtatcgttagccaatcgcaacgtgacatgtcgagaagatactagacaccactggtgtctaatagcaatgctcttatatatatatatatgaaaagaagagaatatgttagcatttatttatagtatatgtgaatgtaagatcctcatattcgaggcagatgctattatctatgcttaacttgcttagaacatggtaatattgaacttgaaaccgaataaacatattttattattgtataaacatatttcaaatactcgagaagggtaatttgttattgtagatgtagagcattgagaagcgatccgtcataggacaataatcatagagttatttatatgttaaattttgcatgttgtacttgatattaaatttagtgtaagccttgtgttgaagaattttgtgatgtgtgaagtgttatagaatacgtataacgatgcttcggaggtgatcctaattcctattatgttctttttttagaatgatttttgttttaggtacaatcctatcttactataataatgataataacaacaacaacattaaagtattgttacccgcattttgacattatatatattggaaatgtttatggtagagtttttggttttatccctataataggaatatttttttaactcttgattgttaatctaatggtaataaagttgaggaaatat

SEQ ID NO: 304226 - DNA, 3728 bp, Cannabis indica
tttggtggaagctcccccttaggactataccctggaggtaaagtcatatacacttcctcattaagatctccatgcaagaatgcattattaacatcaagttgatgtaaatataccatccatttaagcacaagtttcacagtgactaacttagtaacaagtgcaaaagtatttgtgtagtccacaccttcttgttgattgtaacccttagccagaaaccttgctttgaacctctcaatagatccatcagcattatatttgattttataaacacatcgacagccaattgcatgatgttcaataggtagggaaactatgatccaagtgtggtttttctcaagggcatcaatctcacaatccatagcactatcccaaataggtatgcccttggcttggctgaaaaattcaggttcataatggctagaaatggccaaaataactgctcgaaaagtagatgacaacctgctataatcaacaacctgagaaatagaataaggtgtaacctttgaaggttcctgcaacactggacagagttagtttgagctaaaaaacagtgatcatcctgtaaatatgagtctgtcattatctaggttattctgaatagtagtagaagcaggtttaggcatatcattgggttgtatggcaggtgtcgacacaaagttattaggggatgtgttctcaggctgagaaatatctgcagcagatgcagaaaagaaattttgatcctcaacagtaaaggcatcaggagtgtgaaatggaaaaatagtttcatgaaaatgcacatctctagaataaaatattatgttagaattgaggtccaacaacttgtatgctttcatgccaatggggtacccaagaaagatgcatggagctgcccttagggaaaattttgacctgttagcagacaaagtggaggcataggccaagcaaccaaaagcttttagatgagtatagtttggaggcttgaattaaagaatctgaaatggagagatattttttaaatttggtgtacgagtcctatttatgagataggcagcagtggaaacacactcattccaatacactaaagggatacaagattgaaataagagagcacgagcaacatttaataagtgttggtgctttctttcaaccacaaaattttttgggggcctatgaatgcaagaatggtaatgaataatgcaaagactattaaacaacttagcaaactgcaattccttagcattatcagacctcacagctttaatagtcttttgatattgagttttaatgagctgaataaagttaggaatggcagtttgtgcctcagccttatttttgatgaaatgaacccaagtgtacctagagtaatcatcaacaatagtgatgaaatatttgtgtcccccaacagtaagaatattaaaaggttcccaaatatctatgtgtataatatcaaagcattatttggcaatattatgattagaaacaaaaggtagctttctttgtttagcataatgacaaatagagcaatgtaaattgggacaagattgaccttgaaattgtaattctttattcaatgaatgagtttttatacaagagggatgccccaatctataatgccaaataatatcatcatttattttggaatcaaaaaacaaagaaaaaatttggggactgattttctcagcaggctcctcaaggtaaaacaagttcccaagtctcctagccatcccaatctgccgtgtcttcaaggttccttgaataacacaatggtcaggagaaaatgtgaagacacaagctctagtttcaagcaaggatgagacaaataataaattaagatagaaatcatggacatacaaactatctttaagaacaagattagatgaaatgacaatggttcctaggcaagaaacattaacagcattaccattaggcaagttaacacaagaaaactttgaattggcataagtattttgaaaaagagatagattgtgacacacatggtgagtagcacctgtgtcaagaatccaattagaagagcttttaggaagagttttactagaaaattgtgaaacagaagattgatttgtctgctcattattctgttgttctctacttttttgagacagcatattcatcaatctttggcactcagcaaaggtggccatgaaatcatgctcaatgttcttcccattccattggtctccccattcttttgagcatcagaaaagttagtagcatgagtcttttcaggaccttgatttttgtttgaaaatttcccatacagcttgtgtcctgggggtatccatgcaatcggtagtacttagccatgatatgcccttgcacaccacaatgatgacaagtattttttggtatgtgaggctgaacacttccaataaattgtccagaggtggatgatgtgggaggagcactttcattgcctctttcattgttgttgacagtaatccctctctgcctttcttcttgaacaacagaagcaaaggctttgttgatgttagggaagggatcctgcattaaaatctgagatcgagctccactgtaggattcattcaaactaatcaaaaattcaagaacacggtcttcatcttgatatacttgaatggtcttcataacaccacaagggcaaatgggttgtggcctaaactcttgtatcaaatcctagaaagattttggatgagtgaagtaagtagtaacagagttcgatccttgaaccaaggcttgcatagatcgtttggtttcaaaaactcttagcgcatttttctggtggtatctctctagagctcagtccaaatcttagcagcattatcaaggtatatcacactatcagctatctcactcaaaataacatgtaaaatccaagagatcaccaggctattgcatcgaaaccacacatcataaacatcatcatcaacctttggctcacgtaatcaaccatcaacgaatttgattttgtttttgctacaagagctactatcatggatcttctccatgaactataattctcgcagccagtcaaaatcttgggaacaagattcacaacagattgatctctactcgaaatgaagtagggacttcgaggatcctcacttggtggtcgattgttcggttccagaacagagaacctatttgcagcttgagattcatctccttgattcgttgagcttcgagtgttggttccaccacgagccatagacccagccacgaacaataaagaatcgaaaaaatggagctcacgagagtcgtggctctaataccatattacaaaccagaaagtaaaaacgagagagaaagaaaagaagaagaacagagtaaatctttcttattgaaacagagaaacaatgagtgagtcttatatagctcaagctcaatgaaagtacagtacaaaaaattagttacacaaagaaaacaactaactaacataactaaccaaccgactttacaacagaaaataactactaaaccagtggtagtaacagtagtgtgacaactaacacttaatactccagcaggtttttgttttgtatttagataattaaattatgtagctcattattatctagccaagttaagtattactcttgaaaatagaataagtgctaagcaggagcttctccttgttgctagtgctgcacatttaaattttttttcaaaaaataaataaatatttaagtatggttattaacttgtagtaaattaatataatttttcaaaataatttattacataaaaaa

SEQ ID NO: 304227 - DNA, 920 bp, Cannabis indica
ggtcgtgggtccggggtccgtgttccgtgtttggatctgggtttgggtcagagtttaaatcttctgatcccaaattaacggtgtgtttctgtagaagttgattctttagaggaaaaagaaaatcgtggagatgataattgtgatgttcttaatgatgtttctatgttaaaatttgtgttaatgattctttctttgtgatattactaattggaagttatgagactgtttggttgtgtttttcagttttgagtttttagaattgtattttcaaaagtgagaatagaaaataattttttgtcattttaaaaatttaattgtgtttggctcacattttttttaaactattttaagatttttttttactaaaaataaattaatattctgcaacatacaaggatatgacacatcaccttgaaccgaaccacagacctagagctgaagccgaaccccgaccttagacaccgacctggacccttacctggaccctagacgttatacctagacccatacacaaacttagaactagaacctagacccgatcttgaactcggacccagaccctagacctggacccggaccttagacttcggaccctggacccggggcctggacctcggaccctgggcttgaactcagacttggccgcctcgggctaaaacctcgaccctggtcggggtcggggttggggtcaaggtcagggttagggtcggggcctggggtctgggtccaggtccgagatctggggtctgggtttgggtttgggtacagggttcgagtcggggtcgtggtcaagatctaggtctgaggtccaagatctgagtccgggtctaagtcttggttagggtccaggtctgggtctatgtaatacccggaattaagaaaaaaggattagcaaaaccctaattagataattatgagtt

SEQ ID NO: 304228 - DNA, 3072 bp, Cannabis indica
taaagtttaggggtaaaaatactaattagcgtaactgttatgcatatgaaactgtttcgtttctttgttactcatttccattgctttctttttcaatggctttctagattctttcatcatgcgcatctaacaaatatttccttcagagttcacaaccatggctggcaggcgccttcgtgaggctgtcaaaactgtgcttatttctgaaggaaaaggtgaattcgacagaaatatccatgtagtcatagcagggctgactaatacatattcacagtatgttacaacctttgaggagtaccaggttcagagatatgaggtctgcattaactatttcacaagaattatagcttataacgaattatactattttcgagttactgaatttgtcagcctgaatttaatgaagtaaacttccacttctccattctgatcagtattctaaattttagggagcctccactctttttggaccacacacacttgaggcttacattgaagagttcaaaaagctagcctcagctctaattggtggacaaaccactgaaccagggccacaacctccaaacctcctcgaaaaacaaatcagcttactgcctccagttattgtggacatgactcctgctggtgtgaactttggagatgttaaaactgatgtccctccaaagtccactttcaagaagggtgacatggtttcagtcactttctggtctgcttgtcccaggaacgacgtcatgactgagggcacattcgcactggttgagtatctgcaggatcacatgacatggattccagcctatgacgacgatgactttagccttcgattcaagtggttaagacccaagaaacttagtcctcagagctatgcaaccatagaatggaggatcccagaatctgcagcttcgggtgtatacaggataacccattttggtgcttctaaagcacttctgggtcaatccgccatttcacaggttcttccagcgctttcatgtggcatgaggaggaggctgcaaagcacacgacagtattcattcattcagtctatctttaaattggcttatgtttggacaaacaatgatataatttttgtagtttatttaacaagagaacacaaaattatatggtattgcttctaccactaaatctattgcagttgctggagtgaaatccaaaaactaggaaatcaacaatagaaaattataccctttaaatatttataggcagggaatgaatactagcctgcttcatcagaaatagacaagcatgaactgcatattgtactactaaatccagataatagttgattgtatttgcttgatcagttatactttaatttcacattattctcttcaatagcaagtctaaattttcttatatggaaatcttgtcaaatcaaacttcaatggcatgtttacttgtggtgtggataaatgtataatgggaaatggtaccttagaattatcactcacatgacaaagaagtataccaagtttttgaccttacataaaagtttattttcataatgtacactcatttattggggttttaaatctcatatagggtagctagaagttggaaccttgatcagcccactggccaaacaagtggtccattaggattctcactatattcccaatcttatggtaattgttttacttttctttcaaagttaccaatcacagcatcttcactttggtcagtatgattctttttatctcttatacaaagtccattaggcacctctcaaccaaaaaaaaaaaaaaaaattgtcacccatacacatctttgatatataacatcattcaagatggcataatgtaatagctttgttcagcaaatctttccttggctgatttatgtaaaatacaattctccaactaccctttatgacactaaatggcacttttacccaccaagaatgaattctcatagtgtatagtatatgatgtgagaatctcattcccattcttcaatactttgatattaagacttttattcccatattactttttgaaaagaaataatgatgatatatgcatacataatacatgtagtgttgtaattagaaagaaataaggagagaatacactattggtagaaggagagaatacagtttttattagacaaagactttggttgttgcaccgaaaaaaaatccaagcaaaaaagttgtataaggttgttgaggttaaataataaaaaagctgcttgttcggttaaattgtacatggccattaaggccgaacaacagaatctgctcgacactcctgccagcagcttcaccaatattctctctaacttctttttgcctcttttcaaatttctccttaacatagaagtctaccaggacccaaaaaaattgctttcaatctctttccgactctagaaggtgatggtcaaaactgtcactgtcgagctggtcgatcggtatagtgattgtattggaagaaaaactccaaagattcgggaagacaagagatttattttctataaacatgacatctatacaagatagatcatctgagtaaagccacgcgtcgcctgactaggcaaaggaagaagctagaaaattctcgtgcaaccggaagtctctacacaaacttaagggtaaagttattgcgaaaatcaccctgacgacatgacatgatgttatatgacacgcgacaagcatagtcagcattatgttgataaatgatgaatataaactgtatagttcttaatttaagatttaggaattgtcgaaactctcgatcgacataaactatttagttcttagcaaaaaaaaaaacataaactatttagaaatgttttaaatttattagaaattttaaataagtacaatatacacaattataaaaaataattaaactgaaaaactcttttaaataccgatcaaaacaactattttaggatatcctatacattttttcaaagatatattttattaattatttatataacgggagtagaaaatattgtgagtgttattgtattgaaaacaatattaattaaagggtaaataccattttggaccctctgttttacaaaaattattaattggaccctgtgttttgt

SEQ ID NO: 304229 - DNA, 2766 bp, Cannabis indica
tccacgtgtcccctcttgactggtccacgtattttgggcgaattttggagcaacaatatgtacgttcactttcaagaaaaatatcttgaaccgtccaattctgagaaatatcaaaaaagttatggcgaaaacaatatcggtcgtcgcaccagaaagcttgtatagcccaaaaaccaagtacccggaccgcaacattgaaatggctatgtcgcgacccacctgcttttagaggcctaatagggtttctaaaccctaattttgaaaattaaaaggggggctttggatatacaactttggaggcaccaaatttagagagaaaaaaagggatttttctagcataaccattgttcttcatcaattcttctcttctcttctatcttttattttatgtttcctgtttgttattagcaattgtttagaaagacaatgaggagttaaacacctaattagggtttttaatggatatagtttaattcttttttatggtttgatgcaattttaatttttcttcaatttcttatgtgaatctatttcattcgtgtttaatgtttataactgcttgatccaattatttattttatgatttcaatgcaaaatatgaaaatagagtattgattatgctatagtgaaatagacatagatttcgtatttgataaaaacacctgtatggtttgtgtaacaattaggatctttatatttaatgcttatatggtaatttaccacaaaagtgtagggtttttttttcatatgatttagattctatatttcctaataagaatatatattgaattttaatccgctatcacataaaattaaaagagtaattagattgtatttttccatagaaagttgatgcgaagttaaattttctatatttctaaatcgttgttatttgcttcttttatttatttgtttatttctattatttttgatactttcaacatcaaattatttgtctgacaaatataaacaaaaattcaattatttggtacttagctacagtttttgtgggatcgacttcactcacgcgagtttattacttgaaaacaatacgtatacttgtgcggttgaattttcactatttattgagttaaaaatattttattattatttacttagcttttttatatatacgtgttatattattatattgtattttataaaatgaataaaatatattaaaaatataatatttaaatgatatagagaaaaatagaaaaatcatgatgtaaaaatttaaggtattttaataatgtattttaaaaaataaaatactaaatgtttgcatacactttttttgatgaatttcattttgaaataaaggttcaaaccagagcaaaaaaaaaaaaaaacaacaacagagagttagatggccacaaaaggggccaactcctcaactgacaagaaactaaaaaaactagaattacaagaggggccataatcccctttcctcgaaagaagcattggggattttagaggaccaaaaagaagtatctagacctccccaatgcttagcctaaaaaactctactccacatagaatcgtccccagtagcaagtttccacccaagctctgtcaccaaagcgagattgacatctttatatcttttgaaattgagacctccaaaatcaaaagggaggtagagtgatttccaatttgtgagagcaaggaagcgatccttctcggcacaccccgtccaccaaaatttgcaaattaccttgtccaactcttgacacaaggatttcagaaacaaaaaaatcgccatagaatagattggagtgcaaagcgcgactgaacaaataagggtagatcaaccagcttgcgaaagcaagttacacctccagtcttcgatgcaagaacagatctgatctttaagaaacttgaaatcacgaatcttgctatttgaccaagccagcagatttcccaaggatttatcctccctattaagctcacggaaccccaagctatccacaattcatggataatattctgcctagcattttttgaacagatgtaggtagatttatggacattcaaactctgtcccgaccacaaacaatacatgttaatgcactccttgataacttctacctccgtcaaatcaaccttgcaaaaataaatgtatcgtctgcatacatcagatgggagatagtcaaactgtgggtgcgaacctagaaaacagagatcaaaccttgctcctcctttctcaacaacatacgggacaaaacctcactaaagaggatgaacaaatatggggagatgggatctccttgtcgaagcccctattgagggagaaaatacttaagcggccccccattcagtaggacaaatatagacacaaagttgacacatttcattacaaatttaacaaatttagctccaaagtcaaatgccaccaaagtcttttcaaggaagctccacctaagatttgatcataggcttttaacatgtctaacttgtccaactctcgaccttaagccttttaaaggaatccaaaattttatgaaccataatactattctcggtaattcatttactgtgaacaattgtagattgaaaaggagaaatcaaatctttgaggagcgatcgtaagcaattagctaacaactttgctacaatcttgtaggcgaaatttcacaagctaatagaccaataatcgtcaaaattattagctcctagttccataggaataaagaccacaaaggtttggttcagagctaggggtgttcataaaatagccgatccaatccaatccgcacgatccaa

SEQ ID NO: 304230 - DNA, 2863 bp, Cannabis indica
agagatcttgaacggaaggagtcattatattctgctacaaacaatgtaagcttttcttcaacccttatgtgtttatttcatggttttagagaatttatatttaggatgttaatcaacatacttgtaagtaaatctatatcctggtaaaatattcccaacaacattatactcctttgtctatccagaacctaatacactcttggtcagctacatgcatcttaatctggttgcaactagagtaagcatccatgaaagataacagctcataaccggacgtggcatctgccatttgatcaattcgaggcaaggggaagtaatctttgggatatgccttgttcaagttcgtgaagtcaatgcatactcgctatgtcacattgggttttggtaataggactaggttagccaaccactctaggtagtagacataattgatgaatatatttaacaatattttaatgcttctaattttacagggtcaaggggacatctcttctgctagatagttggcatgttcttgttaacatttaacacatggtagatggcatttgggcttatgtcaatcatgtccctatgacaacctgctttgatggtgttcactatttcactccttttgttgggatcaatatccttcccaacacaaattaccttggttggatctagttcacaaatttgaatttattctatctcctccacgggttccagcacagtcttagcccctctagggatctaactcatcttccattcacatcaagtttctttccttgttcagttgaaccatcaagacaatttctttcctagcctctcattggtttctctgaatagttcccactcctgcgacatgggtgggaacttgaggcataaatgccagatcgaggttatggctccaaaatctaccaaacccggacatcccattatagcattataagttgttgggcagtccaccacaacgaatgtacaatatttgaatgtgctctgtgtcagggcataaaatcattgggagccatatttttcccatgggtatgtgggaatttttattgaatcttgtgagttgaggaccactcagggacaaatcttagtctgtgaggcctatggcaaggaacacttctttgaacaatatgttcaccaaactcccattgtctaccaatatttgagcaagtatcttgttggcaatgggagtctcaatcaccagtgggtcatgatgtggaaaatgcactgtccaagcatcttcttcagtgaacattataggttagtccatgagatgaggtctttgtgtcgatagctgacttacttcccagacctcttcatcatgatcaagggccctagcataaggaactcattatgggttgatcctccccccccccccaccacagggtcttccggagatcatggctactcttccgttcgacctaggtggttgttcgggtggtaccccttaatggttggctggaggtactctcagaggttcttgtacatctgaagcttgaatcactcctccaggaggtgcttgagctccaacttccccctctctcatatgaggcaggcagtttcttatccattcgtacaagtgtcctaaccgtatcaggctcttaatttcattcttcaaatttttgcatacgttagttgtgtgtccaatatcattatggtactcgcatctcttattggggtctcttcgagaactatctcagaataagggaggtggcctccggtagtgaacattttgtcatgtggccagatacacatgttcttgagtgttatacccatatttcgagcaacaatatggtgctgacacgtgtaatatagctagaatatgaaccagtccaaattatacaataataaatatattcagacgactctccttaagaagtacagttggtagaaatattcgaactcaccctcttaaagacaatggcgagcaacgaataataactaatgactaatgagaccaacaagtcgaacaaagaaggtccatatcgggatacacataatacacaacagaattgtttgaaaaggatagataatgaattatccaaagagcttgcagcttattgattcacatactcgtgagtatgttgaaagactaaagacaacaccttcagcatggttcacctcataattgtcagatggtgataaacgtctcgcttatgccttactcaacattaatggaagaacgtgaggaatactgcgtcatatacttagacattgatttatgataaagtgtctagaagaagattgttgcattgcaagaagaataaagcatagtcagcataactgtctatagataaagttaaaagagcggttatgggaagttacttgtaattatcccatgtgtgtaaatatgaaacgtgaggattgtccacgtttcacgagcggttacaagtaataagatcccaacggaataactgttatcctagactcctataaatagggacaaaacctaaggaacaagggacgacaaatttcgagaaagaaagaaaattatacctgtaattcattctgtaaaaataatttattgtattctggatacaatttatcaatccctgaataagatagacttgtggactatgaagagttaactttaaaaccataaaattgcttaattttttcacaagaaatccaaaaaaatatttttagaaagaatataaattatttcatggaaaatttcgtaattcacattcaatcatcaaataacacataaaccaacatgaacacatccaaattaacacaaaacaatatcatcattataaatccatatttcatgaaagtaaaatcattaccgtggctctgaggctagttgttggtaatatttttaccaggtatctagatttactaactaagtatgttgaattaacatcctaaatatgaa

SEQ ID NO: 304231 - DNA, 4073 bp, Cannabis indica
ttttagttttaaaatttaaaaaaaaaagtatttgtttttttttttaattaattttcgtttttgtggttaaagtcttctcatttctttgctttcttgttggggatcggatctgaaactcacccaagtggaaccaaaagactcatttacgttctttcttccaaagtcactccacttttttttttcctctgtcaaactttctgagttcttttatttgtacccatatcgtcagccatgaaagtttgctgctttttcttcttctgccactagaaggtaactatatataaacccttttacttctttcttttatttctttcagcttggtttgtaaagaatccaaagtcgaatttcggggtttcaggttacttgtattgggttctctatgcgtggaagttttcagtttcttgggttttaaacaacaattcatatatgaataaattcttcttcttttcttctttttgttgttgatgttgtacattttctcggtgaccaattgggtttctgggttttgaagaaacttatcttttggcggctttgaatttgtaaagcaatgccatttacttaacgggtatgatttgattaatgaaataattaagacttttctgacacattagattgttcttaaaggctggtattgaattacgttttcatctaatttatcccatttaatttatgggatttgttagttgtgtgagttccttcttatgattattattattattatctgcatatgggtctctgccgattctgtaatccatctaattaatgtcttttattgcaaccagactagtcgttgagccaagtttctaatacttcttactggctttttaaacatttttaggtaggcattaaagtgggagattatgtaaaaaccatggttttggccatattgttacaatcaacatctgtatctctacaatcaatcactttgcctagttgaaatttggtgtcaaggtggtggtgccttcgcctgaaaactgttccatggattcagttcttgttgatggggttcattcattatcactaggcaacaatctgcctaccacaagtggtactcatcatcatcatccttctcggattccatcaccgagcttatcaagtgatggtggagcttcatcaatatactattcaccagctcaaagctatggcaaaaaaccgatgtactatcctaatggttctgtggttattcaaagtgattcatataaagcaatgcaggacaatttgaagcatcaagagacacccgttatggtaaaacacggggctgctgcgaataaggggattgataaatcagcaggaccttctactcagaagaatgtttctaaggtggaagacaaatgctgcactaagcatctaactggtgaagaaaattgtgattcaagctgtttggtggaatcagaaacttttggtttgattccatgtaaagaaagtgttgggcaaatgaactgccaatcaacaccccaaccaactgttacttcttatgcaagtccccaaagtagcttgtactcagccactgtgtattcagaagccaaagaaagtttcaccaatactgaagccagtgaatgtacaagcagtattgagaaaattggtgagggctgtgaaatgaagaattcctgtgaatttaatgaaagcaggaagaccagcatctgtagaggcagcacagggagtgatgttagtgatgagagcagcactagtagtttgagcacctctatgttcaaaccccatatggcaaatgatacaagatgggatgcaattcaagctattcgatctcgtcatgggatgttgggtttgaatcatttcaagttgcataggaaacttggttgcggagatattggcagtgtttatttatctgagctgagtggtactagaacgtttttcgcaatgaaagttatggataaaactgatctgggaagccggaaaaagcttccaagggctcaaacagaaagagagatattgcaatctttggatcatccattcctccccacactgtatacgcatttcgagacagaaaaattctcttgcttggtgatggagttctgccctggtggagatctacataatctcaggcaaaggcaacctgggaaattcttttctgagcatgctgccaggttaggaattatcctttccttaatttttctacttctttgttatgcaaattataaattgatctaccattatgtcatataagtctctgcagcccatagtgaatagattaggaaaacatgtattgcattctttggtggaggcttttgttgtagaaacttttgtgatctggatgtgggcatctttacttctctcattttcatttatctgtatcatttttcctcaggttttatgttgcagaagttcttcttgccttagagtatttgcatatgcttggaatcatttacagagaccttaaacccgaaaatgttttagtcagagaagatggacatattatgctttcagattttgacctctctttaaggtgtgccgtatcccctacccttgtaaaatcttcaaactcgaccatggagtcaaagagctcgggttattgtgctcagccttcatgtatcgagccaacttgtgttatgcagcctgattgcatccaacccgcgtgttttgctccacgcttcttgtcacgtaagcccaagaaagataagaagaccaaaccaaaaaccgaagtacatcaccaagtgagccctctccctgagctcatcgctgaaccaacaagtgctcgatccatgtcctttgttgggacacacgagtacttagcaccagagatcatcaaaggcgaaggccatggcagtgctgtagattggtggacatttggtatctttctctacgagcttttgttcgggaaaactccatttaaaggagcagggaacagggctacattgttcaatgttgttggccagcccttgagatttccagagtcaccgagtgtgagcttcgctgcaagggacttgatcagaggtttactagtgaaagagccacagcatcgcctcgcttataggcgtggtgcaacagaaatcaagcaacatcctttctttcagagtgtgaattgggcactgatccgctgtacaagtccacccgatgtcccgaaaccatacacgatggatgttcctagaaatgaggtccccaaaattcccacaaatgggaaagatccgggtgttgatgtaaagccttctggtaattattttgagattgatttcttttgattcttatcattgattttcttgttttcatttagtgcttcaatggttcttccattgcaaatggataaaaatccgtattcccttttcttcatttgataaaatatgtaaacttgctccttcagactgagctccatagcagcactgcgggaatgcaaatgcatctaaatgagaaattaatttgttttatctttttttctttctttaatttattccattaataactctaataagtaataattgctttgattaagttggcttctctttcttttttgcaacaaaatgtcacactctttcaacttaatttcatttggtttcttggtgaggtgagtaataacttggtaagaaaagtaatgaaggttttgattgttttgaaaactatcaattttgtttgtaatgttccttttattattacagtgtttcaattgatttaaaaccattaacttcatttttatagggggtgtttggaaaaaggaaaattaagaagttgggttggccttcttttgaagttttgatatcttttctataagagcattgttattgggtactagcggtgttcaatatttttttataggtgacgtcctacaattagttagtaatattctttaaaagttatattttaagttatataaaatatatttaattagactaaaagtgatatcatttaagagaatactaggcaccaataatattttttagcaattctttttttacaaggttgacatatatgatagttgatacttgtctttttgtccacactagtataccctgatgggaatgttaaatttataattttcaaaagaatactattttacaaaatagcatgagcaaaatgtgtatttttgccaattattcttagatcaatattaaaaaaaaaaaaaacaa

SEQ ID NO: 304232 - DNA, 1872 bp, Cannabis indica
atacttttaattttttttttaatttttcaatcttctgttttctttttcaaaggtacatcttgttggatatctgacatcaatatccagtgtaattcagataaaaaaaaatatctagtgtaatcgatcatcatcaccactcgtacttatgtccaagacaaaacaaaaaagaagagagagaagcaactataaatatataataaatgagccatcagatcttaaaaaacaatttactgtgtaactattgaaaacaaatatatatatttatatatacaatttgctcttgatcattgtctctggctgtacgtaggcaatggcaatcactacattagtctcggcagtttcaagaaggtaagtttcttacattgaaatttacataattgtatcatacttgttatgtatattcacaagtgacccaaacaatattattaacctaaaatttatatattagtacaggttagaaggtaaagtggctttgattacaggtggagctagtggaataggccaaaaaactgcccaagtctttgcccaccatggagccaaactagttatagccgatatccaagacgagctaggccactctgtttgccaatctatagcgagcggcgcggccggaaacgacgccacttacgtccactgcgacgtaaccgacgaatctcacgtcaaagccgccgtagaaaaagccatcaagtcctatggaaagctagacataatgttcaacaatgccggcataggtgacccgaaaaagtctcgaattatcgacaacgagaagggcgattttgagcgcgtgttgcgcgtgaatgtgacaggggttttccttggtataaaacacgcttcccaagctatgatctcggctaaaggaggcagcggcggtagcatcatatcaacagctagtgttgcctcgtgcatgggaggcttagtctcccacgcgtacacgtgctccaagcacgccgtgcttgggctgacgagaaatgctgctgttgagttgggacagtttggaataagggtcaactgtgtgtcgccttatgggttggcgacgccgatttctcagatcttccatgggcttagtgtggaggagcttgaaggcctgtacggatctatggcgaacttaaagaatgtgacgtttaaggaagatgatattgctaatgctgctctttttttggcgagtgaggagggacggtacgtcagtggacataacctagttgttgatggaggtttcaccattgctaattcttcttttccaatgtttcagtaccctgaaattaatcatgcttgattaataattagtttccattaatccaaagaaaatataattaataaaaagagtacgtacgttgttatttttaattgattattacggtgaaatcctcaacaagtttgtcactttgagttttagtgttgttgtttttgttgagatcgatacaccagtttatatatgataaaatctgaacttcttaatagtccattctcattagaaattcatctcatgattggtttcaatatttaatttcatgaataataatatgacactaaagaaagtgtactttttagcatttgtcttttcagtataataaagaaataattgctttagaaaaaattacattgagagcccaactttgtaaattattaacaaaaatagcgcctaataccgaccatcaaaattaaaatattataggataaatattattgggtgattctacaatgtattcccttaagatgtactaatacactcttaacttgtttcgtcatccaaaaaaaaaatttaggctaatttttttttcatattcatgtacgttatagctatttaagatatcctacaaaattttgaaaaattcagatgatttacaatatagaaaataatgttcaaacagtcta

SEQ ID NO: 304233 - DNA, 3633 bp, Cannabis indica
tagttatttaagacattctgcaaaattttaagaaatttagaaaaatttaacacgccgaaaactacgttcaaacagtgtattacatgcgtgattattttattttaaaatttagagtaacaaaattttactcaagaccgaaacaagttaagagtgtatcaatacatcccttttaagggagtgcatcgtagaatcacctaaaaatttaaaataaaaacgttaaatcatacaaacgtggaatcgatttccgtgttctccgtctctgttgatcaaagtctcctcttttgtatttctctttttcattttatagggttatttgatctggagaagcattttgccttctacggtgcatatcatagcaacccaattaatatattgattacatacttttttgtgtggccaatccttttctctactcttcttcttgtctacttcacgccctcttttttcgatttcccatctgggtttgaccatagccatggacttattttgaatttgggtttcgttttgactgttatctatagtctgttctatatatgtttggacaagaaagctggctctttggctgctttgctctgttctctttcttgtggtcggagccagtcttcttgctcaacacctcggtttctcagtagcatggaaggtaagcccccataaatcatatgttagatgacttttcaaaaatttatgtacatattttctaattagagtcgtgtataacatatctgattagcatagaaaattttagatcaaaagaagtaattaccaactatttaaaggggcttattttctggaatggataattttgatatgggttttactctgttgtcttaattttgtttaggggagctatttttaattgatattgctgttggatcaagtgcattttgttttgactagtttatggttgcctgtttttttttggggggagttatgtaatttcatttccattaatgtttatggctggttaagaaaatatgattagttcctatggaagttggagactaatgtttaattttgtttaaaatgtgagattttatattagtatgaaatgatttgctaagcttagttctctttactaggaaaataaagaaacatactgcattgttatagatcttaattggagcctttccatgagtttgaaattcttttacttgttggaggcctaacaatgtccccaagatcaagatttgtgttttgttttgttccatccgcattaattcgaaaattttgtttcaggttgggctggcagctcaattgttctgttggacagggcagtttataggacatggggtgtttgaggttgatattagctctgtacacagaactataattaagttcttctattttgaacatattgcaactttctatgctaaaataattacatttttctgtttccatgttttgatgtggttgtagaaacgtgcaccagctcttctggacaaccttgttcaagccttcttgatggctcctttctttgttttgctcgaggtaacttgttttgctctcggagctgctaattgattttttatatggtttgttgattaccatttatttttaatgttatgagcattttgtttcttgaaggttcttcagtcgtctttggactatgaaccctatccggggtttcgctcaactgtagaagcaaggattagtgctaatatccaagagtggcaagagagcaagaataagaaaatctcttaaaaatggggttgaacatatttagatgacatgtttaatacatttagatgattaagaacagccaactgattgtacactttttctcatgttaataatgtatgtgcctttgcaatctatgccaaggtccaaaaattatagtgcttcagtaaaatttgatacaagaaatgagcagatttggtccggtctgccctatgcaatgcattataccttcgtttgagtagtctctagttaatttcatattaaatctggtctgatgatgaatcttcaatgaagctattctcaggttctcgtttttgaacttgccgatctttcattgaatttcttaagctaataactttgttctacttccctgctgtgatctggttctaactgtaaaagatgtaagcctcctccaacaacccgtgtcgtcccagaatatcaaccatacatccgcggtgtttcatggttggtttgatgttgtagtctctgctcataatatcaaagtattttctacttacctttgctgaccaaccggccatggctacaagcagacaaaactcccaagaaagggacattgcccagtctctcaacttctaacatattggaaaacaatgacaatgtctttgtctacatgagcatgagtggcatgtgctagaaagggaaaaagccaaaaacaaacaaaggctaatctagaaacctacaaatcctattccatttcattccctcaaaccaaagaccacctagatgttatatttcaaggatatttattatcaggattatatatttgagatcttatttgataatgtcataagtttaagggtaaaaatagtaattttttttcgtgtttttttaattgagtgatcttgatgatgtattactttttcaacataatttgaatttaagcttttttttttcaaatttccaatctagtgctacaaaagaaaaaaaaatggttcaaaacatttttgtattgcactattattattatattttgattctcaagcttgattggttagactagactatttcagtgtcaattgacaagaacaaggcttggatgatctcctgtgctcaagaaatagggactggacaagtcctcgtgagcaagtcgatcatgggactccatgaaagcttgtggagctggagcagaatgggatcagcagaggtgtctccattctcgccattgagagagttcatggtgtgtggttttgcgattgttgtgtgaaaatgatcggagatgatcgaaaaaaaaaagagcatgttttaatttgataccatattagtttcgtaattcagagaaaagagaagaatgaattgattgaattctcattgaatgaattgccaaatagtgagaatacattattgcataacgaaatccaatagctttaacaataaagataccacgtgtataactaacaataacaacctaactacccttctaacatctaatatgtcataaacatataaaatttacaaatgataaatacatatattattattatattataacttaaattatgcagatattacccccatctactacaaatgatactcctcaactagataaatcctttcacaaagatgaatcaaagatcaacaccataccaaaaacctctgaaaacagcttttgtttgagctgttttgtgagagagctttaataaacaccaccactagtagtagtactgttaatcacaactccaaaagaagaaaatccttagatgctgcatcctaattctgctacgaattataagctctaatgtcctatcctatttagaccaaactcattgcctcttaggatccacaatgtataatacaactttttataatattaataaatcagcagttaaccaacatcttaggcttaaacgacagcaagtgataaaataattatttttgggtgattacagcttacaaatgaaaaagaaaataaaagagtcatttacagacatctttagc

SEQ ID NO: 304234 - DNA, 3214 bp, Cannabis indica
aaaaaaaaaccaatcaatctctatttctttatatgtatctctctcttaagatattgagtttctccaccttctaggagtctttttggtctgctgatctgcagctgttgtagggagctgagaaccaatttcatggttctcaatgtgtgtcatctttgtaagtttaccaagtttcttccatccacttgtccaagcagatccttgtttttgttttgacatcttttcgaactgtcgttgaagggtatccatgtcgttttggagttcagcatacttggctttaacagtctccagctcaaactttagtgtgttaatgtcttttttggcagtagcccatccttcttgaaatgattgtggggtcccttcaagtagactttttctgtttgagaccattggttggaactgggactctcctgcagcctctttcagtgtagtattggataaggcattacttatcttgacctgttctgagaagagtacttggactactactctcaatggaagcctttcgttctgagcagcgtgcatacaagcatcgatcgatagcttttgacaatccattactcgacaaagtctcttcctttcatgctcagagagtgttggatgagcctgttcacaattttgattttgagttatataaagtttctgagctaaacaaaacatttcccagatgctaagtcaattgatgacaaaacccaaaaaggaatacatgaaatcttattggaaatttacaatgcagctccatttgtttgctaagaatttttctttgaaaaaagggtattggccagcaatgttttttgcatatagttttgatcactcttcataaaaaaaagggcattaacaaaaattgcatgaagttagagagtgaattccttaaagaaaggaaattttaccttaagataggaatctattgccctataaaggccatcatcacatgtccttgcagattcaggcaaagcttcagccagtacctgaaacttagtgagagagaggtttctgtctctagacacctcagtaaggtaactatcaacaagcctagatactctcatcttggcattaggaccagcaagagcagctctttgacttgcatcatacatgtgtttatccgaaaatgattgcctgcttggacttgaaccttcagtctgttcttgaaccagaaaatgctctaaaagtctttgaacaagatcaacatcaaacatagtctctcctttgttgaaattaggaatcaaaagatcagccaaagtggcttgctcaaactgcattcccactctcttctccaactcagtcaccaaagccggtgccactttcaacatgtttgccattctcagcagcctaagaaggaagctgcaggagacactgtccttctgcggcggtataatactaatcaagctctcaattatcatccgttgatcttttgcctgcaccgttgggatgtcttctttagtccctgcgagaatcatatgaagcccgcctttccaactggcagctccactgctactagtgttgctgttgctgctgtggctgccttcatctccaactcaaagccatcttcacttatcaaacccggtagccatttagatgcataatgcattattgcagctccaataagctcaaatctcataccctttactttaattgcagtaatgactctaacaaaatgatcaatccttagaattgaagcatcttcaaaccaccaatcaggaggaacttgttgctgacccctactggggctagattcgttcctttcattccatttcgggcttgaaacactctggtgtttcccagtataagcccatctaatccctttaggattagcacaagccttccaagcaatagactcactacatcttctcacaatttgaagattctcagcccaaggagagagcttctcacaactcttcaaaacaacaatggaatctctccatgaagacaaaacaacataactcagaaaagcttctgtcttgaatataagattgccttcttctaaatcctcagtcatttcaagatactccgcgccacaacgaaggccggatatgttagcagccgttagatcaacagctactccataacaaaactttgctgctagctcaaaagcttcagcctctccaggaatatcatcaagaacaaccttactcatatccgggtctcgggtttcatatataattctattcatctttccactccttgcaagaaggggatacttaaaaaaccaaaaacaaaccacaattcagaacaattcacagaatttcaagtcttgtttgtaataaagttaaggaaattttgtaccttgtgcaaatgaaaacaaacatctccaacttgaacaagcaaatcactgggaatatcagtagccacataccttattacataagaaaagaaaagtttattatctcaaatggggttttcataacattccaaccatggcagaattcaacctccaaaaaccataaaaactgaaaaatgatacataccagtcacgtccacgttgctcaaacccatcagttttaacaccatgtttgcttgagctaagaactccattcccatactcacgttcagcaactgactcactttcagattcccacatgatgatggtagtaaccgaaaatcctggaaaatctgaggtgggtttcctttcttctcaactcagactgaaaacttcagagcaaatataaaaaaaaaaacagaagaaaaattaaattttgaaagaacaataaaataaaaaaagtcccacatgggaatgcttaaaataatcttcaagtgtcggctttaaaaactgatttttcatttttgaagagcttaaaataataatacaggctgtgaagtaatgggcatacttgttctacttacttactgttgtatattggatcatttcatttcatttctattctcatttttatttttattttttaacattagaaaaaagggaaaagagaaaattttgtaatggagtgagttgaattaaaatggtgaaaatattatttagaagaaagaaattaggaggaaggaaagtggtgctttatggagcgtgattgttgttgttttgtgtaaaagcaacgtgttctggtcccggctgttttgatgttgttgttattattatcaatttgtagaattttgggttggattttgtttgggattcacttacacttacattacatataacaattaattattataaatattattctctaggaaaactagaaaattaaatgcaacttttacttat

SEQ ID NO: 304235 - DNA, 2534 bp, Cannabis indica
atatatacaataataacaaatcaaattttaactcaactttttcagtcaaaagtaaaataagaaattaaagagaaaaatatttttatttgatgttttgttataacatagattacaattataccatgttattatttatttatttaattatataaaattttagggagcatttggtaaaatttttattttttaatattttaattacaaaaataaaagtaaaatttgtgtttttaaaaaataaaaatgtgttctataattattttttaatattttaattacaaaaaataaaagtgtacatgttctttaactttttttatttttatttttttattttatttaagttgggttcaggtctaggtctaggactgggactgtagtctgagttcgggactaaggccggggccggaatccgggtcctatggtccaagttggggtcagaatctaaagtattgattaagaaaaaaaaaagattgtttaaaaaaattgtaaaagtgattttttttttctattttcagaatttttaattaaaaaattaaaaatgaaaacagttttattaaacatatttttggaaaatatttttacttttctaattaaaattctaattaaaaaaaaaaaaaaaaactgattaaaagagtgttaccaaaacactctcttaattaatacaaaagtataattatatatttgactaaaattgagcataaaaaataatttaatattaatttctcaaatatttgaagtatttactttggattaaactgaaatgtgttaacaaatatttggcagaaagaatttggtagtaaaaatgtttaaatataattctttatacaattctgaagctttgagaaacgaaagagaaataacaaagcaaagtaaaaaacaacacgtattgttaatgtttagagtagaattagctaagctgaaaattagttacactaacaacctgcaacttagatcgtaacaaaaagctaactaataatagaaacttactaatcctaacgaagttaactaattatatttttaataaacccttcaaactaagtgtggatagaaaaaccacactaagcttgcctatgagaaagagaaaccttgtgcttgaaattgtgttggtaagattatgagcaagttgaaattgagcaaggacatgttgagtagtagttgagattgtaagacccaatccctaacaaaatagaagtcaatttcaatatgtttcgttctagcatggagattaggattgacaaccaacatcatagtattcaaatagttgggatagctattgtgatatgtgaagctcaaatagtagagattgcagccaagcgatatctgtgacagcaacagctagactacgaaattcatcttcaattgatgatcttaatatggtatattttttttagacttccaagagattgaattggagccaaacaagacacaagacacagtacccactggtggagtgcctatcatcaaggaccaaagcacagtcaacatcacaaaatgcaatgatatcaaagtgagaagctctctgtaaatggagatcatagtcaagagtgcctattatgtaccttaggatgcgtttaacaactatctaatgagaccacaaagaagcttgtataaactgagaaactttgcttatagaatatgtaataactgtcttagtgatagttgcacactgaagtacacctacaactgatctgtacagagagtaggatccataaccgaatcactaccaaattgagacagcttgagaccactagccataggtgtactactagaattagtaccttgcaatttagttctacacaaaatatcttgtatgtgggtacaacctcttatctgtatgagtaatctgaacaccaagaaagtagtttagatcaccaagatcttttagtgcaaaagtagaactgagttgtgtgatgagactggacacttcaaagtcactgctgctaataacaataatatcatctacatacactagaacatatgtagtatgttgaggatgaagtcttataaacaaagaggtgtcagttttagcatgatgaaacccaagacttagtaggacagtagaaagtcactacaaatatcacatttagcttctgttttgatgtttgaaaaattagacaacgacacaaaaaatgaagggtcaaattttgcatcggttttgcttagacacatcattagtgtcaatttacatatatttttacgtcagttgtgcaccgatgctaatatacttaaaaaaatacagaaacatttatgggcttcgggcttcagcctatatattaaaaaaaacctaatcatataaagcctcacttatctaaccctaactcatttcaaatgtaggaaatgacacttacttaattatctaagacatctatatctcttttcacatccaatttcttacatctataaaccgtcaggaatactaatttttcccgacggttttaaatagttacttaatttttttagcgacggtcccccaaaaaaagcgtttttaggaccgtcgcgaattctgacttttgtagtagtgctctctctctctctct

SEQ ID NO: 304236 - DNA, 5194 bp, Cannabis indica
attttaattatttttacctatttatcggtattattattatttttttgatttttagtttggagatttcagctaggttgaaagttgaaacccttactgctatattgtaacaaacaatgactaaactaataaacgtacaatcaggagatgttcaagttgagtcgtcttaaccaaattgagtgaagcaccatgtgaatcacatcaaacggttgagccggtctattcaatacaaaatgtctttttacctgagaaaccttatgatatagtatcaagtacttctcatttgaaatatcacttaagatgttcttaatttcaggtatttttgagattgggatttgaatgctaaattgattccaatcaagtacatcattgaagggtaatgagtagctatcagagattattacagggacacacccagcattgatcgcctccaccactcttgggctagccacttcgtatccacttggacacaaacaatacttactttttcccatcagcttagtgtaattttgccctcttggtaccttgtcaaacacctgaatctctttatctttgtctttccattgctcgagcaagatctttctaatatatccatggagtgcaccagcaaaaaaggctaatattttgcgcctttgcggggattggcccaaatctgctgggcccaaggttcctcttctcaaatagatttcaggtagtgatacatctcttttgggttgaaatccttctgacatgttggcattacatataactcttataaagtttttgaagagatgaggatttccatgtgatatttctggaccctgaattaagagtatagcagaaaaaaaatatatgtttaatttcatcaatgaaataagagtttatacattgttttaataagagtttatactagaagaatgtacatgtatctcacccaatcatgggaggaaaccatgaaatgatcagcaccattgctttcattccaaaatgggtacttattagccacaacaccaacatagtcattcatcactcgatagaggcgatctcgattgtagtcagacgggtgaataatagggctataaataaacataatgatgttaaatacactgataggaatcaaaaatgtgtgtgcctcctcaggatatttagccctgaaaggactctcctcactctctatttcttcaatgaattgtccttcaatagcatacacgctacgcattgggcccatgtggaatattggtcgttctccttccttgtagctccacactttgaatctttttaccatctcaatatgactccttaattggccccaaaaaatatataagttaattaaacatagcactgtttttgggtgtcaaacgtattaatgaatatttaaagtggtaccatttacttactggtgaaaagcatatgggtttctgtaaattgaaccttttggtacaaagctctcattcttatcagacttaaaagtacttttggaaataatagcttgacgaatagctagtcgggccttagccagatcatactcaattctcttcaacttattcttcttcttcttgattatctgctcaaaaacacatacagtatacacattagctacaaataaatttaactaaaacacttgctgtacataaatatttctatatatatatatatattcccatataccagaaaaagaaaaaaaaacaatgatgctcacctttttagcaggaatgtgatagttattaatagtaatcattgtattgttttgatgctttaaacttgagagaaaagtgtcttcatcagaaacttttggtggaactataacgttactggtgttcgaaatatgataaatgagaataggaatagaggtattaatataattattattgataaattggatttggctcaaggttatattattatgcaaaaggaaaggaagaagaagaagaagtagggaagttgaaatgaacaacaaaattgtagtggaatgacttaaggttgaagccatggcttctagtggctgaaataattgatcgattacatatatattaacttcaaggttcattacatatataataatgatctagaattatgtctagcacgtgtctcccatatatacgtatctaattatagttaatttaatataagaattacatctccatacccaacatgagattaaaaatgtgataaacggtcactaaatttatatatttaaataaaaagtgaaagcctcgaagttcagctcacgtggtctgcattaatgttaccaagactcactactagaagatagacatgttaagaagaactatatcgtctatatatagttatattattattgttattgacacaaatgtattggatcttatataatatattaacttttacacaatattgctaacattcacacaagctaccacttttaggaagctgccacctttaggtgatgctatactaatccttttttataccaatgctatataaagttgttacattttttttaattctatctatattgcataataataaaaattatcttaatctttattacatctcatataattaatagctgtcaagagagtaaatgtacttaatgcaatctcttaattaataagagaaatactaaagggtattagtagtgcctagtgtcgcgggctcacctttttagagagcagaacatccatacgacactttgacttctctaagccaaggccagccttctaaccaaccaaagaacaatgggctaattttcgcgcgaccgtgtgcctcgtgcacactttcgtctcttaaacagcgctcgccgagtcatgctcgcaaacatccatgcatcgaggctttctagccaagatactcgcactatccataggtttctacgatgataaggtaaattccaacattgtcgctcacctcgtcactcgtgaccaaggtagcatgtggggcaagaagccaacaccaagctgacgtgcaaacgcttctaatcgttccccattcgatactgtccgaacagtcttcctcatcgcccaaagactcaccatgcccccatgcatgttgataggccctcgagacaagccaccaaactagtagcatatatatgttacacctctatctcttctagcatgctgcatctctctcatgcgcgtatgaaaagtggcccatgaatgactacccgtatcatctcgtgttgagactcgtggccaagacgcaccacaacatctcttggaggtttaggccacgtcccgtgcaagcggcacaccagcaagcaaatagaaacatacacgctaacctctgacagcattctaaaatgcactaccgggttggcccgataatgtccatgagtattccaactcatggagacatataaacctactagtcccactgaccagtagtatctcacttagcaccatggtgctaggggatggtggagagctggcaactggtacttcccccttaaagagcattataagcttttagtcttctacgagaaacatatataatttttgctctatagacatatcgtcatcaccatatacctaatcacaaagtttcttaaattcgattgcaccattatattcgtagacctaaataaattacgaataccaagcctcatcccaatccagacaatattgaagatatttacaataattacactgtcgtacaaactaagcttcagcatgccaccaacatgcacatcaacatgcaccaccacttgaccactgcttggccaacttgtgggtatcacctagcttgtaacgtgccatcttggcacgcatattacattctccccaacttcaacatgtcgatacccttattgatggaccgttggcaaatcttcctgataatctcgacttctaagcttactccaagcttcatctaaatcctaagtctgcacctattcctctatctccgtagaaccactctcttggtgatgatctccctcgcccactcttggacttgatcaaagaacccgtgccactgtcactattcagaaccacccatggagtagtgcctccgcacttgaatacttctcccaacatgaaatccttcaagttaatcacaatgtccctccaattaaccaataagcccttgcaacactaatgttgaagctaatacatcctctgatagtacctcactcgccaattgtcccatgcatactccttttaaaaaggactaactatggggcacccctcggggtgaggttcgcaaaccaactgtacccaacgacaccttgagaacacacttccactgaagccaagtccatctggacaagatctttcagaaacttcacacgctaatttcatggtgcaccatcctcctgatggcaattgagcaagacgcacttattgcaggataaaatttgatgcgtctctcttggacgaggcttgcaagccaactgcatccaatgtagcaccaagtgcactcttgcacataatgtcttcgcgaagtactcaatatattggccctccgaccctatcgcacacccacaaatttatgcatacgtgctcctatgggcttctttcacgtggccaatgatctttttttttttgagttttatagatctttcttaagtcataacatgcttgagtgttgatttaggttatgtaggctttgatgtggtttgattttcggcttttatttgagttgtttaaggttaattgcatctggttttgctggtttgttaagtggttgagagagttagtttgaaaactcaaacttgcctcaacaatgatgttttgagtttctgtgcattttttatgttgtttttgcttggaaactgttgttgggtaatattgcaggtgttctgaaagttttggtggagtttgagaatgttttgagagagatttgagggttttagggtttctaaaaagaaaccagttaaccgattctgctagaactgtagaatcgattaactgcttcaccaagcaggaccttaggaatcagttttccatttggggaatccaatttactagtttggggagtttttagagcctttgttttgatatttccttgatatttaaggtattgccatgctatttattgatagggaaatttctagttttaagtttacctatttatgtgatttggacataaggcctccattcaacgcatgattttccattcaggtcaaccattacatttgaatttagaaacgaggtaagactagcataaaatgtatatgtatgtgtgtatgtgtattatatgcgtactatttatatgattcgtatgctatcaacactagtac

SEQ ID NO: 304237 - DNA, 2354 bp, Cannabis indica
atcacacatggccgagtgaattaagagcactcaagaccgaatgacattaacatcacacatggttaagtgacttaataacacttaaggtcaagtgacattaacattactcatggctaactgacttacaagcactcaatgacgattgacttttgatcactcatggttgagtgacttttgtcactcatggctgagtgacttttttcactgatggcaaagtgacttttgttactgatggcaaagtcgacttttctcactcatgggcgagtgactttttgaattgctcatgggcaagtgacttgagaactcttgtggccgaagtgactttcaaacactcatggacgagtggacttttagtcgacttatggctgagtaacttttgtcatttatggccgagtgactgaagagcattcaaggctgagtgatgtttgatcactcatggccgagtgacttttgtcactcatgttcgagtgacttgagacttgtggccggtgtgacttgagaactattgtggtcgagttcaatcactcattaccgagtgacttttgccacttatggccgggtgactttttgaatcactcatgatcgagtggcttgagcacacttacggtcgtgtgactttcaatcactcatgacagagtgaattttgttactcatgatcgagtgacttttgttactcatggccgagtgaatttttgaattgatgatggccgagtgacttgagaactttatggcggatcgaatttcaatcactcatggccgagtgactttcaatcactcttgatccagtgacttttgtcacttatggctgggtgactttttgaatcactcaaggttgagtgactttcaatcacttagggctgagtgactttcaatcactatggcaaagtgaattttgtctctcttggccgagtgacttttatcactcatggctgagtgacttttgtcacttagggccgagtaactttttccagttacggttgagtgacatttagagctactctttggccaagtgaattttttcactcatggtcgagttgcttttagagctactctttatccaagtgacttttggctacttgatgtttttctccaattgtcttttgatgtttctccacttttgttgaaggtgctctgttctcagtctattagatttaacactctgtcaactatgccttaagtctctaaggtatgaagtctttctctctccccattttttgcgtggcatttttttccttgataaaattattggtctgctacttatatctttgtatgttggcgctatccctcacatggttagagggttgattaacacattgttcctgtagaattttcagctctattttccttacttagcacacttagttatcttttttctacctcttaaatgggggtgtcattcggtcttaccttgtgtttcccatgaatcccggacaaataccccttgagctgactttgtctatatctcatctctggactctgaaagtcctcaagaggactcacgtgagaggtatataagattgttatatgagagaagtgattattttggatgcatcattagctacaaggagcatttgaaaagggtccaatttgagcatcacttggtcctaaatggaaagcgattcgaccaaattgcgaccctgagttgtacctatataggcttaagatttcgctagctgaaagcgagaatgagtttttgtatcttgagagtacctttcccccagaacctgttcctcctcctttgtccgagtttgccatttctaacaatcattggatggactgcaaccctccttcattcctttatgggttacctcgaactaagattagagcttgtagggttcgagagagaaataaaagatgtgaggcccgtgcataccaccacttccttatgcctacaagtatgccacctaataggatggtgatccctagtttgcccattttgatggaaccatttaattatgccaacattgctatttctataaccatggataaacttcgtgatattagggtcacctatagtatcccgcctgatgcctcttaaggtttgtcagtagctggtgatggggaatgagctatttgtcctgaggctggtaggttgcttttagtgactagctattgtggtctgatgcaaatcttccgcttcatccattctttatacctagtgcactgctgagaaaacttggccatcccctgacatctacaattgcaccactcggtgcattcgattcatttgagcatacccattcctagggtatggctgaccagactctagcccatccaacgctactgcccaaccaagaagggccaatcaaccaagcccttttagcatcagatccttctgcgcaagcacaattaga

SEQ ID NO: 304238 - DNA, 1411 bp, Cannabis indica
ctgttcctacttcaagctactcaaaagtgataaccccctttccacgtccatcaacagccgaaacccgttgcaaagctcccaaatgaatccttccgctcccaaccgtccgatcatcgatggaaagtagtcctcgaaatcaacaatgcttgctgctaattggtgatgatattgatcatgagcagcagcagcagtagtaatattcattgcctgcatattcaagtgttatactagctagctctctagttactctcttatatgtaatgaaagaaaaatgaattttagggagagtaaaataatagtactaaggggcctttctttttaagtaatacggtgagagttagagaacagctagtgtatataaatctatatatatatacactaaagatatttgaaatgactaattgaacaaagaatctaaccaagaaaaagatagaagatacaatagtaataataattgttagatattatccgagtattgcgagcttctttgggctttcttctattctcttttcgttgggtgattttcacgaatgggcttatctctctccttccgggaagttgcatcagatttgatcatattatacaatacatattttgtggcttatttatttatacagcggcagcttaaattttcttttttttttttcttctttaataattttattactatggatacttatttgttcatttttaatcacataaataattatacaaagtgttttggaatgttccgggtaatcgatgttaattattgattttgttgttatatgaataaaaattttgaaggtatagaagtaggcaaagataagacagtgaaattgtacgtatgcagatataaatatatattgggagagaacatcaaaaacgtagatgtacgctcagtagtctcaagtgtgaactgtgagggccaaaagcgtttgtcatgtcatgggataacaatgtccacgtggtgcacgcagacattttattattattttttattttttttagttaaagcgtttatatatcgcttacattgcacgacttacaattcaaactcaggaccccacacacaccctcccaatcccaatcccctctaaagttggtgcatgcagtgatttataattatattttgggatcttgtgataatatattcacagcaccaaactaaaaggaagtgtaaaatgatgatatacacagattgtttggcagctctggaagaaaagtaacagagaaaagaggctaataattacttgggctagcaggaaaactataaatagttctcgatcgtgtgaatatgaaacatatttttaagtgatgatgattccaaataattcagggcaatatatatagtaatttcttttcctggtatatatatttatatagcatatataggtttcggatgtaaacttaattaggccaagttcggtca

SEQ ID NO: 304239 - DNA, 3317 bp, Cannabis indica
atatcgcgatagtaatggggctatatacttctttattctcacaagatggtaattacaaaaataaactaagtatcagaaactccaaactctagagcgagaaagtctaaagagagaagctgtgaccttgtggtatttttctgaatgtgaaaaatgagctaagggaactctccttatataggtgaaggaggcccacaaaataggggaaagataaaaataagttttattccatgattgatgatgatctaacggtaaaaattagcttctagtggtgatggccaatttttggtgtccggcgggtcccgctgcatgtaacccagagcttattttcataactccttggggtgaaatttgaagatgatagctttaaaattacatcttaagtgtgacacatgacttgatagagcattgaattagctttgaaactcaagtttaatcgcattaatcgaataaaaattgagtgagttatggctatttcactaaaggaagtttaggtcccagcgcctacgttgacattcagcccccaggttgacgtactagcactcaggttgatatatgacgtcaacttggacgatgggtaagtgtaaaaatttccaagggatgtcctttaagatgcctaagtaatagtttgacaccacttagtctatttataggttctggcaaagttagtcactggttctcgaagatgttgctattttgcggaaatgggagactcgaaactcttcattgccaggtgtgctggaagtgggaaatgcaaagttgtgaatttaatttctctaacttcatatatcattataattgtgaaaaactagacggactagattctcgggatttttcactgatctcttgggatttttttggatactttcaaggcttctaaacttgaggatgaggtttcctaccctatttttgaccatgctgaattcaatggtcgcatcggatttggcatttgagaaattcaaggcagcatccagggttgatgattgtcaacccgggcgttgggcccagccctaggtcaacctgggtgctgggccttgtttctaaggacttgggattgtggttttctccttgagtttacgtaaatcttcgttatttctaatgatgaaaaaaattcctagaatactttttgcttaattggatcggaaacagcccaggttggcaaaatgtcaacctcggcgctctggacattgggtcccgctttttccccttcaaaaattctgtttggtccccaaaaatagttgaatctcaatattttctgaagacggagacgatgctctactggatttccaaaaaactccattataaatagcccatgttggtaaaatgttaaccagagcgcacgaccagccccaagtgtctgtctgtcattgggctcggttatttgtgcccaagaattgtttttttcctcgaaaaggacttatttccctattttttatgaagaagagtacaatgcaaaagtgagatcttctatcagacgcttggaaggcgcctagattgaaagattgtcaacctgggtgctgggtgatgggggccatgggtgctcaaaaattaacttgcttcaattctgattttgattcctcaaatatgtctatggtatgtctagttgatgtcccaatgcaagttttgaccactttacacagagacggtcccagaaactgaaaccctacttgaggatgtcaacttgagcactaggtgaaacccttagtgcctaggctttcaggttgcaggttcgtgtaattttaggtcccgagtcttggattaggttgctccatatcttcatgatatagaatactaaaatatagtgggttggatttaagttattaaagtccgaatatccatctcgaagatcccgaagtcaacctggacgcaggactagggtcccctcccaggtcgactgctatgctagtctactcaactccgtgacgtcatccttcatgtcatgtgtcaatcattgatgtccacattacgaaggaaagtttttggattaacattgtgtcattttaatttctataattttactttttgctgtagatttctaatctatcaagttcagtttctgacaaaaaaaaatttaattacgttcaaacaattttataacagttccgaattaattaaattgtttgttaattttacttggtgatcataaaaaaaattaaaatttcttaatcttcaatctgaatttatttttaaattattgaccaattataagcataaaaagtcatatttccctctttgggtgcgccgttcaagcaacaatatttcccgatgcttgaatatcagtaggtggctagttcattaattcaatagtaacacgcattacatacagaatcactaaatatcctagacactttagctcattgaggaagaaggatgacacatctaacattatactttgcgtttaatgaacttcattgactaaaataagaggtgttatcaaaatgtcttcttcatatatataaatatatatatatatttatatactccaaaattgttagtcaattgaatgaagtctttttcatgcacactatttctttcctacatgaaataagtgacagcatcttacctcataacttagccaaagagaaagaagaaaaaaattgctaaaatttctgattttcaattagaaatagaatagtcccaacttgtaggagtaaaggtcctaccttggctagactactactgccacacccacacctatcaagatcagacggcaatagtttcttggatcattttgatcagtaaagaaactaacttgacttattcatctcattgaattattttcaatgaagggttagtaatagctttagaaaaagggaagaagcacttataatgtaactttcatgttggttaattatattataatatatgatgcatgaaagaagagttttacataaagtcattggtattaggtgagaaaaaaaaaaacattactaattcccatgagttcagaagaaaagcctttgtttttttggtttttatatctatatttttggtgcagaaaaatgcttttgagctatccaatcagagaaacttgactccattctataggaaaaattaaactctacaaaactcatcagtaatgagttcttttttttgtttttccttttttcaacaggttaaggcaaaaaaaaaagtatacctttttcttgatatacattatatacacttgtgcagtaattaaagcttattagaatggatatatagtcaataaatgagaactaactatgtgagaaagttttagcaaaatatatatatactaggtgattgttacgtgccaagccacgtagtgttagttttatttaatattttagttttttatt

SEQ ID NO: 304240 - DNA, 3357 bp, Cannabis indica
gtgcggattggatgttgttgaccaaaaagtgcggattggatcggatgaacacccctatgtaatttttagttttttatcaggctttccgggcccaataaggaaaaacaagcaaatatggcctggggtgtggggccgtgttgaaaacgacatcataaaaaaaagctgtgctactattacttgccacataatctaaccacgaatcacacggttaaattcaaatcacacctcttttaccgaatttaccctcccacgtcagaaaagtcccttccaaaacccctacatttgtagactatgtatttctttacaatgaggctcactcacacacaattactactcgtcagcttcagaaccgtaatcaaaatccaaccactgaattaaaataatataatctatttgtacacatttttatctctatttaacagaaattattaatttaatatattttttccttaaagtttactgttaaaactaacaacgctattttttgaaaaataattaattgttaaatcaattatttagttattttttcttgaaaaaaattaattgttaaattaatccattaattatttttttaaaaaaattaattttaaatatttaatttaaatatcagatatttttttcttaaacaaatttattaatcacatacatatcaaaatttattttgttattgtttaattaatcatactttatagtttatttaaaagctttaagagtgaaaaacttgggcctgtgcactcaaaaaaacctccctgttcatcatcgtccatctccatcaccatcaccatcaccatcaacgtccctgaccaaagccacggcgtttgtttagtctctctctgccgtccgaaagagatgttcttttgaggtcttcgaataacttattcgaagaacgattaagtagtaaggaaattcggtgccaaaaaggaaataataataataataaaaaagttgagagaagaatcgatggtattctctgtttcgatcactacttatattgattaactctcctaggatgatctctttttcctcggtttgtaaggttttcgttgctattgtacatgcatttatgtgtaatatgtatattatagcgttttatctgtttatttgctatgtctgttgtatatttgtgttaccgttgttgtgaatctgtgatgagtttgtctgttgtaaggttatcgttgtttatttgttatgggaataagtgatactatggtttggttcttttttgtggttttagaatttgttttgttttccattaattgtcagcatcaaacttactaaaatcaatatttctatgtttggatggaaatcattatatgtttaagatcagggtttttgggctcaagaaaaattggtcattcaattcaaaggtttttgatttgttaattaatgattggatatctgggtttagtgacattttgatgatttattgctcgtaattattgttatcttctttgtaaatttatacatttgcttgatttcatttattgatcgttgagtttattcattggtcttatgattttgtttcaggttgagtactgaatgggaaatcgtgggcaaaagcgtacagaaacagtagaagaattgccggccgataaacgagcctgcaactctctggagttcagaccgagttcatcaaattcatctgttcaaactcatatgaattctactaattcaactgctgaaaccggtgaccatgatatggatacctcatcttctgcttcggcctcaagccggtcagagggagaaccagaaaaggattcaacatatgggtcttgtgactctgatgatgcagagcaaagacactctgagcttagagactatcagaggcggagatcttctggtgatcatggaaaattcaagaggatcttatcagttctgaatgaagaaacagacgagtctggtcagctagtcgtgcttacagagctatgtgaagtgctgtcattttgtacagagaattcactttctagcatgacagctgactccttatctccttatcttgtaaggctctcaagacatgagactaacccagaaattatgctattggctataagagctataacttatctttgcgatgtttatccccgatcatcgggttttctggtccgacatgatgctattcctgctctttgtcaaagactgatggcaattgaatacttggatgtggcagagcaggtaaacttgatgttttcctttgtgtttatactaggaatatatgttttttgtgtgtgtcttaatacattgcttatctacattaagtgtttgcaagcattggagaaaatatcgcgggagcaaccactcgcttgtttgcaggctggtgcaataatggctgtcctgagttttatcgatttcttctcaacaagcattcaggtaagatagcatctaatatgtatgtgagctctgaaattttttgtgtcacgtttactgcactgcagcgcctttttagttatgtattcctatgcaatgctcagattgatttacttatttttttcgaggcctggcatttatttaagctatttatttattctgtatcagagagttgctctttccactgtgatgaacatatgcaagaaacttccttctgaatgtccctccccttttatggaggctgttccgatattatgcaatcttcttcattatgaagataagcaggtacttgaactgttcagggtttttcaggactttgtctcagattttcttgttttgaggcatattattgaccatcatgctcatgcttctggtttattttcagcttgttgaaaatgtggctctctgcttgattagaattacagacagagttaggaagtcttctgagatgctggatgaactttgcaagcatgggttaattgagcagaccactcatttcataaactcaagtagccgaactactatgtcactaccagtttataatgtacggtacttattgttacttgtgtcttttggcattagctttatgtcttgcattgctgacattgagtgaatgtctgcatattctgctttggatggcaggggttactaggggtactagtcaaactttgctctggttcaactgtagcattcaagactttgattgagcttaatataagtagcatattgaaggataccttgtctaattatgacatgtcacatggagtttcctctccacgtacaattgatgggcagggaaatcaggttcacatcttaaactgctggtgcttttccttctatggcaatggtcactgagttgattatcaactttgttatcttgagtatcttgagcatattaaatatgttttggctttgactacattatatggaaaaaaaatgtatgatctcatccagacatataaaatatatgatattcatttatatatatatata

SEQ ID NO: 304241 - DNA, 1738 bp, Cannabis indica
attattttatacaaacacttactgtcaccattaaaaggtagaattgttttttcaacccattatataaaaaaaataattaaataaaaaaatatacaaaaatatattttatatggtgatatgtatattttaataatttcacacctctattacaaaaacacacttggaactaagtaaactatattgacaaataaaagttataactaaaaaaagtacattagaaaaaaaaaaaattggcataccataaccgaccataaaaccgatcgtaaaaagcttagaagatgccacatcatcaccaaatttggctatcggtttcggtttttaaaatcattgtggttggtttcgattattgcaattttaaaagttagttaaccgcaaccaattgtacttgttttataaatgttatttaccgatatttttagaaactgaattaaaaataaactaagctaaagaaaaaacttcaagaaataagtatgaagagtatttttacgtagttggagcgttaatgagtcttagtccacgattcaatattattaagcttgaaaaagtaatggagtattttttacacaagagtgttcttaccaaagtcttagaatcttaaactttatccctgaatttgtgaaataagctttgaacccttagcatgaagggatggtgttctatttataggctagagtcgggtttatgggtaaacctggacccgctagagtttgcatgtgttaacaaagcccattgatggggtaaaatacaatattatattgactttaggccgattaggtgaagcccaatttgtgagtcaatggtcattcgtacggaaggggaccacttgacagtgacaggtggcatgcgccgccgatcatgcatagtactcgtcaaagaaggtgttggacagaaggcatgtcccttttgggttgtgcgcatttcttaggcttgacataagaaaaaaaactcttgattttgtgagatctggtatcagaagggttccatttaagtttactccctaatgtcccttcagctgtctttcccgaaataccccatgagggtgtccaaataggtttaattgggtcattatccttctgggtgagtttcccttctgggaccaataaggtccgagtttattatgtctgtacttgggatttgtagctcaatctggaaccgtggtccaactccatggtgggctgatccactagtttgactaggcttgtcaatgggctcatcttggttaatttcgatcttcagaagtacacatgtcacctatctgaaaacatatataattagttttatattaaatatcctattctggtttagtggtaagacattctctttacatttgaaagctcaaagattagggcataccactagaataaaatgtgacttaatttttttatataataaattagaaattattcttaaataaatattctacaatgtatatatatatatattaggttaatattacggtggtgcacgtatacttaattatattttagttatacaattagtttttttatgttataaaatcattttttattaaaaaatatttaatttaagtgatatttatatataataacgtaataatattcaaaatttgttgttacttattattttaactagatagagttacgtggcaagccacgtaaatattagttttattttaagttcttgtggtttttgtttaagaatttagtgactaattgtaaattatgttataaacggtatgttttataaaactaattgttaa

SEQ ID NO: 304242 - DNA, 3755 bp, Cannabis indica
aaaataatttccaacaatgacatactctcattttagttgtatttattattgagataataccaagcacttagcttggctctcttcagtattacaatgaagtttgcaagtgagaagtgtgaaaagagtgaggacttagagattatgagaaaatgtgaagaagaggtggtcgtgttcaagaggtgatgaagctgaggaagaggttccttttcacatatgtctaatgccctttatagagtaccagggcttacaaagatgcagatagagatgtccctagaaaatagggacattacaatatacatttgaattacaaagagaatatctcctaaaaactagaattgttatttattgatggagagtcccatctttatggggtttgaactgatctggagtcataggcatgttgaaggtgagttggaaggcttgtgagaaaaacacaggtgttggtctgttcttgcacctttggccgactagccttgctaaaggcttcccaatgcatggaagctggcactccaggccgacaagctataggtctaggtaggacctgtttggcaggtacatggattcttgttggcctatatatgtcatgcaacatatagtttccatgtctagaaagttgctcggcactaatcttgacaggttagtgctgagatgtcttctatgtacttcttgctttttgccacgtggagaagccacatcaggtagacaaaattttggataactaatttgttttcaaaaatctcagtaaacatattggtgctttcattaagagttgtagaaaaatttgaagctactttgcatctacacaaatggtgattactaggaaaattgtcgtcactaagcctactcctctaggctaggtcgccatcatggacaacgctaacctactccctctagggtaagccaagctgagcaatgtgagggatggggaagtgtctgaagttggcgaataaccgcttgataagacctatcaatgagaatagcatcttaagaaagacctcgaagacgatggagaaacagaaaatggcacatggtaaaaaatcaagggtggatactaccaagatggatattattatgagcaagaccccgaggtggtttgattatctagtgagttagctaagacccaacagaatttggtacatcaggaagagttttctcgccaaatggagaaaacgatggcacaactacaagtcagacttggcggtataaaggaagactcaaaggaagatgcttcagaagagcctgtgaaacagtttatatctgtcaaagactttgacggggagattggatccttgaccaacctcaaatagaaaccaggttaaagcctagaaaacgtcatccaatacatgatggaagtagcaacaaaaactaaattcagcgactacatgaaacttgtggtcgtctaatctggattgaccataggctccttcttatggaactaaatgcaaagagagagggctaaggctctgtctgagttcatgtccagagcctaaggaatcattaatttggaagattcttttgtacaagcttttagagttgttccatttccatccccactagttgcaacacccacttatgctctgcaagttatatttttggccatcacattcgaggaacccagtttacaactactgcagtctatggacccactgcctctgggcacgcgcctacacataccaatttctctaggttcaaaatagcacaaatcgaatgcaatatcgctcccaaacggtcaggcaacaaatggaggttcaaaaatcaaatgtgagccattcctagaacaagagaggtgggagagctagagtcgaagtgaggctccaagtaaagaaaggaaccaatatgatcctaagcatatcgagtacactagcctaattgatactcaagaaaaattttatagggcaacctgcaacatgttccactacagaaagctccccgaatgttccaaggaggaaagctataaagggacctgagtaagaaatgtgagtaccatggtgatattggtcataccaccaaaaaatgtgattatttgaaggatgagagtgaaatgttggtcaaattaaatcaccttggccagtgggtatagattcccatcatctatcttagacaaggtatagttcacggacatctcgccattcctggatagcgcggagccataaatcctacccagggggtaggtctccttcaagctcccaaaacatgacttccgtctttacttgctccaatagtgaaagctgcagtaccagtcctagctttaaaccagattatccgtattcgccaggactggctccaccacctgtagatggccacgtagcaattatctctagaggaccacaccttgccagaatcacttgcaactcacataagagatacttgaaaaagttggaacatgaaggggaagtatatgccctagtgtagtctctagcccagcatccacgaatgatgaaccttctcatcacctttatagaagaggacaccaagcacgtgcacttttcccataatgactcgttagttattgaagcccaaatcacgaataaaagtctctagagttctattagacaatggcagctttgtcaacatcttgttcaagttctccttccaagtgatttggtaattgaagttggtctatcaccatgtctaatacatctggaagactttaacggagattccctaatgttgatggggaaaatccagctcctagtcaccttaaatggggaacataatgtcactgctttaaaatattgcctatttgtagtagtaaattgctccactgcctacaatgtcataccgggacaccctgtctcagttgaatttggagcggtcacctccattcaacacatatgcatgaagttcccatgtgataatggaagtgttggagtgatcagaggttattagaaaaatgcaagaaaattttataatgtcttcacccaaccgatatttatggttagagaagaatttgcaaatgatcctagaatagccatccagtgagggacagaggccatttgagaggattaacaagatgaattggatccccgagttaggatagaaagaatgattgagccactagaggatgttgaggaagttgacatcaacaaaacaaatcctactaaagttatcaaagtgcgaagaaacttatctttagtggtgaaagagaaaatcgtgtccacagtaaagaaaaaccaagatatattggcatggaatcatgcggatatgatcgggatcagtctgaacaccatctatcttgccctgaacattaatgaaaatgcgatgctagttctctaaaaaataatgccactacatgcagtaagggcagaagcagtgaaggcaaaagttgaaaagttaaattctattaagtttcttcaagaagcactatatttttttttgttggccaattcgatgctagtctcaaatcccaacaaaatgtagaaaatgtgcatagacttcatgaatctcaataaggtttgcctaaaggactactttccacttttgttgattgatcggagtggacaccacatttagatatgaactattaagctttatggatgcataccccagctataataagataaaaatccacgaggtagaccaggagcataccagtttccttctatgttgtaatgccatttatattgaagcatgttggagaaactaactagaggctggtaaataaaatggtcaaggtgttggaaattattttaccattatcttagatctactcacaagtatgttgattaacatcctagatatgaactttctaaaac

SEQ ID NO: 304243 - DNA, 2649 bp, Cannabis indica
ttagggcacaaaatccaacagatccttagttgggtttggggattatcagagaaggaatgggggtacaaattaaattaaccactaaggaggtgatgtttctagtttcctcgttcaagtcaaaataagatttgaacaggatcttgatcaagagtctttggttcctgaacaatggcatactgattttggcctgaatggagagggtacccacgaattggaataaagagctacaccagttcccaattggtgggtgaatttattcttaagaacagtaggggaccacccacaatgactgaaagtattacctcaggaggcttcatctttaagttcctgagttgttatattcttaagataatgagtgtgagtcacataatcctggtcttcttcctcctcgggcataaggacttgctgctagtttgaaaacttgggggttttgaaggcattagtactctgatctctgccaagaagggtgcatgcttttaaattgttattttgcaataaaaaagtttgccgctcgcagaccataggggagattgagaaggatcttgtgtctttcttcgattttcagggtggggataggcctcttagtgatcactgaaaacatgacaaaatagaagaagaattagtttaagtacaaaaaatgataactctaatctaaaaatttgagagaaattggtacttacgtataatcctaaatctagaggtgttgagtggatataaacttgtggtctaaaagaagtcatccttgaactcctttttgttaggcaccctcactgtgatcttacgatcactagtgtgggtcctgagataataaaagccccctgctctatacttcctcccagtttaggctttgacaaaataaaaattcaaaatttcaaggggtgttggacactcccacttcaaaatgtggtaaagggattttagacaggcgaggatcctgtatgaatttggtgcgagctaaaatgtagcaataccaaggtagttgctgaattctttgaaataattcctaagggggagaacagctccagcccttatatgctcaacactctatatatgcaccaattctagtaggcttactggtgctgcaaccttcatcttaaactagacgtctgggtaggtaacaactgaactcaccttaagccacggatcgaatgtgacatcctttctcgttcctgatgccacatgatctcaaaacatcgccaacataagggccgatggagctgatcctgaattcaattaactcagcctcgaaggtaacggtagggttctatggggtcttggatttgcaaactttttgagccataattttaaaatccaagtcacctggtgaaatagcaacagtgacaagtagtaaaaatattggcctcgctaaagggatagtaactaaactaggcaattcaagccaagcagcttctcgcaaacaacgacgcttgcccttaaggacttcttgcaaaatttgtctatagtgattacaagcttcttcttggtcagacctaatgagatggttcctaatttttgcatcatttaggtcaagtatagtttgaggttcttgggtttgaggcttaaaagctatggctgaaaattaaggatagtctgattctaaagggtctgggatcataaattatgggctaaatcgggacatgattataaagaataatacaccaattcttggaaaaagaaaacccaaaacctgcgaatcacataaccttaaaaatttctagccctaaattactctctaaatacacagttcacccatatagtaaaataatgccaagaaaaaaaaaatacatgccaagaagttaagactgaaagcacaaataaaagtcggcaaaatgaaatgtcacttactggtttaatgagaaattctgggtattgaataacttcgcgggaaaaactccgatgtcggagatactgatcttgacgaatttgaggacgatcgagggatgcaatcggataaaactcaaagaaaaaatgtgaaagatagaaagggcatgcaagtttgggaaagatgttggttgagagatttttgagttctaagatttcatggacagtaatggcaaaaatgaaggaaagcttgaaatttatacctaaatagtggtaaccgttcgatcgagagaaaaatagatcaaattgatgggaactaagtgagaaaggaacatttaaagcattaaattgagaaatgacttgtctcaaagttttgaactgccaaactaaaagcatgtaaatttaaaataaaaaatacgattgtaccctcgtagacatttaaaaagtttttttctttaaaaaaagtattatttaaggggcaattattatactcaaaatttagctaaaaataagaagctgacacatgtaccagggcaagaatacgaaccaaccaaagtcgtgcattattaaatgcacattcaataactcatctcgagaattacagttaataaaaatattcgagctcgctatataggcaataacaaaatgtgaataataactattaacaggtgagattggcgagacaacaagtccatctccatctcgagataaacagaatacacaataaaagttgttcaggacaagtaaacaaagagcttgcagctaattgatctacatatttgtgggtatgctcaaagaatgacaacaacattcgttcacctcgctttt

SEQ ID NO: 304244 - DNA, 2759 bp, Cannabis indica
actactactactactactatatttttggttttcaatggttgaacatattctgattttcagtgttcacaaagatcttcaggtatacttaaagtcagttaaaaattaatacaacaatatataagacccaacatcactattctctccaaagtacaccattaaaaccacattttttttatgaaacaggcatcatttaaactctcatggtgttgcaaaggtgaacagagtgaccaacaccagcatgacattgtctcgtttgagaaaggaaatataacaaccgcagagcgcagcagtaaacaagtattactccgctatctatgaattgaatgttattatgaattacatagttcaagcttccatcagttatctttcttagcttttctgcttaacaatatatgtagtcagagttgcataattctatcatcctaggctgaaactttagtttgcagtgtcttcagtctattgtctaattgagcacttattttcatttcagatttctttgaagtgggaatctgacccacagactgttcttatattgacaaaaccaaattcaacttctgtgaaacttatgtgttcagaaatggtcaggtgtggttagaaactgagatatccttagttttctccttacaaaagctcattttctagtagctgaaatgaaagatgtcctatataccaagagctcttttgcacccgtagtcatttataaggccattttattattcttttctcgtatagtccgtttaatcctcctcattcatcattgtttcattgtaagcagatggttaaagcatagaaggatgaacatttatgtggaaccacgtgtgcaaactgaacttctaacagagtcaactgacttcaactatgtccatagttggaaagatggtgaggagcaaaatatttttcattatcacttattttaatgcttcaacttcttgatttttgaatttaatgtttaaattttttgcttttttctttttgacagacagcgaaatcaccctccttcacaaaaaagttgatctcgttgtaactctaggtggagatggaactgtcctctgggtatgtgattccttacatttcgaaatattcatatagtaaaaagaatataaagaatagttgagaagtcagaatccagcaaagctggtgtatcaaatgatattatcattatctgccttatattgctgtgttttaaaggagttttcttcagatcttagagtaacctactgattgctgtcttaattgcataaacttaattttgaaaatgcagttttgaacccttgaaatcgagaatttgctcatttaatatcatttcttttactgtaatgatatattctcttagcatctaattttggttgtaataacctttcacaatttatttacaggcggcatccatgttcaaaggaccagttcctccagttgtcccattttctttagggtctctgggcttcatgactcgtttctgtatcctttgactctgtgtgttttaccaccatgccaagtaatagtaatttataaatgttcgtaatattaattatttatacttaagcttacaagcaatggtagccctctgttatgtctcttcccaaccacatgcttattacttttttctgtatgtctgtgctcaaaaaagttatctttaacacattcttcagacagtgaaacctacaaagaaacccttgatgcaattttaaagggacccattaacataacattgcgacaccgtttgatatgccatgttatcagagatgctgctaaaactgagtatgaaactgaagaaccaatacttgttctgaacgaggttacaattgaccgcggaatatcatcctacctcacttatctagagtgctactgtgataattcctttctcacatctgtccaaggtgatggcttgattctttccacaacatctggtagcactgcatattcactggctgctggaggatcaatggttcatccccaggtacttaaagatgtcatttttgtgagagtttgatgaaatgaatgatattgcccatattgagcttctatgttttatttgtataggttcctggaatactgtttacgccaatttgtcctcattcactatcatttcgaccactgataatgccggagcatgtaacaatacgtgtgcaagtgccattcaacagcagaagccatgcgtgggcatcgttcgatggcaagggcaggaaagagttgggaccaggggatgcacttgtgattagtatggccccatggcctgttcccacagcatgtctaattgactcaactactgacttcttccgcagcatacatgaaggcctccattggaatctcaggaaagcacagtctttcgatggccctcgagatacataactaatcccttacctctttcttctttcttctcatgagtcttacttctcagtttcaagtttcatctgcgaggataagaaataaaaaacagagaaagaggatctaattagtaatttgacgactgtcacgttttcatcatggaacactttagtatatgttagaacttagtcgagtgtattgcaatgtattcatgtaaaagccaccagtttgtatgagaaatttgtgaacagaacattttcatatactatcacttgtacactaaatagcaaaaatagtctaatggctcatttgaatttgactcattattgtcattattgttgtcattgtatctcattctaccattataaataagctacatgagtgagtcttatttagattttattttttgacacaatatttttctaatactttcaaat

SEQ ID NO: 304245 - DNA, 1911 bp, Cannabis indica
ttttaagtttttaatcataaaatgaaagtaaaaattttatttttaaaattttgtttttgaaaaagaaaaatgcgttcttttaaccatttttattttttaattttaaaaacaaaaaataaaaaggtgtcctataaagaatgacctacaaattgcatttatgtgtggattgagattaaaatagatttttatcaaagtaatccttcttgcaaaagataaattcgtcgtactccatcttcgagtcatggctgccattttatcaatcaacatgtcacgtattgacttgtaatccccatgacagaacaaaaaagcatcatccttaaaaactcatatgattcaattccaagtctccacatctcttatggaacttaaactcatctagcttcctatttttttttttttttattatatgagataagtattacatgcctaaaacaaataatagaggggacattagtcgccatatctcaaaccctgattagattcaaaaaaaaacatgcgattcaccattaaacattagtaaaaattagggagttctaatatagttcatgatcgacctgataaaggaacatgggaattagaaagcttctaacatctcctctaagaaatttcattcaacagtatcataagcttttcttaattccaacttaatcatacaactaggtcgacaactattccttccataatggcgcacagggtcatgacaaattataatattatgagcaatgaacctgctatatatgattccaccttgattttgagctattaaactagaaagaatattcttgagtctctatcatatcaattttgtagctaccttataaaccacattgcagtatgtaattggcctataatctccttaggcatgagagtatggactcttgaattgatctctttcaaaaaatttacaaaatgtggttgtatttgacatcttctaattaacttgcaagtttcaacacatttttgaaaggcattcgagtttccaagccataacttcattccaatactctcttccttgtttaaaatattgttaaaatcccctaatactaaccacaggacacgagtattacaatcaaccaagtattttcagaagcctaaccttccatcgcatctcttttattaaatggtttgactaataagtgaattaattggctagaacatttaataataatagagattgtaaacattataccatgcattattaaaaagaaataccaacttgagaactttaaaattgtatttttgaaaaattaattttgtaaaactgtaaataaaaaatttagactgtaaatgtattgtaaataagacataaaaaatatatatttacgaaaaactcttaaattaattaatgatttattaccaccacaaaaaaatatactaaattaaagtataacaattgagaaaaatagatatttttccactaatatcctttaacaaaatataaatcatgataacaatttgattttaatttttcataatgaaattatttttacatgtttcgtagtaaagatttatgaggagtctcaactaaaattacaatctcataagtcttaaactccccaaaataattaaaactatagaatatttacaaaatattctcattatgaaaaatacataatattctcattatgaaaaatacatagaattgtttagaataattaggtaaatgatagtatacttagaaattgttcatgttaattataatatctttgttctctcggtctgctatgatttctcaaaaaacttcagttgctagtcatcttttttcttttcgtaccaagcctatcgaccctctctaggcttaggtgtgattctggtcaagtttcttaatcgacacggtagtgggtgagtggatggtctatattaatctcatttctctctttgctctcctaatctctctctctctctctctct

SEQ ID NO: 304246 - DNA, 2713 bp, Cannabis indica
tggtgttgttgtcgtggtttcgtctgtgagtgtgcaagatggagacgtcatttttcactttcggtatttacagtataaaaggataaaaaaaagtctgagggcagtataaaagctatttttgccgtgtggcagtatttttgtaaacatttgaccaaaatttagtatttatgtaagttttcatttaaatatccatgtttttttagttagatttttgacattttcttcagcgtgtgaccaagcccaatttgatcagcccattacttgttgagtccatgtagcttccatccaatccaattccatctctgccttcttttcttctgattctcttcaactcacctgaacctctccgactcaatccctctctgccttcgcttcaatcttcctcaattgttcactcagaaattggcagcggctacgcgtcgccaaatttttccttgcagattcggctaaaggtactttcttcgaccagattatgtgaaattgttgacttctattctgtgttgaacgaactgctctctctctgtatatataatatatatatatgggttttggatgaagtccatcttttttagtggtccgtttaattatgcagagtaatttataatagtattgaagtaatgtaaatataataaataatagattgattgataatacggaacattactctactccaggattgaaacgggacctgtacaatacatgtgtgtgtgtgtgtgttttctgagaattaagtacgaattttgtgtcgtgacttgtgagctgttaggagaacaacctatatagatacatacatatatatagatatgtaagtttgtatatttctgttgtgtgatgctctaaggattgaatttctacatcgttttttaatggttcaatggaggatagatagtaagacaccagattgtgaacacccttcaatctaagtgaccagtacttttgggtttgctagtagttctgaacccccattgcctcccaaagttgtattgaaagcacactctatagaatttcgatgaagaatacaaaagtggattttaatgtttcttcaaattccaagtcacgtagatagagatagtaggaaaaacttatgttgaacagatgtctgcttaattgagctgaaaatttattaatttattgttttacttgattggtgtgtgctcgtttttatggtgatgagatgtttccgaggaaatagaaaccaatgcttgctttgttggaggagcatttacatacctccttaggttttcaaattaaatataaacgatgttgctttgctggagaagcttctctattgtgggagtctcacattccatgaccttgtggagcatcattctttacctctttgttcataccacgagtctttcgattcacttaattatgttgctctcattcttatggaacaagcagcatgtttattattataagttactctttgcagaaatttaaatttaatgtcaaatattgaaacagtttgattttttacttttcttgctttagaggttgttaattgtgtgtttgataatatgtgtatttggtacactatattatgaattgtattttagtttgtataaacggtagcatttttatttttaattttttttttaaaaaaaaaaaagaaaaaaggcaaaatgaataatgatttaatgcttttagaacatttcttcttaagtattaaagatgcttgatagcaacacaggactgcccaaatggggggaggaatggaagcgaacaagaacaagttcatagaggagtggggttctgcaagagagaatcttgagcacaacttccgttggacacgccgcaactttgcccttattggattattcggcatagccatcccaatcttcgtctacaagggtattgtcaaagaatttcatatgcaagatgaagataacggtagaccatacaggaaatttatgtgagtagtgagagaaatgctctcagaacaatgttcaatgaagaactaagtttcatttcctgacatgaatgaattgtttgcacttttatttgtattgtggcgaagtgatgttagcagccagtttactttgttttagagttgtatttttccattttcattaaactttacctttttctgttgtgagcattgagagaaatgcttaatagagccaatttcctgatataataaaactgtttgcacaataaaagcggtgtcaatgtaaacaggcactttggaattgtagtttgctctgtcatattaatacgcctagtttggaactatctcttttgttttcttatgattaaataaagaatagaaattggatcaattttcataatgtaaccagtatggaagtccaggttaattgcaggccgagcttatactcgttaaaagcttatattatatcgagtcattattgtgaagctcaaggcctgtgctagtggagtatgttgttttgccaatcatactttggtttgagatttagtttcatacagtcatacttaccattatatgttggagtaatcatcattacaaatataaaactttgattgttgatgaaaatgtattattatttacgaacatgtgtataaaatattatatttaacattgagcaattgggtgggcacctaaatcaaagaaatttgccaaaatcagagcataatactcctgtttgtattatttatcaaaaaataataacaataaataaaaagcaaatgcggtgagcgtggatcgaacacgcgaccttcagatcttcagtct

SEQ ID NO: 304247 - DNA, 2521 bp, Cannabis indica
tctctctctctctctctgtgcgtgtgcgtgtgcgtgtgcgtgtgcgtgtgcgtgtgcgtgtgcgtgtgcgtgtgcttgtgcgtgtgcgtgtgcgtgtgcgtgtgcgtgtgtgtgtgtgtgtgcagtccttaattgccataccttcaactaatactcagattgacacactaaaaacccatcacaccaaccaagcttccaaagtttttactctcaactttcttctttcatctgatgcataattgaattgataaactagcccggtcgatttaattcattacagtgccattttggagctcaaactttgtgcccaacgacttttttgaatttttcatgtatttcgttttacgtttcgagattgattgggtttgtgttttttgacaattttgaactgtgatttttctttaaatttttttggtaccttattatctgatctattcttctctggagtggaattctattgttctttttcttaatatttcaactactattactatttattttaagattagttaatattttttttaaataaaaaagagctggactgctaatatattgatatgtatgcattttatttaactaaatcaacacttaacggaatttgtagttgcttactgagatttttggaaactgattatagaataaagatgcttaagaaagaagtaaattaaagaagaaaataccaagatttttacgtggtttgagtgttaatgaactctagtccaagagtcaatagtattgagctagaaaagcttcaaggtatttcttacaagtgtttatgccctagttgaagaaccctaattctcagttgttctcctttatattcaattttcaaccctttgcacaaatggataatgttctacttataggggagaactaggtatgggcatacccagacccggtaggatatttagggatcaactagaatctctgatggggtaaaatacaatagttattgattttgggccacttgcttgaggcccaattcatgaagtgaggcatgtccgtacaagtagaggtacatttgaagatgttataggtttcatgcacagccgagtctgtaccaagaatatcaaagaatatggcgttggataaaaaagtaatttcttttggtagcgtatgcgctctgccagtctgatgtaggggacaggttctaacacgtttctaacactatagagctttgtgtcttgagagttctgtgtaaggagacgtcctaatgcaatctagatgaatcttagttactcgctcctagatttcccttatgaaggtatccgcacttgtcttaacatactcttcgcttctgagtcgaatgcccttttctgaatcaggaagattcgacattggcagatcagcaaattgggctcatgtctggatcagagctatagcatgacttgatcatctggttggataacaaacaagatctggcccaagtatggattgactttgactagtatttgaattttagaattatacacgtcattgctccaggaacccgaataacaatagtaacagttgcaacaataacataacatatagtatttaatctgtcgaaaaaaaaatatagtatgtataagtgtatgaaattaaaaatataaactatttatgctacaaatatctttatattttataagaatttttaaattaaaatatataaaatctaatgtttaattgcacaataataatatatggcatatcgtagtagtatgttgtgcacttatggtgctttcggtatttctcaataaataaaagccatatatgtaaggatatgatgtaaatttttccaaaagcacactactacaaatattagaattcgcgacagtcctaaaaatgattttttttcagggaccgttgctaaaagtaactatttaaaactgtcagaaaaaatttagtattctcgacggtttaaaatcatagtaaacaaaataagcaatgttttttaataaaatgcgaacttttaggagagccttatacccgacggtttaagtcgtcgggtatgagggtccattaaaaaaattgtcacttacttctcgccacatttcctacgtgttcacctactctttttctatttcccacatgcccacctatttcttctccatttctcacatcctaaaacgaaaatcttaactctccaaaaccccacccacgcctccgcaccatcgccctcctctctcgccatctgcctccctctctcgatctccctttcttctcgtctctctcgtctatcgatctccacccaccccttctcctgtcggtcttcctctctgtcgcatacgtcgaaccaccattaccttcagtcgggtttcctctcatttccgtctcatacgtcagaccaccaccacctcccgtccatctccctctctccgagctcggtataaatacatttatttatttatatacgtttttatttattatatatatatttattttgttattgtataaatttaatgtgttttaaagttagttgttattgtaataaaattaattaattattttaatttaatttaagtaaaattataaaactaat

SEQ ID NO: 304248 - DNA, 1455 bp, Cannabis indica
ctgttacgacaactcactgagggccgcaacccttgaattaattcactacttattaatcaaatccacctatccaatctctcacccattcatacatacatatgtatatattgtacacgtgtgtgtatatatatacgaattttatacttgttgaaacaaataactgattttgatttaagcgacaactggattccacaatatgcacaaacatatatatagagatgggatttaagtttctattgtggttcaattaatgtaaaaattagtttataatatttggaagtcttatatatatatacatatatatatgtatgtgtatatatgtatacatcaatctcaacctcaagaagaagtctttggtcaataaaatgggacccgaaaagctattgatagtatagtcgattccatgtggcaagtgaatttaagaattagattgtggtgttcatcaactacctggaaaaaaatgtggccccttttcaaaccaaaaaagtgaggctctatatatgttacactatttacaattttcgtatttttttttaattatttttagattgttaaagattatttttaaactatttaaagtattataaattaattttttcgttaagtatcatatcaatgccacatgtgtaacactaattttaaaaatataatttaatattttttttttagttttacaacttttttaattatgctaattaatttttagtttaataatattttagaaatacatacttttttattttaaattatggtaatatagtaactggcaaaatatatagccatatcattattttaaattaacatctgtaataaaatttgataaaaaagattaatttatacaattctgtaaataattcagagttcatttttaataagctcacaaatttaagaatacatactatataatgtgtttgctactgtcttttatatatatggcctgataaaacatccttctcagccagtccccatgaggcccccatatatataaatatatagatatacatatgtatatgtatatgtgtgtgtgcctgtgtggctgagtggttagtggggtctatcctccaatatttaagggcaaatgcaaattgagatactacaatgatatccaacatagcaactgtgttatatttttatatagtagtatagtactatacattccatgcatgtaattaataaacagaaatagaagaccaatgatactccaacccatgatcaatttgtctactatttcacaccttaaggtatatatattaatttgaatatttgatagcgaattttgtatattttcttctagtaaaaaaaatgagctatatgattataaatacttaaatggatattaaatttatataatttatcatgtataataatttatttgaatcttaattatatattagttattctcgtgtaactatttttaagttttttttttttttttttttaaaagttaaaaattaa

SEQ ID NO: 304249 - DNA, 1942 bp, Cannabis indica
tatatgaaaaaaatttacgcccaccctccaattaaatcatgggtccgccactgtctttgagcataaagagacattgaagttcacgggctcgacaatgtttttgaataagataccaagagcttcagagaagttggagatctaccatgaatggagaggagattgagaatgcgagaacaaaggagggatagagttatggagggagagcccctatgtatgttatctcgagccaataaacatagtttaggcatatatttagctaaaaatgtattttagctcacctgctcggcctgctcttgttgataaattctgatgtttgtatattccaattttcaacacatgtaaacttgattgttatttggatgattaagcatcagtgaaagttccattctaaaaatgaaaattaaaaagagcttgattgaattcttcatatcctatatttggtggactaagttccacattattcccatcttaagcacatttttatattttgagaagcaaacttattttgaagatttagatatttattttgcattttttttaacaaacaaatcttctcataataattggggtagagaagttttcttttaattgggcaataaatttaaggttggaaaagaagggaaataatccagaaaagggaacattattatcattaaaggaaaaaagtgggggcaacataagcataaacctcttcaacaaccaaattgaagtttaagaaagtacatacatactacatatgatcaaatcaaacatcatcataacaaaaactaaagtaaatagtaaaacaagcacccactcaactacataataatttccccacaacacttttattcagtgaccaaatccacaagcctagctagcttaaggtttgagcatggcaagaaccttagcccaagttggccttgaagttatatcagccacccaagccttgacatggggccgactctcaaactgactcttcacatttgttcccagcaaacactgcaagttaggaaggtgatgaagatcagccaaggtgatgcaatcaccacccatgtacttagatttggagagtcgattctcatacacatccagaacctttactaatttagcctcgttttcttccaccgctgcctggtcagtcgtcatcccaaacatgggtttgaatattatctcccaccccaatttcgatgccactgggtcaaattgatgagcttccacctccatccaaaccgatgcaattgccttcttctttgtctcaaagggtatcaattgagttcccttttctgcatattcctctgctatgtacttcgtaatcgccctcgattctggtatcaaaatgggtttattcatgaataatattagctacttctcagtgtaaaaaaaaaaaaagatggaaaaatcatttccgaatagctgtaaatctccatcttcaaaagctggaacttgaccaaatggctgaaacaataacaaattaagactagaaattcagacataggtgttgaccaaatgtaaaatcaacttgagcttgttttctttttaacttacgttgagagaaatgaaaggctcttgtttatgggctccagctcgcatgtcgacgggaacaacttcgaaatcgacctccttctcgtagaggcaaaccacagctcgttggaaggcggtggagagtggagcaccgtgaactttgacggcagccatgactattatcgctttactttgactttctcttgctttagtttaacttttgtgtgtttactactgttagtgaaagtctatatatagatggagtgatgaagcaagggattgattttataaaacatattaaatggttaggtaagacatcttccgtgggagaggagagatgtaaagggaaatttgattctatattcttacctatatttaatattttatccctaaactaatacatatcaccattgactactttatttaaaacccaaaaata

SEQ ID NO: 304250 - DNA, 3806 bp, Cannabis indica
atccatgccgttgatagagtcaagccactcttggctttgatcattggtttgaagtcaataggaaattcgttggggggggactgatgcttttatggaaggatagtgccaatgttaattatttttaactttttcttgtaatcatgttgactgtaatataagccttaatgttaataaaatgtttcattttactggtttttaggattctcttgttacttcccaatgaccttttacttggagtcttctttagaaaacattttataatggccctaatctttcctggtttatcaggagggattttaatagttaccttttgcattctaataagactggaagtaacttttttttccaataaagacagataattttgatagctttttagatacatttgctctttttcctcttccttatgtgcataataagtatacttcaaaaaatagtacgctttgtgaaaaactgattgggctattggttctgatttttggtgtaacctctttctaatgcggttctttatcattttcctttttatgttactgatcatagagcccttaaggtcctactcaatgaagatagtaatagttgtcttctttttatcaataaaagattttactttgaaaatgctttgttggagaattatgatttttatcttactgttaagaactattgggctaataatattaatcgctatgagaattgtagggattttactaggtttcttaatggtcaagactcttgtatctcttctctcaaaatcttggaataaatctgttaaacatctttttaactctagaatcagtgatcttcaaaaggaaattgctaggcttcaaacttctatccctagtgatagtgatgttgcttgtcaaattgaaagcctccaatctcaactagatgctcttctgtacaaagaagagatctattggagacaaagggctagggttcacaagcttcaagctagggataagaatactaaatttttccaccaatttgcatcccataaaaaaaagaataatactattaaatttcttaaagatgacagtggtaatattattaataattttgatgatatatgtaatttaatttcctcttatttttctgatctttttcaatctcatggttgcgatgctgaggctgttaatcaaatttggattgttcgggtccccctcttgaggatcctaaattcgatttccttggccagcctttctctgtagaagaggtgaggaaagctatctttaatctttctagggatagggcccctggtcttgatggtcttaatgcatattttattaaaaaaattgggacattgtcggctctaattttgtcaatgttgttttggattgtcttaatactggtgctgagttttctgatgttaatctactttaattgttcttaatcctaaaaagcagcatgctaacacccttaaggattttagacccattagcctttgtacaactttttataaggttattgctaaaattttagctaatcgtttgaaatttgttctagataaaatcatctctcattttcaaagtgcttttgtgtctggtagaaaaatttttgacaatatttttattgctcaagaagttgttcatgctattaattctaggaaaagtagtaaatatggttgggctgccttaaagcttgatatggctaaggattttgatagggttgactgcactttttggaaagtattatgctttcattttaatttccctatcagtttttgtctctcttattatgagatgcataactaccgactaacttctccattttgattaatggtgttgttaggggatctatcaagccctctagggcattaggcaaggggatcctctatccccttatctcttcattctctatgctgagggattatcatctcttcttcgtgctaaacaagaggagtgtcttctaaaggtggtgtctatctctagaagagctccttccatctctcatctcttttttgcatatgatagcctcatcttttgttcagctgataggagctcttgtagctccctttgggatatttttaacatctactctagaatgtcgggacaagtcattaacttttccaaatcgtttatccttttttctcccaatactttgcaggatattagagatctcttctttagcacttttaatctagaggatagacctttcgttagtaaatatttgggtctacctcagtgtctctctagatctaaatatcactatttttcttttctaaaagataaagtcttttttgtccttaggaattagtctgctaagtggttttccaaggctggtaaagaggttctccttgaggctgtaatttaggctatccctacctatgcgatggcctgttttaggttgcctatcaagctgtgtagaggaattgaagttgtaatggccaggttctggtggggttcttctagggattctaaaaaaaattcactggaaatcctagaaatcagtttgtaaatctaagtttatgggagggctaggctttcgttctttaattcaatttaaccaagctatgcttgctaagcaggcttggataatttttaaaaatctcaattctttgcttagtctggttctcaaagcaagatactttcccaactcctctatttttgaggctgctccgggtcataaccctttcttttcctggagaagtattctttgggggagagatttggtggcttcaggtataatttggaaaattggggatggggaacaaattaggacaatcgaggattgttggataccttataataagttcgtgatctataaggataatggctcacctaactcatatatgctttcttatttcatagatgattcaatatcttgggacttgccgaaacttaggtgtcattttgaagattctttggttaatgatactcttgaggtttctattatcggattgcataaaaaagatgagctcatttggggtaaggagagttatggtctatttagtgtaaaatatgcctatcatttggctctctctaagcaagacattccctcttcttcatcttctactgagtccaaaaagttttggagtaagatttggaattctaaaacacccctaaaagttaaacattttgtctggagagtcatgtcaaatgctattcctgtagctacttccctttttaagaaacacgttattgattctcccctttgtcccctttgtaaacttagtcctgaaactgttaagcatgatttgttagagtgctctagattgaggaaagcttggaaatattcaaagtttgcgaatcactactataattataaacaccttgatatttatgagtttttaatgagtgttaccaatattcttgataaagatcatattaatattttatacagttttttgtggaccctctagaatcaaaggaacaaagttttttacagacataatgatattcctcctaatgaagtgtttcattggtgtgttagctttttcttcaagtatttggatgcgtaataacataaaaaccaatcaactacttttgcccttgtgcatactaagatttcgacatctttttcaaagggtaactttcggatgtatattgatgcagccattgatctcaataacagaaaatatagcattggtgttattattttggatgagttgaaccaggttagagcaggaatatccaggccctttgttggaagtgttcctcctgctgtggtagaagcaaaagcaatccttcatgctatacaatgggctcaaatgttacatctgttgggttttgtgccctaaataaaaccctttacaatctgattagttatcaatataagaaatttgaagtgatttatgtttgcatgaattttac

SEQ ID NO: 304251 - DNA, 3229 bp, Cannabis indica
agaggatttagcaagtttgatgtttagtttttttggagtattccctaatctatgtatgtcgaatgaccaatgtggatgaacatggattaacccagcatactcttcgagtggatagaaaacttgtatggtttgatgagatttcttcttttattggagtttcttaattcttgaagttgtatgacattatgatttattttttcaataaattattcattgacaaaaaaaaaaatgacacttatttgaactcataaacaacatgaagaataaaaaattaatacacaaatatgggttctttgggggatgagacaacatagaaggatgttttgtgctttattttatactagtttattatttttatagaagaatgttagggttttattttcatattaggcataccttaatagaaatttgttagggtactttatttttaaactagtgtgcgttaatagaaagatatgttagggttttacgtacgttaatagagagatatatgttagggttttatttttaaattaacgtactttaataaaaccatttagaatcttataaatatgggaagtatgttattctatttataataacgctctgatacttcaataaataattgtaatagttaactaataatttagtatttttactagatatgtcttaaattatatagctctaataataattataaaacaattctatctataaatcattaaattgtcgctgctcattaatttatattgagataaagattatatttttagtacttttagattttcttacagtcatataaatgtatcatcatttctcaacatgtattgtagtaataatctataaatactataaataatttatcactactaatttattaatgtaagattacttgtaatactaattcattagtatagtatatatttaaatctatgatcaaataaaaaacatcatgatctaataagagctaaatattgtaattgttatctttggtctgaattatagttattattaactaatgataataactaaatagtttatgtatatttttcgtatttattgtataacttttttacttacatttctctctctatatatataggtgtatgaaccagtctacacactgattcaacaagcaaatttaaacaaatatcttctgaaaccatatgaatcaaattttgagttgcaaatatgtttgcatgaagatgttgaagaagacatccaaaatgatgatttttcggtaccaaatatatcttaccaaaacttaaacttataatataattaccaaatctctagtgcacttttaaaataattattttggtagacttcttatttattttcaacatctatgaaagttttttagttcattttttttttcttcataattatgtatattatagttaattaagactagcttcctttaaattttttaaaatttttaaacaattacagtaccaaaaataaggttcaaatatttaatttgttgcacttgtaactattttttctcatacatatggtaatcaactgtttgaatcttatttttaattctattctaaaaatttacgaaactcttaaataattgtaacatatacaattataaaataaaaattaaacttaatatatttccaaaaaaataaaccaaaacaactattcaaaagatgtagttactaatgataattttttctttttaatgtacaaattaaaactagtactctgaaaactatgcgattgaagcattcccgctatcttatcaactaccagtggcaatggcgcctcctcctccgatcccaactgcccttcgaaagggcaaggtatataattttctttgtaataatagtatttttgtttaaataatttttttaatattgttctttaatacatgtatttatgtatgataataatgatgatgaagcgatggagagcaccaagaccttatgtgatgagaaagaaaaagaatatgcaacattctgcaaaggttgctaaacttgaaaaagaaatcaattggctccaagattggattattgaagctagacctcgcaaagatggcattagacatgattatgtatgtgtatatattattatgataattaaattagcattaattaattatattttacttaattattcgtatggtgtgattatattgcagtattactaccataaagcatcgggtcaaaggtgtcgatcattggttgaggtttatagttttcattcttatggatatctcccgagaaaatctgatccaatccaatctaatccatctacagtaagacatataacttgatttattaatatagttatacaaaacgttaatttattaatagagttaaatttaaataggtaatgctagaacagttggaacaaaagccagaaccagaatcagaaccgaaatcagaacatgttatgatgaagaaaaccaataggaagaaaaggagttttgatgactattcttctagtcatgaattatatccaatatatgaaaataatgatcttgttgaaacttcttcatcatcaattattgatgaaccaccaatgtctattgaagaatttcttagagattcttataataatctcatgaatacacctcctaacccaaactcatcatctgagtctacacacatggataaaaaatatgttgaagactttcttagagattcatataataatctcatctatagcattcctgcttcaatgcaaaaatcatccaaaggtacaaattttatctaatattattcttttattttttttttaataataataactattaatttattttaatattttttattttatttatgtgtatcttttaagggtataagaagaggagagttgctcgtgagaagaagagtagtgaagaaaaatcagtccctatggatataatagtgattgattaaagggtccatttgtttgcacttaatgaaaatatatatctgattcagtcagttctgaaagatgtatatttcgattggtgaacgatgtcgtttttagttttgtttaagttatttcgaacttaatgtttttagtttatttgaataattcaaaagtggatggttttatattattatcatataatcaataaaatatttatcgtgtttgtcattctctcaaaaccaaaattacatacaaagaattattaaaagtaaaaatatttaaaaaagaaatggaaaagctttctgttctcttgtggtcagggccggccctgaaacaaagtgggccataggggaaaaaaaaattttgggcccttatgtta

SEQ ID NO: 304252 - DNA, 1497 bp, Cannabis indica
aaaataaaaaaaaaaatattaaaaaataaaaaatattaaaattttagaaataaattttatagttttaaaataataatattaggtgtactaatatatattttaaatatatacaaaagtgtacacataagtagtctatattggtagttaagtgtaaaaaatagataacacctcaaatttgcatgaagttcagtagtttggagggttttacggtcaaaatttgaacttagtaggtaaagtgcaagtagaatgataattgagaggctttagccgcaaaaaactcaatataaaatgtgatagaataatacatatatatatatatatacatgtgtatatatgaagagaagaacatttgtttattaatttattttgacagagagacatagacaaagatgatttattttgaaatcatcatctctttatgtgatgagagagaggtggatgcaggtcctgatatgcaaatagagatggaaagagtagctaagcctgatgtgcaaacaacgacagaaagaccagctcagtcaagtatgtgaacactgacaggaaggctagtgggctttatggcgaatgacgacagtgtgacgaccaatgggacctgctgatgtgaatgggcagtggttaaaggctggacctagtgcaaatgggggtggtggataaaaaaaataaagagagagcaaagaatgtggtcgagagagatagagagacagaaaggtaaatgtgtttctcaaatgtaggatttgttataaaaaaatatgtatatgtagtatggtttcatgtgggccttttatttattttttatatatttattaaataacctcagtggtgtcagtttagaagcgacacttataagttcaatagcgtcggttctaaacaaacacttaagagtcaaattttttgtttttttggcatcagtattgtgtattgtgtttgtgagtggactgatgccattgagtactcataggcgttggttcacaattgacgcctcaaaattagagtgctctatactgttagtttttaacttgaactgtctgttttattgacactaaaaatgttttttgtagtccttatattaaacacaaattcatctgaaacaaaacgtgtgaactaagcaattgacagaatcatataaaagattttcgatttttattattaagtgatgagattacaataaagattttatatttaaggcataaaacctaataaggacatcatgtgatcatgctacattaggatcgagtgttgaaaagttgcgccaaagtatgatttcagtagtagattcacaattaaccaaatgaccaataatgagttaaaaaattcaagacattagccatggtagaagaaattgattgtaacgcccgtattttatatttaataaacttgaaagttaattttaataaattatagcttaataaccatatgggtcgggatcccgagtatcaaaatacaagttaaaagtactttactattctgtacatatttttttttctttttaaaaactaa

SEQ ID NO: 304253 - DNA, 911 bp, Cannabis indica
tttttccttactgctgccacacgattttttctccctattcggccaaggtcaccagtcctttcctgggcctggttgcggccatggtcgagggagtgatgatttacactgtgggaatgatttttatggtggtggttatcaagcttgtcttcttcgatcttgggttggtcttgatggatttgaaattttctttgattggtttgtgttggcttctgaatagtgggtttttgtcgattttcttgtgtgaaattacttgggtactgcatctgacgtgagtcgttgggtgagggctttttcttctacctcgaatcatctcaagtctggtgttttatcgatttttttggtgggtctcttgtgggatggtccgcagtggtggatcctggcttggtggcttccttgttgagtttcgagtttcttgtgtgtgttggttaaagagagtatgtttatgtcaatttaggcttgagtctaagatgttgatgcttttgtgattagttcatttctttacaatctcaatacaagtccaacacccaagcttcctccaagctttttctttggaacccatcgtctatctctgcaagttgatcctcatcattcgatacccatctccattagtgggacacctagcgccgcaagatctcattaaaatcaataaccatgtaagaccaacaatagagattgtctcatattaatgcattattttgaaagaaaaatgtgtatttttattttagtctattatttataatatttatacacttgttttattaaaattacaaatttaaattaattaaatataagttttaatttaatttttattaaaatattcacttagattgatttgaaataaataatttatctttcatccttaatatatatatattttaaataaacattaaaaaaattatttaatttaagtt

SEQ ID NO: 304254 - DNA, 4277 bp, Cannabis indica
attggaattgggttttatttagggcacaaaacccaacacaaacatgatttacaagtttcttcaaggttttttggttctgcatgttttccttgtattaggccataccactcccacaagtttcaatttcactcccttaaatgtgtaaatcttggttacaacacttctacacaaaagattcaaatgcctaaccccaacaggaaataattacatctctcgtgatgttgtctttaatgaactggagtccccttttgaaaatggtttcctcaacaatttttaacctccccaaccttttgtgattcacgcctcttcctggtctcttctttccacttctattacagatcgtggctctttttcttctgcagctattattgaaactcaagcactacatgaagcacattcaaccatttctttgtcacattcacaggaacctcactcacctgcatccaaaactgcttcaggtattggaggggaaagaaacctcaccactgatgacaatggttctgatctcaaccttgattagtttgatattcaagctcatgcacttgaaattccctctctagcagccactgaatttttctagcaacctacttatccacctacaccaatcactcatcacatagtgacctgagctaaatatggtatatttaacccttgaattctcttaagtcatgtaccacatcctcttgataatattgaacctgacagtgtggaagcagctcttcaacattcaggttggtccaatgctttggattgtgagattgttgctctcaaaagaaacaagacatgggtgttagttctatactctagttacatgaagctggtgggtaataagtgggtgtattggataaaaaagaattgatgacaactcctttcaaaggtacaaagcaagaattgtggctaaaggattctaccaaagaccaggtgttatttatgggaagacttttagtccgattataaaggttgtcactgtcagaattgttctcactttggccacattgagaggttaggacataaggaaattagatatcaacaatgtttttccgaatgggagttagaagaggatgtgtttatggtacaagctcaaggttttgaagagaaaggcaaagaagattatgtgtgcaaattgaacaaatctctctattgaaacaagcacctagagcatggtttgataaacttaaagatgccttgctgaaatggggttttaaaaattttaaatctgacacttcattattcttttacaaattaggaaaacttattctacttgcactaatttatgttgacgatatcatcattacaggaagtgaacctatcaagatgaaaacttttattttagaattaaacacacagttcacattaaaggacttgaaaccattacactacttccttagcataaaagttttcagagatgagtcgggtctccaccttccaaacaaagtacattgaagatgtcttaaaaagagttaacatggggaacttgaagccatgctcaactcccatgactccggggaagctcatgtcgatgaaggatggagaaccaatgcagaattctaccatctatagaagcacaatttggaccttacaatacctatgtcacactaggcctgacattgcctatgctgtgaatgaacttagccagtttctacagcagccaacaaccactcactagagtggatgaaacgggagctaagatatctacaaggctccaaacatctgggtttgcacatcagttgttgtaacaagctaactatcaatggcttctcagatgcagattgggcatgttacctagacaatagaaggttaatagttggccattgtgtgtatctaggtgaaactccggtatcttagtcattgaagaagcaacatgtggtatcaagatcaagtattgaatccgagtacaagacacttgcacatattgctgctgaaatatcatggattgagtctcttctcaagaaaattgaatttcctcgggctgttccttctgtgacctggtgtgacaaccaagtgctttggcttctaagccatttttccatacaagaacaaatcatattgaaatagatatgcactatgttagaggcaaagtacattaaaggcagcttaaagtgagatacatctcttcacatgatcaagtggcagattgtttgactaaagacctcactcattctcgatttgcattctttattgacaaacttggtgtgaaaagttcacccttttgtttgaggagaggtgttaaggaatagcaaattagtcaggtattatttgcagtcgtcccctatcttctactttgcaccaactcacgtaaatgattggccatgattgctaacatgtacaattctgttataatttgtgattgtgtaatccttatagaattaggcttgttagaatattcctttgagaattgtgtccagctatataaatacccttttacctactgtgtactaatataaattatcatacacatatttattaatttgttacacatatttaatctatatattatattatttataaataatataacagcttatatacacacatgtacatacaacaaccctatataagtcaaattaatattggaggaacacacctacataatctcttccaccttaaaaaaatgatgaaaaagataaagttcttgaaacacatcaataggaataagattgtagaagaagagaccatatgtatatttagttcatatggcaataaagctatagggaccaatacatagtgatgtgtagtggcacaacaatggcacgtgattcacacttttaggcctatagcctaacaaagcgtggaattggagtggaccaccaatggcgtttgtggtatttcctagctataccctctaatgcattcctattattctttggagccattgaaagaatggataacaagttaggtcactcttgccccccctaatacccttctctaattaatactacccaacaaaagtcgttggagtacttacccatagctttcttcttcttcttcttttatatgtatcttatcatcaatataatcattcacatctttaaaccctttttttccttcttttctttcattacacaatttcgatctatcccctttatcattcacatgattaataatttgattttattatatatggttgtatagttattattattatgtaactggtgttagctacactctactccaatgtatatatacacattttgaaatcgtggagtaattataattattttgagaaaataataatatggttgccatgatgatactaaatatatataattaataatattttctggtatatataggtaataatttgcataacacatagacacacacatttaatttttgtatattgtatttctagaaattgagcaagtggcgtgtataaaatggtttttgaatttgtaccaacccttggtaagtatcgattaaatatatgtacacattatactcaacatatatgcatatatatatgaatcaaattaattaaagtgtggacttgacttaaaatttcaaatgtgtgtttagctaagtcatttataaatatatgtagtacgatcaacttgttggcattaaataagtaaattaaacaaaatttgaaagttataacaaaaccttttaattagtgaaattttctatttcaaactgccgacattttctaacgaacagtactatttatattattcaaatatatatatatttaattaaatgataatgctaaacaagcttatgtataattcatgatcgatatatcctaatgtatatatatctctgggacctattgtactatataaacaatatctaacaaatgtgatatgttggttactatttatatatctaatcctaccaactaataatgtttgctacttattgattagcaattaataattatattagtgtacctgaaaattatagcagttgaaagcttctttaattcattgcctaattttttttattattatcttttttctgagtgttttttctttgctagctatccaaacaagggcatgcatatgtgttgaaaaagaaaaatcttttccaagttgtaattaataaaatatacaaatttttttaaataatatatatatatatatatatatattaattaattttttaatcgccatatatatataatctaaacgtgtcgttcctttgttcacaggatgccaacaactaagtttgttaggcaaatattggtgataataatcttacctaatatataaaatgtctatgtaacgttttttgtttgtgtcttttaacagtttggaatctatttaacagaatatgct

SEQ ID NO: 304255 - DNA, 3327 bp, Cannabis indica
tagtcatctcaatttctttggctctgaccataaagccatcaatatgaagcttgataattctcccccaaatcttagtaaggttgaaggggataggagatcctctttgagaatgtctggttgactgaactaaactgggatgaggttatccttaaggcttggactcatagtgctagctctaattttcccatccaaagcctaggttccatacaaaaagcttgtgctgatcacctatctaattggaagcataaatctttctttgggttcctaaagaaaatagccaatgcccaaaagtgcctcgagaatgctagaaactcccttgacaactctgaggcctcctatctgaatattaggaagttgtaggcaaatttagatagtctcctttctaaggaagaaacttattggaagaaacactctagtgttaactggctccatgtcagggacaaaaacaccaaattcttatataggtttgcttcgaataggaaaaatactaacaaaattcaccatatttttcttagtgaggctccaaagtgaatagtgttgaggacattctcaacgaaattgagaggtactacactgatctcttcacatctcaaaatcctcattacagggctatatatgctataatttagggtattactactcagcttaaccatgattagtatcagtttttagaaaaagcttttccccaatgaagtgatacaagctctgttccaaatgccccctaaaaaagcccctagagttaatggattcaacaaccattttcaccaaaaaaaattggaatgttgttggcaactctgtcactaatgcaatgctcagtttcctgaatcatggagttgatatcacacattttaatacaacactcatcacactttctaaatgtgaaaaatccctctaccctcaaggattaccgtcctattagcctttgcactactatctataaaattgcctctaaaatcctggctaataaaatgaagcaggttcttaactccttaatttcaccaaatcaaagtacttttctcaaggggagacttatatctgacaacattatgatggcacaggagctcttacatgccattaaggggagaaaaacaagaagcaccggttggatgacaatcaaacttgacatgaccaaagtttttgatagggtggaatgactttacctaaataaggttatactgaaattggattttcctaccaaattcacttccctagaactatcttacaatagcttcatacaaatttaacgtcaatggtcaggcccttgttcatgtaatccccaccagtagaattaggcaaccattttaactatttaatgtgtcgaaaataaatgatgagcatactaacttttttttttcaatatatattttaaatgaagaaatgccatacatattgaatcaaaataataataataataataagtaatacacgttacaatttaatttttaatgtatttgtttgtatgtattgtaaatttcggatgaactatccatgtttttaatactaaaattgatggcatttttgtaatttagatagaaaagtagtgggtagtgatggaatggatttgctgtgacgtctccactggtagcgccaggatcccaagataatgaaatttagtgttaatttatttttaacgatactcataatcaactcgataacggcgactcagccttaaacttggctgaaattacgaactctcaacgattatcataattttaaacttgataatcttgttagtttcctgattagcattcaatgctttatttttctcctccaaagaatattaataaaagtttcttaaaaaattgtcttcttgttctgatatttttataattcttcccttaaaataataaaaataaaaatatatattattgccatgtatagctagtgagattctagagaacacaaataagatctgcagccaaatcgataagagaaaaatgattaatttcacattaataaattaatgaatgaaattttgtcatcttttaaaccacaattttgatcctacttaatttttttgtttggatttatattattatttcgaaagtcatgttacatctccaatttttggcctcaatttaatgatataactaacagttagtaaggaaagacacttcaaatttaatcaaatccatagatacttatttcagttgataaagaagtatatatggacccccttagatttatgatatgtgaggttttgaactgagatagagtagtaatactcaaatattttgagctgaatattcatacatacatattgttttcattataaggacatattaaccaataaattttggattttcatgtatccagtgacttggccatagaagactttgagaattaacagtgacaatagatgcaattattcatataaagaaacaatgatattaattgtctttggcgtttgttgtggacttaatgtgtggaaacattgactaatgttaaagagcctaaatttagagaaaaaaaaaattacatgtatcatgtatagtaagcaagaaataggaaagtaacatattaatattgaatgacttaagcaaagtgataatatataattcttctttttatggttaactaatttaattatttcttggcaagtgtttttataataagatctaaaaggtcgtattttgatgcatatactatatatatcttaaagggctcagagtactttccaggtgattgtggtttgacataaggcactactataaaaataacttgttgttcttaaattgcattaatctaaattaaaaacatttctgactttctttgccagttaggaaataaaaattgttaatagtatagatattttcgtggaaagtgttgaatttggactttggtcttgaggataagttataacgccacagcaaaataaaatactatttaaattatacaataatatttcagatttgctttacttttttatactctgatagtcgattcaatccaattcacacttgtgcagattgaattggattaaaaaaatgaaatccgcatttagtgcaaatcagatgcactatgagtaaaatagtacggatcagattaaatgaacactttacatacttggctttattttgttggtggttcttattaatgtggtgatgttcaaccttagcattgtattccattagtctcctttagtattagtttattgcattagcaggtaaaaagctttatgccaaacttcttatcaagctaactcttttaataatatatatattttggaaagttttatgaagcactcaaatggatgtagttataattctaatatttttatattacagtgtatactatagaaatttaaggatattttgctgttatttt

SEQ ID NO: 304256 - DNA, 2881 bp, Cannabis indica
agtataaaagttattttagcgtaacatataaaagaaagaaaatgggaaaacacagtaatctgtgtaaatttcccaaaaaaaaatcccaaaaataacatgaattccttctctccaatccttttaaccttttctttttgggttcataacttttataggaaataaatgaagtattattgatcatagaattggaaatcttaccataataaacatgtaaaaggttgtggccgggtgaagaagaagagaagtaagaattgcacatacatttttaccctcagtcaaagaaatattttattatttatccggtatggacaacgctttataagttgaatattttttatttcaaaaaaaaaaaagtttaatattttttaattgagagtcttgttagttgttactctcgtaggatcctgtagtggggaaaaaaataatttaattgaatttaaaatgcaggtaggtcaaattatcctagctagcctgcatttgatattacttatatatatttacaagactatgcatgtgtgtgaaagaataatgctatttgaggcatgtgtaaattgtaatatgagatggggcaccttaagcaattgatagagattgatataataacctactcatcaccattgtgaccaaactattttaggaaccatcatgtgtatgagtgtatgtatatagaaattaatatatagctgttagagtgtaaatatttttctctcactatattgctatataaagtttctttcacatgcatgggcaggtcaaactagaaacaaccctagcctgtgtttgatatattacttaatcaaaatatatatttcttcccaaccagagtacgtctttagtttattttgctaatttgctttgttcgatctctttgtaatttgttttattgctttcccttgtgtgcgttttatcttgtcttgtagggttgaggcagaaggtttattaagatctctttttcagttcgtcatcttctgaggttagtcaaacaatcatatatataatatactcttatctttatataaatatatatatatatatatatttatattaacacttattgttttgtatattattattatatatgtaaagtcagggccgggcctaggcataggcgggctaggcctgtgcctaggtcccacaaattcggggaccaaataaaaaataaaaaaattatttaagctaaaatttaagtgtaacataagcaacaaaaattcatagcttaattggttgaggtggatggcataatgttcaaggtcaaggtaggttcaaatcccataacacttcttttttttttttatatatatatttttaagggtcccaaaatttaatccgtcttgggcccatatattttcagggctggccctgtgtaaagttaatatatctttaggcttcttgcttcttaggtacaattaatataaacaagatcaacatggagtattttggaattgttgctgatgagatattgggaatttttgttccaattctagtttactaggtatattgtggaatgtaccttcttctggatttaaaaataggtgaaaattatagattacatacaaaaagagatgagatggagaagaatacagtggacaaagcaactgtcataaaaggtgttctccttcaacagttcatacaagcaatcacaacaaccatatgttatatggtaagaaaatataaatatgtatataacagttcattttatgatgttatatatctttttttggaattaatataaaatatatatataattaaggttaatcgaaagggtggtgatgatgttgatggagatgataataatgatgaaaggtttatggtgatgacaattattattttgggatggcaatggggtattgctatgctggttgtggacacatggcaatatttcatgcaccgctatatgcatcagaacaaatatttgtacaaatatattcactcccaacaccaccggctggtggtgccttacgcatttggagctctgtacaatcatcctttggaagggcttttggtggacacaatgagcggagcattgtcattttttgtgtctggtatgtcacctaaaacgtcaatatttttcttctccttcgccactatcaaagccatcgatgaccattgcgagttatgccttccttggaatccatttcatatcatcttcaaaaacaacactctttatcacgatgtgcaccaccaattatatggcaactagttcaacttttcccaaccctttttggtcatgtggataagttgtttggtacctaccttccccctactactcctcactgtgtaccatctaattagtgttgctatactacaaatgttttatcatatattaattaatgtaaatattttttttataagctttttatatttctttgtggtttgtctgtctttaacctctgctgttgtttttggtctgttcgtgtgtttggtagtactactgctttgtaatatctcactttggcttttgcccttttctcttttaatgaactttattaaaatatatatatataaatatatttatatgtgtgtgtgttaattaattttttcttttttctttacgtttatatattgcaatacaaagtttctttcccatgggcgccactactacaaaaaggactattcccaacggtttaaaactgtcttttttactatttcccaacggttcctaaaaccgttggctatgtgggtgtcataaaaatacggaactttaaaagacagtttataactgttggaaaaagttactttaaatgacagtttacaactgttgcaaaaaatcactttaaatgactgtttataaatgttggaaaaagtctatgactgtttataactgttggaaaaagtcactttaaatgactgtttataactgatggcaaaaatattatgtaaa

SEQ ID NO: 304257 - DNA, 1333 bp, Cannabis indica
attgaaaaagcactgtagcgtgccttaacattagggcgttacataacacttatccaaagtgtaagtatacctatccctgattatcatgcgagtctaaatcaagtgaactgacaaatcaaggaattaaacttttgaacatataattatgattatattccactgtgttgacaacactataatcatgaacaaatacatatgttctggaattaatagaatttatacaataaatataatcatgaaataaatcatgtgaaccatgcaacataacatgatttctgatctttattaattagtaaatttgattatattgaaatgagttttatctagagcactaaaccttacagaaaccccactgggcgtgtgatagacttcaagcagtgattctcttccatgaaggagaattgaagaagtattgaacccccagtgatctttcaaccaaaagtttggcaaggctggataattgtcctccgtaactggccaatccatgcacctaaaagttcatggaacgtgtacaatttggtgcagttccaccttgagatagcgagtttgggagtactgaaaaatgtacttctggagcttgagggtgacctactcctcagggagatctcaagaaatcctgctgtcttggaactgacatccttcccggtgcaaccactcgactaatacacgagataagaactcaaacttccttcactgtaccagctactctggattcaccttctccagtgtcattctcagctaactcaattataaagtcttttgaaatatatgacagttcttcggcagtgtagatggtcattctaccatcatgagcaactctcaaattgcctaaatgagaagcacgatagagattccttaactggtttataatgtctcgagttactttcttcgatgtaacctcatgaattatagttacatcataataatagagatccatttcaacaaccttgaccaagaagtgattttccttaacaacacaatttctaccaaccgtgccataaccaggtctaaccgaaaacctaacagatttcaacgatgctagaggaaatctcatagtcgccaccactgcgggttcctacgatatcaatttctaattagcttcacggcttaatgaaaaggaagtagaagtagtccacgacgatggacctggtactgacaccagcaccgatgcaggattttgaaggttgagggatcaggtagtaacaaaatgtatagtttgacaagcacgttatttttagtagctctctattggttacttggtgccaacacaaattttcttgatttcaccgccagacccaagtatttcttgttggttattattttaccaggatct

SEQ ID NO: 304258 - DNA, 2703 bp, Cannabis indica
gaatcaacatcaataacatacaccttctcttgtatgattggtgaagggactctctgccactacgtcacaccttctcttgtagtggttatcgaggttgtcactacgtcgagttggtcgctgatcgggacctcctcacggaggtgtccttcttattctgcttgaggtctagggatgccctcatccccttcaagttattgaggtctatgattattagtaacctcctccccgatgacagggggtggtgggtctctcatcatggcgaccaactaattgttgtcaaagtaaattttgacgtttcagaggcgacgtgagaatctagacattttgaaacggttgtgtgtagagaaacaactttgccaaattttgttgttcccacaaacggcgccaaactgttggcggtgagaacttgtcaactaagttagtggtttgaaatatgaaaagttacccagaaacgtgataaagatcaagacaaagatgaaggtgaaaagatgtctgaatattcctctctctttattcaatatctaagttgcaccaactaatttccaaccccctctcacatctgagataggggtatttataggctctaatggccaaaagtataaagtgatcccaaggggagaacacattgctttcaagttgtaggctacaggtgctagagtttggcttgcacctcgtacttttgtctggtgtcaagtgatctctgatcccaggcatctggtccctaaccgtaggagggtgatcccgagttgcaagcatgtggtcgcaagttgcagcagagtgatcccgagctgcaggtgcgtggtccccaactgtaggtttgaggtccccaccttctagtaataggtaagtggccacagcgtacctttggtcgggcctttagactttgaaggtatgttgtcactgctactcatactcccttgcattcagaggcctcagaaggcgtggtaatatgctttccctgacacgccttgtcccttgagttctcatctaatgccattctttctaaatgccttcacatcttaacttatactcatatcccttcaagatacattcatgctatatcacacttggcacccttttcccacacacacataaaccccccaactcacacacacggctcgcatgcgagcccccacgctcccacactatgcgacccccaccttgcacacacggcttgcatgcaaggccccatcctcacacaccactcgacccccaccttgctcacacgtcttgcatacaagccccccatgggctcgcatgcgagcacccacactcactcaccacgcgacctcccaccttgcccacatggctcgcatgcgagcctccacacttccgtgctacctttgctcacttcaggcttagtttgccctgaagccctcacaagggctcgcatgcgggtctttcatttacgcacacatgcatcttcacaggattcacgtggtaacttttgtgatagtgcagacgtatctcgacatttggaatgttgcctttgaaaaatatgccttgggcaagtacgctagcttggccaacttttgcgaatcttttatcccttaggctaataatcccaaaatttaagagcactaatttttggggttaacaagcatttttgataaaggttagattatcttaaaataatctttcctcttgacggagtgtttttataaaagtaataattaaatgtaccattggttaggtactttcataagtgttgtacgagagaaatatgggacatctattcattggaatgaagcaggtgagaaaagaatatgatgaaccagaaagatccaaggaacttataaggctatataatgaattcaagttgtatgctcgcctcatcaagtttcaaatgggagatttcttttttatccaagtattgcctatgagagggatacgtagcctatcaaattcgacccatattctaatttgtgatgattttcagcttcaaacatatttattatatgaggaatagcatatccaagttttaggctggaaggagaaagtactttagaataaggcaattccactaattaaaatgactgtagtgaaacaggaaggtggttgtaataatcagggcttattatatggtatgggttaattaggtagtaaagagtaggattatgaccctgctaacctaatttagtatagattataaattttgtcataagtggatgaatgagagtaatttatatttcggagatttatttggaatatgtgaatataatgtaggttattttagaaataaaaatatttcaggtttggcaaccttggagacccgataggaggccaaaaatgtcacaatggtttatttagtaatattgatgggattattgagataagttgattatagaattactggggtattttagggtactcagagttgacaaaatacgctagggttaaacatttcttagcgattaagaaagagtaaaataattattattattaatattaatatcattattaatactgttattcgcgttttcggcattggacacgtggactccagatccacatttaagacccatcagtcagacccttattaaagataaaatgggccaagcacatttggttgttaccttccacaaacatgtcatggttccccactgacaaagtcttctaccttcaacaaaccgagcccgatagacatgtttgacctcacgagaccagagagacaagactgttggaaattatttaccaggatct

SEQ ID NO: 304259 - DNA, 2142 bp, Cannabis indica
gagtctgttgcatgcgtgaattttttattttacacgcgtgtgaaaatatatcacttagggctgaatgatttacaaaaacttactatagattttatccactaagctttttacaatctatttccatgatagagacagaaagttaatacttgaatccaatccaaagccagaagaagggccttagcctcttcaacctcaggaggcacaatatctgttatgggggcaattacacctgccatcagattaccctggtcatcatgaactaccactctcaagctatgtttctttgaattattgtccaaggaagcatcaatattaattttaaactttgtaggcacaagttgggcaggatgtcttcccatagactgctgctgctgccttcctttacttgtcatgtgatcagctttatcaaattcctgcaagtaagttgctacatgataatacagaagtattggaggtgaatatttgttatgatgaaagcaattatttctttgattccataaggtccacaggaaacacaaaaaagcattcaacacacacttgtcaaaagtttcaaaagccttagcaataaaaacaataatattaaggaacttatttttgccaaagtaattataaaaaggggagtgtttccaagcagtttttgctctgggacattcaaggaaagcatgtgttactgtttttggttttgtgtggtagagggggcaaataggggaggggattatgtgtctatggcaaagttcaactgcaacaggaattgaattggaaagcacacgctagacacattgtttaaccttaggggggatacagaaaaaccaaagtgttgacaaaatcttttattatttttaaagaaagaggaggtatggatatcctttgaactaacaacaaggtgataagcagtttttacaataaacattctagagttatctttcccccaaatcaagtcatcactaaaattatgtccagcaataggaatgtccaatatactatcaatgagggatatcgtcaaagtagcattttagactgtccaaattccaagcaccagaagaggagataaaaagtgataagttagcagaaggaagagggttcaacatgtcattatgatttagaccaaaacaaggcagccaacggtcttcaattgtattaattttttgtccatttccaatcttccaaataagttccttttttagaagatccctaccccaaaggatacttctccaggagaaagaaggaccatgaccaccaacagcttccaggatgcatggtagagtgagggaagtacctagctttaagtgtgagacttagcaaaaaatcagggcatttaagaattctccatacttacttagcaagcagggtttgattaaaatgcaacatcgacctaaaacctaaccctcccacaaacttagattgacaaaccactcgccaatttttccattgaacagatatgaggtgcattgcgagagatagcaatacctataagaagatcatgatcctgaaaagaatgaaggaaagcagaaagcccttcagagcagaggataaaaaggtaaagagaaaggggaaagaacttaaattattttatttatattcaaatatatattatttgttaaaaaatattatataatatatatgactataataacagagaatcaattagttattccaaagataaaaattatcgttcatgtgattgtatagtgtaaactacttaatttcctaaatcatgttttattgtataaataggggttcatctcataaataaggctctactgtcacttgaccaactctgatgtcatatatactttaataaaaaaaaatatataaataaatatatgtgtatatataccttaagagagggagagacggagactggccaacatgctggtggtggtctaaggtcgagtggtgggtacgtgggtgcggtggtggtggttgtagagggaggtagtcgagagacgagagagggaggaggcgatggtttcgatcagagctatggtttcggggttaggcattggtgagtttcaaggaggaggcagtctgctattacgaaaattataaacactacgcaagtatacgtagtcaagttactgctcacgcaagtgaggtcgaacccacagggaattggattaattactactaaactatacttat

SEQ ID NO: 304260 - DNA, 2022 bp, Cannabis indica
tatattacatacactatatatatagtctaacatcctacatacttaatatcaaagagtatacacacaaaaaaagaacttattctatgaatatttgttattttaacactttgtatcaatgacatgcgagtagttaattatccatctaattaaccacacttagcttaattaatatcatttaacaaaacccttttgatggtttcgtttatgacatttgttacataatatgtgagccattattttctcaggtcgcattagctttgcgctattttcaagatcttcttttgtaatctcattttacaacatctattttcttcatttttgcttaatagaactcaaattatatagactagttttaatcgaatattcatgttcttgcaaaaattttaattttagcattatatcatcatatttgactcccatattaaactacatgattataaagtctagttgattaatatctatatgccccgaaataattttaaagtaaaactttatgatgacttgtaaaagtgaatgacttaaaaattatttcatgaaaagtcaaaattacataaaaaattgaaaaaatttacatttactactggtaatatagtcgctaatgctcgttattccaagtattttttactagcgagctattttgccaggctaatttagaaacccctggtgcaattacagcttctatcatatatggaccttcccgatttgggttaaataatcctgccaatacatatcatgtgttggcaaatactatcgcaataccaaatcttcaatattaaaaagtctttctctaactctattattgaagtgttttgtgatccttgattgatatgcagtgtttcacatttttgacttattgcgtctttcgtcgaggaagtccagagaatctttaagtaattcctggttttcatcctgatcataaaactctcgtctatgggatgagatattaacttccacaagaagcatttcctctgagcaaaatgttagcgggaaaggagcatgtcccgttgcattcttttcagttattcgatggacccaaagcacttgtcttaattcattaactcatcttcccttgaatgtgtcaagcttctttttaatagtgtctattagggttttattgactgctttgacttgtccgtttgcctgtggttgcgtgacaaatgaaattttttgatgatttaattcctcttgcgaaattcagtgaataaattgatatcaaactgagtctcataatctgaaactatctttgatgtaatcaaaactaagggttcaatttcaatccatttagtaaagaagtcaaccatgacaatttcatactttgtacctcctcgccctgttagtaatgacccaattaaatctatccccaaaattatgaattggtagggcgaggtcatcatgtaaaattttattgggggattcttggtaagtgtgagaatatttggcatttattgcatttctttaaacttatgtgtctctttgttaatgattggccaataatatccttgtcgaattaccttctttgatagactttgccaaccagcatgatctccacaaaaaccttcatgcatttcctttatgatattctcgtcttctgtttgtaatacacatcgtagtagatacattgaatattacttccacaatagtgtatcttggtatcttatacatgagttttcttgcctcgtttttttatggaagttgaccatttaagagatagttcattatgggtatcatccatgttggatgttgctaaatttatgattactacgcaagtatacgcaatcaagtagtaaactcacacaggtgaggtcgaaccacagggaattggactaattactactaaattatactattaattctatctggtaaaagaatactttttatgaattaaataaaacaatgcagaaaattaaaaccaacaaaaggaagattaatcaagataagaaaatagggagacgaatcctgttgttaagttaccaaagttaatgtttaactgctatccttctcttaaagtgaatgacagattat

SEQ ID NO: 304261 - DNA, 2162 bp, Cannabis indica
gtttccaagtttatttgaagctgtaatttccttttcctcttggccacaactagtttctactttatcccttgtttgctcaaaaatgttgtgttttgtttccaagtctatttgaagccaaaagactgttgatacattgttgtaatttggtaaaaaaaatggtcgaaggcttttagtaaattcaaaagagtgtaacaaaggttctcacctaaggaacctacctaatccaatcaattcatatcgggctttttgctaggattaactcctcacattatctaatctttatttaatttaaaaatagccaaattttgtttccactctcctttcaagctagtgcaaagatgtctatttttgttttgttttgtgctcccctgtgattgttattattaaattataggcacttgaaatttttcccaattaagttgatccattccttcactgcatatttaaattgggcaaccttgggcatgtcataacaacagtgatgtcattttcttttgcaggaagaaaccactgtgcttaatcaatgcactcaacttctttctccatcagctgatcctacatatgtaatgacctatatcaatcatagttttcctcagcaccgacactacctatgtgctggtgcgtggatactgatgcaagggcatcctgaaaatattaacagtggtaacttggtatgttgcttaaactgaatataatgtatgaatgttagttggcactttgacacattgcttggccacattttgtatcgatattagatcttattttttcaaggagatttttcttcttctctatcttaagggatgtatgtagtattagttctgaaagactgttttaacttttcataatgtggatgtcaggcacgcgtcttgagagagttttcccctgaagaggtgacagcaaacatctacacaatgatagatgtgctacttcaccacattcagttggaacttcagcatggacactccttacaggttaaaaagttgtctctttataaatttcattaacatttgtaattagtgtgaaatcttatcggacttttcatgaagttttttcttttgtaggatcttttactgaaagcttgttcaaacctggcattttttgtttggatccacgaattacttcctttggatattttgcttttggcacttattgatcgtgatgatgatcctcatgctttgcgtatcgtggtaagtttgcatctttagttatgtttctaagaatatcagttaatgtgaccttcatatcactttaatgcttttgtagcattcagtatgatctgatgattttaattttatgatatataaaatttgtcatgttgtccggaattgtccaatgttgtaggtatctcttttttcccttcttattgttattgatattaaatactattttaggcgaattatattcagttagggcctttgaacagcagtacaatgttcaggagagcaacccagttaaatgtgtatttgatactttcaatactatgttggaagttattaattgttacttttggtttatggttgtgtgtttttcttaaggtctgttttgtttcagatggctcatttcttgaaaatcagtcttgaaacaatcttaatgtatttattttttaatagaagaactttttggtttaataattaaatcacgactaaggtggcatatgtgtgtctgatgaggcatttatggtgaaattaatttgttttacagattgctctgcttgataggcaagaacttcaacaaagagtgaaattatactgtatgaatcgcggaccttctgagcattggctttattcgggaatttacaagagaaatgatttgcaaaaggccttggggactcatctttcttggaaggacaggtgatgcatcccaaaaattatgaataaaatatgtggagaaggtcacaaaaccttcattaatcattgaaaaccaggagtatatgtagacaaacctagtctattagaaaatgtatagaatgaaaccagcaaactgaaaataatataaatttagtacgtgaaatacatagcaattgctataaatatcaggaggggtagctcaggttaggtatgtggtttgttcccaaaaggtttgaggttcgagtctagcttgggtgcctacatgggaattgctataaattcgtggtctccgaatattgtagggtcaggtgggga

SEQ ID NO: 304262 - DNA, 3359 bp, Cannabis indica
tttcctcaaaacttagaaacccaatgactgtgaaccactttgtaattgtgttaaaccaccactaattaaacaatattactcaaggttttaagggaccaacttctgcatcttattatattctcttacaatgagtactttaaaagtcaacaatatcaagctcactaactaataaaatcacttatatggactctattttataactagtatttgtagtatttgcacataacacaggacagagcagaggctctcctagctttcagggtttaatagaaaaacaattcattaagacatcaataatgattaatgctagacaacccccttaaagggagttgatgtggcacttattaattggtcgacaacctgcaaaagaggactaaaatagaggcagtgtggctgctattcttgcttaaaagattgttgctctatactatgatatatagggtatttataaggtgacagtactatttttgctcacttataggggcattttattgtaacaacccccacctgcatcattaaatgatttgttttcctttacattctcttctttattaaaagtttttctgttctcatgttccatacgaaataataatttcttcaaatgaaaagaagaaaagacctccgcaatgtattgaaaagtaaaataaatagcattaaaacaagtactaacctgcctcatagtccattctaactccatacaccctccccattcaaccaatcaaagtgtaaaaaaaaagcattagtgttagccatcaacaaccaccaccaccactaagaagtgtcccaatacgagtaattagccctaaatcctaaaaccctttgagaaatgctaaaaggcatcacttgtctcatataacttaagaaaataactttaagaaaatatcgttaaccaattgtaagatgtaacttactagttcctaatagcattgctcaaactcttatggctgattagaaattttgcacaattaaaatatatgaattccaatattaaattgtagcaataacattaatggtatgatatgagaatttcatgatatgacacataccactagtgcccacatcatgctccccacctaaatatttttttacaaaaattacataagattgtcataccttcataagaaaaggaatgaacaaaagcatccaaatggcccaaagttttacaagccttgtccacagcttcaacaaacaaagcctccttctcttcttccatatccaacccaaccacctccactggccaagcccctttcacacaaactatcttctgggcaatactctcaagaaacctctcatttcccatcaaaaccagcctaaatacataaaatcaaacaaccccatttctatatatatcaatacaaacctctcatttaaacaaatatattaatacccattaaaaaaaccaatataaattagacagcaaatttagaaagaagaatgaaacctgcagcctgttcttgccaaattgaaggctatgctaattgaaatctcgtcctcgctacaagtgaccaaaactctcttcccattgctccccattgctgtggtgtgaaaataactcaatagaatcagaccctttatataaagtatccaaaaaaaaaaaaaaagaattgggtctcacttaattataatagggacatagcactataaagggttcccctttggtctactattctttataataatagaatctactgagaaaagagaggaaagaaaatgaattagtggagggggtttgaattcacctgaatttgaacccaaagtgggaactcactcaatcaaaaagttgaagtctttggcagccgagtcaaatttgaggttgataacaacaatccaagtaaactctttcttcttaatacaaatattatctaatgttctaatgctttctgtcatatataaagggtgtacatataatattattaccataataggaccctccttttgtacatataaatattaccataattataccaaacaaaataatttatttattttgtatttatttattttgttaaaaaaaaattaaactttttgtgaaaaagtatggaaaagaagagttattcacgttggactcctcctgtgtaacaagtcagcaaagaccaagtgagatttttttttgggaatatatatgggaatatatctatctcgtaaataatcttttatgtactttgctaagaaaaaataaaataataatatttatgtactttatattttaaaattttaatgcaaatttaattaatataaaatagttagatttcaaaatatttgatgccaaataaatatatatttttcactaactaaaaatttatccaacacaaaccaataatataattttttattgctaaataaatattattgaaatgcagtattaaatatatatttattttttgagaggtttattttatttatattaaataaatggttttatacgtttattaatgcaaattaatgtgatttgaagggtccatattattctggttattattgcagaacaaattttttgagaaaaaacaacggtatattaaaccaggtatcgaaaatcaaaaacaaaaaaacaaaagatccaactgggaaatatcttgcagaacaagtgcacataattaattcatttaaatttgaatattaaataaaaatggaagtgtcaatcaagtcagtggccacacacactgaatcaaaatattcaaccattttttgagttttatttgtttattttcttttactaatttatttattttataatacttgtaccaaattaaaccaatcattaactttattttttattatttgtgttcccattggttttgagttgtaatttcttttttttttttttgtacataggtttgaaagtaaattgaattctttaaattgagaaatttcttgccattgagatagaaattttccaattatttctctaggcagtttttctctctctccacctaattatcattttccatcgtttttttttaatttgatcgattcaagcattcatttggcccttacactcacggaatgatggctctttatacacgagtacgtcactctagctgcttcatggattgacgattggccctacataccaacacgagtgttttccagcgtgctttgtcctcactcacacgcttcttgggaaaacttcccaagaggtcacccatcctaaaattatcacaggtcaagcacgcttaactgtggagttctttcgtgatgggctaccgaaaacaagatgcaccttgttgatataggtagtaccaaccaatccatttaagcactcttcaactttgtagtcccatgcctacacacatgcccgtctcaaggtgttgagaggcctagggcgaaatttgaaacggggctttttttacaaaaaaaat

SEQ ID NO: 304263 - DNA, 2675 bp, Cannabis indica
aataatattttttagtagataatgtttaatatgaattttttttagtaattacacggtgtaattacatccaattctcatgggggccatgagaattagagagtgtaattggaacccctcaattacttccaattacacagttacagtgtaattacatggtcagacaaacatgccaaattgtgtaattacctccaattacacacaaatctaattacattatggctttccaaacgcacccttatataatttattatatttgactgttgatagtagaaaacatctctttggggtcttggacccttgagagttttggggtctcgtacccttaagagctggagacctctcttttggggtctcagaccctatacagttgggaacctctctttgaggtctcaaactcattagagtgggagatttttgtttggggtctcagaccttttagagttggagacctttgtttaggatctcgaactcatgaaaggtggatatctcttctttagatcttggacctcttaggttatacttgttcctccttattacatttgggatatttatagcaaactttagagcccttggtattttatattggcttagtacttgccctctttaaccttgatgtctttaggcttttcttcatacacttttacatctttgacatttatgcctcgagatcttctattgtatgtggatcccattgtaggggtctctaggcttcttaaactgcatcgaccctgaatgtgttatccatgtatcattgtaagggaacttttgcccttccttgtgcagcgctctaccttatttaagaaatataagtttgtgagggaagctttagccctttcttaggttgcactcaactccattttattacattcttcaccctgacggtgtgcgcttaatgttttgtattttatacatcaaatatgacttgttagagtttttggatgacaatatataaggtattgttcatggtttcttctctcatttatttctgcataagattcttagagatgagtgcttaatagaggtttattatagggtattattggtggatgtatagacacattttaaggttcggggtgaccttttgttttcttcatcagtcgttcaccctcacgctttgcattattttgtccagtgtctcataagttattgccacatgcaatctctaacttcttaaatggggtttgtttattttacttacccccattttatgcctcttacaacactatttcttgcaagaggttgtcatctccaacctcaagcaagatgtaagagtaaggcacgaaggcttagtgagatgccccttcagaggtgcatattgacgggacacatgttgttgagatgcatactatcgagatgcatgcgatgagaggcatgttttcgggatgcatgatatagagacaaatgttttacgaacacacgctatcgggatgcatgctgatgaaatgcttgctgacgagacacatactaccgagatgcatgcagttgagacagatgctggcgtgatgcatgatgcaaagacacaagctttaggaaagatctcggccaagatgattgggggaaaaccttggtcgagttatggatttgatagcgggtagctcgttagaaactgttgtctttatggtaactcttagtaaatttgattagtagccagtgaaatccatgggatgaatcccatggatgatgctagtattataataaaataaagattacatttattatgtgatttatgtacataaactaataaagacttctatagagagaactaagcaaatttctaactagtaagttgattatgaaattagtaatatatgtgtgccatgtgattgtgatatctatttaatgtttttaagatcaacaatagtagaaatttgacaaattgacaaaaatatcatagtggtatagcttaatagaggtactgagaatttttatggataattagagattatgtgttttagtgggttataagggaaatgatcctttcgccataaaattttaagttgacgcaaatttttcgtcaactcatctaataagattgcaaaaataaagaggatcgcggtaaattaatttgactaataaaactacaatagattaaattgaaagtagagattaaattgaaagtaagattaatagtagttcaccccccatgtcgcgatggtaatggggctacgtctacttttatttttattgatcatattcgacacatcagagttatgttctcaagagtgtgttgataaaagtatagcataggttttctaggtgaaatcttaatcaagatttatgaatataagactcatgggagacttagtatccataaagctgatcaaaatgggtggttgtatagttcttgggaacaataaaccaataaaatacacaaaagggatgtgtatcaatggtgttttgatctttgtgtcgactgaatatgatggacttaatgaaaaatatgaaagagtaagtatggtgttctaggctgccttcaaataggtctcaaagaaatgtttcagaacagagagagtctaaaagaaggtctctaaacaaggatccctatttcagcctctttcttctctttatataagaaaataaatatctataaaaatctccttgtttctaggcttgaaatgttggaaataatttaccaggatctagatttactactatgtatgtttcattaacatcct

SEQ ID NO: 304264 - DNA, 2728 bp, Cannabis indica
accacatatagttttacataaaaatattgcataaaatacaatttaatataatacaatacaatacaatacgacctaatacggcgttccaaacgagcccatattctgttaattattaatggacaataattaaattttgtcttgtgtgtttcttaattttctagaaaagaaaaaccattagtatccatagattgctacaagtcaaaaacagaaacactggttcaactaaccaggtcaataaaatctgagagagttaacatattgctatattaatattaaaatctgccaagatattgtgttttgtgtaagatgatgagtggtacatatctggattgttatcagtttcattaggtccatatacatatggtgtttaatgctgattttttatttatttattaattttttttaatttcttctatttttgtttttgttttctttgggaaactaggtggtgagaaaacaatatagaacgggcggcgcatgcagatgccagtaacgatcaaatataaaagcatccttcgccgtttgttttttcagattctgaaaccccaaacatcgacacgtacgagtagtctctcttctcataaccatatatcgaaacgctccaattcaataaccttcctctcttgttaaaaacgcttctctctatattatatatacctatacagacaaaaacccatcagcaagaaaaaccacacgacaattttgttatatatatgttagggagagaaagaggagatgcaatcggagaaagatcaagaggccgaggagatgatgatgaagcaaaaaaatggtaacagtaatgataacaacaataataataatggtaatgaaaataacaaggcccctcagaaatgtccccggtgcgagtccctgaacaccaagttttgttattacaacaattacagtctctctcagcctcgtttcttttgcaagacctgtcgaaggtactggactcaaggtgggaccctccgtaacgtcccagtaggaggcggttgtcgtaagggaaagcgagccagaaccacaaccggctccgccatcgcagccaacatggccagcacatcctctacgacgtcctcttccgaaggtggtggtgaaaactactctaggcagttattagctcaagcttcagtatcaggtggaggaggaggaggagcgggagatgtactgccacgtcatcaaaaccagacgaataacccacaaagtataattggttcgggtctgatgatgaggcctgttgagccgtttggctcgcagttttttcatcagagctcgtacttgccttcttttgcagatatgaatcaacagttggcggggatgatcacagctccttcttcttcttcttctgcttcgactttgagtcttctagagggattcaacttcgctgcctttggctcacaacaacatcatcagcagcatcagattattccaccctctcatcagttttttgatccgtctgacgatcatcatcaaacaacgatcgacccaacaaggagtgtaataaattctaacaatcatgaccatcaatactggcggcctcaacatcaaagcaactttggatcagctcagcatcatcatgtcaacaatgattccgaaactattactactcctactcatcatcataattccaccgtcgattggaccgttaatggcgctgccaacgtcgacaacagtggcgacgtcgtgcctgcaaacgactcaaatcatcactggcctactactactactactcatcatgatctttccgggtcgtacggacctcctccttgatgatttgctcttcacttgattattgctcttgtcctcgggatgtgtggtatagcacataaatttaattttacaaatattattcataagtatacagaaagaaaacgcatattgaaatgttatcatcatgataaactatatgtttttattttttttatttttttttttctgttcctacttctagtagtgtaaatactttaaatgcctctttttttttttgtggttagggatataaaatgtgacttttatgaaaacatcatatagctataagtacatagtgttttgtggtgtggtgtggtgtgggtatatatatacatgtatctttttattactgtaaaggtgaagaaaagaatatggatatggagaggctatattgatcaccttctttgttactttcttatatttattatggcggaaattaataatatctcggttgggttgggttaggtttcaactttaagttgattgattaaaagtctttcgttcgtgagtgacgtgtggtaaaatgcatgcttgtgctttattaagcctagttgctttgcttttttcatatatagtgtttctttttgcttaatttatttgcaattttatatatatatatatacctttaaaataacatagagatatgttatgtggtgttaaattattaagattgtatatgagtgaacaatcttaaaatttagaataatattgtattaaatatatcggaaaagaaagctcaagtagtgcaagtataggaggagctatataattgagaaagaaaaaattagaagaaggaaaggaaaaaggaaagcttagaagaggttgatgaggtgttttcttgtagggaattaaatttagttgggtgggcatagaaggttgggcttttatgcatgtgggtgactgacgattcaacagctttaaaaagcatcaactttttcattctacttactttttattatatgtaacatattatatattaata

SEQ ID NO: 304265 - DNA, 4073 bp, Cannabis indica
catccaaaccaataaccctaagttttttttttaattttctatagcctatagcataagctatatgatatctcataagtagaactgcatcttgctggtatgattgagctttattttcatgccatcatggtttataaatatattacttttaaaccatcaaaaacaactctggtgtagttatgctgcattttaatttacttctccttgcagccagcagttgtccaaaccaatcgattttatgaacattgatatggcttttgtgtttgttacacagctcctcacattgctacagcacctgtaaaacccccacctcatcgtgctcctgcttctgtatctcccaatacttcaaacgaagggaggcatccaaatttgattcttattcttggtattggtgctggtgtgctgattgttgccatcatctctttgtttattgtttgtttatgcatgttcagtcaagataaaacaaaagcgcctcctgtggaactggatacaggtactgttatggaaaataatttttgtccatcttcattttgttaaatcctaaattatgggttcgcagatattcattttcttttgtagtttaatagtttgatggtatatatatatatatttctgttatccccttccccttcgacaactttacatgtacttgactaaattggaaaagaaaaagagttagttagtactttatcagaatcaagtgaattcatattttggagtactgcatttgttgaatttctcatactaaaatctactttaccacaaagatgcatgtagcattaaaacatttttttttgaagtacaccatgttccaaatctaatttgagtttgtactgcacctgtaatgatcttttaatttacttgatgaatcttttattccagaaaaacagaggaccgttaatccagttcctgttgttggatctctaccccatccaagtagcacacgatttctggcatatgaagaacttaaagaagcaacaaacaactttgaatctgcaagcatacttggagagggtgggttcggaaaagtttttaagggtgtcttaagtgatggtacggctgttgcaatcaagaagctcactaatggaggccaacaaggggataaggaatttttagttgaggtggaaatgcttagcaggttgcaccaccgtaatcttgtgaaacttgtaggttactatagcaatcgtgattcctcgcagaacttactttgctatgagcttgttccaaatggtagcctagaagcctggctccacggtacaattcttttccccgataaccttttctaaaaaaaaccctgctttagataaatatatttttttactagattttcttagttagaaagttttcagttgagtatatcatacatgcaatccttttctttttgcattataattatttcttttgattggtattagtgccaatgattctctgttgtcctcaggtcccatgggagtaaattgtcctcttgattgggataccagaatgaaaatagcacttgatgccgccagaggacttgcatacctgcatgaagactcacaaccctgtgttattcacagagactttaaagcgtctaacattttacttgagaacaactttcatgccaaagttgctgattttggtcttgcgaaacaggcacctgaaggaagaacaaattacttgtctactcgtgttatgggcacattcgggttcgcctcatctctaacttttttatttttacaactctatctggtgttgacatgaattataattaacctacaggtatgttgctcctgaatatgccatgactggacatctactagtcaagagtgatgtttacagttatggggtggtcttgcttgaattactcaccggcaggaagcctgtggatatgtctcaaccggctggccaggaaaacctcgtcagttgggttagtacaactcataaatcacttcctcatttcttgtttttgactgtccaaagaatagactgctttcaattttgtgttaactaatttgtatgtcatgaaatgttctctttcacttaacaattaacaaatgtgttataatccttccaggccagacccattcttagagataaggatcggctggatgagcttgctgatccaaaacttggaggtaagtaccccaaggaagattttattagggtgtgcacaattgcagctgcatgtgtcgctcctgaggcaaaccagcgtcccactatgggcgaagttgtacagtcactcaagatggttcaacgggtcactgaataccaggattccatggcctcctccaatgtgcgaccaaacttaagacagtcatcaactacattcgagtccgatgggacatcttcaatattctcttctggtcccttctctggtcttagcgccttcgacaatgacaatatctctcgaacagcagttttctccgaagatcttcatgaaggacgatgaataatatacgtctcattcttcgttctgtttaacgagtcagactttcactcatcaagggttggaactcgttctattttatgtggctcgagacttgcagacagcaaggctggagttctcccccttcgaaacaaggacctgaattggagcacaatcatttgggaaaagggtgtatttttgtagttgtgtgtcattggttgagggaaggaaggataatctcttgtgtccattttattgtttcccccagcattaggcaaatggttggtgaattttgtatatatattccatgtaaggttgttttacgatattggctacttgaagtttttttgtttttgttctctttgccaaaatatctttctatatcaaatcacacctgcaccgaaagttcattcattgaaacatgactataacactaacacactgatggaagttattatctgggcagattcgatagaagtgtttacagctctcctgttctgatggatttcaatccaaagtcatcaagggaaagtaactgaaactacctacttgcttgccttttcttgcaccgtttggtagtctcaattaatttgattagtattttttttatttctttttctttagtgaaatttacctttattataatctctctttttttgcaaaggcaaatacattttggatgcttcaacatattatagctctcctgtagtaatgcgtttttttttcttagtcgttttaatatgtatatattatttttaaatgctttctttttaatataacagtattagtaaaatgtttatattggagttgttattatttaattattaatttaaataataataaaataaaatttaatataatttaattatatttttttacatatataaaatttaatttaattttaaatttatttataaaaattatatctaattaattttattaaataataaaataagtaaataagtttagatattttaaataatataattaataaatttgttataaagtataattagttaattaaattaaggtctaattaaaatttaaattaagatttatataaaaaataattatttaattgatatttttaaattaaatttaaatatttaaaattattttttcaataattaattgattgatttaacgatgttaaattcaaactatcaattttaggagaaaaaactattaaactaacatttttttttattaaataaccacatataagagagatatttgttttgtagtgtctttttaattaatatcgaatagttgtaagagacaatttctaaatgtaaattgtgcccattttgaggtctgtagcagttatacattttaactacctttttggtttttaactacctatttttcaaattctttttttccctccctcgttccctgatcaatctaactgcctcctgggttcatgttcattgatttccttctcatcttacaactcactccccagttgttgtccctgtatctttgtacaatggatccactcatgaatgcaattcacaatactttatctttacctaaagaggaaggatcagttttcaccctccctgaagaggctgctgcgtctcatacttctcactctagtcacatgttcattgctcgggttctcactgattcatatgtccataacccatctttcattgatcaaatgtctgga

SEQ ID NO: 304266 - DNA, 1569 bp, Cannabis indica
cattaaacaagtaatgaaattaaatctatttctttattgataattgaatagaaaagattacatttaaatagagttttatttagggcacaaagcccagcaatcaattctcatacatatttatcctaaaattgtgaaatatctttcacatagcctacttttcaacatgtagacagtcctagtcttagcttgaacaagaaatttctatcctagatatgaaataaaaaagttcaaccaggagttagtgtacttacgtgttgagtggaaaggacatgggttgctatcgtagaatcttatctatactcttcgaacccaatcgataaggcagtcataactaatctagaaatcgaatcctttgtctgccagggggtcgagctagtcaatttgaaggggttcaatgtctagaaaaaagcctcgggcagagattgagcaatcattgaatcaaactctcacactcttcttgcatgcaatggcaaaataacggctagagagaaaattttgcaagggaaaactcaaagtctagtagaggtgtgaaaaaagtgaaagagcatcatcggtgtcaatttatacttcaagaaaaaaataggcttttttcaaaatcaatggtctagatctctcattaaatccaatgtctggagagttgaaagggttggaagcatttatttgtcatgattttcctcaggttcatcaagccataaagacgggtcttttcaaatcaccccgctgtcattttaacctttttctaacatacccgccccaacacgcgtgtaatgaatcaaccagggcatttaatgtgccgcatgatcgccacattggtaggcctaaatgttccatctacccttaacatattacagctcaccaaaaagatgcatccacgactctaatagtcaacacgtgttaacggttaattctgggaaagagattgcaagctcccagaactcagaaagtcccagaagcatggggggtaaatgttatccgtgtttccaagcaaggaacacatggcataattagagaaggagacttgttaacctcccagattagcagagatactatcaaggtcccttgcaaaggtttcttggtagttcaagatgagttttatggataattgatggggagagccatccccagctcaagtagcgtctccaggatgtagaagaaccatatgtgtccccatctccaagaagtcctagaacatgatttgagtgaatgacttttgggtaaggacctctacagactggtcaaggatcataaccgatacatcaaggtaaatggccacgtcatcttcatatggaaataaacatacaagcggttacacctttttttgacacatgatcagatcttgtctcccatgacaggccatggtagtgtgtgttgagttttattccctaaataaaacccatttcaatataatcaaatttactaattaataaaagatcagaaatcgcattttatgttgcatggttcacatgatttatttcataattatgtttaatgtataaattctattaagtccagaacatatataaatatgtatatattttttcatgattatagtgtcgttagcatagtgga

SEQ ID NO: 304267 - DNA, 1354 bp, Cannabis indica
agatgtatattttactattaaaaaattaagattttttataaataaatataaaaaataagttttactattaaaaatgcttctatatttgaagagaagagtgtaagatagagaaaaataaaatatatggagtagctttttagtgtattttaattttagttttgattaaagatttgtaaaataggagaacgaagtaatgacgattaatggctagagattatggttacactatgagaaaagggcactaactataattctgattctaagtataatttattattaatagttataaggatcattagatcgtgtttgattcgatggtatgaaaatagtgtaaaaatttgtatccaaagaacatgtcttattatgtaaaaacttgtgctattcttaatattcaacttatttaaaattatagatctaatagtttttaattattttaacaagtacatctttatgtgagatgcccttttatttctattgtattataattaatatttgtaataattatatatattaataatatacatacattacctaattttatattatttataagaaaattaaaaaaatacttgatttgaaatgttattcgtaattaataaattaattttttaatatatagttttaaaaaaattattaaaaatgcgcgaagcgctgatttattccctaatatttatataaaggaaagtacaaaaaaatatgatacgacatcctataatatttttcatctatttatattataaatttgtaaatattgagtaagtttctatacccaatcatctattttcttgcttttttccctttatataaaataaaacaaaacatacgaaaagccatgaaactttgatttttaaatttttttcatttagttacttattttaaaacttattatatatatatatttttttttttgtaaggaaaaacttattatatatttttattcatttgcttataaatttttactccaaatatttttatttggagggattaaattacttgtaatagtcgaaattataccccattaatttgcattgtaaagtatttgtaataccaaaagctcattttttttattcataaacaatcatcattcttttgatttatactaaactctggcgggtgacctctctgtgacctttctctcaattctatttcttaagtgactattctctcactttcaattctattctactctcaattctatataaatatatatatatatattgacaatcagctcagtagcataaatcttcaaattcttgaaattttattctaaaataaaagaatatatctcagtatctgttatgtattacatgcttttgttaatttcatttttggcatatttaattgacaaaaatat

SEQ ID NO: 304268 - DNA, 2872 bp, Cannabis indica
acagagtctattttattatttaacaaaatagatagtctaatctataaattttacaaaacataggattcaaaataatatttactttgattttattatgaacaaacatttacactaaaatcagaatgtgaatctcgagatgaatacacgctttgagcgatgattttatgaaatttatattttgcaccacaaagatatctttaaagtgtgtaaaagaactttgatagtttcataattttattatcatccctcaattttacatattccttgcacttggattgattgaggcaggttgaggttatttcaacaacccaacccaattagatctatctataaaatttcaatccattcacattttattatacaacctaacccataaagtatgagttgagttggattataacctttattttttgcattaaaaaattcaaatatttcttttgatacaagtgcagattgaaccccttcccccaacaatagcccaaattcttccctaacataaaagtttaaacaaaaacaatgtagttatcaaaactccatagtccaaatataaatcttgaaagtctttagttgtctattaagcatagaaattgggtgaataataagcgggtaatacaactcctaacctacccccacccccacttaatctccaataaatttggggtagggaaatatccctaggctatgggaacccagtaggtacctattaagaggtacctattaagattaagacaataataaataataataataatatagcttaaaatgaaaataaaaaaacaaaatattaactttaaaataaacaaatattctacctttaaaaagcctttattacataatgaagtagaaaaaattaatagtttactttataagtatagctaataactttaatacgtaattggaaactataaatctggatcaaatatagaatgggtagtattatttccgaccccgtcccgtacccacttcaggtatataaaattgcaccccactcatgcttcattactcattaaagcagataatcctcgtcccattcgaagtgggtacctgtaattacacgtccgataaatcaaattttcatcgctagttgttcgtaataataataaatttaaaaaaaaaatacaacaatatcatattaattgaaagatccacagtcaactaaacgcaacaatataatcacaataatattaacaaagaattcttataagctccacaatcaacactcaacacaacaatattatcacaataatattttcattaatcatatatattcacaataataaactcataaaacacattacacatctgaaatcaaaaaacaaatacaataaatacgaacaaaaattgtgatttatggaaattatgaaagtctattgttttttcaaacctttacttctttgtaacactttattaacacatgggttactgtactgattcaccataggcctgaaaataaaagtacatgggtgaagatagttatttcatgataacaaaatgttcaccatctttttacagcaaaagggtattgccctgactttttgtatctacaagtttaagaaaggctgcccatggctcttgccttttcctttagaatatatttttgtatctttccagttgaagtctttggtaaatcttcaaatactactgtcttgggagccatgtaatgaggcaaacgatccctacagaatttgatgatatgatcagcactgacattgttgttatcaaatccttccttaagtgtcacaaaagcacaaggtgtttccccccaaagcttatcggggcgtgccactacagcagcctcgagcactgcttcatggctatacaacacagtctcaacctcaactgtactcacattctcccctcctgatatcaccacatctttctttctatccttaagttgaatataaccatcctcatgtttcacaccaacatccccactacgaaaccatcctccctcgaaagcctccttagtcgacttcaagtccttaaagtagccactcatcacagtgtttcccctgaacataacctcaccaatagttttgccatcggccttaacactttccatagtcaccgaatctttcacatccatctcctccatcgcaagatggttcaacccttgtcgagctttcaatgcatatcgttcctctggtggcaatgcatcccattctggtttgcatacacaattagtagcagggccataagtctctgtgaggccataaatgtgattcactcgaaaccccatctcttccatcctcgccatgacttggggtggcggtggtgaacctcctgtcatgatttctaccttgtggggaagcgggaggcagatgttgtctttaggtgagttcacaatcatgttcaagacagttggtgcagcaccaaagtgtgtcaccttatgcaaatgtatgttatcaaaaatagctttgggaaagacttttcgtatgcatatgttggtagcgccttgagctgcagccccccatggtagacaccagccattgcaatgaaacatgggcactgaccatagataaacaggccttgtccccatcccgtgcagcaaaactgtggctatagagttcagataggccccgcggtgactgtaaacgacagctttgggggctgcagttgtgcctgaagtgtagtttatgctgatgggatcccattcactcttaggccgtcttacttcaaagtcataactcccattttccaacaaattattatagttatggtatgagcttgaagtgaagctttcaaaatcggttagtaacaccaaagttggaggaggctttatgtccttttgtgcaagaagatcaagtgctcctagagcagtttctagtaactggggttccacaaagatgagtttggcttctgagtgtgctag

SEQ ID NO: 304269 - DNA, 2643 bp, Cannabis indica
atatcattattatatctcgttgatcataatcaaatgtttgatatatcaataaatatgaatggcaaaaaaagtagaaaatttgattttgatgagttaattgcacattagtatatagtgatcaaatatcaattgtatacaaattgtaagcagagaagagaaagttgcatcaattataaccccttaatttcatgattacaggattaaattcaacgtttaaggtgaggaggctccataaaccacttgttgccttggatgaaagtcatgctcataaaaggtttgatttcttcatcagtcaatttctttgaatacttggcgcgtccagaggtgttagctcccggtccagtgcatttgtactctccgtaaaacacagaactgcatttgcaaagaagcaatatccatgtatgtcgtttcaattagtatatatggaattaattaataataaaaaccacaaaataatatgtgtatatatagagtatacgcacttgttgtttcctgaagctttggtaggtgctcccatggcgttggaccagccattaccattgatatggttgcccatatcagtgtaggcaaatatgactcgaggcatctccctccaagctcgacccaagtaagtgtcaccatcggctatgattttgcaatgaacaaaggtgaatccactgtcttcagttacactgtcccttccttgggctgtgataactcctgtgttcttggcaaccgatcttatggttgtgctctatatgtaataattaataaaaacacatataatcaatttataatgtaattaaataatagccatgtgtatatatatgaagagattattaatgtatacataccaagtatagggattgtccattgccgaagataaagtctacagagccttcaatgtagcaatctttgaatacatgtctacctttatcatcacacaaggtatcttgatagcttacaaatttacagttgtggaaagctgccttgtcacctgatattctcaatgccactgcttgttccccacttttattaccctttggcattggagatgaattctatacatacaatacatacccttaattagaatatatatatagaagcaagtgtggacctaatgatattaattccctaattttttgaaagagaaatgctaattaaggacatcttaaagaggtgtgaaacagttttcaagtgtcattttaatgtaataaatgatgtcaaaaattattaagcactcagaaccttttctctaaaagaaagaaactttaaaaaaatttaaaaacctactaaaaactcgctacaacagatattttaaaagttctttaaaattatatttataaaaaattatttattaatttaaacataatttattaattattttaaattttaataattatttttgtacggagatatatttatatattaatattatacatttgaaatgaataaaaatataataaattttttaaaaaattaataagatattgataatgaattttaaaaacgtagttataaattaaaaaaaaaaatagagttttgatgatgtatttaaaaatagaaaatataaaaaatataaaagaagatataaaatcataaatatatgcatacataccacgaattgaatattagcagcaacaaagtaattagactcaatggctacggtggcgctgttccaggttccaaatttagcggcggtgccgtcaaaggtaattacggggactttagctgcatctccataaaaggtgacgaagggtttagtcctgtccacagttatatgctcatgataaaccccaggaccaatccacactataaccctccctttgttaccagatggaatacttttaacggcgtcagtaatagtcttaaaatctcctgacccgtctttccttaccttaataactttagaggctttctcagcatcggccaataccttgtcgagggcgtgatcgttcttcccttgctcgtgggctctcatgttgtgatcaatccaactgtccagctttgatgaatctgccggaatgatgctcgggctgccacaggttccgatcacctgtaaagccaagactagtcctccaatgaaaaacatcaccttcaaagccatattggcaattatggctttgatttattgatgtgatgatactcttcgatgaagcttttctttggagatgatattgatgaaataatagagccttaatttgttgtatatataatggtacgtatggattcatagttgtggtgatgagtaattttaggttttaattttcagcacaaggaaaacaaatgctatagatagtgtgtgtactgttaatctttttcggagctcatattttttttattattatttttcttctttgaaggaagagatgtgataatcaaattagttttttgtacctaactattacaaacaattatacttaaaagggatttgtttgtgtgatcgatctcattacaaatatgtctatatttctttatattttatatatgatcattttcttcatatctattatttgggtattttgccaatataaaattataatattatatctttataaacaaatattcactgaattcataacttacgagtacaacaccttaataaaaggcccaagttatataggggtccttatattataaaatgggaaaatttacaaaaatatt

SEQ ID NO: 304270 - DNA, 1401 bp, Cannabis indica
ttatttgtttatttatttttgttgtcaatgcagattccattttctgtaattgttggatggattatggggcgtccgatggacttaaactttcaacttttcgagactgcaacattatttataaccgttttagttgtcgccttcttgctgcaggtttgtttccattttagtcgaaaaatgtaccctgttgaactgatttaccattcaaagtgagtggatccaatcttaatccaattgtgtttttgttttgttgtaggaagggacctctaactaccttaaaggattaatgctaatcctttgttatctaattgttgctgcaagtttttttgtacatgtagatcctacttcagacggttagttttcgaacaacttcagcttggttactttcgatttcttcttcgttttataattctttgttcgggatttgattgtgtagatgattcacaattgaaaacgtagtcgataggcctgtgctgatcgaggtgaaagttattatagatgacaatataaaaagaagaacaaaaaccgaagggcggtattgacacacaattcgggatcatcttttctttctattgtgtatatattttctccattgtttttttcttctgctttgtgccttgttcaggtatgttgcagagctctttgttttttctttgctttgattggatgttaaaatttccacttttgactcagaagaagctgagttatgtatatttttacaggagaatgcaaatcttgtcattttcataataatgcaattttagttaaaaatgtcttctattttttcttcattatgctgcaacaatctcatcaatggccattaacttggaaccttaatttcatttatgtaccataaacaaaatgggcaccatttgtaattaatactcataagaaaatagagaaaaagaaatcaaaaatgagaaaacaacattaattatgaggcattattattacgagtattcttattaagcaccaatggtacatattatatagtactacctaaaactaattctataatcggttagcaatattttataaaaattattatattgaattatatagaaatttccttgaatttgttggtcagatgacattacgttcaagactattggaggcattttggtgttccttcgataggggtggatgagatgaccttcgtggcttttgaactttggtcgtaggttatggaaactcgagttattatgctttgctggtctatttgaaaacatcgtaatgatttgatttggaaaagtaaaatgttagttacattagcacaactcaactttgatgaatagagtaatgttcaaaaaagatttcaaggggtgagattttaacagaaaactaacgtgtgtaagagtaagaaaaaactagttaaaattttccgtgaaaagaagaatattttaa

SEQ ID NO: 304271 - DNA, 2674 bp, Cannabis indica
taaggaggttttgccaccaaaaaaaagataagggggttaagtgtataaaaattaaaacataagggggttttgccaccaaaaataaagataagggggttaagtgtataaaaatcaaaacataaaggggtttcgccgcaaattgctctaaaaaaactcatcacacacgcacacgttcacaacttgcaaaatatatcatattatattataaattaattaattaattaatattataaatataattaaaatgtcatttttcttggcatttgactatgagagatttcgtgtgttttcgcagcgttttcgtgttcactctgtgaaaagtgccgcattttggaataaattgactaatgagaaattaagaaaaatatatattataattatttattataactgaatatatttatagattaattaataattatttaatatttttaatgcaacttgttttaggtagtgtctactgtatttttgtcacttagtcttctccaacttaaaattacgcaaagttaaattgttttattagaaaaaattcttttggcacatagaaaaaaaattaatgaatgtgtggccacatgcatatatagaaggaaggcatgttgggtgagtaattaagatcggtgtactatatagctaccctaaggcctaagctatatcctattaattaattaattaatttatacttgagggtggggaaccatattattagggggccataaacaaaaataatatatatatagaatacatacttatttacataacgtactgtgttttaccaaattttttacatttttgataataaaattagaacaaaaaaaaattaatttaataatctcggaaatttttttagtattacatgttaaaattcgataaaatttttaattaatatttaaaataataataatcattataataaattagtataatcaactaaaatttagttaatattgttaaaaaaactaaaatttagttaacaaattaaaagtatatatataaatgcatgtataccaaatgagtattgtatagtataatgaataatatagatactattttttgtttaaaaagaaaaaagaagaaatatatagatatactatattttatatcaaaatttgaattatagagtgtccaataactattgagagaaaagaatttataatttaggtagccgaaatataattttaattagattgtgaaatcgatcgtgtggtgaaaattaattaatacttagagttgttattattagtgtaggaatatttaaaacattttaattaggatggtatttatactttcacttacaaatctttatgtatataatacactaataaacatttccatattaattattcttgataatttatataatacatacatatatgtgatataggaaaaaactatatggtggccaaaatgaaaatatcataattccatgagctcattatgacgtacgtcgtgcatgcatgcacaacaagaaattaataaaataataataataatatcatttcaaaaaatccaaaccccagccaccgccacataataatgaatgaagataaaattgttactataagaagtaagagtttcattcacgttcgtcaatttttaatttcatttaataatatactttaattaatataaaaagtagagaggtagcttacttttaaaaccaaaaataaatcatataaataataaataaaaaaaattaattaatttaattataaaaataaatgaaattattaccctaactacacactttgtaccaacgaaaactaaatacaatcacgcggctgagccaacgactttacaatagcgtggagattcaatccaaaataatccaaaaaaatcacactctaactcattaaacactaaccgacactcacttatccattggcttagaacctaagaaactcgccagctggcagcgcgtacaagcgagtgtcacattttcgcgagtagagtcgcaatttagtttagtcacgctctctgacttttgttaaagtcaactcgttattatatgtgcaattgggagggctttgtttggatattaaaaataaaatatataaattaaaatggtacgtatgtattgaatattgaatatataaatataatataaatgtatatatataatcgatattaactttgttttatagaaattatttcaatggatcatcatgaggactgggatttgctagctgtggtcagatcaggagggagcactaataccaccaataataattttggttatgaatctccaaacatgaccaattatgatcaccaaacgacatcgtttttggttgataatactaaacaaaacgacaacgacaacgatgataatgatgatgaaggtgatgatctctctattttcaattcattccctcatcttttcgaaacgacgacgcatttagatgaacttgaagaactctacaagccattctacccagttgatttgcaccctccgatggttgactctcacgaccatgatcttgatttactaccgtccgatcttaataatcatgaaccaacaacgcagaagaataagaagaagaatctcatcatggttcaaaatacaaaacaaccagctccaacaaaatataagaagaggtaattaattttaataataataattaatcaaagctctacaatatatttgattgaataattatgattgtattttttttttttt

SEQ ID NO: 304272 - DNA, 1350 bp, Cannabis indica
cgataatattgtaactataaatagagatggtaattaattgaaaaaaaaaaataaaaaaactgaaaaaggagaaaggaaaaaaccagtaaaggttggtggtgagctctttggaagacgaggagtggtcgatggcccagtctcatgacgacagcagtagtcgcgaactgcagcgtatttcaggctcaagacgaacacgttcccagggggcgccggactggtctttgatggactcgcttattcttgtcaatgagatcgccgccgtcgaagccgattgctccaaagccctatcttcctatcagaaatgggtgattatagctgagaattgcaccggtttgaacgtccccaggaaattgaaccagtgccggcggaaatgggactctcttcttctcgactataataacatcaagaaatgggagtccaactccggagatagtgtttcgttttggtccattggaagcgataggcgagaatctctaggacttccgggagacttccaccacgatctgtttttagctattgagagtctcataatggcgcgagagaatcaaccggatacggaccctgaggatggcgatgatgaagctaaagacgatacggttgatctcgtaaaagagctaggtaattcttctcgtatatgctctgaaatgtatatttttgctacaaactataagtatggaaatgcaatctagttgttaggcattcacaacaattatgaaaaggctttatctgtaattattctagtgtgaggtttgagaacccattcatagcttgtcttctgtagtaaaagattttatcacaacccatttccataaatttggctgccaatttttacatttttgcttccataatttggagcttgagcttgttgctcttaaaaggcttcaatagatttaatgaatttttcgagcctagaaaagcgacaaaatgatagtgaagaaagatcacacctctttagggtagagccacacaaatgttaaatgaattttgaatacccttttgccatatcatgcaagttaagtttaagtacattcatattcgagcttgattttgttccatttgttagaggtctagcattagagtaagtttcctctacaagttctggaattaaaatggagagagttgaagacctttatttcattatctgaatttgacagcggtcctctttttgttttacttttgtatgactagttgtgtcatgtctctattgtttgttccttcattaaaggaagcttattattagagtacgctcaaccaagttttcagtcatttaattcgtctctaatattttaccacattttaaatattcaatcacggtgtctgcgattcgttcaaggaagctaaatttccatt

SEQ ID NO: 304273 - DNA, 1306 bp, Cannabis indica
aagtttgcaaccctagctgcacctcattgtgaagaacatcgccggagccgaagctccatggcgacgatttcgcactcaaaaaacctagcatcatctgaggaggtccaacgacgtgaatgagaagatgagaaggagatttgggataccgaggacgttcttcagatcctgggagaagacgagcaagcaagaaggaaatctgagacaccgacttcagctccagtgacgttctttagatcttgggagaagacgacaaggcaagaaactgagagagagagagagagagtgaggatgacgaggttgaggtgaggagggtcggacggtgatgataaggtaagaaatcgagagagagagagagaggacgacgaggttggagttcgatttcgtgggttttgaattctgtggttggggttcagttgggttttttggttagattgttttttggttggagtaatttatatgtcgattatttgggttggggttagagttttctaggtttgatttttgggttagagttttttaggttggggttcgatttctgggttggtgtttgtgggtgggggtttgatttttgagaagaagaagaagaagaagaagaggaagaaagaagaagaagaaagaaaaggaaaaagaagaaaaagaaaaggaaaaaatattatttttgttctattttgaaatttttaaatattttaatgtattttttaatgattaatattaggtatgtatacacttgtgtatactgcagtgacaatttattttggcacttaactaggaacgaatccactgacgctaataaaaatattacgtaaattttttaatttgataattatagattaaataataaaaaagctcccaaaaattaaataaatctggtaagattgtgattataatgtatataagtattttttttaatgataaataagtctccacaaagtaaaaatttgggtttgtcactgcacttaataaatcaaagtggacggaagatatacagagcaaaatgatatagatgttgagaagtttagcctaaactccccctaatttttccaattttggaagttgttaacgtagaatataagcctattttagtgataggattagcacataaatagttgagaatgaaaataagaagaataatgcaaagatcacaccaagttttttacgtggttttgaagttaaaagtttgcatagtctacgagtctatcttattagctttctctgatacaaattagggttctctccaagatttttcgtccatttttcagtacattctacccctatttatagttacatagggagacagttaattaca

SEQ ID NO: 304274 - DNA, 1786 bp, Cannabis indica
cacagcagttactccaatttgatagtgcaatactatcaactaagtcttcctccctagatctctaaatcagaagcagtttattttatctgattatcaaaaggtatacaattgtgatgagacaatatgtatttatagagttagggaggggacttagctacaaaaccctagttgggctgggcctgctcatcaaaggcttcagtcaactagaaaagcccacacttctgcttcacctagactttacacacagatgctaagcccattaacaattgatcaccaacaacatgggctaacacagcaaagaactatccaatcaacccaagttttaataaaaccaataaaatttaatgtaagcccaaataaaagtctaacataaaagagattgacaaacttattaatgtccctggctccttcagttaaaatggaggaaattaagaaacttgaggtgatacttgatgatcttatgaatcatgaggagctttattggaggcaaaaggtcaaggtctgaatggctaatggtgggggatagaaacactaaatatttccataataaggcttcggtaaggaagaaaaagaatagtattactgagcttgtgactgagaatggacagaaattgaatgatgatgaagcgaacaatgttgttgagattgagcgctatttttctaatatcttccagtcatctagacgtatagtgcaacatattcatttgggtatcgaggtagttgggccgcatgtttctgatgacgagaatgttcgactcctgaccctttcacaaatgatgatattttgagtcgaacattctcgtcatcagaaacacgcgacccaaatttaggataagaattggacataatttgggtatcgaggtagttaaagcgattagttctaaagtagcaaatttaggataagaattggacataattttctttgttttagttagagtaaatcattactttttatttcttatataacataaagcaaattgttaaataggtaagaggaggttggaaaaggtcatgtgttgtgacatttttcttattctttctatcttttttcttttcttttattattattatattattattattattattttaaataacgtggggtagtttgttttaagaaaactgctaagctaaaccaacaacataaaataaagtaaatgatcaactaattaattattctaataagagccaaacaaaatataacaactaaaacttcataatttctataacgaaatcccaagagccaaaaaaactttatttctagtcaagaatcctacattaatctttaacatgcatacaaatgaaatttgggggcatcaatcaagtcacaataaaagcactaaaagcctaaaatctctcattccaatcccataagggggctactcttatatagctaccaaccaaattgaggacattatatatatttatatttatatatgaaagaacaaaccaacaaattaaagaagttaaacttatagtgagatttactatatagctgctttttctctagtcacttatacctttctttcagggacatatttggctatgtttggtaggaataggaaaaaggatatatgaagggtggtgaatttaaaatagatgaaacttgtaatgaatggaaattaattaaggatactataattcacatccatattatttagaaagatatatcttttcatgcattttctgttaatcaatcacatagattatgaactatccaaacacacattaaacattattgctcataatcattaaatgcaaaatcaatactttatttagagcatca

SEQ ID NO: 304275 - DNA, 2064 bp, Cannabis indica
atttatgttgttactaaaaaattgtcacgaaaaataattgttttttgtagtgtatgtagaaaatattaatataatcgtttaaaatattatttgtgtggacctcgatcccattttcttagttattttttcttttttgataccgagtcagggctgggtgggtggagtgagtgggttggattttcaagcccaaatgtttagccctagttttgacagtgtggtgtatatacaattaggaaaattcaatttgagcctacattttagaatttcttatacaaatttaaataggattagtcaccatttggggtagtttcacatattgtttgagagtgtaaaagttttatgtagggaagcttgaggttttcctctaattctcttattagtgcaatataattgtcttcattaccaacaatacttgcaaaatattaaagactggttgcattgaatgttagaagtataactctatctagtcttctacgatggattggaagagtaaaattgagtagctttaggaagctggtgctcgctatagcaagtctagttaccacatttggaggatgaggggatggatgtctatgggatgaaagctacaggacacaactaaagtgtgtaaagaaatcaaggttggagttgttcaaagagttgaattattttgtccaagaaagatctcaaatgatgataaagcttagttttttaccatgtagttcagcattataattttcatattgtacagaatacaaattgtaaagtcacataatttcggcccgaaaattaagtgctattaggttgtaaaaaaattcactactgcaaaacaagcctttagaggtacttttttcagcataataattaataaccgacgccaaagggttgaaattttttggaagggcattttacgccacttttggggtcggttatttccaaataaccgacgccatagggtgtgcccccatatggcgtgggttatttctaaataaccgatgccaaaagggtttataaccctagcccatcccttcgtcttcctcattcgatcagccaaccaagaaatccccaaatcagagaaaccccaaaccctctccgccaaccaccatagaaagtcaccccatttcaccattttttaactattttagctcatttttgtttctaaatcttctatttttcatacctaaaactatatacctgaaaagatcacatttttttctcattttttagggtaaaccgaaggtagaggtagtggttgtagtaattatacctccggccaccatttttttttgggggggaaggaaaacactttattcagcaaacaaagaactacaaatggtcaggcttctctgcatttaaaatggcagagcacaagagggtaaaacctctgactaaaaaaaattacatctgtgagtaaaagcccacttagctaaagagtgagcaacattattacaatctctattaacaaatttgattcccacacacccatctaaaagattagtagaaaaaatttccaacaaaggcacccctcaatctacctgaggagcttcctttgactgcagatgatttatagcagtaaggttatcagagttgacaaaaaaaggtctagccttcaatctttgcaccaggttcaaacccaatctgatagccaagacttcagccagtaaaaccgagacacacctggtttgaaagcaagcttctgcagctactaaacggccaaaattgtcccttataacagcagccactccacttccctgctgatctttgcataacgctgcatcacaattcatcatataagtgccggttgaaggagccagtcatctactaatccccttcgctttcttcacttctctgttcgcggtggccttcagcagagcgttatcaatgtaatcaagagcccaaggagtccagctttccaaagaagtattcttattttggaaaatgcgttgattccatttgggcaccgtgttagaaagattcggaacattgttggagctaagaatcaagggacgatggtctgagttccaccaaggaaggagggtgactgttgatgtaacaccctaactagcataggcgtattacgtgatt

SEQ ID NO: 304276 - DNA, 2807 bp, Cannabis indica
gagagtaaataaaaagaagaaacaatacacatcaataaaggaaagtaataagaaaaatagctaaaggcacctgcaaaggatcaggcaactgagctacacccttcaatgttgttggacgcccattgacaagtcagtttttgagtactaaagaggcaccatcccctgcagataagagaatgtcagaagttaaaggtgtcaatactaatagaagtacttctcccggtgattctccttacattgattttgagtacttttaaaggaaaggaaagtcacatcactaggaagatagatatggggttgggggagaaagccaagggtgcacacatcaccaagaagaggagttcagtttatcattttatttcaatacatttcatattgtgatcgtcactactatacataaacaagtaaaccaaattaattcaaagttgcgaagccctacttttcttgttagcatatcacaaacgtgatgatcaaactctttgcatatacttaagtcacacacactcctcctgagaacaaatatcagcattatgattgatttataccaccaagattcatattttcaagtttatgatcaagaacatttctagtactctatagcctctaggttgttattataagaaaattgaagacataatttccactagcagtaaacgacattcttgaaacatttttcacaacaccacctagagattcaccataccgtacttagcacaaaatgaaagaaagaattaataatcaaattagaataaaaacaatgatgaaattagagagagaaaactaagttattagtataacaatgaaaaagaaaagaaattatacttctcggctctggcgaatcgcaacttttccaattccaatcacttcattatatatttgaattaatgtgcgagcctctagctctgaacctgagaaagatgataagttccattcacaattaatattatcctacactatagtataattaataatatgtggatatggacatgggtaaggttttcacatagatttcctaaacaagcaacccaaaagtcagtataaataaaattcacattacaatcagagtgcagtagagcaggccaataaataatctttgaaaagagagcagaggctagcatctgttaatcgttctcagcagtcaaatatatggttaaaagctaaatctcaagcacttttaacctcaaaccaccaatagagtcgttattaaaattgagaactctacctagcttgggagctcgaccatggagcttaacctcaaactcaacagaaagacaaacaaaaaaatgaaatgttgctgtgactaaatgagtatacaaaataaatagttgtgactaaaagagaattattagtcacaacctaataaaatgctaactaaatgataattagttacaggttttggttataaaattttataacaatatttagttgtgaccttttactaattataaaactttaaattttaaaaattgtcacaaataatttagtgtgactaaaatagtatttgtcatgagttgtgacaaaaatacacatttagttacaaattatttttgttgtggtaaaaggttgggactaaaagtccacttttttgtagtgtttttaagctaagacaaaattaagttccctattataatataagttgaggggtttatcttgtcttttatcataacaagagaagttatatataatagagcacaaaatgcatttgaaaagacaaaaaggcatgtgggagaggagcaaaggaagacatggcttgttatctcttttgtctccttctaccctgcaatgcaatgtagggactttaggaaaatttgttggtatttatgtatgagtgtttctattctttgcttgtaaagaaattttaattcaatttgtttatgtctgcctatattttagttatttaaaatttaaaaatacacataaaaacaacttatttcacttgcctataaaacaaattttcattaacttgtttttgtgtacatggataggttataataaagaataaaaatattaagtaatagtttatacattatttcacaatttatttcaagtgtggaaactactaaacatgtcatatactcgagtgtaaaaatttatttttagaagataaattatttatgaatttcaccaaatttagtgtgagatcataaataactaaaacatacaaactcacataaaaaaaaacacaagaggacaaaaaagtaattctcaagccctacttagcatagaaatttcttatagttatatgataagatgtagctctttcggtgtcaaactatattataaaagaatatgtaatatctataatctgacctagccttcataactttttagatttttttttctattattatatattttcatttcatttggaagcatgaaagacacccttaaatttgggatatgaatgcttaatattaggatcatgattaatatgttactcaaagatagaaggcactaaattggctttgatgaatatggtcaacaagatcagtagtattcagtattgcaagctgtataatagcattcaattagtataagtacaataactttaaccaaatatgaagcaaacatttatgtactcctcccaagaaagttggaagctttgtagagtcttgatttgaagaaaagacaagtgttttaaagggttgcttcttgctggtttttccatgatagtcctagtattttaagcaagattttgcaacagtataaaacatagaggagtgctaattacaatattctatttacaattttttagtttaatctccacgttcgaaatcacatgtcagaatattttttttcaaattttt

SEQ ID NO: 304277 - DNA, 2650 bp, Cannabis indica
ggtcgccgtgggttcgactggtctcgggtcgtgcgggtggctgtgggttcgaggggtcgtctaggttagactgcgtatggccgtgggttcaacgtctgggttcgtgggtggcgccgattggttggggcgttcatttgggtggtcgtgggttcgaacggtggtttgggttcgtgggttttggtggagctttggtggtctgcgtccgtccgttcgtgggttcgtgagtttgggagagggaaagaagagagagaatgtagttagagggaatgtgggaagtttgaaataagaagggtatttttggaagaatagagaaagattggtatatttttcctatgtgttataattaagtataattaaataccatgttccctttttttagcatgaaatgtcaaattttccaataaaaatactaatattggtaatatttgttagggatatacacatataattataaagtgtaaacagtggaaataatttgcggccgtgttcggtgtattcgataataactcttctcttcgccatacccaaacacttgttcccagggatctccctaaactcactctcaaacccattaaccgcttttcttgtctacaatggccagggacagttgtatgactcgtgtggccgccggagtcgcagtcggtggtgctgttggcggcgctgttggtaattatccctatacttctctctctctctctctcatatatgtatacggagttatatacatttctctcaatacctctatcatataatcatctagttttgtgtttcgtcgttctgggtttaggttttctgcgctaatttctgcttattatgggactcgtgcactttttatttttaaattttttcatatgtgtatctgaattcgtggtctgcgttggaagttagcaatttgagtttctagtttcatgatgtattatacatttgtttcttgatttttaagcatcgcgctgtgctgtgctgtcctgtacttttatttatttttttataacagttcattgttgcatttatggttttatgtataaagcttggtcacactcacaagttatatatatcatttggctttggtttgcatttgggggaaacttttattcgaacagagcagaacatgtaagctaattttaggtttctaggccatgccatctcctacacatagaatttcctttaatctagacgaaaactaaatatttcatgttttcatgacatttattggatatgcaatatcatcatatgttgcaagttggaacacccccgatgatataagctaattaatatcaaaccattattccttcatacagttttaatacaattcctttgatgtttacatgttttattttatgtaatgcaagtccctagtcttatttcttttaggaattattcttattgtattaatcttttgttagcacagttttccttcatgcacctctgtctctttttaaaaaatggggcaaaaaataagtaacagtttctaccaataaagtgcatttcagtccaaccctatcccagaattttccggaactttaggaattccgacatcagttgtgtactttccaatgtagcttttgtctaagatggtaaagattaccttggatggatgtttgattagtctaagaattctgaagaatctcggtacttttaatgactgttctagcgtcctgcctaagtttcttattcccttacaattgcttgaatttaactttgttgaatagtcaagtcttttatgattttgtttctaatactaactttacatccaggcgctgtatatggaacatacgaggctattaggtataaggtacataatctgatcctgtcttagacttcaacatatgatattgtagtgacttcaaagttggctcttttttttatatattattttgcattgtctattgctacatatacttccatatttgatgttccgttacttctatgttcattgttctgaattatccagtctttcagtgaagattcttacgttatattcttttcagtgtaaagcctttttattagagaagtaagaggaatggaatgtaaccttaaatattcagtctcattagtcttcaaaagattacaaggccgaatttacatacaaagggtaaagaaagataatatacaatataactcaaaccctatgacattgacagctcataatactctaactaattctggaaactacaaacatggttagatagaaaaatgataaagtatcatgtaatacttccccccaagatggagaataaatgttgtcaaccaattgatgttggtttgaaacttgcaatgtcatcaatgttcttgcttgcaacttttctcgaaccatgtgggtttctatctctttacgtttggtgcgctcagaatgaataggagtaatgttgtgaaaattatattgctttataattgcgcaagtgtacacaatcacaaacaagtaatacaatgataagtaaatcaaagttcgtctccacagggactttttactaaataatgctaaatcaactaagagcaattccaagaatttcaaataaaaataaataaaatcacacatcaattcataagaaaaatttatagccttgagtctaaacttgagaactaattttttaaactaaataaactaagaataagaaactaaaagtgattaaaatggtggtaatttcagatt

SEQ ID NO: 304278 - DNA, 2338 bp, Cannabis indica
  modified_base (2138)..(2138): a, c, t, g, unknown or other
tttttaacaagaaagatctcttaccttattcacaattgtattaacgtttttctttaatttaatccccacagccattgccagcaagtttttttgcactttggggttctgtacatattaacaaaaattcactgtaatttcaatatttcattatatatgtagaatatacacaaaaataaaaaagaaactaaagaaatgtaacctttttaattcttggaccccacaatggttgcatttgcaagtcagaagtcttgctgactattcctctaggcaaatcaacttcatttcttttctaaaatacatataatatttaaacaataccataagtcttgatttgaataaaaatcataactactaattaatatatatacatatagatacagatattcatttcattcttgagtaatatacacattactaatagatgaattagggacaaacctcataagaattgggaattgttgtagcattgagattgcactctgaaaggttctgtttaagattgtaaacctgaaaataatattgtattaattatttataaacaaaaaaaattataatgtgaaatttatttatagggagagacaatagattagaatagggaacaaacctgagaagaattgtgataacttgtagttgtagcattgagattattcaactctaaaagactctgtttaaagattgtaaacataaaaaaaaaaatattgtattaattatttataaacaaaaaattataatatgaaatttataaacataaaaaatgtttatatatatatatactgaccaatttacaatcagaggcagattttgcattccaaactagaagaagggaagaaatcaccgcagccaaaatgataacataataataaaatggtttatatcgtttattgttataattattattatgaatatccattcttctagatttctttgggaaaatcaaacaacaatggtgttattagtatatatcaaaacccagagaaataaagaacaagaagaaaagaaaatactaataataaaaaaaaaaaaagagtgacttacaaaagttgacttgttcatatctttcaagaaaatatatatgtacactttgtttctttcttcttctgtttcctgtttttgattgtctgattgaaaaaaagaaaataaatatagaaagagatgtgtaatatatatagttatatatatatatatatatttatatatatgtgtgtgtgtatattggggtggtggactatatagatataaagggcaagaaataaagcattaaaaagcagagcacgtgaagaagcaaaggttaagttgagtaagagctagaaaaggtagaagtaccaagattacgtcttaaatattttaggagaaaaaaaaagagtttggaggaaaatatatagtcaattataagtaagaaaaaatgtcttaatttgttatcaatcaatatttattattaccaattatacatagttattatatgaaaatatatcaagaagatacgaaaatgggagagaaagagaatgttaaggaatgtatagtacctaataacaaaatcaaataccatagaattaaaatggaaagatatgtatgattcatgaatcaacattaaagttttattttcatatttgaattgccatttaccattacaatgttatagtagatatggtttctttcatttaggcagtgaagcattgtgctcttttcaagacaaaaaaactatatcaatataattaggcataatgtttacagcctacttttttttcatttatttatttaactaatttaatttttttttttgtagtatattaatcaaatttattggtgagagttaaataatacattggacattaaatttggtcattaaataaggaggattttatttggtatttaacaataaaaaactaagggaaccttaaaaagcaaaacaaaattaaaagttggtggattttgcctaaaaaaattgtttgggaggtgtaactcaccaaatagcaaaattttgatagttatatgtggcaaattaccctatccttaaattattaattaataaaaaaaagtttatttattttaattattttgaatcatttatttttttaaaaaaatattttgaataatttattaaataaaagtatatgtgataaattgtttcatgattttgngttcataaaatagttaatccaattcaatccgcacgatctaatccaattcaatctgcaaggtgcgtatatctgcacttgtgcggattggattagaaaatctaaatgcggattgaatattgattgacatagaaaagtaaccgattcaatccaattaacatatatttatataaatttttgaaaaattatatatataactaata

SEQ ID NO: 304279 - DNA, 1214 bp, Cannabis indica
aataataatattttgggaacgttaaagtattttgaacttataaaaaatttataaaatgtcttcaataattactatatataaactagcacataaaaaatgaaaataaaaatagagcatagatacattcagtttttttttttttttgatcactgcccataatttatttatataagtaaattaatgataataagaataattaattaccgtaatgttgatgattttgaataatattgaggaagatatcataggaatttgcatagacaaagatagtttgtggagccaaatccttgttaagctgatcaagtactccatttagtttattattgtaccctttaatcaattcattcacttcttcagaacattttccacttggcaataaattaagggctcgaataaatggtatacatcctaatggtccaattccaaccactacaaattttctacctcccaactcctgcaatctctatacataaaaatttgactcagtctagtgccacgtagctcgaaaaactgtaggtaaataattaataataaagattgtacctttaattgtagagtcaagttagataacatgaaatcttggaagatgagtgaagtgatgctgttatggtgatgatgaccaaaaaatggtattgatggttggaaataattgagtacatcattggacccaattgttattgaaaatattgcctttttcaataaattattggtacgattgtctcctattttattcaccattttgcattttagtttcctcaaaatacttcacttgttcacgcaatggcactcttccaatctatatacatatatatatatatatatagttattatgtaattagtaaaaaaatatatgagatatatattataataaaaaataaaataaaatggtatataattaattttttttaggaattaaaatgggtggcttacaaataattgtccagtttggtcgagtattcctgaggctccagatgcataattaattcccctcttaactgcttcatcttctgaatttggagctaaatagggtggaggaaatgacttacctccaagaacttcacctatattaatcaatttatcatattataattcatctataaataataagggtgaatactattttggattttgtattttgtaaaagttattaaatggatcttttattttgttaaataacaaattagactctgagttttttaaaattgtacaaatag

SEQ ID NO: 304280 - DNA, 1317 bp, Cannabis indica
atgttaaacttaaattaaaacaaaatattatatatttagatgtctataaaaattaatatcacatatagttttacataaaaatattgtttaaaatacaatttaatataatattatacaatacaatacggtgtagattaccaaacgatcctatatgtattatcacttaattaaatctaattaaaaaagactaattatatttatattacaagtaacaataacttagtattacataactaaaatatagaataaataaagattatcaatgtgggcaaatgttatttcaaaaagaaatgtgggcccaatgtaacataactaaccgtttgcttaaactcaacctgggcttaaatttaacccattcggtggattgtcataattggacactaaaattaaaaagggaatttaataattatcatcttgttaagaaaaataatgattatcatcaatagtttatgatagaatgcttgtgcatggcagaataatattgtatcaatcataaatctaaaatatatattttaaaagaaatctaaaattgggaaaaatagataaataaaaattaattaaaaaagttttaagtataaataaaatagtataattttataaaagtggacgattcctagacggcctgcgtctaaaatacgccatgggtgatacttatccgttatccgaataaccgacacgtcagctttcgatttattataaaagacaagggaatgataaaatcacacaccttcccaaaaataaaagtgaaaaagcacaaataatacacctgaaactttgggacttcattcctatttgacaacgttgttaattgttacttagtaagccccaaaaaaaaccacaaaacgacgtagtttcataagcggtttgcattgtcggtgtcagaattaaactcgttggtttggaaagggcatattatttttttttttttttattagttatcttttttcttagtacaaattatctttttctttaggaatcccttgttcgctttattcccacaacacatatgaaaatgaatttcatcttcaaaaaaaaaaaaacaatgaatttatccattcaaaaaataaaattaaagatttttttagtcttttaaatttattaactacagtaagattaattttttttcctcttactaggcccgtcgccctttctttaacgtaggtacagtttgattagaattgtattttactattatggttcaatttttgttacagcgattaattttatctctgtgatataattttaagtaggggtatacgtcggtcggtttggtcgggttatagcatatttttattaacccaatataaatatcgggtt

SEQ ID NO: 304281 - DNA, 680 bp, Cannabis indica
attctctgtgttgatttgtagtatgttgcgtatagaatcagttgggccactccgaaaaatgtccctagcccatttggtatctgaagcccaataccaacaaagaaaataaagcccattaatatatatgatgtgaaagaacattttatttttttctaataattccttttgtaaaatatctctgttttgtttgtcctgaactctgacttgagtcagaagatttttttgaccgtatgtaaaatcactgtaaaaaggtacaaacaatgtatataaaatggtaaatgacattgccaatattgtcatgtagtgaaataataataaatttaactaaattagtatagctagagcacaagtaatagaaatatatcacaatgctagctatttactttctcaaatatggttttataattaaaacataatattagtaactagttactacaactaatgttaccttaataaggtattttaccaaatatgtcaacactaagtataacaatgtattgatgaaatttctttttaggcctctgacttagatgggctcaaggtataaatttaatctgcctatgtctaggatcggacctgatcatagtagctacgagaaatggctagtatgtatattattactaaatatgtgagtgtatataaagttaagatatatatatatatatatagagagagagtag

SEQ ID NO: 304282 - DNA, 1696 bp, Cannabis indica
tatatatatatatatattccaccttttgtccttctcatttgaaaatggaattagctaatcttaaatgtgcattttctgtcggtgacagcaaaaacccatttcttaagtgtttaatttttattatttatatattaatctttttatttttactatgctattcgatcatgtcaagtgttttgtattgtacaaaattaaaagttttcatgtctatgtatatagcccagcattttttttttttggcttctaaagcttcaaaaaatacttttgttgctatttaagtaatttgtgaatttaactttcaattctaaaaagttcttttaacaaaagttaagagtttcttgaaaagctaaaataagaccataagttttggttggttgtgcttttaaaaattactttgaggggcttctgaagctcgaaacacttttgttgttatttgagtaatatgtgaatttcaattgtcagctctaaaaaattcttttaaaagtcaactttagtagttttctcatgaaatgttttttgaaaagctaaaatcaaaagcagaagtctagctaaataagaccataagttttggttggctgtgcttttaaaaactgctttgaggggcttctgaagccccaaaaacaattttgctattgtttaggtaatctgtgaattttagctttcaactctagaaagttcttttaacataagtcaattttagtagctttctcatgaaaagtttcttgaaaagttaaaatcggaagtagaagtctagctaaataggaccataagttttggttggctgtgcttttaaaacctgctttgaggggcttctgaagctccaaaaacatttttgttgttattgtttgggtaatttgtgaatttttagctttcagctctaaaaagttcttttaatagaagtcaattttagtaactttctcatgaaaagtttcttgaaaagttaaaattaaaagcagaagtctagccaaataagaccataagttttggttggttgtgcttttaaaaactgctttgaggggcttctgaagctccaaaagcacttctcgagtatctagtgagtttaagtttttagatttaaaaaattcttttaacaaaattcaattttagtaactttttcaagaactcaagaagagttttcaagaagtataaattagaaaacagaaatttagctaaacatgaccatattatataacttttaaaggacaaataaaataaagtgagtcatgtatagggtggaaaatgttaaaaaaaaattgaaaatttggtgaaactattttgtagacaattacaaatcatcttttatcaatcaaaataagttaagaagcaatatttgttttctaccagcttagatttttttttttttggttattttttacaaaataactttattcatcttcaaattagcctttgatcttgtcagtgtgaaaagtgactctatgcagtgaatttgtcccaataatttttgtgaacctaaaagaaaggtaagaaaatgggtttaggtcaaatttagctctaataagaaccaactttataaagctctacacctatttttgggtgtccatataaatatatatatacatagggtaaatggcggtaaaactcccaatactttcgttttggtttcattaaacccccacaatccaaatttctgcgagtaaatccccaaaaccaggaaactgttagcaatttaacactt

SEQ ID NO: 304283 - DNA, 4604 bp, Cannabis indica
tcttttatgtttggtaaagtttttgtcaacgaacactagtattcttttactgtgaaggatatagctgaagctctccagctgccttttcaaattgagcccaatgaagtggaatttgatattcaaaaggtgctcgggtttctcattggtgacaatgatttggaactctccgacacaatgcacatgtctcaacttacctatcatcatgttgctcttatgaggtttgccctatcaacctggtttccttggtccaatctggtaaaattttcaaatgaacttgctttcttttgtatatagtttctactagtgtaaaaattaatttggctgacatgatttggaagaaaattgtctctcttagaaagggcaagaaacctaggcttaatcttatttttcttgacttgatttataagattttgtctaaccaaaagtagttgattcttgagaatgaatccattgacatgcctgctattggtatcactttcaaagtcccaaagaaacctcttcaacgaaaatcttctaagaaaaaggctcggtctgcctcccctagtgctattgatgaacttgctggtgcatctccctccacttctgctcctacagaaatggctgaattcaacttgcatttgggaagaatggaggcaagtcaagccttacttctcaggaggatggacatcgtaatgaaatccttctgatccaatgatgatgcttaagtggttcctttttcatctttttccctcttatctatgattttttgaactattttgactttgtttatttggcttgttatctttggctccttgatagcaaaaaagtggagtagtatttattttttggattgttggttacaactctgaatccttattttagggagagttgttttgtttatgatttgtgaacttttccatttaaacagttatatattttatgtgttagtatgctttcatgcagggggagtattttctatactctattatttttgcttctaacacttgatgtaggttttcttctaataaaatattttgtcaatcaaaagtgctaaagggggagaatgttaattctattttttgcatctttcatttgacaaaaatattttataatatatttatttaattcggctgaggtgtgtatttaaatttaatatttttgtattaattgatttttatatggaatgaaagttgtctaatttttctatttatggaaaataagacataaaggataagttggatgactcatcctatttctatctatctagttatgctaatgatcttgtgtgagtttcctaatatgtttgatcagatttcttgtgaaaaaaattgaagcaagactttccttttctctaaaggaaaatcacacttactgctcacgattctatagggtacagattcgaaaattcctaggctgattaaagaactattttagggaattgtctagtgcatgtggtattgctcagaccgtgtgtgagctgtcaataaggtgtatattgattataaatacaccatatagaagctaggtaaggtatctctttcatacactttgaattatattcatttaagaaaatagtatctttgctttgtagagaagagagtgttcgtctcttactctatttatatattttttgtattgtcttgagtctatattcaagtcggtaaaagaaaaagaacaacagtgctacctttgggagaaggttctacaagctcttgggagatttcttttcaactcttaccttgggaggaagcaacgggagttcgagcacttgaagtttcaataagattcgattaaaaggtagaatacatcaagcttgcaccatacaatcagagggaatctgtttatgcataagccaatcactttaacttttgagatctatctaatgaatcttatctctgggcatgaccccgtgaactagtaaaaatctggaaggatatattgtggaaaccacgtataaaaaccttgtgtgtttttatttttctgcaatgtttgtttttctggtttattctgaagttacagagttgccttttatagctatagaaaaattgttttagtaatagttttattattttgtatttaattaaggaattaattaaataataaactagttattttaaaatacaaaatttcaatccataaagaaaaatattggataagttgtgcaatgccacatcgcttcgaatatgtcaggtgtgacgattttgaaacagtgtaggtatgaggctacacagtcaaagagggcttaaatagattggtggcactactagtgcctatatcaataatgtgttttataacataatttatttgagaatatctgaatgtatttgtggaggtgtaatgtctgaatttcccttatttgtatgttatgttgatttttgacccgagaggcaaaatggtcatttgaccaattttacaaacaaattgaattcagtcttgttgatgaaattggaaaatgtaaaacttttttttcttgtcttgaatctctctaaccaaccctctctctctctcaaaccattcttgcaattatgttgaaagtttagagaaaatcaaagctttggtgttgaatttttgtgttggaactttaaggaggacacttgaggtagatttcactctcttattcttgatattattctttgaaaagaaaaagaaagaatttttcatatatgaaatatttgaatttgagctgaattgttttgcatgtatatcttgtgttatggatttaatgatgttcttatgtttaaagctaagaaatagtagatggttgttgtttttaggtgagcatgaaattaatttctttttaagttaattttaattgagttatggctgtgattttggtgaaattaagcttgattttgcttcattttcttgggtcaatttgagcatggactttgtttaagctctcttaagcgtttattttgagagttttaaaggtaaagagttaattttgttttttgtgtgattagacatgcatattttcatgggaaatataccttttatgctttatattggatgtgtgaatcaattatatgacttaggtgaagtttggtttgagtttgggcatttacagacctttgaaattggatttctaggtttttcgaacccagtccccgcaaccagacttatggtttccgcggccaagtcttgcagagagtattcccaattttcttgattttattttggccataacttttatctccaaactctattttagacgttctttatgccgttggaaaaattgttttgagctttattaatcttaaatacgaatactatgaaatttgattgtaggattaacttattttgtgaaactcgaggattgtcactagagatattggcacttggtcaggatcacctctgggttgggatttctcctcatacattggaacttaggtaagacagagaactaaagacatagaatatagcgcagtggcgcagttatatgatatttgattgtcattaagaattcgtgacctagggttattaccctaagtgcgtattgttagaagtgtgcaataatatgttaattgaatatttgtgtagagttatgtgggtaaggcattaccagtttagacttggtggttataaccgagacaaaccctagtaaggccttaaatgtaaacagacgtgtgagaaaaacacgtaggtctatgctacatagacatttattataatgacattattatataaagtaatgtaatataaaatgcgatcacacagtttatatatatatgcaatggcttactatttgaagtgtaattattattataattatcatattatattattttctatcttgctgggcctcggctcacgggtgctttattatgtaggcaaggctaatgtagtatcaggtcatccatgagatcgaggactttgaggatgacttgtacatgttccagttaagttagaccaccatgggttcggtccaacaggaagtgtttaaaaattctattttttcgcttaggtcggcctgtaccaaataacttgtaatattttgaaaacaaatttttatgagatccctgatatgtaagttattttcgtttatagtaaaaatgtcgatgtttattgcaagttatttatttaaccaagtttaatattctttctaaatcacttggcttatggaccatgattaacgagattagtggtttattatcacgacacatggcattcctctgagtaggacattacaaccttctatagaataagatgatagaaaactttagaatttaatcaaaaagtatctcctctactttcctactttatttttagattaatttagtcatgatcttagaagagcaatatttgttgaaacaaatactttcttatcttaatgaccataggatgtaagcaaacactttggaatagctatgaaacatgtaaaccttagttagaagttttggctttccatatataagttcatgattggggcatccttgaatctagtaatggtgtatactaagtatacaaccattccatcattctgaggttttctttggattatacttagatgggataacatagaatgtcatttgctatctctaaggcatttccctagaaggactcaggcagctgctagtaactaatcatagaccttacatttttatcaatatgtgactctgaagttc

SEQ ID NO: 304284 - DNA, 1429 bp, Cannabis indica
atgtgtatgtcataatgagccccccacctttacaaactctccctccgcgacagtgtggtggaaataaggtagagtaagctttcatttcaaaattaattagtaaggagaagtgtagtttatcaattatatattaaattttcacatattataaatataagagttcctaagaaaagaatttttttatttgtttgattattaattaatttttacttaagaacaactaattaatttacaacgattatgtcttgtcttctagcatgtgtcattgttttttctttctaaaggtttcttttgtctgctagttttttctggttttgtcccctgtttttctgcatttggtcctctattttcttctgcatttttatccttggtttttttttggtgttatcatccattttcgggctaagtcatggcctctaatagcagatcaatggaggatttggaagagagatatgctggatttgatttagagaaagaggatgagggtattgaaatagataaccttaaagcagaggaagtgttgattgatgatcgttactgcctggtgggatgttttttgaatgcaagatcggtggatttcgaggctatgaggcacacgttggcagggctgtggaagcctgggaaaggcctatttgtcaaagagttaggcccaaacctttatctgtttcaattctaccatgaaatagacattgaaagggctatcaatggaagtccatggactttcaacagattgctttttctgtctggaagagtaccacaaggaggtgatccgaaggctgttttgttgaacaagttggatatgtgggtgctgattcatgggttatcatcaggattcatgactaagcgagtggtaaaggaagcggctaaagttattggcaaatttgtggaatcggatccgaagaacaataatggtttatggcgtgatttcttgcgtgttcgggtgcgagtcaatatcgatcaaccaatacgaaaaagaatgaagattaaaaaggttggtggggactggttttgggcacattttaaatatgaattcctccccagtttttgttatatttgtggcattattggacacactgagaatttttgccataagctttttaatacatctgaagaacatattgttaagccttatggggagtggttgagggctcaaactcagaggaagaattacttgcttcattcccaatacctgcggactagaaccgagattgatgagtaggtgttcgggccacgggaagaagctgctggagtcaggtccaatgaacattcacggagcagttctggtgcgcctaacaagggtaaggagaagttgccagttttagaagatagtggtgataagagtaaatcaattcccactattctctctcctaatggcatgggcagtaattgttggattttatgccctaaataaaacccattacaatctgat

SEQ ID NO: 304285 - DNA, 3374 bp, Cannabis indica
tattcaattgttggaactagctcgacgttgcagtccaccccactcatgtttggttaatttcctatatatatgttaattggaaagtcagtttatataatatatgctaaaaaaagtaataacagtattataaatttataaccttttattaatatactctgaccctcacagttttacctgacatgtgtaatcttgaaataacatacaatattgccaaagtgtcatctgatttattcaaaatttaaacatgcacccatattatacaccataccaacttataaaaattaaaagataaaaaatcaactgtactctgctagcttgaattcatttaggtgcacttaatattggtaagaagagcatgcataatgtcaagaaagagcgaaccaagtgcatcacaaattgtccacaaactcattgagaaagatgccatagataggactgtctgcttcaaataatatggtgttccacaaaataaagggggagaaacatagaaaaaaaaactacgtatgtggtgagatgatatgatgaaattggacaattattaatccaattccacttcgctataatgcggaatagaaagaaaaatgtgtattgatcttgaaagtgaattgattgttacaaaggaaaacagaggacatatatatacaaaccagaatattcaactgtgactaaactaccaccgacttaacctataactaactactgatacatagcaaacaatattactgaccaaattattgaatttgataaatctgaaatttggaaaagacttcacgtgaacacgaaaggcgaagtggagggcctaactgtagaaattgttaaacggattgtaagttccaagtttaatttcatttaattgttatgcttcataatttatttttaactctatttgttttgtttataagacaaattacgtaagcaagtggaagagggtgttgtacaagtgaaaggtaaaagggacgtgctgatcatggcgctcgggacagatgagcatggtggccgggttcgagccatgggtttcagcgtcacccaaaccaaatatttcaacacaccacgccctaaaagaaaaaaatgtcgatgggtcgaaccagacatcatctgatttggagagaggcgtgcgtgagacagaggaaagtaacagaaagttgcagaataaagtggatgagctcattcgtcttataattagttcccagcatagcagcgttgcatctagttctggtggtggaggagcatcaaatgagcaaccccatattgaccttgcctccgatccagtagcacaactaccgcgtcctgccaatgtctactctgcaccagatcccatagcacaaccgtcgggtgctgccaatgtctaccctccaccagatcccgtagcacaaccgtcgggtggtgccaatgtctctactccatcaccactgcgttttagagaggagattgctccagtactagcagcaccgccatctactggtggtagttcagaagaggtaatcttaatattattttacgaattatctaatgcaaaaattataaatatggtcaacttacaaattgaattgttgcttgtttgttttggatttaaagaccttaccgtgttggatgcactgcctattgaagcctaatgggatgatattaaaggttgctttgggccacattgtcaaggaaaaatatttaaaagatggaaagtttctcattaacatggatgaatacctacacaaagattatcgtcagctatttatcgaagaagccaatgtggagaatgcactgctcctgtgttccatagccgacgattcattgacaacagtaggtcaagctataaaatgttatgtagcatggccaaaagactatcttacacctgttagaaaacatttggtatgtttcaatttatttacttaacttattgtgtttattcattaatgacattgctaaccttattgttttttttccatatatatagacatagccacccaccaagaaacttcagaagcaacccgtgaagagaagtaaaaaaagcctctgacgatttactccgtcctcaaacacagcctccaaaacaccttgagagggcgagtaatgcaaaaggtcatggtcgttatgtccaaccacgccaaacttcctcaatcattaccgttaggaagtccaaattagcaacggtttttaaccgtcgcctattctgctcgttttgcgacggtcgtatagatggcggttatggaaactgacgggaatactttaaacgactatttaaaaacgtcaggaaaaactatttttgtagtagtgtcaacaatttttcatagattttgtgattgaaaataggtccttattttgatggatcaaaaatcatagttttctccatgaaaaattggaaaaggtagagaagagcgattggactccgaactcatgttgatgagtgaaaaagattacgtccaaggatatgattgaatggaaccctgataccactgatggtatttgagaataaatttctattggttttgtttagaataggtggatatgtggttaatagtttgttgtggtaatatagtgaagcagtgatgttgatgagtagttgttgatttagtatatgaaattagttgggcttagaagagagaattgtatgtaaagtagtaagctcttattgatagtttggaacttttgacttttgggtgttggttgttacactagctcctcaacccaaacttggtatttatagggagctaaaagttaatactacaactttctagatttttctttttttgaattacaattttactttctaagaaattctagaattttttaagtttcttagcttacaaatatagtttctagataattctaattttctctaattttcttagttttgtatagttaatactaaaattttttagataagaaaagtgtagaaatgtgtagcactttttagcattatttttgtttggttaaaatataaatgtaaaatttagaaaaaattagtatttttttgtaaatttttctaatttatgtggggtattgtggctataagtaacagtaatgttgcatggtgggagtgggagtcttgtactgaatgggccggtatcagtgagcctgtgtctagattattttggtgggcctgtctcttttttaactttagagaaaagtcaccttaaaacgcatttgttgtttaattcgacaacttatatattatataatgtaaggaaaggaccaccatgaaatcacatgatgccttgccgtgatcacaaaaacaatatcaattaaccatgggtgggtctatcgtctataatatattcaccttttgtttgaagaagtaggaccaactaatgatgatgaacatgaaaattactcccctgtctgtatatatatatatatatatatatatatataatagtaat

SEQ ID NO: 304286 - DNA, 1711 bp, Cannabis indica
acctggagtgttcggtctcgggacatctgggagttgtattttgatagtcgctgtgcgacctgtaatttgtgtattttggaatattaattttaaaaagtttgaaaatgggatcccggcacttgtaaatattttatcatataaagtttaatatttaacataaaagttttaatttgacacgtttttcgagaaaattcttttattagcaaagattgcactataattgaaaaggcactgtagcgtgccttagcattagggcattacagttctcgtctccctccttaagccagagaaccttggctttttggtgtagaaacaagagcacaactttatgagtattttgatacttaaatcaagcaatgccttctttctcaattagatcaccagacaacggccttaactataattctttatggcaatctatcatctcctgaaatgccacttgatcacgttgctgaatgttagagtaatattttcgattaacctctttaagaactaacttcaatctcttaagtttgtgcaccgacctatacattaacgttccttgaattggatcacaccaactcttctgaatcatacttttgaaatctagagcttgaaagtacttaaagggagacttcccaattttcaccttaggataaactgttaaaattccaggactatggtcaaaattcccttctagaagaaagacaacttcagctgaagtaaacttttgcaaccaaatctgatttcccattacacgatcaatcttcaaataaattctatcctctttactttacttatttttccaagtaaaaaaaaaagtacctgaatactggatatcttccaatgcacattgctcgatacaattatgaaacttcttcatttgatgggattttaccttctcaccaattctctcctccacactaagaatctcattaaactcctccattattacccaaggaccattaatgtcagatgctaaagacaataattcctcccataatatctctctatttgattctgtattcaacccatagacaaatgagaccgtgaacctgcccttcccaactctcacctctaaatgaacaatctaacttgaacaaaacttgatattcacttgaaatattgccgaattctagctgactgtaattcacccacctagatgccaagcattatttgaagtaaatcaaccaagcccactttcattctagagattaaatgtttagcctccaactgtttagcaagcttgttgattccccgaacgttctaactcattattctatccattcaaaataggaggctctaccttcccttcttttagtattcctccctactcattgaacattgaccactatcttccaacgcctgaaaaattgttcgtagtgacaattgccataaccacattctctattggcaatttccctttcttctcgactttttgaaatccctcatcatcctctattacctctttctttttttggatagccccttcctcttttctcttctccgcccatgcttgctttttttggacgattttgcttccttctttcttcctacacatttcagttttgtggccaaacatttgtattcattacaatacataccaccagaatccattcatacttaaccactactttgatatcttgatgattttcattagtgaaggcaatggttttggagaaatcttggttgtaaagcccgcttagttaatttggaaattagcagttgttta

SEQ ID NO: 304287 - DNA, 4318 bp, Cannabis indica
tttatggcataaataaataatagtataatattatggagttatatattttttttttttttatatttatatgtattttttatgctatatttttgtaaaaaaaagtgaaaatagtatatttataaacaataataagtttcgccgaaaaagtcaccagcgccggtatcaagaaagtcgtcggaaaaattatttttaccgaaaaaatgtcggaaaagtcacagtcgccgaaaaatcacaattgccggaaaaataactgaaaaagtcaccaaaaatagatatctcagatataactaaaaataaaactgattctataacatgaataaaaataaataactcaaactagttataattgaaatataactaattttttaatataataaataaaaataaataatacaaaataactcaaatcaattataattaaaatagaatgaataaaaataaataatatcaaataaaaaaaaagtttataagtaaataagaacatgttatataaattttagttttattacaagaaaatggagtgtatagcaacatatgcaatctcaaccggagagaagaaaggatgtggcttccctcaagaattgcagtgactctgactcttccttcttcttcttctttggtcaacgctagacttttgccttccttctctcccattaccagaggtgctttttaatcacaatcactgttagtctctctctaactctaactctaactctctgttttctgctatggtagcttcaaatgaaacttaactctgtaactcttttaggataggcttccccatttctgggttcctctcattttccacaaagtttacgactttttccaacaaaatggcttggaatggtgttagaaatgatttggctgttgaaaacaaatgtggggttgttcttccagcttctgaatcttatgttgaacaagcttgtgatgctcttagagttggtaaggttattgctgtgcccactgataccctctatggattcgcttgtgatgcttggtatgttccccactcattttgccttcaaactgtttgattaatttactcaatgaaactttcttgaatttcagcttaaatgtgtttagtgttgtcaaaatgttgttgaagtagtcattagtttgaatcatcttctttggttttgacatggaatttgagcttgaatttaattacattgagctaaaagagagtggaactgaaatgaactttggagttaatgtcatatggtcacagcagcaaacacgttaatgcaagattagtgagcttattataagagattaaggttgcgttttggagttaatgaaatggaattggaatggaaagatatcaattttcatttgattcttatgtttggttgtattttaaagtattagaatctcgagttttctattattttagtggatgactattccattttgagatggaagaaaaaactattccagctcaagatgaaaaaaaagaaaagaattaataatttttagagtaaatagcgcataagtacttaaagtttcatgtttgcaagtgacataaacctaatgtttatttttagcggcataagtacccaatatttgtaaaactgtaattttttttaatttcgtcagtatagactctgttattttcttcaacagaccacatataaggtctaaattctagattatttggtctagatagaaacatgtagtatcagttatttccaaatattcttttaataaattcaaaacggagtctgtactgacaaaactggaggaaaattacagttctacaaatattaggtacttatgccgctaaaaataaacaggaattatgtcacttacaaacttaaaattttagatacttatgccgctatttactctaatttttatcaatattttttgtgtatgaattttaaattttacttcattctgttcttatttttattcttgtgtttttatttttcctagccaaacacactttaaggtcctgtttggcaaagcttttgtcttgaagaaaagttcattcatattaacactattcagaaaacaagtgctttgtttttttttttctggttgctgatcaaaatgtttgatgaattatgcttagctttgtaagtttagtaatcaattttcacatgggaacctaaatgttaatgcagttcttcggaagcagtaaataggatttatgagattaaagggcgtaaacacactagtcctcttgcaatatgtgttggggatgtgttagaaatcaaacgctttgccgacaccgagcatttgcctgatggcttacttgaatctctccttccgggacctgtcactgttgtactaaagcgaggtttgttcttgataatctttttccgaaaaagaagtcaagggtttgtaacttttaggactaagatatctgctaaatagaaactttcttagtttcacttgagaatgtagggttaaaagttcaagtttccataatgtatctcatgagaaaaaaaaaatccatagtactttttaccaagcctttttgaagaaggctaagctatagaacaaagcaagggattgagctctccgccaatgaaagcaggtgactgttcctactgaattggatcaggtgcacccattggacgctagagccaatgttagttcttttaaaatcaattttataccgtttgctagaggttgtatcaatccgaacgatagttgaaataggattcgttttggctagtgctctatttttacagtttcgtggctggattagaagttcgactgagctatagtttcaagactagttgaccactgactttgagttaatatgttggcttattgcacctttgatcttatgtagaagagttgtgtccacacctgagtcaattttggtttgaaacaataatgtgttccctctaatattttcaggagagtcgagcatactcgagaagtctttaaatccaggattggacagtataggagttcgagtgccagactatgacttcatcaggatcgttgctcgtggattggggagtgcattggctcttacaagtgcaaatccaagcgggcagccaagtagtgttagcatcaaagatttcgagaatctttgggaacattgtgcctttgtttatgatggcggtgtgctgccttcgggtagagcaggctcaacggttgtggacctcaccaaaatcgggaagtacaagattcttagacctggaaggtactgaatcaatcaatctattgttgttcatctttgaaacattaaataagaaaacacaagaagaagatttgagcacagaattctgttataacccctataaccgaaactaactaacttacagttgtgataaatttccaagtaattaacatcatgtaccaaacttatatgttaaaactgtaaaaatgtctaaactgtatctgaaaattcatgaaaactaaccctactctttttcggggctgaatttgcagtgcggaggttgagacggttgaaatcctcaaaaggcattctttagaagaagaaacaacaactacttgaatatgccttctctcttcttctattagctattgttaagaactctaatgaattttgatttagtcaaaatctcattagagtcctcttcaagatattttattgaatttgaactgtataattctcatgtttagatccaacattttcaccattaatctgtgaacatctacctgtttgtttccatggttcatgctcagaactctaccaaaaccgttgaccgaagatgggctttaatggagaaagtcagaatactaggcagctacacttgattcagtttctaaccatagaataggataggatagtttggtttttcatctctgaattaagttgtgtattaggcagttaattaatttgatgattaagattaagaggaaaatatgattcaaatttgggtaacttgccaaacaatgctattctattctatgctattattacctactagctctgttaattacataataatggtggggtttaatgcgaaattcaagtaattgaatttcatttaatttcttttgaggaaaaacaattattattaataacataattatatttacttgtttggcaaaagatggtacctaaataaaatcaaaattatattgcaactatcataacatgaaaataaaaatagttggataattattagggttttttttcttttcatttttacacttctaagtagttttttgtatttttacgtaaattcacatagtaactaaaatcacaattaaaattcagatagcaactcacatagaagttatcggagcggttcaaattataattgtatatgaggtaatttctctaattattattattgttaggaaaattattctatatactatttttaat

SEQ ID NO: 304288 - DNA, 2170 bp, Cannabis indica
aaaaattatgttggtattgactttagagaaggaaaaaaaagtggaatattgctttaatggccaagtttgtttgagccatttcattgaaggaagatagtctctgattaaagtgggtgaattccatctattttaaaagggattgatttctagtgtttctctccttcttcggatgctagcatgtattttaagaagcttaccaaactcaggaatgtcatagacaaaacgggatttatttgagacatgtttgactagaagatttaaggtgagagtttttcatctctctctgattgctgttgagaaaattgagtatcatagattgttgaggcattggctgtgtgtctcaaaccataaatttgtgttttggcaaactctcaatgaacatctctcttgaccaaagatgttttaagtcactttctttcaattgattctaattactaccctgtttgtgagttgtctatcgagtctcataactacctctttattgattgtgtcttctctcaaaaagttataaatgatgtttctatttggtttggtcattgggagtggccaactaaccttgctgattggaagaaaagttgctcttcgacccccaattattgtcttgttacacccttgttttcggctattattgctactgccatttacttgttgtggtgtaataggaacaaatgtatctttgaaggagtttgttgtagaccgagatacattagtagtcaaattaaagttgctcttaaggttagaattcaactttgtaatttttttaagcttaaaaaaagagagaaaattgttatcactatgataaacaatttctaacctttgtaaggtgtttggtagctgctcttgtagtgtgtattgttttggtgatcattggtataaaatatttttctcttctccaataataataataataataaaataaacattggataattgttgacttggtagtgaagctaagtaccaatgttatccaattatatcccacttgctcctgccatgtagtgatccacatcattaattttgtggtcccattatggattcagcatctagtttggatttggagtacatatcacactattattatattatttttctaaaaaaaagggaaaataatatacttatttatttatttatttatttttcacaaagtaattaaatatactgcttagtgtttaggcgagctcagatgggttggtttttttttcaactgaaggaaataattactactttaaattaatgtttgggtgcataaaaatggggacaaattccttaatacttttgtagttgaattctttaattcaagtcatttatggtacgtagtttcatatataataagttgaagatatataactattcattgacaaagttcattccccaaacatattgttataaaaaaataagaaaaccatttatagaaattaattttattagagaccacagttttttttcaactcatttatatatatacatcatcatcatcattaaacatgaagtgaaagtagaccaatattaattaatatcagtgtcacagagagagagtatttcttttgccttcaatcatatgaaccttcctgctatggaaagttctgttgggtagacatcttgaatatgatgtttaggcaaaagagaagaaaaaaaaataattggatgaaattctctatcttttatactttgtaagatatttttattattattttttcttttttattttttttagtacaggaaatttgaatatctatgcattaatttggggataattttttccctaattgaatacatatgaaaattaaaaatatgtgacaattttatttaaaacccaatactactcctctcataactcaaccctatctctctcttcgtctatttctctctctcaaccgaccgaacaacacttcaccgccgcccaaaaccacaacccccaatccccctcaccgatgcccaaagccccggcccctcaccatctctctctcttccccatctctctcttcgtctatctctctctctctctcaaccaaccgaaccacaacccccaatccccctcaccaccgcccaaagcgctgacccctcaccaccgcccaaaacgccggcccctcaccaccgtccacaacactgtaaacacgcactgacacacaaagaccaccggagaagaagaaggtccgatgccgtgcacaaa

SEQ ID NO: 304289 - DNA, 1795 bp, Cannabis indica
tttttggttagttgttagttataattatttttttttagttagattagtttcttttaaccttgttatgttaagagagtattaattcaagaagtcaatttaaaataaaaataaacaaaaacccaaataacatgtctggatcagaattacagttcgaaatattcaaatcaaaaacccgaataacatgtctacaatggagagcctagaccttgaggatatcatgtctacagtggacctcatggcccaattagatgcaaaaagagaataggcgaagggtgaaaaagccagatcttgcgaaaatgacctaagaagtagcatcaatgacaaaatttgagggcgcgagctttcagatgaccatacaagacagctggaagatcaaatagtcacattgacaaaactcacgaactgtttggttcggaagcaaaacagagccacatctaattcaaaggatgaggtcattgaggcacaattgtcgagaacttccgaatgcctcaaatagattgtatgagggtaaaacaaatcctatgtcctattttttgaaatacaacaggttgatacaaagagcacagtgaagatgcaaaatatttatattttttttaacattattcaagtccgtcgaagattggtggaagagattactatccaacttcgtccaaaattagaacgacttacaatccctattctgaaaacaatttgttgctgcaaaagactttgatatggaagttagctcactaaccaaaatcaaacaataatgtaatatttgcttattcaaaagggtagtttaataatgttagtactggtgatatgtttgtcattaagcaatttatctactaagataaatgtctagtccctttactatactaaactggaggtatcttttacctcattctccaatactttaggtcgataatcaaagtgcaacaacactcaaatctaatgttttatgctctctcaaagtatattaaattcaacctatatttttttacggctcgtttagtacgatgtattaggtcgtattgtattatattgaattagattatacatcatatttttatataacactatgttaaattttaatttatactaaaatattatatatttaagtgcccataaaagtcaatttcacatatagttttacataaaactattacataaaatataatttaatataatactatacaatacaatacaatgtaatacggcgtactaaacgaacccttaaagatcacatcatggcaaaatatataagtacaacaaaaataacaaaataaaaatataaaacaaattgacatcacctcatctttaaccctataattagtataaaggaaagaaaaataaaaacatagacgatgtaaagaagataaaaaataatgatgatagaaagagaatgtatttttattttatcttatttggaaagagagaagaaaaaaatataaatgtgtaataataatttaataattttatataaattatttttaatgaaataattttaattaattttgaatgagttaaaatgaaattaattaatattattttaaaaaaatagtattagagtaattatagaaaaaaaaaattgcgagagtgagaaagatagataagagtgttaaaattttaaaaaatggtaaaaatatgagaaataaagtatgtgaaagagaacgagtggatgagtagaaaagggtaaagaaaaaaaaaagaaaaagaagctaacagagagagagaaggtcagcaaagagaggaaaaaaagaagaaagtattaaaaaaaaagctaacaaagagaagaaaataataataaaaaaaa

SEQ ID NO: 304290 - DNA, 2938 bp, Cannabis indica
aaaaaaaatatttttgtaaaattcccttaattataattttttgtaaggcccttaattataattataattataattacataaaaaaaaactttaacacagtcttaattgtttattttcataaaaatagaaatagaaccttctttaaattctactttttgccttccccacaataatttcgagccccccctccaattattatcaccaactattttatttatttatttatttattttcattcaactttatgagcaataaaaacaaaatggcatgtccctatttttgttgtacattatttattacttcttactcttatgtttttttttatttgaaaaaaaaaaagttgttgctattccatagttaacctctccaaaactttgatctatttggaaccaattataagatgaggattgtgattaaataattaaaaatctcttaatagaattaggattttgctaaactaataaaatcccttaaaatatgaaggtacatatctaacaaagagcataaaaaatacaaaaaaaaataagaatagttttttgtcataaaaaagaaaaagagtaatctcaaattgtgtcaaagttctataggtctattttttattgaatgaaatgaccaaaataccctgaagacatattcaatcctctctcacaaagtgtagctaggtagcccaatcacaggctgtctatttcaactcctggtatttggttggggttaagcatctatctactgcgcccacaagcaccataccaaccaatcacaactcaacacttttgacctttccctttcattctcacccttcttctgtttcttgctcctgttccattgatatagagtgaaagatccctgtcttgcaagtacaaaggccccgggctcacatttttctttatcactataatactttacttcttctcactctctctttctctctcgaaaaaaaaaagttcatttcccactaaaaagcttccatgtacttccaaagcttcaagctttaacaactctgcaaaacacagataaaaaccctcctctctctgtttctcttcttttgtaagtttttctttaatgggtgtttgaaattttcagtgaatctttcttgctttcccagctctccgtttctcaaaacttgatctgggtgtctgtgattttcccctaattataagtatttttgtgtgtgtggagatctgatattgaggtctagggtttatcttttttcaccaattaaggatcttgaattctccttgggttttggaaagttggtgtctttttcttttattggattccttccacttatatgcttctttgaaaaagggtttttgggattccattccaataaattcaaatgcttcttccataagcaataccttcattactctgcatttcctatctgggttttctctctctctttgaaaagaaaaaaactttcagagagagagactacagagtcattgctatgcttgttttcataatccatagcatgattcattagagctcacatattcaattcaactgtatattagaaataataacaccatgtacagaggaattgaattactctctccagccacttacctccaaaactcaaattggttgtttcaagagagcaaagcagccaaatggactccagaagagaacaaacgctttgaaaatgctctagcagtttatgacaaggacacaccagatcgttgggtgaaagttgctgaaatgattcctgggaaaactgttggggatgtgatgaaacagtacagagaattggaagaagatgtgagtgatattgaggctggtttgattcccattccgggctattccaccaccacaaactccttcaccttggagtgggttaacaaccagggctttgaagggttgaagcaattttacagtgttggtggaaagagaggagccaacactagaccatctgatcaagaaaggaagaaaggtgtaccttggactgaagaagaacacaggtatatatgtttatatattatattgaatagtacccattaaagctttggctagagtttgatttgttgggaggaaaggtagccttgaatcaagttctgtttgatagatctataagattattatatgtgagatgaacagttgatatatgaatttaaaacaaattgttcactattcatgtcttttaacttgaatatttgttggaatatgaatgaaattaaacaacaatagtttatatcccttttggggtttttagtaattgtttttgtttctttatagagtgttgtggagtctcttttttttttcttttcttttattgatgggttgaattacaggcagtttctgttgggacttaagaagtatggtaaaggtgattggagaaacatatctaggaattttgtgaccacaaggactccaactcaagttgctagtcatgctcagaagtactttataaggcaagtgactggtggcaaagacaagaggagatcaagcattcatgacatcacaaccgttaatcttcctgaatcgaaatctccatcttcagagaatggaagatctcctccttcacctgatcactctgtgccagttatgcagccaaatttggctaagcaacaacagcagcagcagcaacagcaatatgactggaagccatcaaatgaaagcttgccaatggtgtttaatcagctaaattcgaatgcttatgggggacccttttgtgggatttcttcatacaaatctaagctacaggagcaaaatttgctaagtggaaatcttcgtggatcgcagttcggtgcttatagtagtagtacactgtatcagatgcaatctatgcaccatcaatgaaaaccaatgcttggatcaaagggctgatttttctcgagtttctaaagcgtttgagagatcccagaacgttattctatggaggttggaatctcaccatccatgccatttataatagtttttatgtgaatatatttgatgagga

SEQ ID NO: 304291 - DNA, 5083 bp, Cannabis indica
agagagagagagaggaatccactagccaccacaggagatgaaccaccagatttgtagttttttaagagaaaaagagagggagatgcagtataagggtaataaaaggcgaagaagccattcgtggcctccatttggctcactgtttgcaagaggcgaaggcaacatcatgtctaacaaaaaggacgtgaaagagagaaagtgagagaatttttgcaagttgtagttccagataactaccttttttattctattcatcctcatcaatttttttctttctattaatttaatggttgatgggtcctttaagattctaaaggtggttatgctatcatctactacaaaaatgtaacttgctctaaagtatctcgaatgctttgttaaaaaattaaataaatcaagatacaaaatttgcacataatttaaaacacaataataattaggtattcacacctaatttatacgtagaaattatctcaattttggttgtgcaatactatcaactaagtcttccttcatagaatctaacaaagaagtaaatttattttatttaattatgaaaagtatacaattatgatgagacaatatacatttatagagttaaggaggagacttaactacataattctacttggactaggcctactcatcaaagaattcagttaactagaaaagtccacacttatgcttcaactaaactttacacgcacaaatacaaagatcattaactattgatcactaacaatatgggctaacatagtaaagaactatccaggactacattaattttaatatatacatataatatatcaaaatagttttgtttaaaaaaaaatcatgggttgaagacaagaaaatacttgtagccactctaaaaacaatattttttttgatagcatcttaacataccgatccaatttaacctttgatgtcgaactatgaaaatcatattgtcttttaagccaataaaagacattcataatcataaaaactaaagtattaaatcaatatggtgaataagtctagtagtatggtaaggaactatggtcaacatgtgactaattttaaatttcaataataaaatatctttattagtcctcacttcactaaaactaagacggttaataaataaactaatacaatcaattattacatttactaaataaataagataatgtaataccacaaaacatgcttaaaaaataagtcaatataatattattgtcattaagaaaataaacttaaaaacacagtaaccacaataatatgaaccacatgctttcattttaatcattcttgagaatatattaaaacatattgaaatttgtgaacatcatttttgaaggagccttccaagccattggtctagtggaagccaatcttctaccatgtccgattcaactgcaagagtttaatggagacacactaatccccttgggaaaaataaatcttgtgatgccaataaatgggcatatttccagaagtaacaaactatcatcattcaagtacatcacgttggtaatatcatgccctactgcttagaatccgatcttgggaagaccatttttaatggatttcaaagttgtaaaatccatccagcgtctatgcttaaagttaccatgtgatacctgaagcattgggacaatcacatgagatcaaggaagtgagcaaagtttctacaatgtttcaacaatgactgttctcatggtcgaggaaagaaatatctctaaatccagaacatctacccagccagcattgggggtggtccaagaagatgagtttgatccattaaattggtgtggaacgtgtaatcgaaccaatagaagaagtagaagaagtatgcatagatgatggatatctctccaaggttatcttagtggggaagaacttatctccggcagtgaaggaaaagatttcttcaacggtcaaggtaaacagtgacgtgttagcctagagtcattctaacatgtctggaatcagtccctgtgctattttccatgcactaaacgtagatcctaacgcggatccagtctgaacaagaagaggcctctagatctagtgaggttggaagtagtaaaaacagaggtatacaagctgacaaacattaacttcctcacggaatcacatatcccatatggctttccaatctagttcacgtcccaaagcctatgggacatggagaatatgtatagaattcatagttcaaacaaagcttgtccaaaagactattttccacttttgcatattgataagatggttgatgctatcgcaggataccaactcataaccttcctagattcatattccagctacaactaaatcaaaatgcatgtggctaacaaggagcacagaagtttccaaactaacaaaggaatctaatgttacaaggtcatgccattgtgttgaagaatgtcgaagctacttatcaaggattggtgaataaaatgttcaagaatgttttgggaagaatatggaagtttactttgatgacattctggtaaaatcaaaaacttcaaagagccatcactaagatctagaagaggcctttaccataatttaggagtacggaatgaaactaaacccaaagaaatgcacttttagagtttcttcagggaaattcttgggtttcatagttagttatcgaggaattaaggaaaactcagagaaaattaaagctcttctagacatgccttcacctagaaaacacagagatgtttagaatttgataagaagaatagcaacacttagtatatttgtctccaaattcacagataagtggataccattcgtcaatgtactttgaggaaatagtaaatttgaatggataaaaaaaatgtgaaccaaccttccaacaactaaaagaacatctagcgaaggctccaatactgtccaaacaagttgatgaagagttgttgttcctgtacttggcagtgtcagatcaagccataagcgctgccttagtacgagaagaaggataagacaaattcttgtatactacataagcaaaatatttttggatgcagagtctacatatcccatgatcgagaagctttcattttgcttactaattgcttcatttttctcacgccataagggtactgaccaaccaccctctccataaaatgttatagaaaccaaagtcattaggggactcataaaatgggcaatggaattgagctaattcgatatacaatatcagcctaaaatttcaatttaggatgaagccttagctgacttcattatggattgcacaaggataaatgataatcttgaaacatcaatcttggaaagagaagtgtggaaaatatatgttgacagagcataaaataaaaaagcttctgaggctgcaatcattttaatctctcctcaacaactccagctccaaagtgcactttgtttcgaattcagagcttccaataatgaagttgagcataaggttatgaacgctagattacagctggaaaaagagccaaaaacaatgagctctacaacgatttacaactagtcgtcaaccaagtgtctagggagtaccatatcaaaggagaaaaaatttctagttacgtaggaaaaactagagagctattgtaatattttaagcactattttgtgaagtaaatccctggggataagaatggttttgcagacatgttagaaaaattagcaacagagcgagagataaagaaatacaaactagcccccatcgcacatctcatcactccaagcacagaaacactggggctacctgccattgatcactcaacctcttggatggctccaataatactcaggtatattgaaatgggtacactattggaggatagagctgctttgcagaagatccagtattaggcccccaaacacgtgatcatgaatggaaaaaacacgtgatcatgaatggaaaaattctacaagagaggattgttaatgtcgtacctaaggtgcatagctggaatgaagataagaactgtcatgcatgaaatacatgaaggtttttacggagatcacacacccagacccagtctttctaagaaaatcctttgcaaaggctatttctagcctattattaagaaggatttcactgagtacgtccattaatgtgaataatgccaccattacttgaaagttccaagagccccaccaatggagataaccctcatgaatagcccttggccctttgctgtctaaggaatagacttagtgggatcacatccaactggaaagggagaagtcaaattcaccattgtcgatgttgactacttcaccaaatgggtggaaactaaacccaaggacatagtaacttccaagaaggccctggactttgtaattaaaactatcatgtgtagatatggacttcaacacaagatagtgttaaatttaataaagcagtttaatagtgatcaattcgtaaattttgtgccaagcatggaaaaatcaaaagtgtttcgactgtggccagacaccaagaaaatagaaaagttgaagtcgttagcaagatcctaaaggctaccttaaaaaagaagctgcaggcttgtaaagcacattggtccgaggaaattttaagagttctttaggcctacaaaaccaaagaaagaccttctacatgccacactccatactccatgacctatggatgcaaaggtagtaatcctaattgaatccacaatgcctacatataagaaagacacctatgatccaacgcgaaacaatgctctactttaagaatccttggatttaattgaggagcttcgagagcagtcacatgtccaactccagatgtaccaaatacaaaattgctaaaaatttcaattctaaaggcaaaagcaaaagatttcaaatcagcgaccttattttgagaagggtatttccagcctctctagagcccagagttggggtctttggaccaaacagggaagctccatatgaagttatagacaaaatttgtgatggaaccgatcatttgaaaagactagatagaacaagaatcccaagagcatggaaaactgaccacctgtgtcgatactatcaataaactaggggtggtcagattgttcggttttatgccctaaataaaactcatttcaaatta

SEQ ID NO: 304292 - DNA, 1388 bp, Cannabis indica
atctgagtaaacaattttaaatgttgaagtagttttgggtactgaacttttaaaaaacatactaaacttccctagttgacaaggattacaaaaaggtagatcataatagtgaccagctgacttttatgcttttcgtgacttggtttaagacttgttttgatggatgaccaagtctgcagtgccaaagatgagctgccttatttgttgtagaaagcttctgacggttgtatagttgagtactgactttatttatctgagattgagcaggtctctttgtagttgagagattcatgtggtataagcctcttataatggtaaccttgagaagagcttaccccatagtcttgtccttgacaacagatgaagaagaatcaaattgtaaaacaatattattgtcttgtgtcactctagagatgcttggatttattttttataattgcagaagcatgcaaaatatttgttaattctaaagttttatcagagacaaatgttttaattgatttttgaaccaattttagtgattgggatagaggagccattgtcaacatttattttgcctttccctttgtaatctgcaacttgagtcatttaatttgcacatcagatgtcatgtggtgtgtggttccactatcgacttacaaaccagctacatatcattgttgttggtgccaataagagagttgtggagcttcctcactggaattggctgatgaattatttgggaattgttatgtttcttgaacaattatcaaatctgtgataacatttgagtgctacatgacctagtttaccatagatttggcacataggtcgatttacacgaccttttctagtagaattacctcttccacgattgctcgagccatgattggagttatttccccaagattccccctgctttatgaaccccctcttatgttgagttgaggaaattagcttgagcaatgtcaagatttgaagtcaagatcttctccagtcacatttcttagttttgtaacatgaattggaatttctacaaggtagagcatcagttgtggaagtcaagaacaccattgccaagtccaccaagaatgtacatgcataatgcttaattcagagagagattggtctgatactgcaagagcatcaccgtgattcttcattttgagaatgcattcattgattagaaactcaaaatttggattagaaatattcatgccaggaataaaacaagggggaggaggtgtagttactagaaggatacttttaagattgtgtgcatgaacgactaaaagaacattaattgattgctagtatagatagtttgtgcaatccaaactaatggtgattggtaggaggtgttgggttttatgccctaaataaaactctttacaatctgattagttatc

SEQ ID NO: 304293 - DNA, 4017 bp, Cannabis indica
agaaaaaacagaggcggagtcaggctcaatacggtgtcgtctcgtcggcgatcgggggttgttgtagggtggtgactgagtgaggagatgaggtttttgaggagaatagctggttttctagggtttgttaaggatgatggccatgaagttaaggatgaagaagacgatgacgacgatgctgctcacaatacttcttctcaagctcggaatcggacccatttcaaagaaagtgggcttccgcgaaaaggatttagtgtaccggttcaggtctctgtcgatcgatctctgcctggtccaattcttgctccttctgattctggcgatggtggtgttcaggttcttgttgttgtttctttttcttactctcttcttaattgttttcgttgacttgttgaattagtgttgtgtttttttagttcttgcaatttactttgtttaatttaagtttgaacttcttttgtagcttaaagttgttgaatctctgtgatttggggcttgatgtttcatgctcaaattgatatgtaatttggattatttattatcgattttgtgtgggatcaaattaactaaataacatcaatgtttatatgtgtgagtgtatttatgaaattaaaaatgcaagaacatgaatggtttattattggtgtgattcatgtagtgtttgatcacaggtctagtttatcttcaatgatgttttgaaaattagggaattttttcttccaaacaatgtactttcatgtttggcttgttttgaatttctacttggtaacaatacatttttggttgaattgagaagtaagaggtttaatgagttgttatccctttgtctaggaaccaatttaaattggacttgaatttcatttatgtagggatcatttacttccttttgcacttgaatttacccacttgccacttctaattacttcttaagccttatatttatcagtcattggtgctcttagcaaacaggggggaaacaggaatgaaaatagattcttattattgttcatttctctgtttttcaattttatcgatctgatctagttttgttctttatctttgtccttcctggacccttttagtatatatgtttgtgggctgctcacttcgttttctacttttttcggaagtattgatgtgtgaagggtacctctgaattcaaatattgaatcaaggacgtcaaaagaaaattaatagattccaatttcctgcatacataatccaatgtcagttcattgtgaaatatcttaggttataggatgaagtattaaagagttcaatttaggtggcaatgtgtttgcttgaagtaaaggaactagaaagagttgctaggctattttaagagaacttagaaatttttatggtcttatgttcttcagaccgatgacccaacccgcaggttatttctaggatttttattttgatctttatttgtggattagtattatttttttcaccaccttgctgatatacctagtctgttgggatatatttcaactctagccgagcgaacctgcttgctatgtacatggaacaaaagaagcatgacaattattaaattatgacccctattatgaattgaatttttagtattaaagagttcttattgcattattttggtatattatgatcaacgtgtccaatatttttattcattaatctctcagataagtttcttccaaggtatgaatttacttagctggcattgatgtgaactatccattttatttgcaagaggctgtcctttttcttcttattcaaatgatttctgattgtaatgataacttaactttgtttctacttcgaagtatatatatatttataaatacttcctctctccctaatttagtatataatgttctttttttcatttataatcataaaatttactcatgaaggaatcttactactggctctcaatctacaaattacagtggtcaggattatacttttcctttatcaaccataaatattaactagtgtgagcaattggattttgtagatgttgatgtgaacttttcttttttcctagtgttactcataaaaattaggaccaaacatttgtgtctaggcagctgagttgagccaatcaatactaggttatgttttcgtgatggatcagtataatgttgcacacagaagaggaaataaccaaattgcttctttaaggtaagctaatgaagtatgttggaacttcgacggtaagttcaattttgaaagtctgatattaattagagaaaatgaatgatccttctgcatacagtagaaatgtgagttctattgccagatgagttatcccttggtctgcatttttggtggctgacttggagttagtgattagtgagatgattgtagttatttcagttttccctgagctttagttgtgataaggaggattagattgtagctgcaagcatggacaaccaaaattcttacagctcgtaactcgggagatagccgcatgtgtatcagggcatagacgaccattatttgagtcgcaacttttccaaaactttctgttgtattcttctcttcattgagttcgattaattttaggcatcttgtcacccacgggaagaaagttccattttggatattttctcatcataatgtaagtcaataagtcataagcatcctatgacttattgacttacattatttgcttgctttcttacaattttcttatagaagaaaaattcgaattgctgttttcattgtgattctaagtagattcactattatcggagaatgttctcaagaggaatgttgtattaaaattatgtacgagtgaaggttttagaacctgaatctggtgattcatttatgcagtagtttcagttgctgtttctgttcaatgccttttctctaattgttattgccatatccaacactaaggtgaaagatttataggatatcgtttacatgataacaaggtgcagatcaggcatatatagcaccagaagggatatgaaatgctatagtaaattatatgcttgtttgattgggatgtaaagatgagatagctcctttcttttatttaagaaataggagctaaatatattctcaataggagcaccattttctgtttctatgccttccaaatattgtcttatttatgattgtctctttgtttcaacttcaaccaacaaccaagatttttctccctgttctgtttggcatgttattatattgtgcttggtacaaacttgtaacagtacttacgatgtcaattgtaaccacggttttatggctctcaataaacttgggaggagatcactcatggaaaaatatttttgctaactacacttccttgctgattcctcaacacatattctgacagtaaccaaactaaatcacataacaagatgagaaattactgttgttctttttatggatttgttttctctataaaggaaaggagttcaatattgatgacacttttcttctgttgctcttttgcatccagggtctcaaatggtacgcaaaacgattaaggatagatgaagatggagatgtagcggacgagttcattgatgaagtcacccgggagtcattatcgatgaacacagaacacgagaagaagccattgcctaagttccaagcaaaatatggcactaggcccgccaaagttcagaaacaggtcgtattgcctaatggtagactccaacaatacgtggagcaccagggtagactccaattggtatgataacaattaatcttacaccaaaaaatgaaaaaaaaaaaagtaaaaaaaagaaaagtttccagcatgattgcgtctctccgattgttcttggcaatggctccgttgtcatgtgtttgtgttttctgctggtgtaacttgttcatgggccaatattatattgaaaaatatatatatcagtgttgataagttgttttgtgggattagtagttgattcctttttgctgatattggtttgtactttctttgtagctgcttttttcttcaatgcacggattgtatgtaacccatttcatttagggctcgtttggaac

SEQ ID NO: 304294 - DNA, 2358 bp, Cannabis indica
agtaaatgcattttgcgaaaatgaaattcatttcatttttctctctgctctaaatttctaatttttttgacatatgtttttgtgtggctataaagttatgatttctgttgcaagcagacagatatcttgtttcgtacttgcatagcgagatttactcattttgcattatagtaactagaaaggcaagatttacgaaaaatcaaggtgctaaaggggttggttttggtttgtcagtgtcaatcgtttcttttttaacagaatgtcagtgagtgtcaatcttattatagcaacttaactcatgtggttgggtgggtgagtcgtcctggctcaagcaccccctgtaggtgtatttttttttaaaaaaaaacaatcttacggtaattgtttgttgctacattttgttgttagcaattaatcaaagaaaaaactggcttactggacagaagtacaatggtctagtaggaccattatctgcttttcttttcttttttttttttttaaattcaaactcattatgattcggcttcttactctgtgaaaggtaatggttgacctctggttttcattttaatgtaggtgtgcttcacttatttcttctggcaatcaatgacaagtgttaaaaataatttgttctacaagaaagtgcttattctactggagaagctttccggtggctggcgtgacatatacattgagagggaccatgctgaaatttcctcccaattattagagttctacttggttagcatggaattatatcttgtttggaccgtagatattgtgaaagatgactcgcactgcattcagattttacaggtttgggatattttgccactatccaaaataccagaactgtcaaagcagatagattttatacacagaagttattcagcagataagttgaatcggtgcaagtacaaatgctacgaggggtacacgcttttaattatacttcattctctgttgcattttctatttttcactagtagggtggtaatagtttttacttttttattactctttttttcctttggggtctgtttttctttcctttatgtcaagcttaatttccagtgtggtttaagtcatctaattgagtttctacagggatttggttgttccaatgacatggccaataaattccagttgtgctgaaactattcctgggaagttacttccaaagtcaatgcctttgtttctaaaggacatgccagaaacatcatcaacctatggaaggttagtagattgactaatacatgagatgaaggagaacgctactagtgtttatttttgcaataaatatctattaactttcctcaagagtcgttagacatggtgctttcactgatcaaattttgagaatatcttggtaataacttgaaagcctcgtgtattcaaaaggttgtaaagttagcaagggctctgctaagtggatcggatacctgacattttctattttcatcaaaatattaagctttgaatatctctacagggagttggttgctccaatgggacaggaagtggacacaagctgtgctgatactgatcctgggaaattatcatcaagatttgtggcttcattcagttcaaagcatgatctgaaaacatcattaccgactaacaggtgagtgctgaagctgcagaatgagttcatatgcgagcacaacacattttgcttcagcttttaatcatcttttttctctttcttttaggaatatggttgttccattgaaatgctcagtaggaagctcaagttgcaatgaagatgatcttatggagttagaaccagaaatatcagacacagttgacaggtcagttttgccatctacttttcctgctgtacgttccatgacttttttgaaagttaattttggagcacaatgcataatttctttagcattaactaccatctaattaaattttccagatattttgttgttccaaagagatggccaatggacagaagttgcagtgtagctgatcccattgagtcactgtcaaaattaatggctttgctcagtctgaaagataatctttcctgctgtgaaatgacattaaattgaatttaaacaagaaaagataacagtcattttgttcccttcagaattaacccaacattagactcaaaggaattatagcttaggtagtcagattgacttttccaccatacattgaagttttgtatagatgaccagtattgctctttgaacaaagtaagtatataatgaaatacgctccgagttattggaggcttctttccttctatccttggtgtttggttcacatgaatgggcattggaatggacttgctattccttaaggtggtgttttgttcacatgaatgagcattggaatgga

SEQ ID NO: 304295 - DNA, 1141 bp, Cannabis indica
atcaaactgggaatattaaaatacggaatttcacaaatgttgactatatctgacttgcgaagtcacaaccatttgagtgagtaagctaggagtcattgaggagagtaatcacgatagtatgagctgatcttgtgcttcccagtcaagataagtttgattgatcctttacagagctcaatcttcttcattaagaaactttggatgtgagtttagactttcaagatagatcagtaacctgttcccatgaaatgcttcaagaacttgttgtatctagagaagatagttgtaatcattgagttttactgaaagaccatatggttaaagtagatttgagaggagtcatctacttcattccttctaatttgttgtggactaggattttgtgcaccgttgttgcctggttgttttattaacagaaagtggtggtcatttttgctctgataccatgttgaatttcttaaacatttaaaaaaaaaataaaacacataaagaaagagaaggaaatatgaaaaaaaaaaaacaaagagggattcttattgaatcagtgacatcagaagatgtaatatatacacttgagtaggacaacaaattaataaaccaactgtaatgacagctacaactaacaaccaaaacaaaaatagttagcaaataactaactgtctcaacactaataagtaatgttatttggcacttatggtgctcaatactaaattgatgtgttggtgtctcacaattggttagtaatttttcatattatttattaaatcaaaatatgtgcctaagacccaatattaaaatgtactaataatattttgttacttcttgttgtgcttgacattacaaaagaaaaaaaataactatacctcttactacaaatctttagtcacaatttttttttttttttttcatttttgctttgctaattagtaattcccccccccccctcccctcgaactttgacatataccaaatcatgccccctgaactattgggattgttagatttaaggactcttgttgtaacgtccccgcttcaagccttcattgggtccttacacccacggaatgaatggctcttatacacgagtacgtcactctggctgcttcatggactaatgactaaccctacagaccaacacaag

SEQ ID NO: 304296 - DNA, 2579 bp, Cannabis indica
tttttttttttttgttgtaaacacaaattctctatcatttgtcttattaatgcaaatgacaagctaataaacatgtgaagtcatgatttatttttaattaacaaaaccaattaatattcactcaattggataattaagacttaaattaataagtatgtttgcaattaagaagtaatcatgatgagttttaattttaatataggtgtattgtgtgtgcccatattttttctttctaaattacatattaatattattatttggtttaagaaaatgaatgaaaaaaatattgaaatactaggagagaagagtaagaggttgaaagtcttagttgatttgaggaagctaaagaaatattgattgaaatacttttatctacaatgaattattatattaattaatatttattaaaagattgtacaaatgaataatcaagtttagtctcttttgtttgtgtgcatatttgactaattaagattaagaatatcaattagtatcaccactccaaatactcaaagaagggtagtaatatttagtcttagtgtactaaatcattgaaattattaccaatacaatgttaatatagtcaaaagtcaaaacatacaacttatgggattttttattaaaaaagaaaattgaataatataagaaatatatgtagtacaacctttaaagagtttttttcgttaaaattcttttgtttcggttgtctaaagatatttttaattcaatcgtggtatagtttctttaaataaaaaaaatcttctaatcgtcatttctgaaaagttgttcactcactattttctactctagaggaagttcccggatgactatcatgttcactccaatcctattttcaagatagctagttcttccctaaattgagttccagctggctagttatccctattggaatgatagatccagatagttgacttcaccagactttatcctatctggaaccgtctttagcgagactccgtggtcctcgagtccagaagctcgtttatattcccagaggtcatgacagttaagctgacgcgaagacttcactcaaagaggaattggttaaattagttatttctaactaacttaacaacccatttcttgcagccatcgacattagaatcttaatcctaagcctataaatatcaccctgactttgtcatttcaagaggactagatcacatgtgaaatcgttgagagtttgagagagaaagattgagaggtgcaaagaaaagagagagattgagtttgggttttgtaagaagaatcttctttagatgaagaagattcttgagtgtaaagtgtgagagttgaaatactttgtgaggactcaatagagaatctcatctcgactgtattgtacacattcttaatcagtaaaaaagaattacggtggtgtttcagaactagagtagagccataaatcacatcgatctatcagacttgaaccagtatacatcttgatgttgatttctttattttttgcatttattgttttctagtttttaatattatatttgcccctgtttttcctttcaattgttgttcttgatttgataatcttgtcattgctaattgttaaattattttgagtttcattgatttgattctacacattcagaagtaattttcctacaccaattttttcataatcgtatatgttgtagctatttaagattatttataaattctaaaatttttaaaatattttgtagtgtcgaaaataaaatttaaataattaattaccacgcgtataaaaaaacccacacatacaataaagtatttaaatttaatttttatcactgttaattattaatttttttaaaaaaaatttacaagtgattttatataactgaaaggtatacaattataaaaataaattaaaaaactctcttaaataccgaagtggataaaagatctaccgaaacaattatatatatttttttgcttggtagcctaggcatacaattaatcaaactcttcatccccaagttttataaaaatcaaaagataagaatattttattaaagatgaaaagaagcaaaattaaattgaaaaagaaaaagaaaaaacaaaagggtagtatggagaatcttcataaatttaagaacaatttacatatataaataataaaattaattaataaaggattggaagggaccagcagctttttttgaaatatgagtttttacaaaggtaggtttcttaattccagaccacaccaccaacattttacattaaaattttacattaaaattttaaattattaaataaataataaataaataaatattaaaattaaaaatgataatgtttatgaattatggctttgtttaattaatttaattaaatggcttcggcgctcgtggccgccatttggcctttggtcggtttttttttaaatggaatttccataaaaataacaaaataacaattatttatatttatttactttgccataaaaatttcacacttcaacattatttataagagaatttttttttgtgtttttaataatttacttatttttataataatttttcttgcattttttacgaaattttacataaaatctt

SEQ ID NO: 304297 - DNA, 2524 bp, Cannabis indica
caccacccctcaaacgcaggggggagcttgtcacaccaagtttgtctgtcaattctttgaattttggatgagtgagcgcttttgttagacaatctgctatctgatctttggaggcaatatgtctgatctcaatcttcttctgcagcaccttgtctcggatgaaatgaacatcaagttcaatgtgcttcgtccttgcgtggtagactggattagtagctagtgcatttgcactcatgttgtcacaccagacaactggaacagatggtaagacaaagtgaatctcctttagtaaagattcaatccatgcaacttcggctgtgacttgagccaaggctctatactcggactccgtactcgatcgagccactactatttgtttcttagatgaccaagctactaatgtctccccaaagtacacacaatatccagctattgattttcgatcatcggggcaacatgcccagtctgcatcacagaaacctgtaacagttaacttgtcgctgaatttgatgtgtattccgtggtgaactgtccccttcagataccgtaacactctctttgctgctgtccaatgtgttgtcgttggacactttaggaattggctcaacttgttgactgcaaaagctatatcgggtctggtatgtgtcagataatgcagggctcctattacactcctatactgagagtgatcttccaattcagtgccttcatacaatgacagtggctttcctcctatcataggagtagaacaaggtttaatgtttgacatgtcgactcgcttcaataattatgttacatactttccttgagataagtaaatacctgtctcgtctctaaacacctcaattcccaaaaagaaactcaaagcaccgagatccttcaaagcaaaaaccttttgaagccgtgtgatgaaattattaacttccagaccactattcccaattatgatgatatcgtccacatatataagcaccatgatgacaaacttaggagtttttaaaagaaacagagaagtatctgcccttgaattcacaaaattccactcaagaagtgtctgtttcagtttgtcgtaccaagcacggggtgcttgtttaagcccatacaacgacttttccaacttgcacacataatctggtttctctttgtcttcaaagccttgtggttgctccatgtatacatcttcttcaagtttgccattcaaaaaggcattgttgatgtctaattgccttacatcccatccattactaactgctatagtgtgaattattctgattgttgaggctttgacaacgggactaaaggtttctccaaagtccaatcctggtctttgatgaaaacctttagcaaccaacctcgctttgagcctctcaactataccatcagcattaagtttctccttaaacacccatttgtttcccactatattcattcgtgcttttcttggaacaagtatccaagttttttttcgaattaaagccaagaactcatcagtcatagctctattccagcccctatgttgaagagcttcaatgacagaagcaggttatgtcgtgccctggtgttgtttggtctgagctgaatagagtttaggtctgaaaatcccaacttttgacctggttatctagggatgtctcagttgaacagcagctcctggttcaggtgactggtgcacagagttttcaagaattcctgttgtctcactgccagtaacattagttcgagctaaatccaaatcaacaaataagtggccagtgagatctacctggtttgtaggtgattgacctggagacagagatgatggtgatgcctgaatcaactcaagatggtttttatcagctggtgtgctgtcagatgtagttggaagtgtgtcttttggcttgtcatctggtttacaggaggtctgagtggaatcgggttgttgtatgggaagttgaaaccaagcatcaggtgatgaaatggttacatctgactcttgtctatagttattcaggaatcctgcactaaatggaaattccctctcattgaattgcacatgtctagaaatatatagtcttccatttgagcttagacatttgtatcctttatgcacttcactataccctaggttgacacatttagtggaatggaattggaatttatggctttggtagggtctaagacatgggtagcacgcagtaccaaaaactttcaggaaattgtaatctggtttttgtcaaacagagtttcaacaggtgactttcctcctagaactggtgtgggaagtctatttataagatagacagatgtttggaaggcatcacaccagtattttaaaggcatattggcttgagctaggagagttagccccatttcaactatgtgtctgtgctttctctcagcacgaccattttgttctgaggtatggggacaagaatgttgaaaataatgccattgtcaataccaaattactaaatgactggtactcactccccattcagtttggatcttttaatttttctctcaaattgattttccaccattgttt

SEQ ID NO: 304298 - DNA, 1226 bp, Cannabis indica
gagccctcaagttcagcctctggtgtgcctatgcctgtttctagtgcaaatatgtctgatgctcacttacctgaacatgcggctgttggaccagataataacacttaggatctatctgcaacaaatatttttgaaacttcagcaaatgttgctgctgctactcacaccagctcatttggttcagtttcctcagccataaaactcaatttgtttgatataactcctgaagctacaacagctacatctgagcaaccttctgcaccaattactaatcctgacagtactattgctcgatctaatgcagatggtaatgtttctcgcactcattccatgatcactcgatctatgagaggtatctacaagcctaaagcttatcttgccactaaacatagactaccagaatatttgttgcctagagacccaaaattagtgaagtctgcttttacagatccagtttggaatggttcaatgtctacggaaattcgtgcactcaaagctcaaggaacctggaccttattgcactatgaacctcacatgattttgatagatatgtctgatgggtgtatagagtgaaattgaatgcagatgggactttggataaatgcaaatccagacttgtttcccgtgaatacttacagtagccaggaattgattttgaggacacacctttagtcctgtggtgaaaccagtcactgttagattggttctcaccttagcagttacatataattgggaagtaaggcaacttgatgtctccaatgcctttctttatggagaacttagtgagacaacttacatgactcaacctaaaggatttgaagaccatcaatatcctaatcatgtatgtaaattgaacaaagcaatctatggattgaagcaggtaccaagagcttggaatgacaaactcaaaaccactttattcagttagggatttaaggcttcaagggctgatacatcattgttcttacatgaatctggttctagtcaactcattctacttatatatgtagatgatattctcattacagggcctaatactactcttattcagcaacttattagccatctcaatgctatttttctctcaaagatatgggggttgttcattatttccttgaagtggaaatatacagagactcaaatagcatgtacttgtctcaaagcaagtacattttgggaacatggtagtacatagatatggaatctataacttctataggtattta

SEQ ID NO: 304299 - DNA, 3700 bp, Cannabis indica
gggataacggcctgcccaatgacccggcatctgttcgaaaaaaccaggtttgtagattggtctagaagagataactctggcaatcagggagaatgggtttttgtgaagggcattaggttcagtaacagtgggaagggagataatatttcgttcttcatctgtgagggaaagtgtggaatgcaaagaatccgaaaatggatccatatcagaacagggctgcacaatggataaacaccagtggagaaggaagaagacggcaaagaacaggggaagtgtggcggaaaagggaggagagacaaggcgggaacggttgtaatcaggtatattcaaaaatcgaaggaaggatttgaagaaaaaacagttaaaatgcacaagagatagtcaaaaaatataacagacacagacccaaaacagggcacctcattaataatattaataatatatattagtaggtactggaattattatttgtattatgtttttattaaaattatttggaaacagaaataaactatttattttgtttattttattggaaaaggcgtaattgttgtcaaaaatatttttgtgggacaaaattatcttttattttaaaaaattaaataaaaatcattatcctcaatgacatttcagtgattggaggaagaatcatttcctttctttcctcccatttctaaattcatgtgaatccgaacccacattagtaaagtagccatgagaattctacaatgtatactgtacaacatatgataacttagaaacaaaattcaggttctataatctagcatatagtatgtgcacttcccctaatagctaaaaaagtaattattaaagtaagaaacataatcactttgactaaatacaagcttaatgctttgctgatttttaagaatatcagtgttgggtgttcaaatttctaatcttgcattattatattggtggtttagttggtgcaagatttccttgagaaatgcttggagtaggctcgctaattgaacaccaatatgcttacaatatttggtaagttatgtattggaaagagttgtctacttcaccggctagaacaccaaacatggttctcaatctaaagcatgtaatcttattacaaggatcaaatataataaacttcataaataccaaaatggcattttcttaggtaggaaggtcacttttttggtggagtgttggcaaacttccaggaagaactaatcatgctctcataaattctatcaccagccacctcttcaactggtacagcatcacatatttctttcatgtcttgttctgttagtttcacactcaccgagccaatgttatcatccaagttcttaatcttagttgtccctgatgaaattccaaattacaaaaagatatcatagcttagaaagttaacctcatattagactctaattcaacttggaaaggactaatggaatgggaatagcacgctcaccaggaataggtacaatatcatccccttgttggagaacccaagcaagggctagttgtgctggagagcactggtgcttccctgaaagggattctattcgatcgtaaagctgcttattcttgttcaaattctcctctcgaaagcgggggtgtgatgcctaatgaaaggaataatgaaagaaaaacattacgatcttatgcagagaaaagaagtccatcagaagcttttaggccgtgatttagtatttatgttgtttagttcataaataaaaaaacaaggttctatgtgattcatttattgagagaatttggcatcaatggagtttaccaactgtctttcattacacataatttaaagatagaatctttaccaataaactattttctggtaaactttctacagctgttctgcccccaaagaagccacgaccaagaggactatatggaactatcccaatgcctagttccctgaaacatcaaggttactctattagttcactcaagcaattgaaaataaagggttagacttacaccaagggacaaccaacacaattacacaaaatagagaaaataagctacaaaacaaagcatctaaaaacttgtctttgcattttccattttgaacaggaacaaaagcaaaatgagataacaaaatttaatgagacaagtcagaatctgaacaaaaacctgcaaagtgggacaacttcttcctcgatgtctcgagtccagagagaccactccatttgtaaggcagtgatggggtgaactgcatgtgctcttcttatggtgtctgggctggcttcagataacccaatatactttattttcccctcttcaacaagtttcttcagttcacccatctaaatttgtgaattttcattatataagcaatctaactcttacagtactgacagcaaaatgctattaattggaagataattatatgataatagcaaaaaggttaaaggacctttttctgaaggtttgtatgtaaaagtaagagtgtcacttacagtatcttctatgggaactgatgtgtcaattctgtgttgataatagagatcaatgtagtctacatcaagacgcttcagactaccctcacaacatgaccgaacatactcaggggtaccctttacaatcatacctgaattgcccattcctgctatgccaaactttgtggccaattgaactttttctcttggcaactgcttcaaagcctagacatattatggtaacaaggatttaatcacactaatacaatatgattatggggtgtatgagtatcaactcaattatgcttatggcatatctactctagcaattcccatttcagtttcttttttcgtaataaattcactaaaaatgagaacttatgtaccttgccaactagatttcattagaatgagctccatacatatcggctgtatcaaagaaagtgatccccttgctaaatgcatatctgatcaatgagatcccttcctcatcagatacaggagagttgtagacaccagttagacccatacacccatatcccaactttgacacctgaacaactcacaatggttttattatctgaaattagagaatactaatgcaaaaaaaaaaaaaagagcatctttagagctcttttgcactcaaaaagaaaaaaaaagatccaatctacagagaaaaagtttatgagaagaaaggaaattgaaatggggcttacctcaagtccttgaatacccagtttaactcttggaatttggagcttgttatcatccgccatttggagtctatcttattttgatttcagtattttgttccctcgatcgttcaatattttaagttaaagtcttcttgttttttgcctcttaaatcccaagcacgttggatagtggaaattgaggctggcagtgttcgagttaggtggtaatgaatatttgatggtagtaaactggtagtcaatacacattcattttaaatactaacaataatcaatattccttttcaaaattttgattatataatcatgattatattttattgtgctgacgacattataatcatcaacaaatatatatatatatatgggtgactattcaatggttacatttttattgtaaccatatgcttacatttttctttaacctgtaatagcagattactaataggtagacttttattttttagatttaattaattgtaattaattattttcttaaaataattaattaaatagacattccttttttagaattatttaattata

SEQ ID NO: 304300 - DNA, 2817 bp, Cannabis indica
ttattttcaatgatctattaatacagcatccggacattgttaaaggatgacaaggcgactgtcatatattctgttgctaatcttcaagacaatgtcgaaatcccagctaggattgtcagtgcaatttcctgcgaggtaatacaactttaatttaaaatttaattggtgatacaaaattggttgacttgtttgaccctttggtacacgtatgataacagatcctcagcaaatgctctgctggagtggatgtgcacaccataaccatggaaatactaaacataatcaaacactacggatgggactcgaaggtgttgctagccttggtggcatttgctgtgacctttggcgagtttcgccttgtcctccagcaatactcaaccaacccacttgccaaagcggttgctattctcaaacaattgcctgaacttttagagcattctggagctttgaagccaaagctcgacgctctctatgatctcatcaaggaaatcattgatgtaaccaagaaaattgttgacttctatgaccttccaaggaacgagtattttactgctgagtctcctgaacttttggctgctgcttctcatattccaactgctgtttactggaccattcgcagcattgtcgtttcttcaacacaaattttggcactcaccggcatgggcatcgagtatgtgtatatatatattagtttgataatttggcttaattgtactatatatatgtagtcatatgactttttgacatgtttgaccaggtatctaactgagccttgggagctatcttcattggcccataagctcaacaacatcaaagggcatgtggtcgacattatcgaacgttgttacaagtttgttggtgggttatacataaacatataaaattatacaccttcctatatattctatatatgtattatgtatatataactattgctaatataaataaggtgcatgctaatacagagaagcagaaacaagatgaagcatacgagtatcttgtgcgtattttccaacttactcacatcgataactcaaagcctctgagggttttgttcaatgaggatccgaacgcactctacgattgctacaacaagaaaagggtatatatgctcagagaaatcaatattcaatttgttatatattaattgaatacatatatatatatatttggtatgtttggaacagattgtcattgaggatttgaagagaaaggtggtggctttattcatcacagaagttgatcctgaactcattcgttcttctgaatatgcaatcttacaacaaatgtacgctgaaaagaggcacagcatgacaagatccgagagtcaatacgaagtggtttgggttccaatctcaaatgtatggaatgatgagaagtatagagtgtttgataggctaaaagagcaaatggaatggcactcggttcaccatccttcagcagtgaccccagtggccccaagattcttcagagagaagtggggctttgttaagaagcctatgcttgttgtgatcgacactcaaggcagagttgtgcaccacaatgccattcacatgatgtgtatttggggaagcctagcttaccctttcactgccaacagagaaaaattgttgtgggaggataatgcctggaccatggatctactcattgacggccttgaccccagtgctgctgagtgggtaagtctttatatacatactagttgacataatagtattagtatagtactatgatatacatatatactaataaataacatcttttatttattggtttatagatccaacaacaaaagcatgtttgtgtatggaggagaagacattgactggatcagaaaattcacaagaattgccaaggaagtggctcgaacatctggaattcatctagagttactttatgtggggaagagcaaacctcacgagaaagcaacaaggaacatcattgacattattcagaatgagaacttgagcagaaccttggactggaatctcatatggtacttctggatgagattggagagcatgtggcactctaaggggcaacttaccacaagtgcatctgtcaagactgaccatgtcatgcaaggaattatcgccatactgagttacgggtcgagcagccaaggttgggccgccatcagcagaggttttgagggaatggctaagggcaatggggagcacatgtacagaggcttggctgagcacgaccaatggagaacgagagaattagaggtgggtttcgtgcctgctcttattgagtaccttgagaagctccatatcgatgcaccacaccattgcaccagcctcattttgccagccactggtgcaatgcctgacactgtggcctgctctgagtgtggtcgtttgatggagaggtacaccatgttccgctgctgccttgactattgatgaccatgcatcatgagttccaattgatagggataatactatagcatggcgcctcgatcctttttgggacgtcatcataaataaattttatgagaatgtgttgttgctgttgtcgttgttgtttgtttgtttcaacgtatttatttttatttcatttcaatattttgggacagaaaattttatcttgtattatttgtattgctggttgcttctcaagggaagccaagtttgcagctatatttaattattgaataaagaaataatattcgcggcttttcatgcagtacacctaattacatatctaatatattatatagtttttttttttttttgaaaaatttacatacattactaatttttttcattttctttcaattatattgtgacaggcagattataacatttttac

SEQ ID NO: 304301 - DNA, 802 bp, Cannabis indica
aaatggactattaattgttgtcaactaactcatatttccttttttccaaaagatatgcaacttcattagactaagtcatccaaaatcaaggttgcaaagactagtaagaatagtcatctccactatagacacaattagcataatagatagaagctcgccctagagtcatgagccactttattcgtatactatttaacaaaatgtaaagacacatttactaagttaagaaattaaaactttatagtcctgaacaacattactatacatattgaactatgaatatcctagactaaactgagacgatcaaactccacctctattgatatctactctttttcttttaatcaactcagcaacgttgaaaggtcgatgagatgcttaaaaggaaattattggccacactgcctttgtttgggataagttcatcttggaactcgttcgtggggatccaatccaattcatgccatattggaaggatatagagtgcatatacatggtcatcttcttggaccgacagaaacattaggtggatctagaggcgaatcttgagttgtggaaggtgtttgttttcgattcgagtattagaactctgactactgaccaattgaagacgatgatggacacttggtgcaagatattctccaaattggtggaccagtctggtttatttgacacccattacatggtgatggtgttggaaatattttaccaggatctagatttactaccaagtatgtttcattaacatcctaatatgaattctaaaacaatgaaataaacagatataaagtttaagaaacct

SEQ ID NO: 304302 - DNA, 1338 bp, Cannabis indica
tatatttatatgttgttgaaaataatttatgttcaaaataattaattatgtacacgtgtgtaacaagaaaaaatatgtatacatatgccaatcgaataatatttttatttatttatttcttttacactatacacaactatcattattaacatgtaagataattaatattagaaataaaatgagatctttctttctattttcattttattatatgaactactatattacaaatatttgtttttaacataagaacaaaaagttatttaacttaatttaacttatataaattatatgtattaaaaacattatccccaaattaaagattaattgagaggccatggccatcccacaaccctaaataattcgcagtaaattatttaaaaattagtaaataacaactataattagaatatggattgttatactaaaagaatttaagttataattttctctaaatgttaaaaacagacattgggcaaatagtcactcctcctattgagtaaaagtgatgtggtaatatttgtaagagaaatgttaaagagtattggtgaggtttaacacttttttacatgtcaatatcgctattggtttaagtattaaatctcatattatttaatggaattatttttaaaaagtattgcaagttaatcacaaagcgacacttttagaaaatgctggacactacttatgtctaataagaatgctatttctacaatatatgtataagatgatcacataataataataaaataaaaaattgctgtagaatatatgttaaagagataagaagtcgaagataaatatttagagaatatatatctcgattgtgtgctttcaacatttttctgttggtttgcaatctaatctttatatatataaatcaataagaggaatataatataatatatatacatatataagacagctaatacatattttgctgataagattaaaaacgcatttatatatgaggtagctagaaggcaatgttaatcaaattgcattaataaagagtttcaatttgttgtaagatgctccattttccaacgtagtatgtagataatataacaacattacattaatgagaattagaatgagttctacttctaatttcaacagagaataatatatatatatatgtacgaagtctgctgtttagcttaatattccaattacaaccagctagctaaatctaaagattcttggtgtctcttaccacttatatatatgctagacaaaattatatgagcgcgcgtataatgtatggtttgggttccaagctagctaaatcttcccactttaacatatatatatatatatatatatatatatatatag

SEQ ID NO: 304303 - DNA, 2943 bp, Cannabis indica
cacagatgctaagcccattaacaattgatcaccaacaacatgggctaacacagcaaagaactatccaatcaacccaagttttaataaaaccaataaaatttaatgtaagcccaaataaaaagtctaacaataaagtgtctctagtgagattgggcactttagcaatgctcttgtataaatagaattttttactcctaataactatctgaagtgtaaaatttattgcaaaatgccttcctttagttgcactttttttttaaaacattttcaatatgtagtcataggccacaagtataactacagtgcaaagatttgtttattagctaattaatacgttgcccaaaattttgtatattcacacaaaacacaaaacatacaatttctttttgaaacacaaaacatacaattttaacaatgtaaaatacacgtatttatgtattttgttattagaccaatagctctactatttttgtatatatttttatctagaagaaacaatgttttgctgccaattttttacaatgacaaaagtatcgttttttgctggcaaaatagaatcttcctttaccagcacttttttaagtcggccaacggggttggcaaatccacgttggtcactactataatataggcctttagaggtttttttcaacccattttataaaaagagaagctaaagggtttaaaaatacccgcctggttcaaaattaacatttagagacatttttttggtaaaaattataggtatagaaattaactataccctatagagtcggttgtgggttgggaaatttttagggttatttattaaccctatgccgtcggttattaggaaataaccgacgccgtaagtgcacaccttaattgacatgtagatcttgcatctccgcttctagctccttcattctttcgctaatcctctctcaagggttagcgggtggaactaattagatcctctttatggtttggatgggcctacgtgaggtactcatcttgtcccattagtgtgtgacttctcaccaaagctaagggataaggtcttacatttgcctcgttcttatgaggaagccatagttgaggtgccccttagcctaacatatttttggtgaagtttttctctcacgttgtggggtgttccccttggcggggccctatgaggggggatcaactcaaactgccttaaatgaccaaaagggcaccggtttagtgaaaggtctttctttggctgatctcaagggggatcactagcagagaacatggagttcccctcgttagcatgtatggttgatttctccttttctagttattttcctttgcacttgaagagtgaggcatgcatttttccttcgattacaccatttaacaccatttgcatgtcgggcacttttgtctccaacctctagttctttagacggaggtcatttgtctccttctcatagaaacgaatttgggagctctaaatcgccaagtaaacttgtgcatccttccaaacctacgatccaaatggttggggtcgtgatattcatagcaaggtgggatgtgacatcgtgaaggtgatagttctggatgtgtcttacttgttaatggttctgtaagtggtgtcaggatcctagttgaggggagcgctctggttggtagcacttggcccaccgaaagagcagtagacgttgttggatatcataccggaggtggtggcctcattgaaaaaatgtcattttctggggctatgtatggttgtatcctaagggaagagacttctttctcttccccttctcttgtgcatatctctccgaggaattgttagccttcgatggtggtagacttttcctcaaacccattggttgaactccatccaagtgcatctctatttttctaagatgcctcaaactccttggcatgatttcttaagaaaaatgtaggttgaagttttgtctttcccataatcggtgccaaattattaatagtaagaactcatcaagtaaatcttagtcgaaaaatcaaacgtaaagagcttaagatgaaatatctaaggaagattcataacactcaagtgacaattgagtaaagataatactgttatattgattatcaaaactcttttacaagtgatcagtttccaacccccattacaaaaattcaaatggggtatttatactcgaactgtaatggctctgaaatataagtggcctcaaaagttgggggacaatgacctgacaatacgttgaggatcatcctgttagggagggtagtagaggttgtgttgttcgggtgtcagcctatactgaaaacttggttgccttcactacttgtacacgttgtaccttcttgtacaaccactttctatcatcaggctttagcagaggtgtgtttgtcttaatggaatagtgttcaccctcacgtttaaactctttgcattccttgtttgatacataagactattgcttgggatttttaataagcgttgggaagttcaaattgtaagaaatatgtgcctaatgttaaagagaggtctaggagtagcatggaggtcttgcaagtgagacgggattatgaggagcccttgggaggatgaaggttgatattggataagcttggcttagggcggttgagcctagggcggctaatgctagcctagcatggggcgagtaaggctaatcatcccttcattttatgccttactatctttttcttggaaccaactcttgtcttgagtattgattccctcttaatctagaatttctaaaaaatatacctagtaatttgtgggagtcaacaataattgatatttttcccattttataaattgatttcattttacattttcaaataaaattttaacttttttcttcctttttttcccaaattattattttaaattttatttttaaaggggaaaattatgttcctctataattttccccctcgatcttaaggtataaatgt

SEQ ID NO: 304304 - DNA, 1960 bp, Cannabis indica
caaacgcttacagtttttatattttcttatatacaactaacatttgcaaaaacacggttattcaattctcatattgagctttatctgggtcgagggtaatgagtgaatgaactaaaatatctccatgttgtggaaaatgtatatacttatggtaggagtagtttaagtttcaaaatcataacttggacatcatgaccttgaacacaccttggttgatgtgtatgagaagtgttgtaacaatatactcatgcagtgaaagtagatgagcttgaaaaactgatcagggtaacatgttagaaagtgggcttgccaatgagctagtagtttggatttggctgtcttcgatggagtcatgattacgaaagcctgaaggaaggcaaggtttaattgaggcttggaagagaatgaagtttgagacatgattatgataattaatcattcagaggtgtatagttttatgctcaagtagttgggttgacactcctgtgtataaggaacataggcttaattataaggaaagtaatatcagaggagacccgaaagctactaatcaggatcaattagggtcagggttttaatcctaataattgaaagaggaaaatttgaatgaccactagctgtgagctctagtgaaaatttgtaaactggttaagactactgtctagaaaagagtgaaaatgataatattattcaggatgtccggacgacatgagaacattatttgaggaaagttgagttttaacctatgctatggtggaatagttgaccaatttacaagtcatgggtatggtatgttaatacctcttagatgattggatgtctccatcaggtgagattgatctccttatgaaaaatatggatgttatgttatgatcatataaatgatatagtcattactcgttgtaggataaatatggctgtcttattaaataataggagacaactggttacttaattaacagagattaatagctaccttataaggtaaacaaagtttaaattgtcttattatgcaataagttatataattgggtgtaatgttgagaataaattggcaagataaggataatgctaccattaactgtaagaagaaaatagatatgtatgtattggacagtgaaactccaattgagttatggaaaggtgcatggattctgagattcagcattattagcgtttaatgtgaggaacttgctacaaagaaggacttatggattagtcaatcagtatgtatattacaaagaagatatgaatagaacccgatattggataaatgatttgtgaaattatagaagtgttttcataataatttaggattactacttggtggaagattggtcctgaggtgggctcgatactggaaataaagttaacagtaaaggttttactagatgaatttaagagtactgaggatttttttgtagattatgttaattggtggtttactggactgaatatttttccttggggtggtttgattttaattgctaaaggaaaatggtgaaccacttaaagcatgttttgattaccaagtgttgaaagggtgacagtttgtaatgattgcatacttagaatatggattagtaggataattagcattattatttatatttgataattatgtgtgatttattattatttgggtcctatatttaataagcattaggattataattttttaatttcaaagattttattaaactctaagtgtattattatgcatatgtgaaatttattatttttatgattttcactcagtaacgatggaaaatgcaacagatgactgttagagtcacatgggttagtttaaagtgtattttacaattttgtatacattattttaattaattacaaaatatgtgcaaaaaaaacttattatcattttctcatacatatatataactaaaaactttttttttaatttttttataatatacatatgataataattattgattat

SEQ ID NO: 304305 - DNA, 3421 bp, Cannabis indica
atgccaggtgaaaatgatatcttcttatagttctgtggccattaaatattaattaacagatggaagcatcaaatcttggttcgtaaaagcaaacctggctgttgtaagactgcagagcacatccacctatccaagaccaagactttttatcaacatcatacaataagcccttcccttgattccaagatgtaaagcagattaagttatcctgtccaaagcactcaaatctctccgccgataatctcaacagtgctcgaaaatacttcggtggcatcctactaatctctacccacataacttttgcatgatccaattcccaaattctcatactttgaagagtactgtagagaccgatgcgtccaactaaaaacagacgcttctgtgtgccagcaaccaagtacccatccagtagagatcgtgggaatttagcaggaatgtgttcccaatatccagtgtccagtttatacatcatcaatcctagtggagaaagggtttctaaatacaatctggaatcacaataggccatcttcgaggagcaaagattaactgctggcattatctggtgaaggaaccaactattcagcctagaatcatacacttcggtgggtaatgatttgtcaccgtaaatatcacttgttgctataactttgaatgaccgttgttttcgatcaacaaccatgatcagctgtctttgctggttgtaatgcatatttggtagagccctccacgtttgtgtaagtggattacaaactaaagttctgaaagttagcccatctagcccagaaaagcaaataagaccaccagaagaaccaactaaccagaatgcccattgaggcaaaaatgtgaaaggaatcctataccatgtctttaatggcaagctgaataccgaacattgcggagtctgtgaattcttccagaatgtaagaagacaaggcccgtgagaaggcgcttgggaatggaatttgagaaagctactatcttgaaggattaaattccaccttctacaaacacaacgaagccgaaatatcataaatggaggaaccctagctaaaatctcattcagcaaatcctcaggcaacattgcccagatattatcttccatctgaacatccgggtgaactgctttagcaaatgtggcagccgtttcctcatccaatcctcgaggctttgtcttgatcaccttctgcctagatggactagtgtttctcgatccgacacgacctaatggactcgtattcctcgacccaccacctctaacaggggaaatttgcttcggacatctcacttcttcatgacaaaacccatttctcgtattcactccagacccaaattcagaagattctccaatatcacccattttgatcaatttcctacaaacagaaaaatcctaatgacccagttcctaccttgagctaattaccatttaccaatgctcaactcaaatacatgtcccccatgcacccccacaaatcaaataaccttactcccaaccatgattcacaggaacaagaaatccaaacccaatgggatgaaagaaacaacaaaaacctaatcttttctcagatccaagctcaataactcaaggatttgcttgaattttttgcaaaaaagacgaaaaaaaattcaccaaaatttatccaaggattacaaacctgtaggctttgtgggtagaatcataaaattttctgaattggctcttggtgaacttcaactctctctctctcctgtagatgcgtttgatttatttttgtcactattcgacaaatagacaaagaaagttttcagataaagaatttgtattgtatcatcactaatctgctacggcggactacatgataagcttcacatcgaactaatgaaaataaaccacctcatatatagaactccgagcattattattggccactagtggtgactagcgcctttagacatgtcacattgtgattgtttagaacacctccgactcctatgataacatccatactaaaaatttacacatcatctatttatctttctttcatattattttgacactcttacttctaaagacactctttaaaatattataattatgacctcacacattattaattattatatatcctaatttttagctacaataactttttagcttcatttttttcttaacaaaataaataaatagcatcaatgctacaacatagtgtccatgcaaatttttagaatgacattcttttctcttcaatggtatagcatctcaatattttgccacataatatatctacctcacaagcatcttttaaagttttaccattggagatgcttttagcgacacttcttaaaaagttataatattaaactatatgagctccgatacttagactaatagcgatattgacacataaaaaatatgttaaacaccactaatactctttaacaattctcctaaaattcgtgacgtgtctttattaatatatgattattatctacacagatacaataataactaataaaacactatttagcaaaaaaaaaaataataataataataaacactaaattggactatttatgaagtttgtaataatattaattacaaaaatcttatctcacctttcttttttcgcctaaacatattttaactacagtaaaataatccattaaaaaaactacagtaaaataatgaatggaagagagaaaaaaaaaaaagtgaattagaaatcatatatttttaaaattaaaaatcaatttaatcccttggttgttaatttttggtattggttaattgactttaatgccacttttactcataatcatattccattgtttgtaacacaaagtagagtccctttgaaaatggtcacttttattttttcatgattgatagatatcttgcaatatcagatctgggccatccatgtgatcaggtatttgaacggtatggatttatatcatcagattataattggccgattcaaactctaaaacatggtatgcactatatgatctgactttaatagaagaaaagtataaatttatgacttactatataataatttcatgatcacaattgggctccactgaattggcagtccttttgttattgggctccattaatggttaggttggctctgctaagatttaaaatggagatctatagtggttattcgaatttcaaaatatgagtggggcctaagtcttaattctaataaaaataatattaagaaattataataaatgactacaaaaatattatataaacgcatatatccaaaaaaaaaaaaacttcaaattattgtactattactaaatgttcctattttaaaaattttctgagtatccttaattcatgtatgttggacagtcaatgaggttgcacatggattagcttggcatgctcttcggttggataaagaactagtatggtttaatgagattcctt

SEQ ID NO: 304306 - DNA, 3304 bp, Cannabis indica
gtttccacgatcaaacacttataagctagtgacactttgagacaatggcagcaatgtcaatcacacacacacaaagcacataaaatgaataataactctctttaataatctaaaagtgtttgtacaagagttaagtttacacaaaattgtactggacctatttataaatataggtcagtgaagtatatccaggaagaggtggttaagttagttttaactaacttaactacacaaccaccaaatgtacacgtgtaaactaataagtctattatacattgggagtcaacaccaaaatagtactacagtataatatttttatctctgcacttgtttgatcaataagtctagatttttatagatcgaatttcatttttgatgaagcaacttattcacagttccacatttaataagttgtttatataattaagttgataattatataaaaaaaaaaaaaatcaatatgaatgaacagccttgagtcaattctttgtatcatctagccatgttacttctttttattgtcttttgtattaatttatttatttattcaaacgaatcagaaaatttcaacaacatagttcaaacttgaagatcatgtgcaattaattatgtggtatgaaagattccacactaaacttatttatatatatatgccaaaagaaaatatcgcttaaaataaaataatatatatatatatagcatttattaattatagaagcataaaaagaaaagtttatacatatatgtacgtcaatcaaacaactgaaatagtatctataaattcatttatatatataggccttgatcaatgtcagatttgaatcctaatttatgttctgatcaaataaaataatgatatatataactggtcttgtcctatacaaacaaactagcaactgatcataattcaaatgatcaattatgcctacatttccatatctttcagtttgaaatccaatctttatggttgtctttttatttatttattttttattatcattaattttattgtgacatgtttttctttccatgaagaccttataatattctcttaattaaaaaaaaaaataagagaaatattatatatgaataagattaatcttgtcaaaagatctgatcccccacattcttgtctaataatgataaatcaaaatggatataggttgcttataatttgtctgataatgatgatatatgtaaatatatatatataaataataataacagtactaaatccaaaaatttcaggtattttatgagttaattagaactggagataattaaacataaccatgtgaagtttgagatgcatgctaattatatatctgtatatgcatattaaatatttttaaaagcaaaatcaatcttttgggttgtcttttcttagatcatattggttatgaaatgttattttggaatcaattttccaatcacatatattgacaattaagatgttggagaaaacattaatattgttataatttctcactctcatcatttgaaaatgtcttaatttttttagtctacaatattcatttaatgtagcacattattctgtatgttctattaaccaaatctcttataaaagtggagggtccaccatgtttatgagaaagattaagctttaatttgtgacaatattaaaccaagttgtaattttattcattgaatttaatatttggtatttacaaaacacctcatgtgattctattccatatatgtctcacttgacaagacacacaagtttactataaatataacaatatttagttgtgtcatttaacaagtgaagtactcatctcaatagccaaaatcccaattaattctataatcttttctttgtaggtacaattttcttctacaatattcataatgggtttctatttgccaggagtcgttccaactaagaaatttcttcgacgatctttgtctaactcgagcaaaagagcatcaaatgttgttcatgtcccgaaaggccatttagcagtttatgttgggaagaacgaaaagaaacggtttgtgattcctttgtcaattttaagccattcttcatttcacgagttgctagttcaagctgaagacgaatatggatatgatcatccgatgggaggcctcacaattccatgcagagaagatatatttattgatctcatatcaaatctgaattaataatgttactcataaaaatgtggaaattcttttatttatttagtacaactagaaattcttttattcttatcatttttcctcatcatgtggagtagaaaaatagctcccagactgaggaaataatatatatggatacaattgttaattgttattgttatacaatttttttttagttttaaacatatcttcctttgtttgataattattgttacggaatagaaagatcgatatcgtaaatttgatgttgttactttcttacgaaattatcccacaaagctcgatatatataactggccaaaattactcaaatgaaccttaaaatttgacagtaattaggatatgttttacttgataagagagtaacaatacaagagattaaactatattcccatatttgttcactacaaaaaacttcacttttagtcacaacaaaagttgtggctaaatgtgaaaaatgttgtgaccaaaagttttagtcacaattttttcttgtgacgacgttgtgattaaaaagttcgtgcctaaagttttagtcacaataaaaataatatgagaaattacaggtccaaatcaaaatcttatcactcaactgatcaaggatcttgatacaaaattctctattaaagatcttaatgctctacactactttttgggggtcgaaatcttcagagctacatctaggatgaagccttgtccctcaccaaccagctcaaccatttaactttctcttaccataaaccttttcatgatccaagcctatataggagcacacttggtgctctccattacctgactttgacaaggccagacattaccttcatattgtcaacaaattaagccactttatacatgctccaactttagttcattgggaagcttataaaaggttgtgtagacactaaaaaggtacagttcatgagggactctttattaagccttctattcaccttgatcttcaagcttactcgaatgcagattgggctagttgcccagatgatcgtcgatctacaggtgctatgcacactacaagaaactaggtctgtaacgaggacatctataccgaggacatgtcatcgttattagtgttttcgcaccagcgggaaaaattcgcggttttttgtgggtaaagtttcag

SEQ ID NO: 304307 - DNA, 4965 bp, Cannabis indica
ttatcttttctgtcaaggatctgcacgtgttgctcctcatatgacaagtatggttggagctataaatttttataactcaacacatgagtagaattcgagacgcatttccatagcatagaaacatgaaataaatccaatattttatgaactactgataatactggaggaaatgatagacaatatgcaactaatccaatattttcgagaatctcaaaaggccttgtaaatttaaggcataactttctccttttttcgaagcgcttaattcccttcattggagatacttgtaggaatacatgatctcctacattaaactctacatttctgcgtgtcagatttgcataacattttgcctactctgagaggcgagcatcctaaccttaatcttctctattgcctcatatttggtccactaaattgattctagacccaaatacttttgttctctagtttcatcccaatgaattggagatctatattttctgccatacaacattttgtaaggagccatcccaatggtactttgataactattgttgtatgaaaattctatcaatagaaaatacttactccaatagccttcaaaatctatcacacgagctcgtaacatatcttctaatatcttgattgtcctttcggactaaccatctgtctgtggatggaaagttgttctgaactttagcttcgtacccatagcacgttggagactttcccaaaacttggaattgaatttcgaatccctatccaatataatggacttcggagccccatgcaattttactatttcttttacatatagtttcgcatactgatctactatgtatgttgtttttcactagtagaaagtgtgctgacttggtaattcgatccacaactaaccatatagaattgaacatacccgtgattctacgtaatccaacaacgaaatttatggtgacatccttccatttccattcaaaaagagtcaaaggttgtaacaaccctgcaagtctttggtatttagctttaatttgctgacaagtcaagcatctagatacattcttccacatcctttttcataccgaaccaccaataaaaggattttaagtcatgatacattttagtactgccacgatataatgagtagggagtggtatgtgcttcattgaaaatttcctttctaagttctacactactcgtaacacaaactcgagtttgtaaagtaacgttccattatttgacactgaattctttagcttggccagctaaaatttcttctcgcgttttttactaaatctggatgtttgaagttaaattttagtgaataaagaaaaaatgttaaaacaaagaaagaaaaataatattaagaataaaatttatatttaatgtggaattaatgaaaaattgtatggaataaaatttgatccaacaaaatttttcataacaaatataaaataaaatagattttttttttctttttagtattctctacatattttttttcccttaaattataaaaaaaatataacataaatttcaagtaaaaaaataaaaaataagaaacacccgtacaacaaaaatgatcaaacgactgataccccacctaattaaagaacttcctagtttttatatatataactagtcaataatatttagctgggattaattaatcatacgccagctagtgtgggagaagttccatcttaattaataaaatgatttttctgggatttctagaagcttgagatttcattagtaaacatgtaatgtatcattaaaatattatataatttattcttttcaaaaagaaatactatattatttatgtaaatatatattttaagtaataaactattttcagctgtatgtatgtatcgatagagattaaacgacacaagccgaacagcaaatgcccaattacacacaattctggccgcccaatttgaatgcttttcaaaactctatgtaaaatgtaatgtagtgtgatttatataaatatgttatattagacttgtttttacttaattattaattaaataataataattaaaataaattaaatataatttaattatattttttaatagaaaaatttcatgttgttttggagatcatatgttgtcctgtttgttggtatgggaaggaaagccatgagcatattttctttgattgcttgttctctaagggctcgtttagtacgccgtattgtaatgtattgtgttggattgtgttgttgtattgtattgtattagtattatttaatacaatacaatgtttgatattgacttgtattaattgattgtgtaaagttataatatatttttaatacactcgatcccaacaccaaccacgggtccgagtccacgtctcgggtccgggtccgggttgggatccgggtccgagtctaggtttgggtcccaggttcgggtccgggtccggggttcgaatctgggtccgtgtccgggtctgaggttcagggtccggggtccgagtccggcgccgggtccaggcccggggtcccgggttgggttctgcggtccaggtccggatcgcagtccgtgtccaggtccaggtccaggtctaggttcgggtctggggtttggggtcggggtctggggtcggggtccgggtttgggtctaggtctgggttcgggttcgggaccgagtctgggtccggggtccaggtcggagattggtgttgaccctatatcctttgtaaatattataatacaagctaatatggaccatttattatgtattaaataatacgacatacattgtattaaaaaatttggtcgtaataattaatacaatacattgcttaatccaaacatagtgttatttattatttaatacaatacgacccttatacgacataccaaacgagccctaaagctgttattaaagagatttttaagtggattaaatttgaagcttggtcgagttcgattgctggctggaagaactggctgacggtaaagaagtcgagcagatcttctcaaatgctcttcgcggttcgattgtggaaaaataaaaacaattgtgtacataataatttttgctatactattgagaatattgtaaaggagattaaaagtatagtaaaatatagattgtatagcttacttagcttaaatcaaaatttggctaagaatggccttttttaacgcttgactcaataggggtgtttggtgggtttgtgatgagtggccgcttagttgtggcttttgtttttgtattggttgttctagattaatgaattttcttctttagaaaaaaaaatcataattaaaataaatttatataatttaattatatttttttaatagaaaaatttaatttagttttaaatttatgtataaaaaatatatctaactagtaaatatgttttaataatataactattaaattttttataaagtatgattaattaagtggattaatatttaatttaaatttaaattaatatttatataaaaataattatttaattttttatatttttaagttaaatttaaatatttaaaattaatttttttaaaaaataattaatcaattaatttaacggtgttataatttagctgttaactttaaagaaaaaaaaactatgttaaataactacatttaatataagatatataaatattttttaaaatttaaataaaagtctagtgacaagtgtcaagtttagttgaaaatacatattaataagggaaattatccactatacagtcttttataacttagtttttaatagaaaatcataaaactcaaacttctaaaactatatatgtaagaaaacaaatctataatttaattaagaccatcatgttggttaataagttaatgcagttaaacctatagctagctaaatagatcaattttctatatttttaatataggttatattacttatcaataaggcttcacctcaggggatctttgcttacagaggtcctctgctgctatggcggggtcggggtcgaccacggaaggtttcttatccgataaagaccaatccacaggcatttggttcgaaggttagaggaaaacaaaaaagtctgaaaaagaagcaggggccgacttcttcagatcctattctaaaaaccaagtccatggcagaggttctcggcgtcaaggctctgtcgatgttgaattttgataaagatgaggaggagatggtagctcttcaaacgatatcacaaacagtgagaacaatcgaagatgtggcggaagtttttgctccacgttcttcactttgacaattggttcaggaggaagttcgatctgacttcatgtcttctttggaggtaactaagagatgcgaggctcaaattatttcaagtaaatctccttctccactaattttctcttttgctctgggaaatactattataaatgatttgagtaaaacatttgaagagccaatacaggggagtcctataaagaaacttgtggttaaaattgataattctgatattgaggaagaaattttgtattagaaatcagctatggtatgctatgtcttgggtgctaatcctctgattggtgcatttggtggatttacaaggagaatttgggcagaaaaaggagtggataaagttggactattaaagcgaggagttttcatagtttgctttcatgctctgaatactccagatgatttcttagaaggtgattacttgtttttcgataaaaagccagtaatcatgaagccttgggacccttacatagaatttaataaagaggatgtgtattctgttccaacttggaagcaacttcatggcttagaattgaaatattagggtgagagatctttgttcaagattgtgaggcaacttggaacaccaattatggttgattcgataacaaaaaataaagggagacttaattttttgagaattttggtggagataaagatgtaccaatgtaacaccctaactatcttaggcgtattacgtgattttttaaacgtactgtgcagct

SEQ ID NO: 304308 - DNA, 1224 bp, Cannabis indica
aaaagtaaaaaaaaatagatatataaagtgattccccataaaatttatatatatacactactatataaatatagattaattataattataaatttatatatcacatcacatatataactatagattaacaagtatatgtatcattctaattgttttaagcttatagtgtagtgatatcacacatctctccttaattttgacagaaaataaatttaactttcaatctccacactcttaaaagttaaaatatatattataaattgatgatgtaattcaaataataataataaagattatagctctaattatgttattaacacgttatcaatacacaatatgcaagatcatagcaataggaatggatacataattattgaaaatttctatattaatatacccacttaaaagattattttaatagacttctatctatttcagtagagagttttttagtctatttttttatgatcacataagttgtagctatttaggattatgtgtaaatttacagtgccgaaaataaaagtttaaatagttttctaccacgcgtataagaaaacatagtcatacgtgcaacaaaatatttaaaacttattttaagcactataaattattcgaaatttttaaaaaattaataaattatcttatatagttacaacatacgtgatcttaaaaaaaaaaataaactttttagaggtatactatagacatacttataattattttactatgaaaagaagaatcccttatctctaacttatttacacttcaaaataaaccggcaaggttgacattattatttttaaaataataagatttgaatatagtttatgattaaacaaaacatcttgttatactttgcttattttattattattattattttttttaaaaaaaaggtgtagtgagagatcccttatattatctaaactatataaagtaacatatataatatattaatctagtggtgattaaaaatagagcctaaaataataagtaggaatcactcccaattactttattcttttcttcctcttcttcaatttggtcaagatagcatatataccattctaacatttctatttcttgattgattttaattattaaaagtcataaaaattaaagtgtttagaatgtgaaaatgtggtttaatgtcatcacaaaagtttttcccattattaattatttaatagttgattatgttataaatattagtaattatgt

SEQ ID NO: 304309 - DNA, 830 bp, Cannabis indica
aaaaaaaaaaaaaaactaatggggagattttatgtctaaaaaaagttcatagattaaaaattccttaaaagatgttatttgcaaaaaaaatcttctaagatattattctttctgtaccaaggcattataacatattgagatgttgcatgtgaggagataatatcacagactatgaccagtgaccacattataagtcaataaaaatattatgtttcaatattattatttggccctttaaaaagtatatatcattttttaaaagcgatcacaatgctccacttttatcccataccaaatccagtgttacaaaataacttaaaagcatcaatccaaatactattctaaagaacttaacacaaaataagattacaagaaccacatctaataaagtaataacatcatcaataaaacctgtccattaattaattattcaaattcaaaccgtatcaaaaactgaatccctcaagacttgataagcctaaataattgaaccatatttttacaattgtaatgttttatcatcagttgggaaaaaggtcactctgttaactataacattctcatccgaacaaagctaataacataatttgaaattcctactatagtactctaagaaattgtgaaaaaatcaaagagaaatactgtttcaattaaaatcaatcaaagggtcaaataataatgagagatcataaatatttatatcacaattgaatacgttttcatttgttaaatagaaaacattacatttacaagtaagccagcaaaatagaagacatgataatttaacatataatttctcttcctacattcttattttccaaaaaataaaa

SEQ ID NO: 304310 - DNA, 1016 bp, Cannabis indica
gtgatatatataggaataaataagcatgcatatagagcaaattttcttcttttcttttttttttttttttggaacaaaaaaaggttccttgatcatcattttcttagcttgtagagaagaatatttatagctaatttcataataattaagggaaggaataaatgcattcatctgtatatatagattattaatcatgtattattccttgcatatatataatgtatgctatattgtattatatagctcaattttcaacatgaattcattgtctactatatactgagtagtttcaccaaagaaaattgcatatatagttctttttttttttacaatatgataatttattgtatatttaatcctgaaagtattgaaagcttgtaatccatataatatacatatatacactacaagtgatcatattatatgtggtttgtttcatttgattctgagtatgatataaagaaaatcttccattgttgtacttagtgcttagcttgcctattagatttggtcaatcataatttccacttttttacacaacaaacaagatctttctttggctttaccttaattattctttggatttgctttgtttttttttttttacttttctctttcttatttttgtatattataatttatttcaaaaattagaagaagagagagaggaaaagaggcatgaatataaaatcaaactaaggtaattaataataaagtgaatgttttgagccttaaagataattcagctttttgtcttgtataaactcttttctacttgctatttagatttaattaataaaaatattttaattgttaatgttcacacgagaaaacataataatattaatattattattgttttacgaaaaaaaataataaaaacaagtgttacttatttttctaaattatattgaagagattttttattaatgaattccgcaagagcagtgaatagtttaaaagtaattagccaaaagtctcttaatataggtgtcgtttggtaacacttttatttt

SEQ ID NO: 304311 - DNA, 3586 bp, Cannabis indica
aaaaataataatatgtaagatcatattactaacttttaaattttgtttttccgataaaaataacatgcacaaaaagagaaaataaagtatatttttttttcaataattattataataaatcgttaactacttataaaatatttgacaattgtgtctaatataattaataactcaaacaaaatataataaaaattagcaaactcacacttcatcaaaaaagaaaaagaaagaaaaaacaataagctaactcatgcatggccctcatggctagaccactatactaatttcaataactcaaagtatcttcctttttggtagatagaaaaaaaaaagtgattcatatataattcttctaataataacaaaaacttataatacacaaatatatatattttttttttgtaaagaacttatttatatataagttaatgcagtttttttttccattaattatactaatcttatttatcaatatatatttttatttttatatacacacgtttaaatgattttttcttgtactgtctctctaaaggtactgctggattttcatatcaatattcaccaaatgttaaaactgccaatatcaaatttaatatttttacccctactcaagtggcctactggcctattattttcgtttctttggagaggtcttgtaattatgagcagcattttttaacatagcacaaaaccgacacgagtttagaaggtacgagcacgattaagtacaaaaaaatataaacttaaacacgacacaatatttataatataaatataagcaagacacgatacaaaaaaatataaatttaaagatgataagatacgacaaacttaaaaaagtaagtacgaattaaaaattattaacatgtgttatatatgctcaaatggtatgtattatcaatcatgcaatataacacgtaatgaattaagaaaaagaattgcatatagacttttattacatagtactagcttctgtttttatttattttattttagtttttttttcttggttagaaatattacatgttacactataataataataatttttttaagtgaaaactctaatatataattccttaatcctaatattatagcctataagagataacgtatttttaacgttgttcatcaaaccatccacaaccgcaccatattattcatatacataatatcataaaatcttatttagaagaaaataagtgtggtcacaataaaaatacaaataagactaatttgtttaaattttacaatacactcccttgaaatgaatatactaatgcacttttatctgtttctatttcggtatatgttatatagatatttaagacatctgacaaatttttgagaaatttaaaaaaatttaacaacgtcaaaaataaagttcagtgagcttgttgcaagcatgattttttaaattttatttagaataaacttttcggttggaagtcaaagctctttttttctaaaggtcgggaggtcgtgttgaaatcagttattcaaaccatccctacgtatgctatgagtctgttttggctgccagttggcattgttaatgagattcatcgtatgtatgctgctttatggtgggacagtgatgatgacaaaaagaagatgcattggtgtgcgtgatctcaattatgttggcataagaatgatagtggtataggtttcctaaacatgtttctctttaatcaatctcttcttactaagcaacggtccggttgtataatattcctgattctttagctgctaaagttatgaaagggttttattacatcaagtgctctttcttggacgttgaagaaactatgcaagcctctctcctttggaagagcattttatggggtcgagatctttagaagaaggagtgtcgttagcttgttagttcaaaggactgtataaaaattaaggaggatgcgtggattccgaaggaccatgtgggtcgaacttattctttctcaggtagtcctcacctccaaaaggttagtgatctcaacttagatcatggatgttggaatgctcctttaattcgagagttgtttaatgcagttgaagctagtgattttttgtctattctccgttcggtgattcctcgacaagatagacttatttggaactttccaaataacgagatttattcagtgaagagtggttattagagcacagttttgagtttggggtagggtcaatttgcaggatctacagggatgtctctcgttggtagaagattctttggcgtcttaaccttcagccaaagacaaaaaaattatttggaagacaagtttgaattttctaccagtttatgctaatttgatttgccatggtatgaaagtgtctaagatttgtccaatttgtttccaagataatgaaactactattcatgctctttgactttgtcattcgcttaagtgtatccagtaatgttggaccctgaaagggcttgactccttaaagaatgcttcttctttttatgaataattgttgggttgtgtagatattttgaataaaaaagaattggaggagttcattacccttagttggcaaatttacacagacgtaatatttttgttcatgaccacaaacttcttgctgacgatcatatggtcagtttttgggcaattaattacctttggagatatcagaacgtgggtggctttcatcccatgatactctttctgtgtaagggacgacaggtgtgtgcactgaaacaaatttagttttaggtgaggtgaacttatttgtggatatgttgagattcgtattgatgattgcaaaatggggatggggattgtggcgtctagtcctaatgggcatgttttcttcttggtgtattttcgagtgtggggtctcttgagcctcacgtgacggaggccaaggctttgctccacggtctctccttttgcctgcagctaggttatacgtctttcactgctttctcggattgcttgcgtttagttcttacggttaatagtcatgacactcattttaatgagtttggtattatacttaatgatattgtttatatttggaagtttttttactagtaattttatatcttattgtaaaaggtaatttttaagaattttattgcttatcttttagttaagaggactcttggtctagatcaatcatgtacctggacctttttatagatttagttgttaattttttctcttgtacttgactcttttctagttttgtatcttggaattatttcattaacaaaaaaaaaagttttttttattttatttttctcccttcaaaaatattgacatatttttatgttattatgtgatgaccataatattaacatatttttatgttattatatgatgaccataatattaacatttattctatgataagattttatttattacatttgatacccccattgtctttttctctttatgttttttgtgacacaaattaattgtttgtttcctgagaaaaacctacccctgaagatctatatgttggcctcttaatattattcaactacatacagactaaaatatgatatatttcattacatatatattatatttgatgtaggcatgaaatgaagcactacaagtaa

SEQ ID NO: 304312 - DNA, 3420 bp, Cannabis indica
tgagtgtaattttaatactactttgtaactaaaaaaaaaaaaaaaaagttacactaaaaaataatattctttattatcacattatttttttaaataaatagaatatttattattattattattaatttattaaaattttaacagttagtatatctaattaataatttagtgtattgttgactatgatttaaatttataatgctttctaatgtgtatttaagtttttcatattttagtgcctcatatcaaaataaaattacacaaaaatttaattttgttttacttaaattatagttaaaaattaataatttgtgatattcagaatttcaactccacaaaatacactaaattaataatatatatatataatattataatatataataaaaaagggaggatgcacttgagctacaatgcacatacaatgtctagctctcaaagaataatttggtgtgttacattaaagttgctattaacattaaatttcttaaaaaaaaatacaccaaacaaatggtttccttcacaattcacatacccctcacattccatcactttcaactgtcccaaacataactataaatatgtgcccgatccatattttttgtgcttttaaaatacaaaccgtactgtatcgggccataaaaaatatgagtcatattatgctgtgcaaaaaaaaaaaaaatatatatatatatatatatatatatacgagtcatgccttactatacaacaattttatagagtaggcttgacatgacccgcaagtgtaataatttcgtaccatgcttagatttaggtagtgctttattcgggttgacctattgtttttaaatagaccaacctgtttttttatacaggctcaaaattgtgttctatatttttacatttttattacaatttatgagttaaatactaaaatatatgtgtattttatagttttagttatttttaaattttttttcaataataattacgcacaattatataaaaacaattataatattataatttgaatgtcattattatttaattgataaataaatatttactattattatcatttaaattattggatattttaatgttctatgtgttatgttttcgaacttgttgtattgtgttgtgtctaagtctatttttttttcgtgtcgtgcctaaatacatattttttggtatcagttcgtgcacaagtcatgtttctcatactcatgtcgatttcgttttgtgtcaaaaaaaccctacctatagagcaataatcctaaagagtaatactcagagacagacccaagggctaatctctcattaaaaaaaatattgttttaagaaattaaatggaaattttttaatttaataattatggattaaaataataaaaaatttccacaaagttaaataaatttgataacagtaattctaatataagtaaaaatattatttttttaccataaatactcgtggtaaagactaaagatgtcccaagtaacagccagatttgagttggcgcgggtcccttgtccaggccaatttatatacaagtattatttcgtcagccatgacttcagtttacaataaattaagccacacctacgaaataccagtttcatagttttaacccttttcatatttctatggtattatatttatttattattcaattgaagaaaaaaaaattgaaaaatcatgtaataaaaatgttatttatttagtttttttaattcaagttagaatttgagataagttgaataagaagagattttatgttaaaattaattacaataaaaagagtaatttattcatttatttttacacattaacaattgggattaactttaatgaaagaaaaaaaaaaaagaaaattaaaaattcatgtaataaaatatgaggaaagtcgtagaaagagaaagaatggcgagtataactgtctaatgaagggtagagaagaggacacgaatgataagaaagagcataaaattagattaaaaaagaatcccaatttattaaagaaagagaaaaaaatccaggtggcatacatcccatataattgtgattaagggatattaattgaacgggtaagattaagttataaagatataataaatgatatcaaaagcacgtgattccacaaataaaacccgatgagaagaacaatcaattatgaataggcttacagtttcttcttcagagagatagaaacataaaaattaggagagatggtgttaaagcttgcggcaactccgttcacgtacgtggcacacgtgttgggaatcgtaggacttgttctagtgctggtttggactatacacttcagaggtggcttggcatgggatgcttccaacaagaacctcatcttcaatgtaagtattactcttctatattaacttttagcttttgtttcttttatcaaaataatttcagcctttaatttagtattttattataattttttttctgtcacatgctattatatttagaaaatttaaatgggtattttttttttcttttcaaattaacttgattcgttttttttccctaaagctttctgggtttgtttttcgttcatataatgttcagtttgattcgtccaattttagactttacttacctttttggaagaataggctgatttgtttgttgagaaattctaactttgactatatcaattattagaatttcctatattagttgagtttcgttacttagtgcgttttgattcttttctagtgtctattgctcctagtatttttttttcttcaataaattgtggttcttgttttttgcattggaattatcttaggaattaggatcatatcctgtttattccatgactttttttttcgacttgccagtctgttaagtagcccataatatatgataattaaaaattcaataatttttaagaaatattaataattatacatatacatctctgacattactatcgctgaccatttattataacaattttcacattatctttattcaaataaatatataaaagcttggctattggtacatttaatattaaaatttaacgtttttaaataatgtttttttaaagggctagatggggtctttatcatcgttatctaacaacattcttatgaacaaaggaaacgtatagaggaacacttattacattataaaataatcttattcttggatggttaaaaaatcatcttatattttgattttagtttttacagacataggacttttttttttttcttttcttttggaagcaaaataacacaaaataaagagttttcattgttattgaagacgttacattgttatttgaaaagacctgtgtaagtttctcgctgtctattaggaatttaacttttgagaaaagtagcaattaatagtaatattttttggaattttattattaaaaaaaaatataaaatttaaatatttttt

SEQ ID NO: 304313 - DNA, 1190 bp, Cannabis indica
ttcaattttcttttcttattaaaagactcgaataatccactaaaacaaccaacatttcctctaaccataatccaggttgatattaagtaatgcaattttgtaaataataaatgaaaacctgtatttattttttttttccttcttcccatttgtttaaataaaatgcaaaaatctatctggtttccaataagaaagtgtaaagcttgattattccgtttagagataaacccagaacaacaatttggtttctattcctcacaagcaacctcattcacaaatgtaattgaagaatacttaccctccttttctgctatctttgccctgactatcatcctcgtcttctccctcttccgtttcggcttcgccttcttcctcttgttctacttcagcgacctctgctcctttatccccttctttaacttcctcttcctggtcttgaggtttggtgaggttggattgcaggtaaatgtcgatttgttcgcggataaaggcttttcggtctgataaagcgagcccaaaatcggcctcgagctggcggcggacactgctgggcgtggtggtatcaaggtccgaaacgcatagaatctcacggagccggatcacgagttcttcgtcagaaaccattgggttagggcggaagtcctcgaagttttccgtcggattaaaagtatgtttaattttccgggaaaatgagagagaaacgagtatcccttgtttttcgttttggaaaaaagaaatggcgtctcatgcaagtgaatgtgaaagaatgaaaaaacataggaatttgagaaaaaaagacaagggagtgaacggaggggagagtcgctgcaagagagcggggattggatgtcaagggtatttttgtaatttcaataggagcaaaggctttaggcttacgttgttctcgttttttacaagtgttcttttacggattaagactgacacacctgatcctttctgtgtagagttaaatgggccatgtggcccaaatctggcccaatcctattgctagtgagcatgagataagtcctccaaattgactgaagggttaaaggtagcgctgaatatcgggcgggtttgtcaaatggggtaagttgaaaaatgtctcttttattcatcaattaatcaaatttacttctaattttatgtttatttgaaacatacctctttttatatgtattgtacccaaa

SEQ ID NO: 304314 - DNA, 2157 bp, Cannabis indica
actttaacaaacaaattgaagaacataaataatacaaataagctgaacctaaccatatcaggattaagatctacagacctaagatcaactagtgatattaacttagaaagatataacggtacatttatgatatcttatccaaaattaatatcggtccaatctaatgtatacttcatacatctgatactggtaaaatttgctaatgccttggaaaggacataacacttatccaaggtgtaagtataccttatcgtcgattatcatgtcagtctaaattcagtgaaatgacaaatcatgggaattaaacatttaaacatataatcatgattatttccactatgctgacgacactataatcatgaataaatatataaatatatatgttttggacttaatagaatttatacattaaatatataatcataaaataaatcatgtgaaccatacaacatagaatgatttcttatcttttattaattagtaaatctgattatattgaaatgggttttatttagggcagaaaacccaacaaggaataccactagcattacggattgttacttgcaactgcagcgagcaatctcttctctggtgaaccaaccgcccacacaggtaacaaaaattaccaaatttttttatatttaacttgcacctagcaaccattcatcagtttgaagaaacaacaacaaaacaatgggtttttaacctcgatatcaacttactctaatctacttgttcttggaaacaggtttagattcgtccagctcaatacatacaaccttaccagctcgagctcccaacacatttgcattaactctggaataataatcatgtggcaggttgtgtatttgaatccataaacggattgtgtcaaaggccaactctttgacaccaaagctagaagatcaagaaagaagcacaataatctcccctttgatgcatcaaggaccatgctccagaacccgtttcctatccgacaccttttcaaagctaaaacagaagacattagaaaatgcttcgtcagcaaaaagggcatcaactttcacctgtgtattccatagttttgcacaaacacttatcacttccttttccccaaagatgaggaccttaccaacaaggcaaaaattagaaaggacttgtgctaaagatgcactaggggcgagagaaatagatgcctcattaaatgagatacatctacctctcttaacccccaagacaatcaataactccctccatattaaagccagccaccaaacaaagacaccagataaaacacatgtgacaaagactaacctacacccaaccccacagaccacaggaaagatggaaaaacaagggacacaccaaaaaaaaaggtcaactcaaaggaacaaaggaaaagccaaagcaccacacacaaagcaagagaaacaaacatacaagacacacgacacaggggaagctaaagcacgatcaacacaacaaaaggtatggaaaagaagtgagaagacaaaaaataccaagactgagagaatagtagatgactattctctctattagacagagagaattagttaggttggttattattctttggtacaacccattctgactatttccagttaatttgctaagcttaagttgtgtttagctacatattgtacttaaaaggagcattgaatccattttcattaatgagaaattcatttacattcttcgttcgttttctctcaattcaacaaaaagtattgaaagtaaaataaaatataaaataacatcatctcaatataaagtaatgtcaccacaaatattaaagaaaagacgtcaaaatttttcaggtgtttttgagaaaacagaaataaaattgttaaaactgcaaaattccaagtggggcccattaacaccatggccggccacttggatagcttttttccaattattattttaattattttaataccaaataattactaacctaaacctagtggttgcctataaatagaaagtgatggctcacaccaaaagaagagaattattcagtaattcaagagattgcctttcagaaaattgagccatccactttctctctatagccgaccctctcattctctcttttcctcttccaatttcgaaataccttgagtgatagagtagaaattattactacataaacactag

SEQ ID NO: 304315 - DNA, 1463 bp, Cannabis indica
atatatatatattatataattagtaaataattgtcatggtgaaattgagaaattattttctttctctgtgcaggaaatcaagtgaagaaggttgtggaagtgaagaaatttcaatttgggcaaagaaactaagtttggggtggaagagatatgcccagttgctatagcaaaggcttagcaagtctatttggaagtagttaatagcaagggtttgatattggggttttgaaaaaaaagtacttggtctgataaaaaacatgtgaaaaaaaatgtttttaatgatgcaatcattggggaagttgtctttatcagaccaatcatttgatcttggtactttgtatttttctttttctttgagctgaaattggagttcagtctaaatcaaattggccccaaaacttagtaagtccatgaattaagtcaaatgctctacctcaaagcttgattcaaactgggcccctcttagattagtcagtcagccccatacctcactccttagcccaatattcaaccctaccaaccaattcaccatcttcactccaatcactatcccacccgcctccatcacccatagttcgccctcaccagccacattcagttcaacccatcaccaacacgagaattcacctccgattcatcaactcagccaccaagtcatacaccatcaccacgaacccccattatcctaacctccgcctaactcaacccagccaatacccgaagtcacccacgccatcacctgctgaccacgaaccatctccgttcaaccagcaccaacccatcacttccagattcgtcgtgccctaccaacacccgaagtcgaccattccagcgtgaatcaccaacattctttcataccaccatcttcatcactgcaccttcctcacgattcagcaatcaacagcaccaatgattcatcctcaccatctcagttcgcccataaccacgaacatccattcagcagccactcatcacagtcaagagcagcgatcaagtcgagtaaagcaccatcatcaacgactcattcgaatctccctggtttgttggttaaattttcatattattttggattacactaatattgctatggctgccaagatgttgattgaagtgaatgtggaatttaatttaattacaatgaaattctgaaattattagagagacgttgcaatgtttgatgcaacaattgaagatttagtgtaattttggagttgtcgtgactaactaatggtgtaattgtgtatggggatgctttaaaaactggatttggtgtcacttggggagtggtaattttggaagagaagtgattgtggatagattactgcggtaatgaagcttggtgtagtgtaaaatatatatatatataatggtgtgagtttgacaatattgttgtgatttgagaagtgtaaggtggtgtgtgggtggctataaaaaaagagagaagagctgggagttctgcagtg

SEQ ID NO: 304316 - DNA, 1566 bp, Cannabis indica
tatatatatatatattgtaaggtaaggtttcaaaatgaaatggattaggactagtaaactgtcacagccctaaaaggcacccctagctagatagattgcatgcccacctgatgatgtgcatcaattattacccagttttcttcctcttttgactgctttcttagtagatagcgatatatagtcattatctttatttatttagttatatgtgttatcttaataaattaaacttcatatatattgttttcatacggaacttcatgatatgaatgaatttgtctaaattatttgatacatatggataaaaattggaatgtgcccctccaaggttgcaaccaattaagctcataatatatatattataatgtttagatattggttggggctgcggatacaaaatcttaattatatcagtctgtcaaattaacccttataactttctcataaagggaacaggaagaaaaagcacaattatttagtcatatgtagattaattgtagggtggatataattgttacaattcaatgaacttctccttcttaaaaagccaaaaaatatgggatattgagagagagtgagaaagaacacgatcatgtgtattaaaagtcttatatagaacaatccatatatttctttttatctttaccggtaatgtggtcatattaataaactaaattaactattataggagcatttataaatttaagacaaatatctgtccaaatatgaattcttagagaactagtaacataatttgttagtgcatgagtcacactatttgtatcaagcaaaatagtacaatactaatactaacaaagaatttatctcatcaaggtctgaacataataaaaaatactttttaatttcaaagccagcaatttaacaacaattttatacaaaacattgtataggctaataagacgatactccttcaccactaaaggttttgtaactttcgtgatgcaccacattagccttattaaattgcttgaccaatttttcatcattcaaaatagctaggcgaaccgttgtagctcggggaccttatgatatcccaatgctacttttaaaaaaagatagcgtgaaaccatcaagacccggtactttcgtggccccaatggccttgaccaaacgatgcatgcacttcctcaactataaaaggtgcaaccagcaactcattttcaggcctaaaaattctgctctcaatgccaccaatacccatctcgacttgctgaagattaggacaagaagattgaaagatagttccaaaatatctcaatttccctaacaatatcgtcctcaatactcaactttcggtcatcctcagtcataatcttagaaattgtattcttttctacattcctaaagctttattatgagacttggcaacgagtccattatagtgaagtgcacaagttaggacttgaaaaaccatgtttttacaaatgtcagttgtatatatgaaaatataaaaactggaagcgtttgcagaagcagaaagtaattctgctacagcaaaacagaacaggcagaatataaaatatttgcagaaaaataaataacttg

SEQ ID NO: 304317 - DNA, 1410 bp, Cannabis indica
aagttgcagacatcctaattaaggctctatttcaaacacagttcaaaactttaaaggacaagattggattaataagtctatatacactccatcaagaggagtattagacttaaacttaactttgttgtttagaatattagttagttagaaaccgttaagattagttacctcattttttatttctgttatgattcagttaatttgttccattataatcttgagctattatacagtatatagctcccccttgtactttcgagtcattcttcttttctctcttcttttctgttttactccgtttctctattccgcactaataacaacttgtcaaatatttacgtaaaatttaaccaagctactgcagaaagatttaaggtgcagatatataaccgaattacgtaatgaaaactaaactggcctttggcaagctccaaaaattcatagatttcaagggtcggggactaatttgctacgttacacaacctatataataatatttattcattagaaacaaacaaataaaaactaaataatataatataatgaatgggtgatgcttagcttagcaaaccaaggcgccgcaattcatgaagatatatattcgcccatctctgaaaattatgtttcgtcaagccgtctcatgatgattcctcggccctagctcaaaaataaaatggggtcaatttaaccccaaccttcttcaattctaatattctattataattaattcatcatcttctttgtttaaattgcttaatatttatttattcaattagtttaaaattgtgacaaactatgtggaacttccgcccaccatgcactaccactcattttctcctcatctatctatttctacaaattagtatttctaaactttggttctaataagtaaaatagtattacatttcttaatcatgattgaattaattaatttgtaattcacaacaacccatatcatattatataaatatatatactaggtttttgtgttgataagataaacaatgttatatttatcatcattgctttggaattttggatatatatgagcaacttttgcggtcgatgtgtacattatatctgtctttacttatgccttttgttttatgctcgttaatgaagtgcattattatgcggcgtgacataccctgtttctttttctttatttctttattatttttatttaaaaatagattattatgaatttttactccaaattattagatgtgttatattattttttttttgaatatttcggctcgttatatatagttcttaaattatttatattattttaaattaggtggcgtttgataatatttttttaatcagttttttgttcttaaaattgaaaaagtgaaaatatttttcaaaaacatattctatagaactgttttcactttttaattt

SEQ ID NO: 304318 - DNA, 2691 bp, Cannabis indica
tttaccctattagtgggcttttatcataaaccctaggcagatcatgggcaagtccatacctacccttagcctataaatacccttctatttccatacggagggggatcactacctaaataaccaaagctatgctaatattattctatgcgttcttcttcttcaagagaaactaagaacacaaagttagtgtttcttagaaaatattgaatatgcacttagaggctaatagactaactcatggactaaggttaatgtttatagagattttcagaaactggttaattagagcttaaagaaaatgcaaaataataaataatagacaaatggttttttacgtggttcaaggattaataatccctagtcaatgagttcgttctattagccttaccggcgagtatttgagtattacacgcttttacaacgataactctgtattccttttgtttctcttaaagaagaagaatgctttctaggaatattggtagaggttttttaagtaagaaaaatgtttaccctttgtacatgaaaaatatgagtatttataggtacatgcatgggcgagggcatacccttcacccacctagggtttcatacttagcacgttactttagctagtgattttaacatggcaatctgaccgttggtggctagggaacctcctaatcgtgtggtgcacatctatgacatcctaatttgtaggacttactacacgtgtcgcccaaaggtttcaccttacaaaggtttttgtatgaacaaattattgggcaaaaaggagttgtagggcatgtacaagcactaccaatgtctaacactagggagaagatctaattggtgttagaagatatgcaacgattggggtttaactccagattaggtattatggagttccaggaaggtctgggctaaggccgttccctggattatcagattttgctaccatcctagagcgggtgcaacttttacgtacttctggtagcaagagaattccatgagaatcccagagttatttctgcatttgttggcgaggagagcctctaggtattacatcatcttctgtaaccctgataaggggaatacataaaataaaaatatgcattctgatgtggcatccttccgcaattgccacgtacaagtcatccagtaatagggataacatttacccctaagctcccaggacttatgagtgttgggagcttgtaactttctctcggatgtccgtttcatgtctctcagtcgttagaacaatcatcaaaatattgaaggaatcttccgtgatgtattggacatctgaaaggtcgtcgtgctctacaatatcaatggttattcgatgaagtttggtgttcagttagtggagtcgtgaactcacgctatgcattttgagcgcgtttctcaagggaaatgaatgacggttggtcttgaagagacgccaggcttctggcaagttagggatggtgccacaaaatgatgattaataaacactttattcttttccttcagacgcattaaatgcattcctttcatatccccaactattggatgatatagcccccgattatttcaatctagatcgtgtgtttccacaacatttgaactattgtcgctcatataaatgggggtcttagcgattgaaaccatttcttttcccattttaccaacaatccttcgcctagatagaattcttctcagagaaacttcttgcccagaaactatagccccttcacacctctctaaccaaagctcaaccacttctctcgttgtatttctttgaccttcaccatcttcccaagatatcttggtatcagacctcggagaggcaccgttgccaaacaagcagtgtaattctagtggaacaaccgtcatcttcacttctaaccttttttacaagtatgtaatgccccaatttaaacttttttttagggtcttaattgaaatatagttttcgtgcttgagggaatatgccacttttcatggtgtagggtttaattttaggaattagggttattagtgtctggaattattttgcatgattcataggggaatacctcatgacttagggctttaaagaggtactttcacttcagtttgggttaagagatgcatgcttgttatttttgatttactagttcagaggatttggcagaatatttttgagttagtagtaatctctcaagtaattcctctttgatttattaagtgtaaacatttttctttgtctgtggaagagagaatttgggcttttgttattgttgtatgtttaggttcccaagttttttttaccatagcagcatgcttcatggtagtaacctttgtggtgacgagtctggcggggatctctctaataagttttgggggaggcttcccccagtacccaatttgtcatttggatgtagggtattgacttcttggattttccttccactttttcagtgtctggtaaacacaatgacttccaactggccctagttaatcttgaagagattcctgaggcatcccccatggattttcctcatgtagaagagaattttgaagagcctgttctggatgagggagcttctgaatctgctctctttgaatgatgttggaagggaaaaggcaaagcctgtgttgtgtccccatctcgtctagttctcaatgacaccatctggagatagaccaaagaccaaacaaactaagtgttggaaatattttacc

SEQ ID NO: 304319 - DNA, 3457 bp, Cannabis indica
aagtaattgttttttgtagtgtaaaccagcaagtcgaaatttgaagagaatcagctggacgaaacatagcaaggaggaatctgtagcaagaggactcgcatgaaacccggctggctcaaagacttcatgctcatcaagcttggacactaataagagatcgagtgagatttttgtaattgaattctgttaggcttaaacaattttattgattaaattggggattactgtaattactttgattttgtcatgaaagaaattagtaattgattatgagagattggccttgttacgaagaaggcacttcactaacagtttcgagaattttagtcattcagtactactccaagtacacttaattacaaagttttaatgggatccgatgcattagtgccactatgattgactctgttagcagatttcttggagaacatgattataatcactagtaaaattaaattaatatacatatataagagattaatgttagtgaattgcacactctagtatgagcttattattatttgattggaaacaggtagcacactttgaaattatatatatcaatataatatggaaggattaatatctatatatatagtttgtcgttgtatttgttataattcttcatcaggtattttttcgattttgtaattggcgtcaacatggaaggtggtaaccccagtgtaaattccatcatgcatcctcactcttttttcttccccatcgtaaagcttatcgacccgagtataagagtagggaacatcacaggttcccatatgtactggaacactgcatgttactctactctttgggggcacaccaacaggaattccagtttggaatgtcctcgctgatttctcagtatcctcccacttaagtttacctgttaattcagcagagtatttaaacgttcccgcaatgagttccggaattaatgttactccgatggttgcactgcccccaaacttcaaggtattgcttgtagagaaagtagctgatgtaatcttctcgtaagaaatcttaatctcaagactgtcgtctgtactgcctcggttttcggcccctaaatacaacgtatccgcaacattggtctgtttaaggaccctaacatcgtccgtgtggaaatctatgtcttcaatcttcctcgaaaccactgtttccgaaaccaacagcttcgtttcatcggtcatgcttggctcctgcgccctaagatacccagactccttcttacagaactttttgtttcccaaattgagtagcgccacagtgtttttcggggtctgaaattggaagggcaagaacagcgtgttcttgtcgttgccatcgcgatcctcagagtttgcgcggatgtaatcatcgctgtcgcggcaccagtacttcttgctagagaggttcattatccgcacataaccatcaccccaagtgaatatcttattccctgccgttagatcggcgatgtctatgccgtccacaaacattaaatagctcttattatcctcacggtagctgagatagttggtaatgttttcatgggaaaaacacacaatttcgggaaatatgacaaacgttgcccagtctaagattttgaacacatctggctccaacgtgtgatctgcgcccccgaaaagaagtccattcgattcatggaaacaggcgaaacgattactcgatttgtggaaaattttgaaatatttaccagatttgagtattttgaacatggtactcgactgtccttcatcttctataggcttctcagctatggcctgaatatttccggccatcgacaccttcaagtatttgttgatgtagcagcatcgaatatgcacaaaatccggactcattttcgccattatcagttcgaatttcgccataggattggtaacttcttctgctttaacatacagattagtttcattctcactattctcttccttatttgcgcttctcaaatacttgctgcgtttgcctttctctttcgtttttcctttgataaccaccaaacttggaaatacagtcgtcattttcaggtatatgtgtattctttttctctcttcttattttctcatcaatactctacccgattcactgaattaaatacaaactgatataagatatcaagcataaattggcagtgaagatttggctctattatattacttaaaaatataatattttatttttggctaattagaatttttaccgcttaaataactttaacatgtatcaaatcatgctttttgaatttttctagtcgttaaaaattttcccgaactattgagattagatttaaagaattttgtttaatttcatttaattttactattttagtgattgtttatgtactaaacctaaaccatgctctcatatctactaaatcatgcccctcgaactttgacatgtactagatcatgcccctgaactttcatctatgatagattttttttactaaaattagataaaagtacttaaatctaacaatctcaatagttcatggggcatttttaactaccttaaaagtttaagagcataatttagtacatgtcaaagttcagagtaagaatcctaatgctttaatgctttggctctattaatgctttggcaatgaagatttggctctattatattacctaagtatttaagatataaattacccttatttattcgtactccatatcatctttaatgctttttgttttaaataagagtaatttaagtcataaatacttaagtataactctctgttgcaaataaattaagtttaatttttagcggcaataatacataagttatatttctggaactctataggtaagtaacaattaaatgttgtatgtttaaactaatttttttaaaaaaaataataaaaatttaatgacttggatcaatcaaggattgtcacgtgacaatttacttaacacctaacaaaattaaactaaagtatttatttacaattaagagttaaacttaaatatttatggcgcaaattactttttaaataattgcaatggttagctctccaataatattaatataatattatattaaaaataataaaaaagaaagaaagagaagatataaaacatatcattgttactttttaggtattcttctttaacatcactccagtgataaacatccttaatgatactaaaaatatatccctgcatgctctaagcaaaaattgatgagtaacaaaaagaaaatacttttttatgcaccttaagatactcaatattacattgatgtgtagcgttcttaatgcatggttaaaaatttctgatattatatatttaattaaaatatattagattctataatgaattgcatcaataactatatgtcatactattaatttgagcattgttatgagacacaaattaaggtgtctaacaccactataaggtggtgtcttataattgattagcagttctttataatatttattaaagtgaaataa

SEQ ID NO: 304320 - DNA, 994 bp, Cannabis indica
aatgtgtagtaaaaaaaaaattagttctcaaacttatcgtgataattttaggttaggtaaaatagaatgaaatatgatatttttctttctccaataaaataaaatatgatttgtcaaatattcgcgttattactataagtccattggtgaaatttcgcttagttttcaataacaataataatgtgggtagcaacagcaagcaaggtttggtgaaaataccactaaaagtactaatttttataaagtttagaaataatttatgttattgatttcgggaagttttgagatattttaagagaacctataattgaaagcactaaaacttatattgatttgaaagaatataattgagcacttgccataattatgttgaaattttaaatttgtttttttcgactaattttcaacacaacttattatgaaatgatactccttaaaataatgtatagtctagtctattgatttgtaaaatcatgtgttgctgctataattactgtgtactacttggtactcccaaaatggtgaaggctttaatgaaatcaatggggacaataagcaaggaatgtgtcttcagttggatgggatgaacaaaaagaatatcttatttgttgatgtaataaaggaaataaatgtattaataagtgtaatgttttgaagagcatgtccttatcaaaaaaaaaaagtagaatgaagagcattaaattgtttggatagtcatagtggtggttgagagatttttccttgcaactctataaaagatttgaattatcaagcctgcggttattgaaatttaattggtaatgcattttaaacgttagtggattctcttaagtaaacaaagatttcagccagattgccaaaattaattaacgaatgctgtcatttaatcaaggttataggagggaaattttaagtttttatatagaaaaaaataataataaataaataattctttcctctgtatattcaattatcttggtatttattgataaaa

SEQ ID NO: 304321 - DNA, 2847 bp, Cannabis indica
atagatttaaataatatggaatatacctttaaattagaattaagaccactacttaatgttgattatcacaaagtatataccttttgaaatattatttatataatatattatatttgattgcgacttctatttctaattgtattgaattaataatagcccccaataagtcgatatctatttaattatataaattatagtttaagaattcaagcattcatgttcttgttaattattttatctatggttgatgttccataatatagtaatttattacaaattgacatatatatatatatatgatatatattaggtatagagagctagcaagctcgaaggctacggtcttaataataactcttcaactggttaattaattaattcgggtctatttaactagtattagtataaaaaaggcacgatcaagtagtcttcttccttaaattattaatcctgaatttgaaaatagaattaaggtatactgtattttaaattgtccaagtcacgtaatatatacgatgcaaatttatggcatgatcaccaatacaatatacatgagtaaacaaaacagtattctctttctctattaaagaatatttgtgtcactgtaaaacatgaatattgtaaagggaacacagatgtcctataaaggcattaacatgtgtcactttttaaaatattatttttataacttactttctatcggacaaggaatcgcttcaaaaatttcattttccattcccaatgtatatccacactttggctacgaaaatccacctatgtataataagagaaatgttaaagcatatcactactcttctatcttctatgtgttaatattactattggtacaattaaatatcgaatctaataatttttatatattagcactaactaatagtaaaacaacatatttaaaaattgctaagtgttaaacactactgatgtcattggttccaaaaaaaaaataaaaattactagatggtcaatttaccgcaatgtgtgtaatttccaataatagtggtgagacacagtacaacatacaaaaatgggtaaaattatttttttaggcaaatatttcttttcaagacttattacaacatacactgatacagtgatacacgtatactcaaaattgtctgaaaagtgtttggtgttgtgaaatcatattttgtagcatggattactattattaggcaaagtagagatattttcataaaatacttatttagggaaatctttcctaattttgagaaaattcggtagataaattaaatttttctaaattttatatgcacagacaactcgtacatatattttgagataataagttacttattttgatttattagtatatagtgatgtggttaattatttaaagtacaatagatagtagttttgtaaatgccgatataaatcagaacttgtgcgcgtgtgggtttaagagttcaatgagtcaaatcctctttatactaggtagccattagtctttccccttattttaaggattattaactttgtggtactcaaggcaacaaatatatatttatacacagatcgatttgctaaaatctaattcgaatctttatgttccatcctatgatttgggaaagagaaagagggagccataataagagattagagaaaattatttaaaatacaagcaattattgagagagagagagagttaaataatttttaaagtgagatgataattatagtaataaaatttgcatgagacagtgctcagtgctcatgtagtattatataagatttagaaaatagtaatttactagttgagaggacaaactataatgtgatagtctttcctgtaataggtggggttgacgtggtccactctaccccgtatgaaattttataataccatattttactatacagtagtagaagtaaaaggttaattaattctctctcaaaaaagtaaacaaaaacaattaattataataaataaatagaaacaaattatatatatttgataaatacaagattattataaaattacatggtaaaatctgtacatatttgttttgatgtgtttgattctaatgcatggtgcagctatacctgtaatccctaattagaaagagaaaatcatatcattatttaaaggtttgaaaccaattaaatatgggactatctcttttaaaagtaaatcaatttttttgttaaataaataaactagatgttattcatacgaagtatataaaaaaaagttaataaatatttatatttatagagagagaaaagagaggaaggaagggaggtcatgagtcagtacgtagtgaagtgtagaggagtggtccagagagtaacgtggaatttgggaccatagtaatatcaaattgcgaagacccaaacagcacgaatttaagtgctatgttaataagtgttaaaatcgaggaccagataattttgattttaaggcaatacgatgttgacacctttacacgggttaagacggggttttgttgggagtgtaggtggtgcttagctaattgtttcggctacttaatgttttgattttgattttgattatatatattattattatatgtatgtatctatcaaaagaccaaaaatatatgtaagatgtctttgtttgaagtaacttccaacgtacacaatggaatgtagttgaaggacatgatcataattaatatgatgctttaaattaataaatatgacatcaaattaataaaaagggatgtcaaaactcaaaacttatttatgtatgtatgaacagatccaactatgcccaatagaaatagaatgagatgagatcagattgaatttataacgactttctttgatgagctgtggtccatcaag

SEQ ID NO: 304322 - DNA, 1554 bp, Cannabis indica
catgcaaacatactcctgcacccattcaataaagatgcatgacattgaccgtaacagacacggtttggctggtcaacctttgttatcttgatatggtatctaccattaacaagcatgataattcaacacaaaatcatgcaagactcggagcaattacattcaacacccttttgagcttcattatttcgtagctggtttgttttctcccaaagctaaaatgaattacacagccagattatcaccaatcaatcaaaacaaagtaatgccataggattactgagtttttcttttgtaacataaggctcgtgataggaatctcctagcaatacaggaaaatagtggatgatatattgatctaaatggtggtgataacagtgttactgggtattcgagaaacccggtgctctcccaagccaagagcggtagctctattacaaattcttcttccaaaacccttctaaaactactcatatatatatatactatctcaataaggcttgttacaatcttctcctctaaacttcagcagtgtcaatcaattgaggttaaagagttgtattggttaggtacttaggtctttaaactatttctaatgctagaaaagaaaaacgctcaatagaaggaaaacattaaataacaggaaaaagattacaatttacaaaccttcaaagcttttcctctttcttgattctgctgcagaagctatattttcaacttcaccattattgccattatcactacttgaaccaaccaaatcatcttttgttacagtttctatatgcttgaattgttcaagaaccactttctcaacaacattcgaagccccaattttttcatcaacagacccatctctgagtcccaacaaagaagaaaaaggcttagctttaccctgtcaaaaatcacaccaattaactccaacatcatcaaatcgaacttcaatcaaattcatcaacaatttcaaactaaatctattcaaattcaaaaattcaatactccaacgaaagatgaagtgaaaagatagtactttgacagtcttggggagtccggaatcgtcgttgagcttccgttggagaaagtccgagagagaaatacgagacacgttctctaaattcttacaaccctctttcggaaccctagaactagaaattccataaccatacacatcaaattgaaaaacaataacaaaattaagaaagaagtgagttaatcttacggtttagaagaaggattgagcaatgaagaaacgatggatctttgaccaacagctctgaaaggagtttgctttgatttcatttctatgtaaaaatttcttccagttttttgtgcttagctacaatacatgaattatcttcttctttagttcgtctgaaattttctgaatttagcgccaaattcgaacttttttgcataaatattgtacggatttttggactgggcccaatctgtaccaacaattatgggcctgggcctattgcaacactaaatctttttttttgggataagttgaaaaatatttttttttaatctattaatctaaaaatactttactatatt

SEQ ID NO: 304323 - DNA, 944 bp, Cannabis indica
acacaacctgtattttaaaaagttcaaaaaatatagatccacaagacacgtatatttacagctacttgagccttctattgacgattcattatttttttttatttaagcgtttatatattacaagcataattaagaatctgagacttaaatccaaaacctccaacatacacgtactctcttatgaccctagctcaagtggtttccattaacttttgtcaataagaaagagaaataggttcactattttgttttgcttatttgcggataatattttgattcaatgactttatgactcaacaaatttatattaaaatgtatcgtgcacaactgtacgcattatactcagactctgaccttatgtattagttatatatttttatatacgtatctcctaacttcgaagcctagctaacataaaataaaataataaatctccaagtaatatttatactaagagtaagagtgaaaaagatagaaaatgaggatgtgagtaagtaaaaaagagaacattattacaacctataattatgagttgattatgaggtgtatagttgtagggttgcttttctcaagcaccctttctttgttggattcacctatatatagagttcaagtgtcccaaaatgtagcattacctggtttatcctcgccatttgcattggtaccagctaggtagtcaatcttttttgttagataagaaaaagtcgcatattagaaagaaaaaaaaattcatgtaactttttcctatccaaattgagtttgtaaaccttaggggagagataggatatcgatcacacacatatatatatatataaatatatatatatatatatatatttgggaagactatcatgtgcatgacttttggacaaatagacaaatagtttctccatctatatgattaataaaaatagtatattataacaagattgatgtgttgttat

SEQ ID NO: 304324 - DNA, 2265 bp, Cannabis indica
attttcataatggtatttattataattatagtacttctttctaaattttaaaaaatttcaaatagtttttttttttttttttggaaagaacttcagttcggagtagattaaagtcaaaaagaatcgagattcacagggagaaattcttcccctttaaacgttctgccactcaacatgacatattcgagcagacttggccaagctatctacaaaagtaatacaatctcttttggcaaaaacaacactgcaacaagtaaaagtcgacaacaaatgtaaaatgagaggaaataaagcagttaacttccaattcggcgctctttttcgcacgtatagcctccatcaaaaccatagaatctgagatgattgacaaattattccaatgattcaatgacgcccattgaagaccaagcatcaccgcctgcatctcagcttccaaagccgagtcacacaaactagtggaagaacacctccaccactctgaagagcccttaatcagtgacaacatagcgcaccaaaaacctcccatcctgaaaggatctgcccaccagaatgcatttgtccatcgagagcctaggagggttggtggtcgacaattggacagaattcatcagtgtatcaccatccacatccttgcatagtttgaaaaatttgctactaatctccttcctgacagaattcacacagggattagaattagaggaatgagtaatcctattcctagttttccataaacagtcaatgatcaccccaatacagtaaagcattttgaccctcaaaggaggatctaaggaggagcaaagattgcgaatgacctcatcaaatattgttaccaggaattgtgtcgatcctaacgggaataggactagtgaaccagagtgcagacacaaagccgcaccttgctaacagatgaaaagaagtttcaggagcagagtgacacacaaggcaagaatttcctccagggaaaggaacttgtcgcccgtggagagtgaattggaacagactctccaaatcatcaaactcaaccttggatgaacctccgaatcccaaatccatctccaaagcacattactgtttccaaatctagctttctgatcaacccaataagcaccctttacattgaactttccaaccaaagagtctttccaaatgagagtatcacaatcaacattcataacaatttgtattttactaatccgatcacccatatcagtaccaaataggaaacaaaggtaacccaaattccaacttcttgttctaggatacatcaagtcagccacgcatctcatactgggagctttgggtctaatgctttccatcaattcgcgaaattgatcgtaatccaaccaaggtatccacgactgccaccaaacatccccatcctcccctgatgctataatagtgctagtcccagcattaattattttcctgacacttaaaaggcctctccaaatgaagctatcagaacccttcacttgtatactccagaaagaatctctaggaaagtacttgcctttgaacacctgttaaccttactcgccaactaccacgcaagtttagctaaaagggcatgatttatgtcttcaaagcgacgaaaacccaggccacccatcaacttgggttagcacagggcattccatgacttggcagcccaaaacttcttagactccagcgaaccattccaccaaaacctcctaaccaccgcattaagttcacgaccggacataagggggaatttaaaagcagacatagaataagttagcatagccaaggccaccgaattaatatacaccattctgccaacctttgaaagagacctaagtctccacccatgaagtctttcacaaaagctttgttttgagaaaattaaattcattcctcttattctgtccaaaaagaaatggattacccaagtgtttctccgtatcatgaatgcacccgattctcaaactattctcaatggacttcctcatggtgctacaacagttactcgaaaagagaattcctgatttctgtttactacacacttggctcgaccaatcttcgaacctttggatacaacaattcagagattcaacgtccttaagattcactctagaaaaaatgatggtgtcatccgcgaacataaggtgggatacgtcacgtacattccgagccactttgataccatggagcagccccttgctttgttcatggaataacaaacgggagaatactgttaggttttatgccctaaataaaactccatttcaatgtaatctattttat

SEQ ID NO: 304325 - DNA, 2195 bp, Cannabis indica
ttcatagaatagtacatatttatatacaaagctagagactaaaaagggaaactaccaataaaataggaaattactaaatatctaattcttttacagttaatatctaacacatgataatctaagtaatcatatctcgacggaagaggctgagaggctgaatgaaatacctaatgagtaagagataaagatagctatgaatattatgggataggacaaggccccatgccctaatgtcatgtctctctcattctacaaccatcatttgaatgttgtccttccgaacctcaaagatatgattatgtgttttttcctttctaatgagtttccttttttcataaatgactcctcaattgttattgtcccaaagactgattgccctactacaataaatgagtacaggctaattactttatgcaatgtaccttacaaaattatatccaaagtgctcgccactaaattacaaggtctgcttaaagatatcatagcccctaatcaagttgcatttgttaaaggaggatgcattgccgagaataatatggtggcatgggaaatcgtttagtccatgggtacgaggaagggcaagaagggctacatgttgattaaactcgacatgaaaaaggcatatgatagaagtcttgcttaatggtgccatctcaggaagttttacgccagagtttggccttaggcaaggggatcccctctccccatcattatttattattgttgccaatgtcttatctagacttattttacacgaggaaagtaagggaaacattgttggattcaagatcgggaggaatggaactaccatcaaccacttaatgtttgcagatgatattgtgttgtgtggtcaggcaacagtgaaacaagccatggcatttctacagtgtttgaatgcgtactgtaagtggtcaagaaaggtcgtgaatttcaaaaagtcttttgtatatttctcaaaaggagttagggaagacaaggcgtgcaagattattaaactccttaatatgaagagaatgaagaaagatgcaatctacttgggcctgcctttgtttaggcccaaaaatagagtcaaagatcttaactatcttactgacagagtgatgaaaaaggtacaaggttggaagtcgaagcttctttcaattgctagacgagcttgtctcatataatcggttggttctgcgttatcctcacatgtttcctcatcaaatgtcatccccaagactattgcaaataaggtagacaaatccttgaggaatttctggtggggggatagcctagagtaaagaaaacttcatacagtttcttgggaaaaaatttgtaaatccaaaacttaaggaggcatgggcttttgaaacaccgaaattatccaataaggcttccttatgaaatgggcctggaaagctttgacagatgaaaacaacctccagggtagagtcattgatgataaatacatacaatactgtgatttcatggagatcaacaagagaaataatgactcacttatgtggaaagcaataatcaatgtgagagattacatccaaaaggggctatgcaagaaaataaggaatgggcactccacttccatatggttccacccttgggtacctaaagggaatctttaaccaactcctcttaaagatgctatccatggtagtagtatggtgagagatagttttatagtactaaattgggtacgtaacgaaagatttgtatatatgattaatattgtattgagcttattcaattaataacaattatttaattaaaaattaaattcctctctcttcggccttgtgttagagttaggggatcatagtaatgggtacgacatactgaacccatccctccctcacatgaacaacccaactataaaagcttatttaccttatataaatacgtgtattaagctaattatattcgtttaacctaattaaaatttattagaaacataataattttaaaataaatgaaattaattttttattagattattttaaaattaatttagaaaaacgcacttagtttaatgaaataaattctagatagtaatttttaataattcaattatattttctaatatttaattaaatagataaatatatttaagttgaaaattaattttaattaattttagaccaaattaaattagaataattttcttagatattaaattagaattaataattaagatgatt

SEQ ID NO: 304326 - DNA, 1581 bp, Cannabis indica
aatttcttaaaattttgcaagatttcttaaataaccataatttacatgaccataaaaaaaaaaaattgactaaaaattatttcagatactaaaacagatagagatgtatcgatataccccttttaagagggtgcattatagaatttcccaataataattataagaatgtatatcaggtgagttttattgaatttgggattttgagtttgtgtgtatagaattagtaatcaaaacctgctcgtttgtgtgaccgagttttcgagtttcgggtgcagatgtttgtcagattcaagttgaactgggtccaagttgggctgaccttttttttttaatattattttttatacattttttcataaaaaaaacacaaagaatgaatgaaaagaaagaaaataaaagaagaagaaaagaaaaatgatatatcattatttagatatttttttttttaagtttatgtttttagaacatgtataattttgttaaagaatatatatacatatatacgtttcgggtggtttcgagtattctattttttttttatttagaaataatgaaactcgaactcggcctaatagttaaccgagtgtaacctgaacctgacttttaatttttgaaactcgattattttgggtttttcgggtttcaagtcgggtgggtggttttcgagtccaaatgttcaaccctaaataattatataagaccattgatcattcatgaaacactaactcgtgatggtattagactattcatacaatccgcaatcagtagttttaaacctcaactaatctaaactaaaccatttgaaatcgaaccaagtgaatttaatgttaatagatggtcaatttgaactgttcataagtctttagtttgatcacaattttaggatgtttttatagtagtttatatgcataatatgtttttttatatattgaatattaatatttggtaagagtgttaggtatagtattatctattttaaatatcttatttttattgttatttatatattattaaatttaatgtgtaaaagaatatagtaaaacaaattaaaataattacgaaatacaaattataattttaaattaaactaatctctttttaagtagattcgtttgaatatttaattagtataattcggttttaaattttaaaaaatttgtattacttgcttagtaaaaaaaaaaaaattcaaatcacaccaattgattattaattttgacaaaaattatcctaattgatcctaaaatactaaccttaaatatacatctgtttaattacacgtaggaccctatatgtagtgattcaaagtcaataactcattgtgtattatttatttcaaccggccctagaaatagaagtatattatatatttcaataaaaataaaaatgtcaatgagaattgaaaaccaaaatataatttctttagctaatattagaccacctagagtctataataattgataattgtgtttccattgcaggcctatgtatccaacctgactccatgttttatggattgagcattgtggtgtctttctagccaggggcggactcacattgtagcgaggggggcagtcgccc

SEQ ID NO: 304327 - DNA, 1547 bp, Cannabis indica
acaaagtgtatgcaataattatagccattagataaaatagtatgcgagggaccccacaagtcagacacatgaagaagctgaaatggttcaatatactcaattaaggatgcttttattattaatatctacattataactatcgagaaccaattgaattatccgcagagaagaatgccctaaataattgtgcaaaatgaaaatatcataaaaatctttaacactacaatttgaggaagtgtttgcttcaactttagtaacaaattgtgtactgatcagagttttgagatgaagagacagatgaaggataagaaggagtgttggactttgatgataggaactggagttgagatgcatcaaaataaaataggccattttgatgtgttcccaacaacagagtacaaagggtctcactatccttatcgaaacataaatcaacatgaaattcaaagaaaacattattatgtttggaaaattttggaaaattcaagagatttttagtaatagcaagggcatgtaatacactattgagtaagattgatttgaaagatgacaattatagaccatgcttaattgacaaacctgtgccattatcaacgaacatctttatggggccatcatactaaaaaccatgagagagattaattagatgcatctagggtacagtgattggttgctccaaaatatagataccaattggtatcactttcaactactataatagtaaattagcctacacatgactattagaattagttataattagtgaggtcctgtagaactcttttcaaagtgatagaagtagccttgtgaagtgcgaccaatttgaaaacacaattggcattgagctttattggctagattagtgaatctaactccccttctgaaacctcccaaacatgaaggtatttctctaccttgagattcactcaatccaccaaaatagtaactcgagttagtgttgactccatgagaaaagcttcctcgatagcatcctctattattagctagtaggttaactcagcgttaccaaagttgtggtattgaggagtatgttgaattgcaaaaacaactagttttgtttgaaactctagttaaggctcgcaagattggcctcaggatgatcgatcttagtggaagcgccacatgagcactgagattaatctctttcttagtcttctcaattttggactcaaatgctataagagcatcgatctttttcatagtataactttcaattcttatgttggtggagatgaaaaacgtgccatattcacttgaaaggcctttaaataaggcaacaatgtgattttgagcacttagagcctaaccaatagatacaagatgatcaatcatatgttttcccttcaacaagtactcagaaaaggaaagagagccttttgttaggtttcgaagcttcttgcaaaacttcaagatttttgttgaaacttgaagtgtaaattatgttgggttttatgccctaaataaaaactcatttcaatataattagatttacttattaatatagatcagaaataacatttaatgtt

SEQ ID NO: 304328 - DNA, 1375 bp, Cannabis indica
tatttttcaaaaattgtaaaaatatataactctgaggagcttaaattttctaacaacttttttttaatataaccaacttaagacaattcctaacacgaacagatacagaaaatattgacagttttgtcataaacacattgagatcaaattattattaaattttattttaacaaaaaatcagttgagggtcatatttgtactattttgaaaaatacagtgtctattttgtcattttacaaaacagagagtccaattagtaacttttacaaaacacagaatccaaaatagtatttaccttaaaaaacacaacaatattcaaattgcaaacttttactttttcttggtcaaagattatagatgttaataacaatgaaaattagaaacaaacaaatttttccttttccatatacccaataacaatcaagattcaagagtagtggagtaataacatcaaaacataaataatccccattgtcaccaaataaacatagttaaaaactagctaggataactaattaattaagaatagtagttcccaaatttaatttacagcaaatacaaataagtaattagctaggtataaccttgcttgtattttctaaagagatcttcagtcttggcattcctaaaagcacaacagccaataagataaacagaaatcaaagcaatcaaagtaatgagaagaataatatcagctcttctccactctttcctaatgttggcaagtaaaccagctttgcaagaatcacaattgtaacaaagctgtgtttggtcattgttccaagcaaggcaatccatatctgctgcgttgtttattgggcttatccaatatgttgggttcacaaatgtgtatccacattgggttggtggcttacaacatcccgactataataataataatcataattaattaaaaaatttaataataaaagaaattaaagaagaaaataatctagctataagaatcttatgtgtgttgttattattcgttgcttttacactaattataattatataatcatgcatggctttagatgtaggttattgattagctaatgacttacttattctttgaaaaatgaaatagaatgtataataagatagctcagcaattgctaagcttgttattcaccattttactttaactcctacattacattattactataatattgtccgatttaaatttaaattgcatgattttattttttggtcactttctcaaaatatcttatactaattgagttggtggagcaaatatattgaatgcaactcttacttattttttcaatatgtaaacttgagttgatacccaagtaattatatataaaaaaataaataaaaaaataaataatttttttttcttctttttgaa

SEQ ID NO: 304329 - DNA, 1511 bp, Cannabis indica
tttgagtttctaaagtagttgcagcgctagttgcaataagggtttctgtacgagtttttttgttgcaatttaggttgcagcgctagttgctatatgagtttctatgtaaaattctgtacaaaatactaaaaaaaaaaaaaaaactgttttgaagtgtaaaaataaaaaaaatcctcgtttttttttttcccgcaaagtgtgacaaatagcaattcaaaaatatataatatatccattttcactcaacctcataaattaaataaatgggaaatatatgtttgaatatagtgtagtgtagactttgcttttcctaaaagatttgattggggttgcaagcaaactcacacatctcaaacttagtaaaagaaaaatccaaaatcaataaagagaagaaaagaaaaagaggatgtgccctatctataatgccattcaaattgtttggtagagtggagagtgaattaatagtaggaaagaggtatagtataaattaggtttcttaataaaaagtagctcaacaaatatttacccatgttttcgtgcacagagttacaaatatatacagccaaatttattggtggcttacaccaaattcctcatacacttcttatgacttgtggaaataaataatggtcaagctctttctattacatgaaatcacaaacttaaaccattcaagtcaatattagttttatatttatggaaccatctaaatcggcaaaaaattcaggctttccttactgttttatataataatgagttagaaatgcttcatcacaattcacaattgatgacataaatatatatatatatatatatatatatataaataacactaaaaaaaacagtaaaagtaattactttagataatgattaaaggttttgcaaactgaaaaaggtaaaatagaaggtcttgacatttgacttcactacaatggaaatacttttggcttttggcttttttggctgtgacatggtttcatgccttgcctttttccagaggaataattgtgataaatctattcaacccatcaaatccaacaatctctaataatcattaaatggttctttacttcttttatttttattttcacatttatataatttggactggttcattaaatgggtcatttaataaggcaaagcaaagacagcaagctaagctaatgcagtcattttgagatgtagaaataataaaatattgttaaattgtccaaattaaataaaataaaaggtgtggcagtgcatgaattaatgtgcatttatgttacttctcaagagatgcttattgctcacttgctcatctatttgtctcccactcaggtcgctcaaggctgattctaatgacaaaatttaaatttactcttaaatcaaatattaaaagagtactatttagcactaatatttacttaataaataatttatttaatttttaaaaagtggaaataaattaaaacttttatttgcaccccatgaaataataaatacactttattattaaaaaaaaatataaa

SEQ ID NO: 304330 - DNA, 2272 bp, Cannabis indica
ttttgttagaggtatttttttaaatcattaaaaatgaaattttcctttttgcaaaacatgtaatctgagagagtcaattcagccaattcctttgcatcaaatctacactattttggctttggatttcaattcaacaaaatatacaacagaattttgaattgagggcaacctatctatttgcaggtgttacaacaataatagctactgaaatcttcaaaaaaggtcttcatttatttttcctttgttacttaaatatttagagctggacacactgacatactactctgcaacctcacctttctcaagctctcatggcacgaggcgaagaactcatgcctaagagcttcttctgcagtgatcctcagccttggatttacagtcaagcatttatcaacaagatcaaatagtgatgttggtatagtctcgaaaaaatcaggtctccttgtgtaggccctgcaccaactacggatttccatagagtccaagaattggacctctaataactcctgagacataaggcaaattaagttaattgaaaaagattggctataacaattttgtttttgatcaaatgtaatcataatgagagtggaattttagtaaaataataccgatggaaatgatgattcacggtcatgaagcttagcaacttcccacaaatcttcactgccttttaactttgcaatgtctttcatgttcctgccatgattgtgatcgagagttagtgaaaggaaatatacaatattgagacaactgagaatcaaccacatttgaactagaccagggatttttaactgttcagggtctccggtaaaaggtgatcttcccatcattaggtaaagtagggtaactccagctgaccaaacatcaatctttgaaccttgatgcagtgaccttagtaagacctgtaataaaaaagaaattaaatataagtcataggactagctgcattgagtgtcaagagaaaattaatctcacctctggagcacgaaatcctttggttccaacacatgaaccttccttttttcgcttcccttctcctacaaaacaacataataaatcatcagaaggcaaaagaatgatagaaaatgctatgactgtcttagctacacacacctttgcctttgagtaatgcagcatcaacaacaggtacaccattagaatacaaaggcattgggctcgtgtagaaattctttctttccatcttgcatgaaggagcagcaattctcttcctttgagaaacggaggtctttagatcatcatcattatttggacttctcatcacattctgcacaaggctaagtaactcctttcttcctaaggatggaagaggctccctcgtcctttctgctgaaggagtcctagcgcccgctgcatcttttgcagaggttatacctgagccatctgcaccttggcttttaagtttattaaaattactcaaatcagtaagagccttcctctttacgctattcttatgttcgtgacttggctttaaatctactgtgcctccttgattaacagcaaaacgatcaactctcacagccttattatctttggtcgactgagcagctaccggggaagagagaggagcatgaacaaaagatgcataactgcttggttttggtttacctatatacacgtattggtttgcaaatcaataagtttaatttaaaatactagccataggtagatcaaacgaatgcatcataaaggttgacacttacttccaacactcagcctttgctgtaaatcctgttatgtaaaatgaaaaatcatagacagaagaatgtttttcatcaaaatattgttatgtaaactgaagacttaaaaaaatatatttaaaggactaaagcactagcaaaccagataagcatcctaaccatggaaaggttgaaatcaataaggtaccccttatttagcttccgagagaaaagaaaattgccaggtttaatatctctgtgaaccactccctgcaatggtacattaagaacgtgaaatttaaggtttcttcatttattttttctagaaatatgagtatgagttgatgatcttggtaacatcttacctgcttatgcaagcacgcaagggccctgaacatgcaataaccataccactgaagctgaaatagatctatttctcttttcaaaatctaaataatgaaaaagatacaagattagttagagatataaaagggttaatatgtgtttagtatgagaagagtgtgggtgtgtggtgaaaaagaaaaagggtttgctttcataagctcctcttc

SEQ ID NO: 304331 - DNA, 2505 bp, Cannabis indica
ttttcttttcctttttgttacccttcacgaggagtgtaggctttatgagttatcttgacccatttcgaggtcagtactcacaacaatgagggagtgttagttcattgagctttctcaagctccccttttagttttcatcattttgctgagagggagccctttgccacctggcctttctcgacctcttcacttgtgtaacatttccattgagggagtaccaactcatagagtagtcttaacctcctctcaattacttatcttatttgagggagctttttgacactttggttccttttttttgtaacctcttttatggtgtaaccactttgttgagtgagtattagctctgagagcattcttgtcctcttaatggttactctttggatataagggagcttgtggccccttaggttgcgccgacctttttctagatttaaattgtattgggggagaatgtggccacttagggtacactctgccccttacattgtatctgtggcacttaaaacccaatttatttgttagagaacccatacttcttttagtgagtcatccctctcagagtcgtattcgattcctttttcattttaatattttaagggagatgatggttctgtgaactggctcaacctttagctttcaatttttatatatttttaaagaggatgatggttctgtgaactgactcaactttttgttttcaattttaaggaagatgatggttttgtgaactcactcaacctttttttttcaagttttacggaagatgatggttctgtgaaccgactcgacctcttgctaatttttgtctgtttctctgcgcatgctttaggactaattttaaggagcatcccgctcgttattatgagtgctctttcttgtggaactatcttttagctttaacttttttcttggactgttaggggggtcaatttctgtattcctaagagttaacttgtcattgccaagaacaatatcttagatggtggaacttcattttgaggagcatctttgatgtttgatttttacgggccgtaggttggaggattcaattgaatgtgttgacttatgagcgtcgagtgtagcatctaatagaccctttatagatctggtgagcttcctgaagaacattcactggtgtcttctcttaagactctatttctttcctctacaaggatgtatttctctactctttcgtaaaagtcatctaagccatccaactctcttttcaacatattcttccacaatccactcctagagtgtaccccagcagctatggtgaactcgagtttatctttaaatatttttcctactttagtaacttcagtgttaaagtgctggatgtagcttcagaaactttcttgtcccccctatttcacattggttacacttgtgatatgcataatgttattgcatgtagcctaatgatgttagaagaatttgtctgaaatttatagccaagaggtaatagacccatgtgccaactatttgaaccacttatatgctgcacctctttgtgtcacaacaaagcactagcaccttgctttgctcgtgaccctcttcatcttcattattttgttaaaagcatccaggtggtactttaggtcagttatgcctttttaaggaaacaggttgggttcttcaaagtttatgggtagaggttgcacttgaatctgccttgagaatggggattcttcatcgaagtcgtcctcatcccagttacaatctttagatgcaactgatgctatcctttgtcaaagatcctttatctcctcatctgactccttcctcattttagttagcttctcccgtagggttcgtgttggttggctttgtttttgttttgttttgttttaaagtgaatctactaagagtgtccgcttctcggccgttgtcttcttgcagagcttttttctcaagttaccttggacaattttggactcgatattttaggatcgtgatgagggctccaaattttttctggttgaagctttttgcagggaggatttaggggtgttatttgtcgagtactttgatgctcccccaactcccagcccacttgctccgctttttcctacttctggtcctctttgccttattattggtgcctcagaacaacctctcaagagctcctctaatgccctatgcatgtatgtcaccgtttcttctagctgcacattgcttatccttagctcattcatctcattgtgtagctgagtctgagagctgtaactcaccgagtagacttgcatttcctttcccgatcagtggtgtgagattttctcccaatctcagtggttgtggtggccttatcgaagatgggttcctcgacctttgcaccacacctccttcctctagggtgatgtaggcagtcgctccatcttgttggttgtttgctggattgtcctcaggtcgcctattctcttctttcgccgagggtacatgtgttgggtttgatgccctaaataaaaatccatttcaatgtaatctctattatttaaatat

SEQ ID NO: 304332 - DNA, 1275 bp, Cannabis indica
aaaatagactgtttgaacattgttttctatattgtaaattatttcgaattttttaaaattttgtaggatatcttaaatagatataacgtacataaatataaaaaaaaaaatagactaaaaaattcttctaaatgctgaaacaagttaagggtacataagtacatccattttaagggggtgcattgtagaatcaccctaaattatatatataaatttttctgaaattattaagaaactacgtagaacaatgtcatataaaaaaacgtttaaaattaagactatctgaatatcaaaaacacaagagtgtgcatcggtttagagtacttacaaacttgttattgaaacaaaacaaggctttctgaaacatttctgttggattattattgtcttctgccttacatattcctgttttgaatccaacccaattattattcaaacataagaaaatagaatgactatataataagatacacatacttataaagtagggacattatttattggtttaacctgaaaagaagaagattatgatgataagaagagtgaaagcaaggagtttgtgttttggtaaggtaaagagagccataacaataactatggggtgaaaaacttgagatctgtaaaagggttttttatgaactgatttcatttgtcaggacattggttttaatataagaatactatgttgtttttttctttgctaagacctattagtgcatgagaataaaaggttcatagtcattttgggtaaagtgagaaattaagagaggttagggttggtgggttaagcttagttttattagcaacaaggagttggggacaaagggactgaaaggagccaagttggtgtccaaacttcctactttcaagtacttgttctgatattatttgtcattttgagtgtttgaactgagtactaaaggtttatattatttattattattattagttttgtttaacaaaaaaggaaaaaagtgaatttatggatggatagatggaatttattaatgttatgtggtaaagatagaatgtgggtagaaaatgccaaagtttttgttagaatattgataagggcagaggagccataaatgaagaaaagccaaagaaaatgtgagagggagagaatcagttaagattcatggaaaatgaaattgtgagtttgatgatgatgggtttgatttttgaagtatattaaaatgggaaatttgattttctatacttagaaaatcaaaaaatttgatttctaaaccaataatttaaaccctaaaaaaacta

SEQ ID NO: 304333 - DNA, 5013 bp, Cannabis indica
attaatgcttaaaagggaaaaaaatagttaggaacactcttgtgaagaatcaatacattaccatgttatcaagatgagagactgagcttgactgagctagacgcttgatttcttcaatgtcaccttccctgtaggcagaaagcagtctgctagaaaaccggccttgatcgcttcctaaaaatgcatcaatccttgtaaagagacaaaactagatggtcagaacataaattaatttcttgaaggagaagtttattagttttattgttctctggaagcactggaaattggttcattctgatctatctaatcggcaaccttgtttaacaagtaaaggatatagtgaaaacttcaaataatgcataaataagcaacaaaaaggcatttatttaggcaaccgtatgacagttcacaatacacttcaacttattgtacagcacagaaattagactttagacacctatcataacaaaaggtaagcaaacgttctactagagttgcaggaaaagattgagagttgtcactgagaacaatgaacaataagatttcaaagccttctggagcgagtgattgaaacagcaaagatctcttacagcccctaatcattcctaggtataatatactgtggcatataaaaatttcgaaggtgccaaagaatgtgattcccaataaaaagtccgtgaaaacaaatgatgcttatttcagcacaccccaggggtggaaaaaataagtaagtcagaattaacaataacaatcacatgatcagtcaaaccattttagaattcttctcgaaccatcacacggattctgatccaattgcccatgatatggggttttaatatgtttaggcaaaaaaaagttcaagccagataatatttttcttgttagaaaaatttaaatgctggaatttctacggtaaaaagtcaatatatatatataaatatatatattattttctttatatatggtaaacgtaaaaacagtacaagtctctaaggtctgtgtcttcatctttcaaagtaataaaagaaaattaagaaaaaaaaaagtcaaaataataatcacaggagtttacttgagattgggaaaacttatacttactgtgaacagtcattgaagcacttctctgcttgcttgaaatcatgagcataaagatacacaataattgcactaagatacgcctgtttggaaaaggttgtcaagaattaaataattacaaaaaaaattgaaagtaaaataaatataaaaatacaaagaaagctttacagatttaatacaaggaaaagtgaaaaaaaaaaatgtgtgttacagaatgatgttacttgggctagttgctgaacaacaaaagcagtaaacaccacaaattatgggatgccaaatctcagttgagagcataatgattttaaaagctacctgagttgtgccttgaggcatgcctcaaggcgagttgaaaggtacaaactttaaaagttacactttcttaagtgcgagtcaaaggcttaagtctagttgtgtgaggttaagcctatgatgcctaacctcacagttatgatgttttataccctaatcaggctccttagtttggtttttatgactcaactttctcttctgtgtgattggattaaattaaataattctcgaagcaaataaactctagaagacaagataaccagaaatgaaatgaaaaaacaatcatcctgcatttctctccccgtgcttttcactctctggaaatattcttccaacagctagcagcattctccccctcttcattgcctctctttttgttctttctactcctccattttcactcagcagcagacagcctccttcatattcatcttcactcagtcaatacccgagagcttgaagctgcagtgagcagagcggctaccgtccttttctttttatatattatgagagtttgatagtaaagatatttcttacataaattgtaattattgcatgtaaagtaataaatgtgtggggaggttggatagtcttggaggggcgtaaaatgttgtactcaagagtatcaaagaatttaaacaatttatgtctgactatattaagcctgtagctcataaaagataacatgagatggtggactatcgttcttattttgggagagtagcactggtagtggcgctccatttgagggcatgagttattcttgcgcggggggtaatggaccaagcggtctttcctctaggagacctaaacgatctatagataagaacaccaaaagtagataaaatagatgttgcccaaaattttggtctagtaaatacacaataactctaaaaacaagtttgctgatgctgggagattaatttgaaagtatatttcagcatgaaacatttcgttgggaattatagccaaagagtgaaaatttctatgtatgagacacatgcagggacattgaatgaagaagaagagactataaaacagattgtaaatgatctgaaagcaacatggaaaatgactagagtttgattattatcaaacagttggacagacaaaatattagaagcttgatccatttcatccctaacaatcctagtggaattatctttctaaatattgttgatgcctttattatttaaagatgcccaattattgttccaaatggcatgacaaagctgttgaagtaggagaaaaccttgttgttgaagtgattgctaataaagcaggtgcatacaaggcagcaggaaatttgtggtcatgatattaatttaatgcttgccaaaattgctctgacaaaagcaaagagtgaccaattttatcaacaaccttggatgggtgatgagcttagtgaaaaaatttgtaacgaaagatcttatttgatcagctgccacatgatttgttaactatttcttttagacaacagtattattttaagcaacatatgcaaaatgatatttgtttctaaaatatagtcagattgtacatgggccaaaatgcataaagaaaggcattgaagaaagtaactatgaatgatcaactaaaattggccctaatatggtttgtactattaaaatttaaaactacaaagttaattctgagaaggtacgtacaatgagattaacttattgagttatggatgacgcaaaataaaacatcacaaattacttatatttgtgtgttgcgaggaccatgctaatcttttccgtatagttccaattttattggatgtcctcaaaagggacaatatcacaaataacttagatgaagaagatttcttctaatatgagaaatttgggatatttccgaccaacagtgaaatttaatttgcatattactcaaattcatgattcataatggaaaccagcgatcgagtatagtttatataaacacattgattaatcaagggccgaaaaacatatgcaagaaccaataaacaaattgatgggtattaaaacaagcaaagattatttgttgtcaaagcagcttcagaatcgtacacttcatgtgcacctgataaataaacattttttgtgtctttaactttgtagataataattgctagtaacttttaatttcttttcatggttacatagttaagtggagagattcttttcaggatgaaattatagaactaaaaacatttgcaatgagagtcacatgtcttacatgcttagcatctgcgtttggacatagatcccataacgatagatacaataaatgcattgatctacattatgtaaaacaaaagggaaaacaaagatatttgaggacacagtcatgcaaggaagaaggtgatcctttgcttgttgaaaatgtgtcatttgagaaagagcgagtgacaaacccaaaaatgatgaagaagaaaaatgcttagcaatttatgtcaaaaacattgacattggggaggcaggtagaaattcaatagtgccaatgaaacagaaaaaaagtcatgacttttgagaattttgtcattaatgtggaggcagagtccaccttcaagtttataccttaatactcctcacaaggccagcacacctcagttgccaagactaattggtttgaaattaagtgtcacttgcacatttgtaacataattattcaatttctctcaacgtttttgttattactattatatttttcattttcttttttttttattattaggtcaatattcttttttacaattagaattgtaccaacacaaaccatttttgttttaggaaatggactttacagtagttgatgaaccaggtgaaagggctagcatagaaatataggcattggaccttaaagaggtcaattaacagtaaagattaattctaaaaatcacaactagaagaaagctcaatcactaactaatacgaagaaaattaaattgcaggaaaataaagcgttatcacctcctatgcttatgacattaatgtaagtgcatatcaagtgtttatcttagtttctttcaatgtctcctccatgttataactaattcctcttttcacttgctactgctagtaacatttagtcacttgattttcctattttctcatatattccttaagattatcactgagcatttgaaatctaaagaataccttcatcataggtttatgacgttaacggattaacctaacaaatcctattaaactattttgcactctctggtcagtttcttcttctctaagattagcttgatcctacatattccaagtaaaacaaagcatatggttcttttaagtacagcatggtagaaataattctaccaatcaattgagaaaaagaagaaagaagcactggagtaactcttgcttagcagaagtggatatgaaatgaaggatgccatcttcttttctaaaaattaaagatgttccatagatgtgatatttctcaaaaataataaaagggaacagagaaacttcaccttgcattggctattagtagcattgcatttatcagcagctaaacccaatcgcaacaggaaagctgcagcatctgtgtacctgtcaaataaagtaataaatacacttaaacgaaaaaaaaaaaaaacgataaaaa

SEQ ID NO: 304334 - DNA, 3234 bp, Cannabis indica
actagcccgacgcacagatggcatgccacaaacagagagcaacggtaccaacgaggtcagaacgacactggaggctcaagggacactgatcgggacaaatgaagcaattccactttcggagcagacagaaggggagggaaaggttcatgatttggatcctagccatttcgagaagggtagtgtgagtataacagggaatatacaagaagaggatagacaaccctcctaccttggtagcaatatggcccaccctcgaagcccagctcaaccacaatacaattcaatactgggaacccaagcccaactagtgaactggcccacttcgaattgttgggctgacccaaaagctagagagttaatgatgggctcactcacggttgataagtattatagagagccaacattactcaatccaatcttggacatagaagacttcagggtccaagagcatctccaaggcccaaggaaaaggaaagcttcagatggtttgatcttcaccccgtccaaaacgtctgcaacgtccaacgacttcgtgaagctggttgaatcaatcgaaaatgcccaggaaaattcacggcaacaaccaaacaatgaaagcaatacatctcagatggaatcagaaacccaaaatgctaaacctctaccctcgcgattttctcctgggactcggctagaacaaggcacgagtaggtagaggacggaggattgctatgagaacccctgaggatattaatgaatccagcaccccaaagaggagagggagaccaccgaagaacaaagcgaagcttgcagcaacgccaaaatctttcaaaggaaagaaacaatcgaagtctagagcggggaaacgatcatcaatactaagccaatgggaaggtagttcttttgatctaactgtgaatcttgataatcactttgtagtaattgaaaaaaatgcaaggcctactacaagttgtatcatcaccgaaatcacagacaccacaacgaaccaagttgaagatgacagcaagcagaaggatttttgtttcggggctatggagacttgcccaaaaaagtctccacagtcgccatgaaaatactatcttggaactgtcgtggactcgggaactccacgacggttcgccaattgacggcactagtccgtcaacacaaccccgaggtggtcattttgtctgaagttcgactaccaagcacaaagttctccagagtttgtaccaggatgaaattcgaaggatcgcactatgtcccacctattggaagggcagggggtcttggattatgttggatgaaaggagtcaattgcaatatacaattcgcaagccgcttcttaatcattggtgaaatctcttcggatcctcctggctgcgtttggaaactttttggcacatatggaccaccacatggaaatgacaaagaacagttctggaatcaaatgggggaattagctctgaatgcgaataccccaatcctactttgtggggatatgaatggaacattgaaggactcggaatgttttcactatgttcgacgaagtaacccatctagatatgcattcgactttcgtcgaatggttcaaagagtgggattgatcgatctcggatacttggggcctgctttcacatgggttaaaggtgggaatggcagccaatcaggaggagcggtgaaacgggcaaggcttgatcatgggttggcttcaccggaatggcgaatcctcttccccaatgcaatcattaaccacctttcggcttctggatcggaccacagacctctattacttgataccacagctggtgtaaactgtagaagacgctctttcaagtatgagaacatgtggatgagagacccaaggtgttgctgggtggttaaagaagcctgggctagtcaatgccaccacaatccaatgatcaatttcaacaggaaattaaaagcaacacgtgtaaaactcaagacgtggaatacacaccaattcagggaagtcaaaaaacaagttcaagatgcaactgagattctgaaaaaaactgaaatggagaatccattgaatggtcatgcggtcgaagaagccaaaatgcaacttaatgaagccctccttagagaagaaatacactggaaacaaaagtcaagggtgcaatggttacaagagggagacatgtgctctaaattcttcatgtcctcaaccgtagttcgccgtcgaagaaactatattcaatgcatcaaagactcacgggatggcgtctggataagagaccaaagtcgaatagccaactgctttcttgacaaatttagagaaagcttcaaaaatccaacaaaccgtacatcaccaattcctactgacttattccaacaagtagttacttcaggggagagatatagcatgtgctctattccttctacaactgagatggaagaggcgatttcggaaatggggaatgataaagccccgggtccagacggattcccaccaagtttttatcaccaccattggaacacggtgcaacctgaccttttccaactgatcacccacttttttaaacacaatgaattgccaagttacataaatgacacttctatcgtcctcatccccaagaaggactcaccttcccttgtcacggattatcgcccaatcgcgctgtgcaacacaacttacaagattatatcaaagattattgcctcccgattacgcccgttcctccaaagaatcatctcgcctaatcaagcggcctttgttaaaggtcgacacatcgcggagaacacaatgattgcacgagaaatcattcattccatgaagaagaggaaagggaaagggggatacatgctcattaaaatcgatttggaaaaggcctacgataagatgagttgggagtttgtcattcacgttcttggtatgatgggattcccaagcatgttcattgactggataaagaagtgtatctcggtctcaacaatcaaagtgttgctcaatggatccattgtgggaaaagttctctccagagcgaaggttttaagacagggagacccgctctccccatcgttattcatacttgcagctgaaaccttatcaaggctactcctttcaaaagagaggctgggttgctaaaaggattcaaactttcgagaagaggatcggaagatatcagagaagattgtgtgcaagtaggttgtgagtggggtgaaaatgtagccatatcagtggaaagagtgaggagatggatgggtggacgtagagtgagggaagtgggt

SEQ ID NO: 304335 - DNA, 2173 bp, Cannabis indica
gaggtcaaggccaaggctggagtccaagcaagatcgagtccgtgtctcggtcaaggatcctggctgagtcaaggttacatgtctgatctggctccaataaaggttcaagtcctaggtccaaatcatcatattattattattattttagttaaagaaaaatctaaaatcagattaaaaaacattagtcaaagcgtcttatattttgagtctataaactgaaaacaatgccaaacactccactccctacttttctttaatttgagaggcatgacatcacccttctataaattagccatacacaacattaaagagtgtcgtcgtcctcttataaattagccatatatgataaaatcatacaaaaatacaaaatgagacgaattctattttttcagcaacttttacacacacaaaatatacattacatgtttacaaatttaataaaattcaataattcaatagtataattatatttacttactttaaatataaactgcgactctttttaatataatttttccttgaaaagaaataccgacatgtgatgttattaatgagatgatagattatcaaaaggtgcatttactatatttatatgtatcaaaattctggatttgttatcatgagattgccaacgggcctcaagaaattaaatatgtaagatttcaacaaaattgggtatgagatatatacaatgaataaataatatacatgataacttgaaaagaatgataataatcaggctaagtcaaaaatgaagaacctacagcatgtgtagacaagctatcatgaggccgactcatagggtaagagatgcaatctcagtctcaccacgcaccaatcgaacatttttagccgaactgagtgagtttactccttcgaatactgcattaactcaaaccactgcaaccatcgaccacaaaaacatttcagactatataccccaaaaatttggaacaaaatcaaatgtaactaaattgagaaatatattacctgtcttaataagtcagcaagtgttctggggagtgcctcatattcttagacaatatagtaagggaaaggaaaagaaatccatgtacttgggataaggcggtccatctttccaagatattatttcctgaaatcccagaaaacaaactttaataatagaatcccttttgcattaatataatttttttttaagaaaaaataggaaaattctttagaaatacatgtatatgaagcacgtatcttatttagtctattcatcactaatataattctcaagtctttgactaatggttaactaggagcaaaggtaattaccgggatatccataatagagtcttgtggactatcgagtatcaaaaatgcaaccatacgcttcctactcaaaaaatgcctgacctggcgccgcagtttctcctacagatattaatttgataaacaatcagacaaagcaacaaacaaaaagatttgaacagttggagaaggaaagcatcagtaaagcaaaataccttctcagttaaccgtccatctgcaataattaaaacaagctgctgtagtggattctgaccagatgggagtcttgctttaacaactgctgaatccagttttttatgtaaatacgtcaacagatcaagcactggctgatcagcaattgtattttcttgcttgaatgtgaaattggagacaatctgagatatacaacaaagacgacgataaactaacatacacacctttgaaaaccagaaagcagtaaaaattggtaaaaagcaaatggaaattttgagtttaaagcaatttatgctcaccttgaccccagcctctccagtaaagggctgaccgaaatcatgaagtaacctgatattacccttctttccgaaacttgctacagctagatcccccatttccagttgagacatggcacggcatactgcaaccaaagcttcaagggcaacattcccacaacaattctcagacatgctacgggaatcatctactgcaatgacaacttgatagtcacgcttgtttggccgagtccttctgagccatattttatccctccgaaaatgacttgctatatatggaataacctgctcataaaaaagcattaaatatttaataactagggcatagcaaaaaaaaggtacaaaagtctgtaaagttcagtatgtttaccttcttcatgtttatc

SEQ ID NO: 304336 - DNA, 3900 bp, Cannabis indica
aattatttactgattctaatatcttttttgtgtctaatatttgggaatatatgttcttattgaagcaattggaagttggttttctgccaatagaacccaattgctttgtttttgttataatgaaattatcaccatgaaaggattcaatttactgttataataaaagatattatatcacatttattgctgatactgttgctttgtttttcatcagattttttggatattcagttaccacttatcaaattaggtctgcatttgattgataatgatccaaagtaagtatgcctcaactcataatgttctcttccttatacaataattttatttatttgttacagaaaattttggactattttaaatcagttcagttaagttttgtaaaatgtgtaattttgggcaaaacatgtataacaaacttgtgtttcttatgtcaaggggcaagacatatgtggttcttgttgccactggaagtttcaatcctcctacatatatgcatttacgcctctttggttagtttttatataaaattacgtgttaatggtgaagtttgatatttgatacatcgtgctttcaatgtaaaatgttcaatatttctctcttcggatgataattaggaagttggtaagaaatggttaaagtttattttaattttagaattgttcaaaaaaccgacgagattgagaaatcaaggaagaaaggatgaacacaaatgcctcttatcttgtaacttgattgtatgctaccttggtagaaaggggatttaatgtatatttattaaatctgtgtttttatgcatagaactagcaagagatgcactgaattcggaaggattttgtgttattggaggttatatgtcacctgttaatgatgcatacaacaaaagggtatgtggcatatacaccatgtttcctttttgcattacgctttctcaatatgcacattacgttaactcatttcggttttcttctttcttaactatgtacattgtggccacaaatgaacatgatctaacaaagtactcaccttgatgatgtagggccttatatctgcagagcatcgaatacagttgtgtgaactcgcctgcaaaagttctgactttgtcatggtagattcatgggaggtaatgtgctcttcactctctcttttcgaggttacatgctattatgtttttctaactcatgataagaattttcatgcaggcgaaacaaagttcctatcaacgaactttaaccgttttatctagagtcaaaagtgggttctctatgttgcagttgaatcccaaaggtaagaaacacaaatgaaaactactttaggctttagtttccgaaatcctcaatccgaacattgtattcatgttatggttataacttgtatttactattcctttgttagaatcccttaaggttatgattgtttgcggttctgatctactccaatcttttgccactcccggggtttggatacccgagcaggtacttatacaaaaattaatatatgaaactagagttcaatggatttaaagactcaccctttatgcatttcttttgtcaggttcgggccatatgtagcgagtacggtgtggtttgcattcgtagagagggacaagatgttgagaaaattatctcagataatcaaattttgaaggagaacagggtaaaaactatgcctatttgccaccatatatttatatagtttttgaaactagattatgccaatcttaccaaaccagaaagaactcgaactatagatacaagccctgtcgtaaaaatttgatctttttattgtttaggttaaacttccttaggcttgagttgtcatgggtcagctagacattttccgagcaaaccacatgtctgaccatttgagtttctattctaaacattttaaccagaccaacttatgaaattatgaagtcaaagtctttctttctttgaagatttcagttctgtaatttgattttcaactattttgattttgaccaaataataatttctttcttcacaggggaacataaaaattgtggatgaagttataccaaaccaaataagttcatcaagactaaggtaaacaaaatctaatcacttgactaaaataagattttttttttctttcttctttctggtttttaaattaatatttgaccatattcaacttttgtattttattgcagggattgtatttcaagaggtttgtcaataaaatatttgactgaagataaagtgattgattacataaagaaaaataacctttacatcaactcatcttcctaattagaatccaataattttagtgtctatttatgaatgattttacatcattctattcaatgctgaatattctcatactgcaattattgtataattttttagatgaatatgaatatatgcatagttgttgaattcaaataaaacttttgaaatattcttttttttttttttttttatttttttttttttagaattagaaatattgtgaaagacatgaaatttacaagtgaacttaaataacacaacatatacaattataaaaataaaaaataagttacattcacaaaaattatcttatagcgaataaattatatacacataattcgataacagaaccattaatgattggtgaacctgaaaatccatttgtaatttctttagagaaatattgcttgaatgatttatttttctcgtaatttaaatactttatactaccaaataaattattggactagatttggatcgactcattcgaattatgccattttaaaataaaattaaattacttttgcatccttatattaataatccaaaataaatacacaagaaatcaaatctaaacacaaattaccccataaaaacaacaagaattttctctcaactttgagaaaactcacaaattaaacttacaagcaagaaaataaaactaaaaaacaaacaaacaaaacataaataaaacaccaataatcatgattaacccagttaattaactaatcaaattatgattaattaactttctcagtttatatatatatatcaaattccaataataccctccctccccttctttggtttttcatttatactgaccaaaaggatcatatccaccaccaccagaagacccagctccagacccaggtccagtatgacccgacccgtctctaaaatacccatgaatcgagttctcaaacatagctggtggataagggcccaactgatacccaggcccaccaggcccataaggcccaacatgaagatgatgactaggcccataatgatccatattagctgaagagtttcttttcacatacgccggttcagggcggagagaagaagatgacctatcagtttccgactcgcggtggcgcgtgagaaagagcgtgagaggctcaacgtaatcgtcaaaccctaatttcgccatagcccaaagcacgtcctcggcagtcaccgtcttccgctgctcgcgctggcaccggtcgttggcttcgccggtgatgaagcttatgtactccgacacgcactcttggatcgtctccttcgcgtcgtcggagatctttgcgtgcgacggaagaatccgacgcatgattctgatcacgttcgcgatcggcatgtactgatcttgctcgcgtattacgcacgtgttttgtacgcgttcatgacctcctccgcctccggtgaaagctccggcaccgttgttgtcggtgccggcgccgatgccattttcttcattggtgttatttgttaccactaagcctaagtctgaaaaatacaataatttatataataataataacaataaagaaaacaaaaatattatgtatttatatacttaaatttaatttttaaggataatatatttaaatataatttaagtcaattatttttagtttaattaaatttttatttttat

SEQ ID NO: 304337 - DNA, 1093 bp, Cannabis indica
gcttaagatcttacagttggacccaaaaccttcatttcaaaccccatctttagttggagtttcatgtgcttgatctcttgtatactcttgctggttatcagaatatcatctacgaacagcaattgatacaaaatattttcattttctctctcaaaaaatatatacaaggatcaaacttacttctcttcagacctatcgttgtcacataatcattatctcatgttccactatctcgcagattgtttcaaaccatacagagacttccgcaacaagcacactcagttttcctttcctagcctcttcaaatccttcaggctgtttcattagaattctttcatccagatgtccatacaaaaaagtagtcttcacatctaattgttctaatttgaggtcttgacattcaacaagtgccaacaaaattttaatcgatatgtgcttaataactggagaaaatacctcaattaaattaagcattcgatgactttactatcttccggcattggtattacatggttggcatcaagattaagcatggtccatgtgtttactatctcaattagatttatcttttattatatatgttgatgacatactcatagttggcaaatacaaatctaccataaaactatttaaagcaaaaacttagtaaagagtttgagaaagaccaaggtgcagctaaaaaaattctaggcattgagactataaaaaataggccacatacaatcattctaactcaggaaggcatctcaaaaaagtgattgagaagattgacatgaaagattctaaacctgtttctagacctcactccaaacagtcacaagaacaatctcccaaaatagaggctaagaaggttccctatgttagttgtgttggtagtctcatgtatgccatggtctgtacatgaccagacattactcactgtatgagtgtagcgaggaaatacattacaaatctaggagatcaccattagactgcactcaagtgcattatgagatatgtcaaagtaacaatgagcataagtttggtatatggaaatgaaatagatcaaaatgaagaagaagtgactaaatttgtagactctgactatgctgca

SEQ ID NO: 304338 - DNA, 1557 bp, Cannabis indica
tcttctaagcccactcgcatctgttctaggttgtaattcggtatttgtttgtcttcttcatgtttgggtgttcattctttggtgttctttcttttacctgttgatacgtgcaaagagttggagcggcttatggcgaagttttggtggaaatcgggttcctcacaaggttcgcgtattagttggatgagttgggatcgtatgtgtcggcataaacacaatggtggcttaggtttttgtaatttgagagactttaatttatctcttttagggaaaaaggttggaggcttcttgttcatgagacttctctggtgggaaagatatttaaggctaagtactttgcccaggggtcttttctctctgttgaactgggagacaatccgagttttgtatggcgtagcatttttgaagcaaaaaatttggttttggctggtgtaatgaggtctataggtacgggtgagtaggtgtctatcgtcggtgatccttggctcccaaacttggataatagctctgttatttccactcacccagccttggttaatgctactatcaattttttgttacaagtaaatagaagagaatgggatgaggagatcatcaatgatttatttgacgtaagagactggcagttattcgttcaattcagctaagtgactcagttttgagggattgttggacttggaagtttgatacgcatggagattacactgtccgaagtgcttataaacatttgcagctgcttaaaggtgtttggtcccaagataactcaactggtttttggagaaagctatggaatttaaaaatccctcctaaggttcgaaatttcctgtggagatcaacatcaagcattttgcctacttgttttaaattaaccaagcgtcatgtacctattagtgcaaactgccccttgtgttctgatcatgatgtaaccatttttcatgctttggttgattgttcttttgcccgagcaacttggagcaggtcgaaagtggacactgctattagacctgctacaataaatagcagaaatgacaactttttcaactggtttttgctgatgcagaacaagaataatgaagacgtgttggaggaagcgactatggtgtgttaggcgatatggaaagctagattgactttgtgtggaatcaaaaaagttggattattgccaacattgttgcttcagcaagaatctcccttgatcaatacaaatttgctcaacaaaggaagggtctttccttgtcgggttttttagaaaaaaaccaagatattgagcgttgggtgccacctgctatggatcagatcaaggtaaatgttgatggagctttgtttgagcaagagtttcgttttggtattggttatgttgcacgtgaccattgtaggcgtcttattgaggctttcaccattggtgaaccggagtgtgttcaaccggaagttgctgaaatcattggtattaaggaagctttgagttggatagctgaacattcgtggcaagatgtgctcatggagacagtgttgggttttatgccctaaataaaactctttacaatctgattagttatc

SEQ ID NO: 304339 - DNA, 1155 bp, Cannabis indica
ttttgcaagtagttgtaaacaaaacaagaagaaagttattttctaattttatcttaactagggtgtgttgtgaatgtgaatgtgaagcccaaaaaagaaagaaggattaaaagggcattgggtgccattgagggggacctctagtttgtcatagttactttactattccaatgttcattcatatatgatatcccaagctggagtagggtcaccaatcaatgattctttaaaaagttctttttactcttaatcacacacaaactcatttttatatgagagtattgttattgattattagtagtctccaacactttttataggtagtgtcttataattagttagcgatattctttaaaagttattttttaaattacagtagactttatatttaattactccaataacaagacgtcactgaaaagggtactagacactaataatacattttagcatttatatttttatattattatattcatttgagagtagacattgaactaaaaaataatacttaatcgaaaggtgccatatgacttgtaattttccaagtcttcatcagtggaccattcatgtttgcttatcacctcacaatttatgacatccaattgtcaatttgtatcttggaaataaactcaataaaacttcatcttaattatatattatttcctccccattaaattggaacatcacatttattcatattatatgtcacatttactttcttgtaaaaaagaaaccaattaatgtcatctttcaaaaagtgacatccttccaagtttaataaaaaatcgtcacttatagtaagaaaaaattgtaatcaaaagaaaaataacaagcctaaacccttaaaaaaaagtgaaatgagtaaaattatcataattactaacaaaataaattcattcactgcgttgagtaatcgaaaattgcgctcaagacttaacgaaagtattataaaataatgtaaaaaaatgttcatattgagaaaacatatatagaaaatgaaatgttaataaaagagagatgtctatggtcctacttattttgagctgtttttattagctagcaatgaacaatatatatatatatatatatatatatatataatggtgaccaccatattaataatacaatatgataagctgtgtccaacttaac

SEQ ID NO: 304340 - DNA, 945 bp, Cannabis indica
ggcataaaacccaacaagaacctctgaggaagactgatctgaccacttcactaaataaagtgaatcttgtcagcaaacctcaaaggaaaaagtgggcagccaatgctcgagggagtgaaaatcttattgatccgagagggaaagttgtgtataaagataggcctagtgcccaggtgaaaaaggcctactattcgacaaaacagtgatcacagcgataattctattgaccggagcaatgatgatgataaggaaattaacagctttctaattacagtatgaccacataagacctttgagcacaattgaatgcaatgaggaaaaaagctaggagcgagaaataaattgtcacgaaaacaatctcagaaaataacattaatgatcatatttgcggacgtgaatcttaagacgcaacaactaaacgttcaaaaaaacaagttgttgaattaaccaagttctcagagcaacttgcccagaattagaattgttttgaatctaatgtacgaagaagtaagattttagaaccatgtgtagagaaggataatagagacacctttgtttggacacttcaggatgcctcaaatggtgttgtataaaggtaacacgaaccctgaggcctacttatctaagtaagtctaattgatgcaagtggaaaaaagtaagcaacaatgccaagtgtctctatttttctctaacttaaaaaaaattcacgaaagatttgtgaaaaaggttatctcttgaatttgttcgtaatggaagatctacaagttatgttcaagaagtaattcataactgtaaaggactatgatatggaagttaactccatgacaaacatcaaacaacaactgtaagatatccttaagaagtacatcttgagaatgattgatgctactgttggaaattattttaccaggatcttagatctacccacaagtatgttgattaaca

SEQ ID NO: 304341 - DNA, 1509 bp, Cannabis indica
aatgttcttcatttatttcatttacattttcctcaatttaatgttgatatttaatgtaaaacggtttaataatcaatttagttctgtgtaatcaaaggatacttgctttgtatataaaagactaatctaacatgaataaaagaggatggagaaatcgttgctatagtggactaagtagaccgtgatctgataaaaccactatacttccttgtgttcttcatttatattactatttgtttgtgtagttttatttgaatactcaccgttctaggttcagtactcgctcttttttgattagacatcaaatctttcttttatttggtcttgtataaattcctccaacaattatatgcgctgtctgtgggaacttcttatttttattttggaggaaaatcaagatggctgcaaaccagacaaatggaaatactagatctttcaatgttggaacaatgcttgttccactcccaggcgatggaacaaatccaactgacacggttaatggaggtgtgggggcaaaccaacatcactccactcaatgtgtttccagaaactactggccatgtaggagaaacatcaacaccaacagccactgtaggctacttccgacctattacactggtcgtagtttttgagagaattacatagctgacaacggctcagtatacggccatgcaagaacaaatgcagacgttgtaagccaaaatttatgggagagccaggactcgacatccaccccacgttcgagcaacccttagttaactaccacgaatagacgataaaacaaatgtcttaacagtaaccgtgttcgcatttcaaaatcattgttagccaaatcgaagatgtagattcaaaagagtaagactaaatttgagctctcaatgaaagcactaaactactgacctcgcttttagacaatgacattgagtctttaaagtgatgataatgattaatcaaataaaaaataatgcaataagaacacactagatttatagaagttcaacccttgataatagtaatggcctattctcctttttattgtattacttatagagaattattaagatcacaagatcgggccaggtgagtttcttaataatgtcgagaaaagcttactaagtattttttcctagagtaattgatttttgggatgcctaaaaaaggatctctcaacaaggaaatgaacctcattatttatagggaaaaatacattacaattatcccaagttattaggagaaaaattaaggaaacttaaatgtcaaattctgtgattttctgaatcgtataaaataaatgtaacaatgatagggaattttaaaattgactataactgtgagatatttagggaaaatatctctaacaatctttactctcgacgtgtttctatccgaagaatggcagttgctcgatctactcaaagtagctggaaggtttatgtaacatcaccgcttcaagcctccattgggtcctcacacccacggaatgaatggctcttatacacgagtacgtca

SEQ ID NO: 304342 - DNA, 2013 bp, Cannabis indica
attgttttttttttttttaatagaatagtcattgcaccaaaagagtagaaagagcattcgaatacttaaaaatacaacaaaatgaaagaatagaatgaaaattattttttttccatttcattacgtccaatcaaacgcccacctaaaagttttgtaagtgaagaatagtaattgttcatgggtcatttaaattgaaaagggtgagagagcaaccaacctgggtctattccatctgtgttaggaacggtaactggggcaagaattgtgagaccttggataattacattgctgcacattaattcatccacatcatcatcatcatcattataatttgttttaatttagtttaatttggtaaagaaaaatggaagtgaaagtgtgtatatagtcaaacctgcagtaaatgggatgaacaaaccaagaaggagaattaatcaaagtgagattaaagatttggacttgatcagagtacaaaatctcaatgatgtaaggcctcgttgcatttagctgaccagctttgaacttagcccaccatggtgcaccttgcccatcgatggtcccattatgacctttttcaattttaaattaaaaacaaattcaaatacatcaaaaattaaccattaataattaaacactgaattattcaccacaaaaattaccagtaataacgacatcagtgagatttgttccgtaaatcagactactgaaccttgcgtcgggggcatcccttcctactccataagaaggcaaaagctccactagtggccattctgactcgtcctatcaaataaattaaataaatatatgagtttttattctcaatatattttcatttatgaattattaacattattgtgtatttgtattttggacaatgaaccaaatataaacaaaattaccacatataaagaaaaaaaattcaatgttaccataataatactaataataattaaatgaatacaagccatgccaaattgtagtgagctgtgccttcatacttctcacgtttttatgtcataatagtatttatttaattttattccttaaaaaggataactgacattttaataaaatatagaaagaaaaacaaatggttaaaaagaatttgcagttatttttcaaacgcataagagaaattaattaatattatatacctgagaaccaagaataacggcatctttatggaggaaaagagtgaaatgactggtgaggttaaaacttccagttaaccattttccagcaggaacaatgagctgtgcaccaccgtccgatgcgagagggctgagatgatcaacggcagccttgaaagccttagtatttaaagtaactccatcgcctacgccaccgaactcagtcaaaactgcgctgtgtttacgagaactacacaccacttgaccatccttgttcttgtgatcattttcacctcctactgctatgcacgtactgcattcccctaaaatcaacaataccactcccagtacaaaaatcaaccatctttcattcttaatctgcattttacaaatgtataaacaaaatatatgatcaataaaaatgatataaaaaggttaggagatgaaaaaaggttgggaagaaagagagagagggaggaaaattacatcggattttgtagactccatccttgaattgggtggttttggtttgagatgtgggatgattatatggttttaatttatatagggtgtgtcaggactatgtttggaagtttttttaattgtggttgatttttttccattttgaccggatttttttggtgttaattttggattctttttttaataataatagttttttttggcaggtataataatagttaacgaaactgaaggtataacctttaatgatagatggcacaacctagtgttaatattgctattagtcaattaaatatgagtattatataatttgatataataattttgtatgtatactagtaagcaatggaaaaacagaatgagaatctttctcttgttataaaataatataaagtagatg

SEQ ID NO: 304343 - DNA, 1648 bp, Cannabis indica
aaatgaccaatgtaatcactaaccaccgaacatcgccccaagaagtgtccaccgcaactaacccacctttgaatcgagagattgatgcaacgagcaaaagagagagagagagagatatacagagtgacatgagagatagagagatgcgagagagttaccaaggtacgcgtgtaacaccgagaatgatggtgaagagggaggagctgatagagagagtgagatgtgagagaggaagaaggtgatgtgtggttgaagagtttattagggttcgatattagtaggtagtgtttattaaatgggttaactgggcttgaagcccattagtgtttctgtaagtatttttctaaatgtaaattagcgttggttttgtacaaacgcaaaatttgcgtcggtgcataatcgatggaaaaaccaattaataaactgacgctaaaagctgcgtgtgagcaaaactgatgcaaaatttgacccctgtaacttccaattttaaaaaaaaaaatcatctttagcatcaattttgttttagtgtcaatttatcaaccgacaaaaattaattatcattagcatcggttaacaaccaaagccaaaaagtaagtgttgacttttgcattggtaacgaatttgactagatggatcgatgcaaaaactcctttttgtagtagtgtcgttaaatattttgagagaaatagatagacgagagcaagaatgagtttgaaattttttgaacggtgtatataaaatgcaaagctattcacgatggtttataatagtcgctaaagaatggtcgattgtcataaaccgacagctattccttagcatactgggatctattgacacgtataactaacaaaacacactattttagtttttacatgtaactgcttttaattgacaagaattctttgcgagtattataaactggtggtaattctaaattatagttgtgagtttaaaatagtgacttaattgttttcccgtaggtccttaaaagaattatttttgtaactattggcggagtcagaaataaaagttagagaggactaaactataatagttaagtaataaatattttaaaatatatcattaaattgataattaaaatttaaatagatagtgtcactcttgcatatcaagaaagtcatctataagtaataaatatatgctaattttttcggcagtttttttttttcaaaatacactaacagttagaaaataattacttaaaaaattattttccatcttattgtaaagtgtaaaaggtaaatttgtggccgctataaaactaaaagtgcaaaagtaagagttggtactatacacaagtggaaaacttatgcttttttaatttttattaatcattacataaatatatcatatgttattttttacaaatatactatttttttttatgaatactaatttttttatttaacatctagatttttaacatgtgttcatacacgtagaaaatactgaaaaaaagaaaataattacataatatatatgatatattatctcacattcaagtattttttttcttctaataatactgcattgagtatattattgttttaatgctctgataatttttttaccatcaatactttagttttagtttagggttaatttcacaaatgcacaaaaataacaa

SEQ ID NO: 304344 - DNA, 2953 bp, Cannabis indica
ttctttttatttttaagtatattctgttaaaccaagaaatgccgttaaataggcacttttaatatataaagatatatatatatttatatatatatttctaaagttgcatatgccaactacaaacaacaattattagaacaagttcttaattgaataaattctatgcatataccaactacacatattatatgcatgatctcgattcaaattagtatattaatttagtaaaactaaataattgttataagagtaatttgtggtgtaagtttaacttacgattgtagataaatatttaagtttaattttttacagtaataatacttaagttatatttctggaacttctgtaagtatttaaccattaaatgtcaaataattatttatgtattatttttttattgctatatttacattaatttttaaataaaacataaaaatttactgagtacttacgaaagttttagaaatatataatttaggtattaatactatcaacaattaaacttaaatatttatttataactgaaagttaaacttatatttatatctagattagtcttgttataaaagtaagtaatagtatccataaggatataactttaaaatcaaaattatcaatttaatataatatctatttatagggaagtacttaccaaaattgatcattcccatctaaccacataagattggcaaacttcttaatttcctccaaacttgtaactttgtcaatagctaaaccctcatagagtggaatttgaggcttcttaccaagatacccgcgaaagggttcttcactaacattcttcatttttgtctctaccggtagatcgaaaagatcttttgattgagaaaatatttgtgtttcataataattatattttgccacgaaacaaccatactcttctaaaccatgtcggatttcctcacacgtggaagaccacacgtgtgaacccggtttcaactctttgttcgaaaaatctataactggaatttcatgcgaatgattttcacctacaatagaatccattttttattctatggaaaaaagaattagaagagaaaaaatgaaaattaatcagtgttttatgtatataaaggttgtttcttaggctatttatagagactaatgtacttgattatgaaatttaattactattgtaatgttatagtttaagaggttatgaaattaacaagttccttggcctaactatttgacttgatcttatatgaagtcaaaactttcaatctcagccggccctcaacctctctattaagtaatatttataaattatagtttataattaagaaatatagggtatccattatgatgtaaataagtatcaatctcatatatttataaaaaattattaactattcacaaaacattattttgtgatggtattaaatatatagtgtgaattcttaatagcaatattctttatattatatatttttagaatctttattttttaaaagagtgtattgttatattatcactgattatgtctaactctatcacactactacaaaaagcattattctcgtcggtttttaatttatttttttttcaaagaccatcgctaatataaaaaattactatttaaaactatcggctataattgagtattttcgacggttttatacagctgtttagtatttatgacggtgtaaaacaatcacaagccaaaaattgaaacggagcgtccaaaaattgaaacggagcgtgaagggtatctctctttcttgactttctcaatcaagcgcaatcaccgccacctcctccttctccctcctcgctctgttcgaacaacgagcaaccatccccacccctcctctcttcgtcctcgctctctccttcgaacaacgagcaaccatcgccacccctcctctcttcatcctctcttgtcgtccgcactctctctctccatccgtcgttgttggcccaagcgaggtgctatttttgacgaccgacgatcttaatggagcacaaatatgagatttttgccactaaaatgttcgagtacagcgccttatattcttcgtctaatttttttaatcatatcatagatttttttctcccattttctttttctctgtgtatagatcattatagtgttctctctttatgtcttattgaatctttgtgtctaacttttttctctacagattgatggaggatctgtgttagtcgggccttaaaaattgttggagttgcgttgtggttaagcatcacaactggtcagggttgtcggagcttgagatatatatctctggtcttttttaatgtgactgtttaaaactgtaatgatttttttaatgtgacagtttaaaactgtgatagtttttttttttaatgtgatggtttaaaatcgtcggttatagtgccacttattgttaacggctttaaactgtcgagaataggcatacctaactattttcccataacatctattttacctaattttgtcacagttaaatatgcatcagttatagagaccagtgacaataccattacgagtgtcataagatgctacttaattatgagtaattaatagttttttataagtgttattaaaaaggaaagatggacatgattttgttaggttaaagagagatgacttttgttcatcatgcacattatcaaatattaattgaacacctacaataataccacaatatttattaaatcttaatctatatgtaaataaaaataaaaatggcaatttaattataatgggaatgcatagatattctttttccaatgaaagataaaataaaagaacattgttataagtaaaattatactgaaagggtttgtttggtacgccatataagggtcgtattatattaaataataaatagcaccgtgtttggataaagcaatatattgtattaatgattacgaccaatttttttaatacaatgcatattgtattatttaatgcataacaaat

SEQ ID NO: 304345 - DNA, 2964 bp, Cannabis indica
atttatagtacaagttacatgtgaaatgaaatgggataggagctattattataactacagctcatacaagataacaaactattatgattgaaaactaaaggaattgaacagctcagttccaactaacttaacctatataatttaaaaaattaaaaatattttttgggggtgcatggcacccttcgcctcccaatagctctatcactgtttgttattgtttggaggattaacttccataaattctaccttcatccttaaaagaatagcaaaaccaaatctcgattttttgatggtggtaaactctcaaaggtctcaacaagcaccaatgttcagtaagctaaagcattggtgagaaccttagctcccatgtcagggttctcacttgtgtgaactttctccaatttcagcaccttatcttctatcttctctcctatccaatacaatcttatgtaccttatcttctatcttctctcctatccaatacaatcttatgtgaatatttttactcttctcatggtgaactagattcttgcataagtgaacagatgacaagctatccggccacattgtccatatgcctttgagcagctctagctcttgtaaaatacattgcaaccaaatttcctctttaaatgcctcaatagttgccatgaatttagactctactattgatatggccaccacttattgctgctgagattttgaacttatgaaactcttatttatttaggcagtggtgggcagtctgctatctttgttagaagcataatcaacatctatataaccacttagggaaactttttcttgatctctctcatagattaggcaatattttgatgcccctttaaagtatctcaaaagccatttgaaggccttctaatggtcaggccctggattggacatgtacctattaagcacattcaaaatgtctacggtgtctagtcttgggctgaccattatgtacattaaatatcctaatacaacaggatagggaaccttctccattttctttcatttagctttaattttatgacaattttcattggagagcttaaaatgtccaaccatttgtactgcagtggctttagcaatatttaaactaaacatcttgacaattttagtaatgtaacttctctgagcgagtatcattctctgttcccttctatctcttagaacctcaatacttaggattttccttacatgtcctaggtctttcatttcaaactctgatgtgagcttatccttaataatcttgattttggccttgtctttgttgatgatcatcatgtcatcaacatatagtagcacaaacagagtgctacatgtatccaagtccttatagtacaagcatgaatcaaaactttgaccttacaaaaccaatctctttagcaaatatgttgaaccttttatttcatttccatggtgatcgcttcaaaccatacaaagaccttttgagtaaacatacccctttctgtcttactgttttccacttgaaaaccatgtggttgttcaatgtaaatatcattatataggaatcccttcaagaatgcaattttaacatctaactgctcaactttaagatcataatgtgctgcaacaacaagcatcatcctaatggtctcgtctttcaccataggtgaaaatatattagtgtaatatattccctcaacctgtgtgaagcctttagctaccaacctagctttttacctaggtggctcaccctttgtcatgctttcttttaacatgaacatgcagctgtaagagattatcttttcaccataaggtttgagaaccaaccacaattcaagtcttactctttcttaatgagtccatctcatcattcatagcagtttactaattataccttgacttgtttgctaccgtttcttcataagttgttggttttggtatctcttcatattgtaaaatagctagagcatatactatgaagttagcttttgactatcttttgggaggcctgatcgctcttattgtcctatctcgagccaactaatagtcccctagtttagtctgatccttctaatcagtgccttgttgttcctcctcagttttaggtgctaaaactagttcttaaacttgttcttgtaactattcatctacaccaatttccttagagtcatcagggacttgattacttgatgtttgagttgtcatgatatcaaatttaaccaagtcgagtctatctatattgttcactacacatttagaaaacaaactcttcttagctttaagtgtacaaactcatgttcattgaaaacaaaatcactagacataacaatttttagttttccaatttttataatacaaagtctacaacatttcacacaaaaaggataaccaagaaaaatgcattttaaagctctacgatataatttctattccttttggtgagcataaatagtgcaaccgaaaattcttaagtgcctaagactaggtgctttaccaagtagcatttcataaggtattttcaattttagaaccctactatgacatttattgatttggcaactagaattaatcaaatatttccccaaaaaaatttcctccaatcaaaactaatcaacaagcacctaactgttggaattattttaccaggatctagatttactaacaagtatgttattaacatcctaaacatgaacttctaaaacgatatgaaataaacacatataaagtttcaaaaaccttacagtggttgcagcggaatgtaatgtatccttccagtcagatctctaacccttgtatcctttctgtagcagggtatcaccaagatctgagtctgaatctccttctcttgaaattggattcttcacagccttacacactatgattgagtaccacttgatgtgtgtgggcactcgctcttttcactatgtggcttcgtttttgaagaggggaagagagagagaaggtttcgaattgggtaggtgaaggagggtcaaa

SEQ ID NO: 304346 - DNA, 4276 bp, Cannabis indica
ctgtagagtaaatatttccaacatcccctctcaaactgagtggggtggataccactccaagtttgtcaattaagaacctgaattgtccatgtgagaggcttttagttaaacagtcagccacctgttcatttgaagggatgtatctgatttccaaggtcttctccaagactttatctctcacaaagtgaacatctaactctatatgtttggttcgagcatgatagacgggattggaggctaaggcgctggctcccatggagttgaaggcagaggaaattcaagttcagtcagcagcccttgtatccatgagatttcagcggcgacatgtgccaatgctctatactccgattctgtactagagcgagagaccacatgttgtttctttaaggaccacgagacaagagtgtctccgaaatagacgcacacaccagcaacagatttacgatcgtctggacagcaagcccagtcggcgtccgaaaagccagtcaagggaagtctctctgagtatctggtgtgtaagccgtgatgaggggttccttttaaatatctaagtatgcgttttgcagcgttccagtgaacatttgttggtgctttcaaaaattggctaagtttgttcaccgcaaagcttatgtccggacgagtattggttagatattgcaggcctccaatgacacttctatactcagtaggattcttcatagattcaccatcaaagagggacaaaacttttcctgtagccatgggagtgggacatggtttgacattcagcatgttcatctttttgagaagttcttcaatgtagttgggttgactgaggtatattccagtcgcatcacgatgagcttcgattcccaaaaaatagtgaagagatccgaggtctttgagggcaaagtttagattaagtttttcgatgaacttctgaagcttcaatggactgtttcctgtaacaataatgtcgtcaacatatatcagaacaagtattatgtcagaggcagttttgaggaagaataatgaggagtctgcctgtgagtttctaaacttccagccaaccaatgtttctttcaatttgtcgaaccatgcccttggagcttgcctcaaaccatatatagatttgatcaacttgcacacatgattcggcttgtctttgtcttcaaaacccgggggttgattcatgtacacatcctcaacaatgtgtccattaagaaacgcattgttgatgtcgagttgtcgcacttcccatgatcttgacactgctatggtgaggactattcggacagttgaggcctttataacggggctgaacgtctcgccaaagtcaaaaccaggtcgctgattaaagcctttggcgacgagtctcgctttgaacctttggaaagatccatctgcatttttcttctccttataaacccacttgtttccaacaacattcatatgaggtgttcgtggtaccaaaatccatgttttgttttttattagagcagtattttcagtgtccattgcacccttccaacctttgtgttgcaaagcttcttcaacactacttggtattttgctggtgcttgaccacttggtgtgtcccaagtatgtttttggtttgaagattcctgctttagatcttgtcaccatagggtgagttggttgtagagatttggggctgctggtgtcatctgtaattgaagtctcagtgccagcagatatatcaggctgggatgcattgagattttgttgggcagcagtatctgttgttctttcagacatgtcaatatcgataggaataggatctgtgttacttacctcacgcacatggcctctcgcaagggattcaacagttggcattctgtttggtgagccaagatggataccatcagtttgactttgagttgacacgggttgaggttcatctcgagataagggagaagtggaggaagctgaccaaaagggcacaaggacagatactggtgttttttgtgtgtatttaagaagccgtgtttgaagggaaaatcttcctcattgtaagatgacatcccgagatatgtaaagtctacctgtgcttgacaagcacttgtatcttttgtggctttcactataaccaagattgacacacttggttgagtgaaattagaatttgtgatttgatatttcctcaagcaagggaagcaagaaacaccaaatattttcaaaaacatgtaatctggttgtttcttgtaaaggacttcaaagggtgttttcatgttgaggaccggggtcggcaacctatttattaagtatacggatgtttggaaagcgtcccacaagaatttttgtggaacattggcttgagcgagaagagtgaggcccatttcaacaatgtggcgatgtttacgctcggctctcccattctgagccgaggtgtgaggacatgaatgagtaaactcaatgccatgatcactagcaaaccgagtgaaggcttgatattctcccccccccccaatcggtttgtagacgtttgatatggcagttgaattgtttttcagccaaggccttgaactgagtgaaggcagcgaaggcagcatctttggatcttagtgggtagatccaagtgtacctgctgtagtcatcgataaagtgtatgtagtatctaaaatttgtgttggacataataggagatggcccccaaatgtcagtgtgtacaagagcaagcggtgaggttgctctatttgagttagttttgaatggaagtgagtgagatttgcccagttgacaggcatcaagaaactagttttatgaggaacatttcttatattgattttgtttagaactacatcaagaacacgagtagacggatggcctaatctcctatgccatcgatctttgattgaacacacagagtgagtagccgtaggctgtattacattggaattagaagacactacaagaccagaaaaataggaaaaacttggttgaagtttggtgtggtgagatgtagcagcagaggcattcggagtgtcaaactgatagagtccatctttaagcttccccttgagaaccacttgctttgtccccttgtcctttatgaaacacaaatcagagaaaaactcaacataaacatcattatccgaagtaagttttgagatgctgagcaaattcttagagatttgagggacatgtaaaatttcttttagaatcaatggtgaggcagatagagtgtggaaagagccaataccaacatggtgaatgggaagcttattaccatcagccacagttacagtttccttaccattgtagtcctccttcagtttcatcttgttgatttcagcagtgatgtgatggctcgcaccgctgtcggcaaaccaggcatcatgatccaaacactcagatgagactgtaagagcagcagcgttagtctgagatttgttttgattgacaccagtaccaccaggtggatttcccatataagttcatcatatctgttgtagcagtaggcagcggagtgtccgtatttcccacagacttgacaggttggtcgcggtccaccatttcttcctccacggcctctagatctaggattagatcctctgttgttgtttgaaccacctctgttgttagttcccctcctggatccaggaaaggtatttttgttagcaaagtttgttgtatgagcattgattttactggtacctgagtatgaatgtagtctctccattttgctgtcatagctaaggagcatgtcttgaagttgttgccaagtggtggatcctttggattctataagaataaccatgggaagatagtcaatgtctaaaccagagagaacattagccactagctggttttctaggtacggctccccagcaagggcaagaacgtctgcccattgtcgtttttggcgaaggtaatctggcatagatagagcccctttccttcctgtctaaatcttggtgcgatattcgtccatttttgcttttgaatgagcaccgaaaaggtcttcaagagctttccacaaggatgcggaacagtcacagcccatcacttcggaagctattccttctgtcatggacccgtacagccagccgagaaggagctggtcattaacgatccattgttcaaatgccggattgacctgcacaatagaactagtagtgccatcaggctcagtggttggtggtaagaactcaaggggtttagagagggttcctttgaggtaaccatctaaacggtgtccgtgaacaatggcagaaaccattgttttccatagggagaaatgttgggttttatgccctaaataaaactctgtttc

SEQ ID NO: 304347 - DNA, 728 bp, Cannabis indica
ttatcaaaattctctcatcatgactaaactaataaaacagggaaaacattcgagacaatagatcccagaaacggagaggtactaggaagaatcgctgaaggagaccaaaacgacgtcgacttagctgtgaaagccgcccgtggtgctttcgaccatgggccatggcctcgcttaccgggttgtgtatgtcaattctcactctctctctcaccttaattaattatctaccatctaaatattaatgatatcaccatctctctttctctctctttggaaataatagagctcttacttgtttttctttttcttcctcatcaaatatttttaatctgtataaaaacgtacgtgttggaaaggtcactcactgtgaacgccacgttaaaaattgaagttaatgcatctagctatcagctatatatcgttagttttttctttcccaacttggaattttcaatatttaaatctactcagtttaaaaaaaattctagagcatgtgctaaggcacgaatcaagatttcctgtccaaatattgtatcccatattatgtctaaccaatatgatgatgacacatcatttaatttatttttgtaaagttaactcactaaaactaacggagcaattctattaactacaagttttaaaattaaatattatcaatataattgctacatatattttttttttaatttttatattaatatctaattgtatagattcaaaatatacat

SEQ ID NO: 304348 - DNA, 1516 bp, Cannabis indica
cctccaaacagacaacagtggcaaatatacctctagatgaattctttgaagatttttgagaatgccacgtacgccaataattcacatgtgcagatactccacaacagaatggagtaacagagtggatgaatcaccaccttgtagagacatgtcgaagcatgctacacacaaagaatgttgcagagagattttgggcagaaggcatgaacacagtcgcccatattattaatatacttcctcgagaaaatttagggttcatttcactctttgagaaattgtggggctatacacctgcagtaagacttctgagtatttggctgtgtgctatgtattaatttgtgccaagctactacttagcgaattcaacaagaaggcaatacgatgtatctttgtgggatacgacagtcaatgaaaagggtagaaatgttgtaaccttacaactggaaagtgttatacctcaagaaatgtggtattcgatgaagcttcatcatggtggtcaccgtaaaaggaagcattacaagattctaaagaaatggaaaacagtttatagcaaaaaagtaggggaacaaatcgttgagttaagagcaaagtgaaagcaacgaagacaccacatattccctagcaaataggggtgcattgaagagcagaacatgatgatggccaaccagaactcagagatcaacaagagcgcagaagccaaatcccaaatatgccaatgttgttgtagctgaagaagagaagttcaaagaataggagttatatgaggaggcatactagaaatccaagtggcttgaagctatgaaagaagaaataactgctctcgagaagaataagacttgggagctggtgccgaaactgaaggaagtgaaacccatttcgtgcaaatgggtcatcaaggtaaagactcgtcctgacagttcaactgagaagatacaaggattggttagttgctctaggattttctcaacagttcgggcaagattatgactagacgtttagcccactagctaagattacaatagtacacgttctactaagacatgcaaccaatgcagactggaggttatggaagatggatatgaagagcgcctttttacatggagaactagatcgagagatatacatagagcaaccaagaggatttaaggataaagctcatctagactatgtttacaaactgaaaaatgcgctctatagattgaaacaaacttcgagagaatggtatgacaagattgctaaattcttagtagagagcgtttacgtcatgacacacaaattgaagcttattcgtcaaagtaagagaagaaaagatcacagttattctagtatatgtcgatgatctcatcattactggcaatgatgaagcagagattcaacaaacaaaggagaacttgtaagtttactttcaaaggaaggagcttggagaatttaagcacttccttctatgtcaacaaaagtatgttaaagatttactgcaaagatttggaatgctcgagtgcaagcccatctcaacacc

SEQ ID NO: 304349 - DNA, 1253 bp, Cannabis indica
tgtaatttttttttgttgttttgtgatttcgtgaaataatccttaaaataaatgggtcccagtaaaattacccctccaatatggaggttggatattactccactcatttcattatttactaaatcctttgaaactcttgtcctgtaaaatataaaaggaagatggaggtgccaaataaagaattaaaaagggaaataaattgaaatactcaaaaatatattgcaatttctgtaaaaccagaaaattacaattatagctgaaaaaaatactctctctgttttttcattatcgccggcgtcggagacttgttcgatgctatttgtttccgactagattctccggtgcaccaagaatgagacttggtatacgaaaaaactgatgttactgagatgttcgggagtttgggagacctttggttcctgctatatcggaattagggttctagtggaatctccattaacctcggtggtcttagggttggaaattaggtgtggcattagggttttttaaattccaatttccatcagcaatacgtccaccttgttttcgtatgcaaggtgaggttttgatgagtatttaccaattttttttaacaaaaattaaacaattatatcattgtcagttgtgtttgatggagtctgatttttgacacccaaaaccgacccttctctctatattcatctctaccatttgttgatttgtttgagaatttgtgttgatttcaagcttggtatttggaggtgttgaggcttggtctttacttgaagcttgaggtagtttcctactgttttaattttaaattttgttgctgaagttgaagttgaaaaacatgtttttgggctttgaatgttcttgaatgcatgtaaggtgaaatggagttaattgatggttattttgttgcttgaacttgttcaattgtggattatgcatctatgcttgttagtgagtttttagggttgttttcagagtttgaaatctgattgttaattctgtttttgttgtttggaagttggtataatatggtgttgatgctcaagttcttgattaggtgattgtgtggaattttgctcaagtattgagcttatcttaattagtgttaatctaagtttgggatgtatatttacatgaaaatgaagcttgaaattgtgtgttttaatgccctaccatgatatcttataatttgtggaatatgattttgagttatatgtaagtttggaatgatttaggtgtgttttgagcatgatttcgaaact

SEQ ID NO: 304350 - DNA, 3651 bp, Cannabis indica
gggttgttgttgttgttattgtaaactaaacatctaaaatttgctatgtgttctttatagctgaggattaagtcatggtagttggtaatgttagttaatatttgattttgctaacagggtttacttcagaacaacagtccatgtctactgatgtgattcgaaaagcttatcaagccactgaagaggggtttatggccgtagttacaaagcaatggcatatgaagccgcaactcgcagccgttggatcttgctgccttgttggtattgtatgtggaggcaccctttatattgctaatcttggagactcccgtgctgtgttggggaaacttgtcaacgcaactggggaggtcctggccatccagctatcttctgaacacaatgttgctctagaatctgtgagacaggagatgcattctactcaccctgatgattcacatatcgttgttttaaagcataatgtatggcgtgttaagggcttaatacaggtaagaagtgaagtgaagggtctatttaaaatgattttcatttggttatcttctgggtttcctctttggaaaactcattactggtttttatgttttgccaacgctttggtactagtaagaatataatgatggctttatactatgtaatctaatctatttgttaaaataactattctggccctattattattcacagttagaaaaagagaatataaagatcatgaactgatgatttgttgataaggaatagtagtaacatgctattgaaatgatagagaaaagagtatttagcctttttgtattgtttaatgtatcaattaaaatatttgaagtccatttctactaattgtgcatgaaactattgtgttgttttttcttagtgcatcctagtatgctttttttttcttcttttctttctttccctgatatcatatatccattgtcattctgaatttgaactttgttttctctacagatttctagatctattggtgatgtatatctaaaaaaggctgaattcaatagggagcctttatataccaaatttcgcatcagggaaccttttaaaaggccaattttgagctctgagccatcaatttctgtgcatgaacttcaacctgatgaccaatttgtcatatttgcctctgatggactgtgggagcaccttaccaatcagggagcagttgatatagttcaaaatcacccacgcagtgtaagataatcctctttctacaaaaatcatttcattcagttagtagtctgcaccattttattgctcaagctgataaattacttgtaagaattatggggaagctccttgtgttttttttaataactggtgcatgtcattcaacttttgtgtcaatgataaagagttttttttgtttattgaaacctatggttcttggattcatagctatttatttagttggtttatttgatttattacatgggatgcagatgtatgaaaattatacctaatgaatcacatcaaatgccatgccaaaactacttcctttaaaagaaaacaaaatttcagctggctttgttgtttttacagggaagtgctcgaaggcttgtgaaagctgccttgcaagaagcagccaagaaaagggaaatgaggtactcagatttgaagaaaatagaccgcggtgttcgccgacatttccatgatgacatcacggtaatagtcttgtttctagactcgaatcttgtgagtagagccagttcagttaggggtccaactatgtctttgaaagggactggtgttaacatacctactaagactctgcccccttgcacaatggagttcaatactacatgatgaatgatgaaccaaaaccccgtgcgcatgactgtcacttagtgttacctttctctgaagtcgaaaaccccacgatcgatcagctctgtaaatctaagagagatgagagaaggtgcagtcaattaatttttttcttttttactgtactatgtaacatttaacttgggacttgtattttatttagtttctgagaactggagcagaagtaaaaggaaagaatcatggaaagttgctcttcaaaatttgatgctgtgaagattctttcatcaagactatctcctctacggatttttaccctttttccttttttttttccagagttcttgccttatgtaaatcttatgtgaaatgtcatttctgaaaattcagaactctgtgttgctgttgttttttttttctttctttccctgaagatgactcctcttggggctaccacttgaagaagggttaccctttgctttctaatgcatgaggctgttgaaatattctgagaatagtgccttttctaaagcactggataatgattctctttgttttgttttgttcttaacaaatttaaaacttttggggtatttttatattagagggaggaactgtaaagatttcatggggtctacctttaaccttagcctacattatggttagagatccaagagcattaatcatattatctttttccctttttcttttatgggttaaaaccaaagaatctgatttcaaagctggagcaaagcacaacttattagtagagttttgcataataatagtaaggttttatttaagctcttcactaataagacaatgtattagctttttgaacaatcataaaaaaaaaatgtaatcaaaattttgcgtgagatttccaaaaaggactaaataaagtcttcttaacaactaaagtttaagaaactcaacctcattaagtgcttttgccttttttttctcttttcttcccccaccttgctgtgagttgtgacctttggttttggctttatcttataccaaagtccatacacatattttgcattatttcacaacaacccatgagatgagagaggcccctctcccttttaactttgtctgtttgcttctcacattttgagggcacaattctccacagtcacaccaactggcaactaatagtattagtattagtggtaatagaagaagaacagtactactgaaagctttctgtctccagctcagtaatgtacctgcattaactatcaatttgagctcttatttatacacttgtgacttatgaacactgttctcttttagtgtcaatagcacttcgatgaaacttatatagataaagtgcacttttaatggcagtacttgtttttatcctaatatggttcaaacaaaaagttcccactttgcacagtagactatcatcacttgtgcccatgtatcatatcacattctatcccaaagaaaaatactaaagagcagcatcttatattactcaacacaccattattattattaaatatttggtgttagaaaattacaactaatatacagaatcaaatcaactaaaatttaatcaattagtaaagttaagattaacaattcatatacaataattggatagtattaaaatcagaaacgattaaagttacagaacaataaaatcaacaccaaaatatatactagttcaaatcctatagattgatatgatttatgtactccagttctagaacaccatcaaaatcttctttattgattgagcacatgtcacaatacaatcgagattgattctccgatggattctcacaaagtgtttatctctctcaatctgacccaagaatattcttcatctacaaaagattcttcata

SEQ ID NO: 304351 - DNA, 1335 bp, Cannabis indica
aaaaaaaaaagaaaaagaaacaaattgcaaaaccttttccacaatcatgaactactagagcaccaatcacaactaataaatacatctacatttaatttcaacaatcctacactaggagttttctagtgatttaattggaaaaaaaaattaattttggtaagttgcagtttctaaactccattaaaattagtattgaataaaattattaaattaaaatatataaaactaaataaagaactttcaaaaaaataaagaagaagagtagtactactctcagtggcagaaatattcaagagaaaatattattagttaaattaaaaccagattaaatatacaaacataaccaaaattattaattatgaaatacacaaacacagatttaagaaacaattaaataaaatgtatatataggtacgaataattaaaaacatctgaggacgttgatgataaaatggaacaaataatttggtgggtcgataaattcatgttggaccaaccgctctaagttgagatttcgtggtagcaaattactgtaatataacaacgttgtgatcgtcgatgttggtcgagtcaacaaccccatcacaagtctaaccactgattctaccataaacggcattacaccactctacaaaattaaaataaaaaataaataaaacccaattaaaatatacataaaaatcaattaataattaccttaattattagcatgcatatatgaatgagaaaaaagattgatcatgtgatgagttaatttaattaccatggtaattgtagttgaagaggtgtgataattgtgaaaatgagtgaatcttggcattgagaagaagaagaaaaataagaaagatatattaattggtgaagaggttatagacttatagtagtttgctgtaataatagagaaggtgtagtgatgaaaaatatgatcagaattaggcttcaacgtgtcaaaggcaatgtgaaaactgtaagaaaaacactgtgatttaccaaattaaaaaccaaattggtctgagaaacccaagacaagaaattagagagagaaagagagctttatctaaaacattttgatttgggttttcattgttttgctaccaacatacattgggtctatcgataccccttcctctactgctataaatgtttattgtgaagtgtttttttattttgacaatgaaaattatttttaattaatgtcaatattattgtaaataaatatatatttttttgtttattttagtttgtatgcttatcttttttccaaattttggttaatagttgtatatttttttaagtaacttatcatatagaatgaattctcttatatcatgtata

SEQ ID NO: 304352 - DNA, 1047 bp, Cannabis indica
tctctctctctctctctaatcatcatatctttaccattatctctgatggttcccatcttggttgcaagacctaatttaataattataacagtcataaagtaggtttggattgacattgtgaattagctagctatcaacttttgtatgactatgatgagaatatttattgttcttgtagctatgctctgagtctgatttataagcaggcagtgtgttgaaaaagagcaaacctatgctatgcagactctgaaatattccaatggtggtgggtttttgccgtatctgactttgctgcaaaatccagaacttttgcacttaaaaggaatttcttttactatgtgcttgagtgtatcttgagttttggtcaattattttctactttttctttggattagcaacaactgattattattattacaattggattgtatattttttctaagtaataatatgtttgtaacgcactactacgtaagtaacgttaaacatagtcaaggcctacaacacaatccactttttagtttctttggcttactataatagtctaacaacttgcaatctaatcagttttctttaattatcattacagggtcttttcaatgatttgtctaaatctctatcacattcttagtctatttggcattattattagtttaattattcaacctcattttcatgttctcctagaaaatcattaatttttcatttggatggaaaattcactgttaaccttaataaaaaaaaaagtctccctttctttacccatttcatgtgttttcacttgtgatggattttcactggtattgttggaatagtgaaagtttacaaaattaatacaaaatgagatgtgaattgtgtgagtatattgagtttcacatggataggaatatttcagtatataatatgtaaatctagaatttgggttggaatcccaaggagtactcaaattttgtgcgtatgggtaagtactcacatatcggaccaccatatgcgcgccgctgttgtttgattgtgtcaagttggtgggtgtggtgttattttattttt

SEQ ID NO: 304353 - DNA, 2850 bp, Cannabis indica
atattttttttaataaataattaaatgtaagtatatatatttttatatataaatacacacacaaatcagtggggaaagaaaccagagaagggagactttgaagaaggagatctgactctctttcgatatctcctctttcgttttcggccatcctctctgccttgagctcgaaattgaggttcctttccttcataacaaaagggtatttttttttattctctcttctttctacgatccgccattcacattctatttgatagtttttcgttgtttttggagttttttttcttcttctcgggtctggttaattgatctctgtaccgatatagatcattaatcacagattgggtttgtttttccttgtttcttatgtgcaattttttctttttaattttgaaatcatggattttggatggagattctaatgtttcgatttatttctctcatttattaatctgcatgtgtctatttgctacttctttgatgattttcttcgattcgatgcatgtaacgagcacaatttactcgattttatacttgatggttttcatatttaatttcgattttttgtttttattgaatctgggtgggtttgagtttcttctactgttggtaataaaggatccaagaatttggcttatgctttgaaatataacctatagaatttgttggattttatttctccacattttttgggctgttggggtttcgattggaagatctgtattgaattcagagaattgtagattctgtagtatcgtgttctatgcctgcgttataaggggttaggttctagtggttttattttgctggtttaagcataaatatttgttggttatcttgggttttgttcatctgtttttgttgcaatgaattgattttgccttttacggcaggattgccttgtgaagtttgttcttttgtgggagctatgggtgttgaagttgtgggatttgagatggtcgatggtccattggaggctgtagctggaggagacaattctgttctccacgagaaggagaatgggaaacaagatcaagggcctaagtctggtgaatccattcaatttggctcacatggcgaagaacctgtcaaagaagatgtgaatggtgtttcaaatgccaactttccacaggatgctgttgaagaatggcctgcgcctaagcagattcattctttttattttatcaggcacaggtcatatgatgatcccaaaatcagagtcaaaattgaccaggctgctattgatattgagaaaaaaaatcaagcccgattgaggatcatggaacaattaaaggcaaaaagggtaagcttttggttttacaagaaaaattattcgaaccagttttctacagctgaagattagcacctaaggattttgaatgtttcacttatcaaatacattattacgttgtagattctgaagtagattatagtctggatgtcattattgtgctgtagaacaatatgaaagtagttgaatagcctgcctttcctatgaaatgatctaggcaaaggttgaatgccaaaggcagttcaataccatctttcgaagactcttaatttgatagagttgtttagttattattctttttatgtatttatcctccgaaaagatatctgactgcattttttcttttcttgcaggctgatcgatcggaggtgatttcacagattagagctctgaaagatgacaacagacagtttaggtcgttagtagatgagaaaatcaaagagattgaaccactgcatcaggctttgggaaagcttcgcaatgcaaacagtgcaaatcggggtgtttgttcatctgagcaagagcttaatagtgtggtatgtctaaatccaatctttcactgctgtaaattctacatcttattgttgacctgttgtttttttaattgttattcataccttctgatattggtttggtgaaaacagatacatagcttgcaatatcgtattcaacatgagagcattccattgactgaggagaagcaaatccttcgagagatcaagcaacttgagagcactagggagagagttgctgctaatgatgctatgagagccaaaattcaggattccatggttcagaaagaagtccttcaagaccaggtcaaagtaagggattttgaattttatttctctcctctgtaatgtattcaaaaccttttgtgtatgtaatttgcgaggtgataatattctaaattatgcaattgtagcttataggtggtgatttggatggggtgagaaaggagcagcaagtggttagggcaaaaatcaagcagcttgatgatgcagcaaaggcttttgacaaagagattgcttcactgcaagatgaactgacagctttaactgagaaaagagataaagcacgtgaaaatgttcagcatttcagaaaactgcgcgatgatggggtatgttttatttgtgtagttacatctactctttttaaagttctagtttttatgcatggtgtttctttggtcgacctaggaatgaatatggtctttgttagatatttcatgacagatgaaaggtaagaaaaacttctattggttgttattgtcaaagagattttattgcttatatgttttttatttttttggttcaatgtttaatgatctcttgctcgcttttatatatttgtatatttttcgaactctgagcagtctgatgttctcattgttttatatattcattcctatttgtatgcctttagttatattttaagacttatagctagtaatttcatgaatttcatgactttattatgaaattatgtgttttttgttatgaattttatgatatatatcatgtgtatgaattttttattcttattgttgaggctta

SEQ ID NO: 304354 - DNA, 3708 bp, Cannabis indica
gacatgaaacttgtagcccttcaatctgaacttacagtggctccttattgtgtggagagaaataaagaaaaagggttgagactttatctcagttcatgtccaaggcacaagttatcatcaatttagaagatgcttatcagaaaccctttagggtctttccagctccaactcctttttcatctatcccgagtttcaccttgcaagtgctagttattacaatttcacatcccaaaacctagtactcttcagcaatctatagaccttttgcttccaggcatgctccaatgcaaacccatttttctgggtatggagtggcataaagtggatgtagtacactcctggatagtcaaagcaacaaacagaagtttcagaacataatgtaagccattcaaggagatagaggggtggaaaggagtacaaaatgaaattctctaagtacactagtttagttaaaactcaagaaaatgtgtataaggtgacttgcaatatggtccattactgaaagcccccaaggatgcctctggaggaaagaacaaaagaaattagaacaaaatgtgcaagtatcacggagacgtagtgaagacaactaatcagtgtgattatctaaaggatgaaattcagactctagttagagttaaacatttgggccagttgattcgaattttaactatttatcccaaacatggaggtattcatgaataattgctcgttccagggcagcaaggaactataaaccctctgcagggggtaagctgcccttaaactcctaaaacacaacttccgaccctacttgctctgccaactcatgttgtagtagcagctttagctttgggactaggaactcgtatcccgaggaatagctccgccacccattgatgggcatgtggccatgatctccggaggaccacatcttgcaggaagcaccaaaaacttccaagaaaatatatttgaaggagttacaaataaaggggaatgagcgctttagtatagtttcccacacaacgtttgcggatgatgaacttaccaatcacattcacagaagaagatacgaggcatgtacattttccccacaatgacctgctggtcatagaagtccagattgcctacaaaggaatttccaaagtgttggtggataatggaagttcagtcaacataattttcaagtatgcatttcaagaaattgggctaatggaggttgatttgtcaccttgccccatttaaatccaatgattcaatcgggactcgctaattttgatggggaagatttagctcctagtaacactaaaaggggaacacaacatatgcgccttcaagcactgcacatttgtagtcgtggagtttcccacagcctacaaaggccatactaggacatccaatcttagtttatttttggggatgtcacctccattaggcatttgtgcaagaaatcccttattataacgaatgtattggtgtaaaaaaaggtgaccagaagagtgcaagaaatttctatatgtctctgtctaatccatgtttatgatgagagaagagattaatattgctcctggagcaattgtacacctaaaagcttagcttgttcgagaggaagttaaagataagtttgatcctagtgtcaggatagaaaacatgatagaatcactagaaaatgtagaagaggtcaacatctgtgattccgatcccacatcaagttagggagaaacttacatgaagcgataagagaaaaaattgtggcgaacagtaaaaagaatgaagatatcttggtgtggagtttccatgccctgaacattgatgagaatgacaaaccagtttgccaggaaagaagacctttagacctggtaagagcagaagcagtaaaaatggaagttgagaagttaacttccattgagtttctaagagaagcaccatacccagtgtggttggcaaacccgatcttattcttgaagcccaatggcacctaaaggatgtgtattaacttcaaatatctcaacaaggaatgcccaaaagactacttttcccttccacaaattgatcaaatggtagatgccatgtcaagatacgaattactaagctttatggatgcctattccaactataattagattaagatgcatgtcgtggaccaagaatacaccagcttctagatagacaaaggtgtgcactgttatatggttatgccattcaattgaagaattctggagcgacctaatagcggttggtcaataaaatatccaaatatcaacttaggagaaacatggaggtatacatagacgacatgatcgtgaaatccaaaacttctgaagagcatagtgatgacttagaggaagcctttgaagttatttagaagtatggtataaaactcaacggtaagaaatgcacattcagagtctcctctgggaagttcttgggtctcatagttaactcctagagaatggaaacaaatttggaatagatcaaagcattttttgacatctcccaagaagcacaaaaatgtaaaaagtttaagtggaaggattgtatccctctaccaatttgtttccaagtctacaaataagtgcctcccatttttcaacattttgcgcagaaataagaaattcgaatggactgagaaatgtgaaaaggcctctaatgactaaaagaacaattgatcgaggctccaatcttgtcaaagtcggtggaaggagagctgttataccttttcttagtagtgtctgatcatgtcataagtgtcgtcttagtgcgagaagaatgaagggtccaattgcagtgtattagataagcaaaacactgttaggtgcggagtccaggtatcccatgaataaaaaaattgtccttttacttgctaatctcctctgaaaagttgataccttactttcaagcccacgtcatgaaggtaataactaatcatcctattttccaagtgctatagaaattggagtcctttgggagactgttgaaatgggcgatggaacttagccagtgtgatacgcagtattaggctcgactttcaatcaaggggcaagccttagctaactttgtagtagagtgttatgggatgaacaaccttccggacgagccagtcccagaactgcctctttggaaggtttaccttgacaaagcatcaaacaaaaagggagccagagcaggaattatcttaattttttttgtaaggacatcaactccaaaagcgcccttaacattaaatttctagccactaacaacgaagtagaacatgaagctatgttagcaggcctgtaactggttaagtaggagcttaaaaaattaaagtgtacaacgactctcaactcgtggcgaacgagatatccagagagtatcaaatcaagggtgaggaaatggctacctatattacacaatcaagagaattattgtaagatgctaaaggctacagtatctgccaagtgctgaaaaaccaatgttcattcgttgatatactggccaaactcgcaacaaacctggagatcatacaatacgaagtggtacatattgaccatctgaaaactccaagtattgagacactgggggtaaaagccataatttatcactcaatctcttggagatctatcaatttttgaactctagggagcttccagctaacaaggattccgcaaagaagatgtagtatcaagaattaaggaacataattttggacagaaagctttactataggggtaattgttgggttttatgccc

SEQ ID NO: 304355 - DNA, 2318 bp, Cannabis indica
aagagaaacgttttactatacacttaacaattacacccctctataactattcataaatcttatagaacacagtgattagattatagtacttataagaccgttttgttctattaaattatttttatcaaacacattttatttacttctcacctaccaaatgaaaaccatttctctttctatcacacttgtcccctcttccttttcatttttatattcttaccaaacatcacataatagaattggaaggttgtgtatcgaaagtaagagaagaccctctcgaatcttaaatcgtatatgacacaattatattattagtactgacaagaactttttgatgtgataaaatcagattgtagatacgacaactactgtttgtaaataattatttacagaactttctaattactaaagaaatattaaagtaactctagtttatattgttgatgttgggatcatgatcctttgggataactaagaatctttaaagtgaaaaggcagcaaatatagcatggtccctctcatgtgctataataaggtagatagattaattttatcccaaagtttttctttgcattgggctgattatgaggacttgggcattggaaatccaacaattaactctctgttcaagcaattgaatttgaggtcagtatagccactttgaaaactccctagaaggttgctgttgtcaaacattattattacttgtaataatcttcaccgtcttagctagatttgaaaaccatacacatctcaagaatcgaatcttccttatcaccaagcgcattaaatgtttgcatcggaggtcgcatgtttttttagtttttcctctaacatggtgaaagatgtctgttttttctctattttattaatctcattaaaaaaattaggctagtaaaaacaaacctattaataaacaaagttctctcaccgtctagagcgtacaagtttttattcttcctagagcttaggggttaggaactggaaaactgaaaactaaaataacttcaacttctacagcaccattaataatctatttttaacgttttttttgcaatagtttcattacatgatatttatatatatatatgaatgaaatacataataataataataagtcaatatctatgagtactacccatagccacagaaaaaaacaaaagctcggttgataagacaaaaacgcagacattaaaataaaataaataaaatataaaaggttaaaaaagaagatttgtattttgtacatagggcatgacaactagggaaaagaaggtgtttttctcggttcaaaagattagaaggttggaatcatgtggagtgcatttaatgcaagagagtgggaattgggtctcggggttccacaaaaggggatagtttttagtctcaatcaactctcgaagtgggtttttcatttttataattcttaaccctatgtctcatgtcggatctcaataactggttcacattaattacgtcttccactcttgtaataataatttatataattgtttcttagagctagacgtgatgataagggttttattttagatcacttaattaaagtccatgcacgcacaatgcacctgccctatacatatacatatatatataattattaattttttaagcccacttttctcttttttttttctttatttgaattttgtttttcattacagttcagtctatatatatccattgtgcagattctaatctatccatcgtgagcctactgaagttttcttatttatgaccaataaattattattctcttattattaattatatatatatatatattataaacctatatacgtggtagttattatttataattgtagtgtattatacgctttacgttctgagaacgcgttgaccagtggatggctgtatatgcaaagaaagtatttttttacaaatttaaagtgtttcttttgtgagtccctaatgggggaaagaaatagaagtaaattttaattacaagaaagagagaaaatattattattgatttcacaaataattaaatactacgtaggcttaatgagtacagtcgaagttttttattttggcattgtagcaaataaaatatgaatgatcacctatttattcaaacgtaggctagctggagggtaatcaagagcacacaatattatgtattaagtaggcaattggcaacatcaagtggttttctgattcacttatttatttaattgctattatttcactctttatattttgacgagataacctcatcctatgacttccttattatctaaagaatacaaaatcatacgtttacaaaaaaaaaaaaaaaa

SEQ ID NO: 304356 - DNA, 2521 bp, Cannabis indica
aaacctgaatctgtaagcatctctctctcatatatatatatacacgcacatgtatctaaatatatatatctgtattcaatttggtatgttggtttttgttgtgaccacgagctgttcgaataaaatgagcatgctttcgttttaagtttgttttccaagtttcatttcaatatgaacaatagattttagaaaggaagtaaaacataattctgactgatagtggaagctcaattaattgttaattttacagatttcactaacttttgttaaattttattttattgaattctagaaagaaaaaaaaattcttttagactttcttcttggtccttttccttgtgcggcaaaacactagagatcatagtgctagatagcttaagcatcttagcgttgtgcctgcattttgtatggaaacacttgatccagattgatctttctttcgatacagtaaggttaggttccaatattgacaaactttgtcacattattgtgcaccttcttgaagcaactcttattttcttatttagtgcttataatttgtgctctaatggttcagtatgtgatgattttgataaatggaggagtgcctattgcatttgctggcactgaagaaccagctgcttatggggaattgatctccattgggggccttggacctagtgtcaatggaaaattgagttcaactattgcagaaattcttcaaattaagctttccattgacagttctcgcttctatatcaaattttatgatgttcaggtatgtttatttgacttgtcctgttatggtcttttccttcaacaattttaccctttatacatatcattttgtcatttctttctggatcacggggacaattttccaatgatacaacttttgatgaagaaaaaagagaaaaccaagacaattttctcatttcagatgtttgtaatctcttcataaacattggtctattggatttgtctgaacttttttacacattaacaatttcgcaatcaaagttaactaatataggagaagaatcagaaaatatatatatttctagaatggaagaaaaaataccaacaaaaatgcatgccccaacccaagcagaaaacaatgcaattacaatcaatattcattcgtatctacacagttgccatttttttttctattaaaaacatcatctttgtaaacttatacaggtatttatcccaaagacaaataagagagagaggtagggtattcatgaatttatcttatgaaaatacttgatttgaataacttaatttacaaactgataagctgataattgagagtggattgatacatcacaattgtcatttagtgcgagtttgattaacttcttacagcaattcttctgtataattctgttttgtccagtaatctatccataactcattttttgttgcagcgaccattctttgggtttaatggctcaacattttgaaaacacccttgtcttgcttgagtagcatttcattggaattcaaaagccttaaaccgtgtcgtgaagctggacggtggattgatcttccctttaaggttgtaattttcatttagatatatggatgccaatatcttacattgtaattgtcattgcatagctaattagcttttgtgaaatgataaatgtgaaaatttaatttttgatcaaagatatgagaaaaatcgactgatctagcagcatctttttcagagcgttgctaatgctattagatcaacacaatgcatgctgtaaattttgtgataaatttagcaaagaaaaaagaaatgatttagtgcactttgtacgtggttgtgctcatccaaaataagttaacaaataaatcaactattgttgaaaattatttaataaatgtgttatagtgcgaatttttcgcttaaaaattcgagatcagtctcttatgaaattgacatgtgggtccaatcctcaagggatggatgagctgtcaattaatgactccgagagttgagctcgcttgacccaaactcgcgaaatgatgtgaccttaacagagtttagtcacataccgtgtctcgcatagtataaaataagcaagactaagagagatttatacaagtcgtgcatataccaagacgtatgtgatgattaggtagccttctcctgcgagtaagtaaagatcgcttctttacatagtgaactagtctaaatgacaaagcgtattcaataactcgatagggactcgtgtattccatgttgtcgatgcatatgaggtgtccatatacgtgactcaaatagaacgcagacaccttagcatgaggctaattagccctgcttagaaagatagaacacacccaaaacctgcgagtttatgcaagaatatgaataggcaactcgcaccctataggtcgcatatgttgctatattcattaaaatggatttaaaatgttctttatttatttttttacgtttattctaatttaatgttaatattaattgtaaacggttctataaccggtcaaattatgtgtaactaaaagaacacttgctttgtatata

SEQ ID NO: 304357 - DNA, 1698 bp, Cannabis indica
aaaaaaaaaaatagaagaaaaatagataaaaatgtatttaggaaaaccaacaaaagtggggagtctataagctaagacaatcaatgtacgtatacggtccctgtctatatgtgttacacgtgtcatgggttgaatacagagattgatctacgggtaaatagtgtgacccaaccttaaaatctttgagctttttctatgttctctgattcttttttttttgtaattgctaagatgacccttcatcttcaaataatcataatactaattaattagaattggtttcaatctgcaaagataaaactaaaataatttgttaattttaaaaataaaaataaaaaacaaaagaagaagaattaattcaaaagtaatgctctttgttgcacagccacggatttactcaactagtggtggagcatacctctgtttttcgtttgttcttgacgaaatatacttattatatataataaattaaattgataatatattactatgagtaaatccatttcaaaaaaaaatatattattatgagtaaatagcattttagcccttccataatgttagaattatgaaagccctgccatatggcttaatcatgatggctacgtattcacactgctaataatttagtgttgttaatcagaacataattattaggtagatactttgtggttttttaggtacgtaatatacagttcatttctattttatatatatatatatatatatatatatattgtgtaacttaatatttatgattatacttctcggtctaatgtctttactgtagagatagagttggttaatttaatgtttattatatgcatgtatttttttaatacgttatttttcctttttctattttctaatggtcgggtattttttacgtgttcacgtgactgtgaatattgatgttttccattgaaaatgaaaataaagaatgaaagaagaaaagtgaagaatggttctaagctaatttcaaatacgagtttgttccaactttttgttacatttatggaattatcggtcgctctaagaaattctatcataaactttttgatattcttgaagaggagattattaagtcttattgggattggattcgagttcaccctcgaaggaagaattacctcatgagttcccaatatttatgcatacgaacaacttcaaatgttcaatttcaaaagagtcgaccagcatctgaagatagtgcttttagaataatttctattttaagaatataatcaatgaattcatttaagataaatgaatattttatagagtaatttgcggcataaatatctaagtttaatcccagttgacaaataaatacctaagtttaatttttggcgataataatacctaaaagttataattctgtaacttttgtaagtacctgacttttgagtgttaagtaaattgtcacgtgacaattcctgattggtccaagtaattaaagttttattttaaaaaaataatttaaatctaccaataagaaaatgacacgtggataatgacttaatatttaacggttaggtacctatagagttccaaaaatataacttaggtattataccgccaaaaattaaacttagagtgcgtttggaagtaactgtgtaattactaggtagggtaattactagggtggtaattacacggtgtagtaattacactatattttaaaatgcaaggtgtgtttgg

SEQ ID NO: 304358 - DNA, 4032 bp, Cannabis indica
gagcatgagatcacaaagccttatggagaatggatgaaggctccttttcggagatcgactaaactaatcggtgaacagtggctgagaaatggtgttcacggagacacggcaaggaggactggtggaagagagaatcatggtggagttcgtggcattgaaggcacatcaatcccaaccaatttccagggtgttaatgctttctccacaaatcgtgccaaaggtattttaagttctgatttcgttgacccaccttttgctcaatcaaatcccataactggtatagtaattactgatatggtaaataaggttccatcaataaaaaaagggaccatcttggtggagaataagaagcgtgggacactagaagaagtgaatcagagtaatggtttgggctctaatactgaactgggcccagaattagatgaggaaaatgatcaagtcagtatggaacaagataatatcagtagcccaaaaaacttgagtggggcgggtctcgacgcacgggcccgccaaggattatgagtattttgagctggaatgccttgggcttgggaccccatggactgttcaattccttaaggatattgttatccaaaagagacccactttattttctttgtggaacgttatgcaaaaagaaaaagtggaacgtattaaacatgtcataggttttgagggaatgatcactgtggaagctcaacatcatagtggtggtatcgcttttctttggagatttcaggaagaggctcttctttaatcttatgatcaaaaccatattgatatggtcataaaagtccaaggctggcccgactttcgtctcactggtttatatggtgaacccgatcgcactaaaaggcacttgacttggcaattgatatatgatctctctaatcaatcttccttaccttggtgtcttattggtgatatgaacaatgttctcagtcaatcagattaaaaaggggggtcgtccttatccaaactggctgctacaaggttttcagaatgttttgtcaagctataatttgattgatatggacatggaggggtacccgtttacatgggagagtggtaaggggactgccaattgtattgaaattcagctagatagagccttagtctctcccacttggatggataattttcaagatactaaacttgtgaactacgagatttccacatccgactattgttcgttgtttcttgacctgataatgcgtcctgttgttgctacaaaaaggaaattcaagtttgaaaatgcatggcttcgtgaacccatgtgtcgtacgcttgtggaagatgcttggtccttaactaatgatcaacctttaacttcgaaaatctctcattgttctaaagttttggacgaatggggtaaggacatcaccgacaactttcaacaacgtattgctgcccgtaaaaaaaaagttaaaaagcctcaaaggaaaaagagatgaatgttccaatcaaatgtatcaagaagaaaagaagcacctgtttgaaactcttactcagaaggaggttttttggcatcaacggtcgaaacaactatggttaaaagaaggggatctaaattccaaatattactacgctgtggcaaaaaccagacggtgcaacaaccatatccgtactattcagaacgaattcggccaggtaatttatcgggaaagtggggttcaagaggttatggtttcatactttcaaaatctttttacaccatctatcacacaatgggatgatgttgttagttgtatttcaagaactatatcttagttgcagaatgaacaaatgctcgcaccaattgatgataaggaggtgaaagatgcactcttccaaatgcacccagacaaatctccggggccagatggaatgaatcctggtttttaccaaaaattctggggcattgttggtcaggatattgtgaagttggtgactgattttttcgctacaggtgtattcgaagcaagcctccccgatacaaatattgttcttgtgccaaagaagaagaacccaaaatccatgcttgatcttcggcctatatcgttgtgtaatgtgctatacaaaattgtctcaaaagtgttggctaataggttgaaaaaggtactgcattgtgtcatatcggagaaccaaagtgcttttattcctggccatttgataacggataacattatggtctcctttgagattatgcactacatgaagcgaaagagtgcaggtaagaatggagtcatggctatgaagctcgatatgagtaaggcttatgatagagttgagtggggttatttacaagctatacttcaacggatgggatttgatgatcatatggttaagttgttcatggtatgtgtttctacagcaaaataccaagtcagtcatgctggtaaagagtttgggaacatcaatccaggtcgtggtctacgccaaggcgatccgttatcctcttacttgtttataatctgtacagaaggcctttctgctcttattagacattatgagcagagaaatcgcattcgtagcattaaggtggctcgtggtgcactaattgtttcccacattttctttgcagatgatagttatatcttctgtaaagctaatgaagaggagtcatataatgtcttgcacttattgaacacatttgaaagagcctcaggacagaaaataaattatgataagtcctctatcttctttagtcgtaatactgaggtgggtattagagatgctatatgtggtgacttggggattcataaggctaatgacaatacaacttacttgggttttccgaatatcattgggcgtaagaaaacggctattcttgggtacttgaaagagcgagttcagaaacggatgcaaagctgggaaggaaaactattatccaaagctggtaaagaggtgatattgaagacggttgcacaagctctaccgaactatgcaatgagtgtttttttgttaccagccgagacaagcaaggaaatggagcgtaccatgtgcaagttctggtggcagtctaatactaagaaagataagagtacacattggatgagttgggagaggatgtgtaagccaaaatctcatggaggtcttggttttagaagcctttatgattttaatgtggctcttttgggaaaacaagcttggcggctattatcgtaccctaactctcttgtgggtcaaatatacaagggtaggtactttcctaactgctctttcttggctgctgagataggagggaacccaagttttatttggcgaagtattacggaagccctccctttgattagaaagggtgttgctctaggggtggggtctggtgctactattgatattttgaaggacccttgactgcctaatgtagaagacccgtttgtgcgcactgtgagtgaatcgttggaggggaaatcggtttcccaactgatgcaggtgggtcaaaggcagtgggatttggaaattttgcatgacattttcattgatagggatattaatttaattgttagtattcccctacataatgaagatgatgatgcttggtactggaggaacgaaaagcttggctattactcggtcaagagtgcgtacaaagtgttgcaggaacttcaaggtcacacgggtacaattgcaaactctagtttttggagaaagctgtggaatttgaaagtccctccgaaggtgaaaaacttcttatggcaagcctctacagattgcttacccactaaaacccagctgagaattaaacgtgtacccatagacgataaatgccctttttgtcttgctgatcgtgaaaccataaaccatgttttggtgttaatccattttcaaaagcttgctaggctggtttatatgtgggggatccggggtctatgaaaggctcttttgtcgattggcttcagctaatgtttgatagatggagtggccatgagaggtacttgattagtatgctatgttggtcactttggaaaagtcggaatagcttgatttggaaccaaaaaagtgtagaagttgcagatgtttttgtaacgccctaatgctaaggcacgctac

SEQ ID NO: 304359 - DNA, 3989 bp, Cannabis indica
taacatgactaaaaaactattagatttggctacctttgaaactgcgacaacacatcaggaatttttccagtattccgttctgcatttcgactatatatctcaaccgaaccatcctccaagtatgtatctgtttggaaaagggaaaaatgaggcccatggggtataactagcatgtgcaatcaccaattgtatttgatagtttcacctgtgctcgttctccatcatacttgtactcgcatgtatattctgtgttctgaaatttttgtactatctcagaaacccctttagttggtttagctaacatagggccaactggaataccaggagtaaagttacaagtctttggaagattccatacaccatcccccaaaagggcaggaataattttatcataaacaggaagtacagagtacacttgtttaacaatctttatagcctgatacacacacaattataaagaacttaaacaaaagaaaagaacaaaaaaatatttttgagtgtattcttgttagcattggtgcagttgactataattaacatgatcctacacaaaaaaataataataataataacatgatcttacctcctctaaaggagaatgtatattttttggagtagagtgttgtttactatatactgcagcttgtcctaaagcagctaaaagtgtctgctctgccaacccaattcgcaactttgcctacagagaaattttgttaaagcttattaacgactaaaagcaactaacaacaaaactcagcataatataagttggaaacctgaagcaatcggatcaaatatagaggttcacaatcagtggcagcaacaagaagtgccttgatacggttctttttcttctcttgactatccttcccagattcctgtttcattcaaaaacatgagaaagtgcatataactgcaataatagttgttaagtcaccttgattccctttacatggtctataaatatcctacacggtggtttaacaaaatacaatgatcattacattccaatcaagacagcatagcctcactaactaataaaatatactttttgtaaagatatgaaattacggcaaacaaaaaaaatcaatattcataacctagttagaaaaacaaggctagcgcttgccagtagctctaatttataataaattaattatacagtttttaaagatagatcagtagtagagtgttttttataaatgcaagaccgccgagcggttctacagatcaattacataacttgatagcttgacaactcaattcaaaacttgcacttcacttctaattatgacccatagaattcaaacctacataaataacttgtcaccattagaacacataattaaagttgccaaacaggctctaacctctgtgtgtgttgcacgtgtcctgttaattttgcctaacaaattacagtaccataaactgggagcaaataatataaaggtaacttgggaaaggaaaaaaaaacacaaatagatgcctaagaactataacaatcgagtgaaagatgacataatgaacaatgatagtcatctcaagcacgaaatgcagttgaaagtagcaatttccttcaacaaacctgttaggccacctattaggctaacatattctagatgtcatagaaatgtaattacacatttgttagtttatttgttgcagtgttgtaagtagccttagagagcagttagtcgtgggcaatggctgaggataaataaatctcagtagcctcatttcagggcatcagattatttgtattgttttttagagtgtgaactgtgaagatgtgtctagaaaatttggtacaccttgtaattgctctagattctcaataaagattagtaacaggtatttgccaagtcagctggttagtttagggaggggtttgagtgttagtaaggtgtatgttaagtgatacaccagcagtagggaattagaataaatagaaggagtgtagtgtaagtttggtgtggagaatttggtagggttgtaaccctttgtgggagagaactaagctctcgaattcctagctatcaatacattttcagccattttattctcttaattgctactgttctaaccagtttgacagggaaatcctatcaattagtcctaacatttcaaaacctctagtgtgtaatgacaatcataattaattcaagggcaaaaacgaggcattcaacctagtatacaatatcttaaataattttaatgtaatgaaaatttaaaaaaaaaaaaaaaaaaaaaaaagaaaagaaaagaaagaaagaaaaacaacctttgcaatgagacgaaatgtatcaaaaaccttggtaacagtcaatggatcaggcttccgcatcatagactgggaagaacggcttgcctttgcaacaagacctaaatctcccaactcctatgaacagaaatgacatttattgtcatgaaaaaaatgctaaataagaagacatataatatagcaatgacacagtagtcatccccatgttaattaaaaaaaaaagaaacacaccttttcttactgaatataagggaaccagaaactacgaacagatagcaatgacaataccttgtattgcttcttaacctgcgtttcagtcctcccacaagcttcagacagcgccttaataatcgaagcatccccaattccaagctcgagcccctcgtgggcaggagcaatccgattcgccgcaagataaaccacaggcaccaaatcttcaggcgtggtatgcattaccgtcctcaacatattgcatgcaatatccgtaatcacaatccgacccgactcgttcgcaatcaaatcaaaagccaaacaaagaaacaaaaaaggaatcctctctccctccttccaacaagcaatcgatttggggtcgaaatccacagccttcgttttcagttgttcatatttagcctttaactctgcaaccctcgtttgaacactcgcaccagaggtggctgtacaaactttcttagtagctgcgacctcggacggctcctcggtcgctgccacctcctgcttcacgatggcattctcagtatcgtggccattttcggatgcagcagtaagggagagggccttgtcttccgatagggaagaatcaggtttggaggagcgttctgagtcgggagtcttccgtttcttgggttctgaaacagaagactctgaggacttcttcttggcggcggcagcgcgtgcgccggacatgagagcgtcaaaagcggaggggcgagaggacatgacagagggagagagtttagggttgtggaagagggttatgggagtaaaggagaatgatttggagatgaagagagagagatgagggagagagattggagctaggcgaagacagtagcatgaaccgagtttgagcatttaaattgcagaaccagaacaagaacaagaccaagaaacatatggcgggaagaatataagtagtgaagagagaaagaagaagagtgtgtttggtttttattaattattacagacagacctctgacctttcctagctgacctgaccttccctgttagagaaaattataaacccgccttcaattttaaaaataaaaatacagacaaattcgggattatatttcgaggttttttattttaataaggctatttagaagttttcattcacaatgacatatgtctaatatgttgtttaattttcataaaaatagttttaaaagggaaatttgaattcctatacttacattacttaaaaatttgtcccctaaatgcaaagttattaaaattggtaatatatgaccattttaccaatttttctaaactacccctctcatttgtaatcagcctctctcttcctctctcttcgtctctctcagccgatttcccacaccaaacccacacccccaaaaaccaaaaaacccacacagtcgccggacccgtgacacccaaacgaccagggaacacagtcgaccaacgcaacccgaactctcgcaaccccgaccttcgacgaactcccaac

SEQ ID NO: 304360 - DNA, 2245 bp, Cannabis indica
agagagagagagatttgagctagatgtagagaagaaaatatatatgttgtgaggtttgtacacatggcaagacttacaacacagacccatccccaaaatcacgctattaaaaaaagctataaaatatctgccatgtgccttcattcggaggcagagaacatcactcggaggccacccaccaacaaaagccagaaaatttattaaaaaaaccaaaatcaaaaccaactcaaacaaaaaataaagctctgtcagaaagagcagagtagtgaagctaatttatgggggaagaaaagaaaaaaaacaaaaaccagagggggaagaagctctgaaaatcaatcaatggtggccgaaactcgatgacccagatgaagatttgagaagatggtggtgtaacgagaggtgggtttgagttgaaatggaaaaaaaaaatgatctttttggtttatttttcacgcgttggaaggaatgaggtattagagcctagagagacagaatgtgagttgaagaaaatctgtgagagagagagagagagagctttttggtgcttatcatataattggataattgagtggtttatttattttgtgtgtacttgtgttgtgattaatttaatttaattacttaaacaatattatgtgaactaaatgtaataggacttagcaccacatgattatggattaccaattgaatcaaaatgactaacttgttattctatcattcttgtctttaaaagaagaagaaaaaaaacttaataacaaaaattaattttaataatcttttaagaactgagttattgatgtcttatcaatatgagtaatagagtaacaaataaatgtctttttttttggtttgcataaaggtatgctaatcaaatcagaaagcactgataattgactaagcctctaataaatctttttgattagattagaaaaggtggagtttaaaaaaatgggatattagtaagtgtatttgcattaaaacatctctttggtagtattaacactgtgatttattttagtttgttagatatcaaattaagactaactaatattttgattaaaacaaattgggaaacataagcattgatataaacaccatattttcattattattattattattattgaatataaaaaaaaaattacattcatgtttaatggattcaattcaatgaattagctatgggttaggagagcttagagtcataggagatttctcaagcatttatggttgattttgtctaaagtgagtagtctttttcttaaatggtctattttgtctcattacataaaaagaaacacttctttaatcaacaaagtcattactcattagtatgtagggtgatgatgatgatgatgatccttggatttgtatgtctaagaaaaggaatcaaatatttgtgttgagtttctttcctcattgatcatcttggttgaatttaagggttcaattaatttggaaaaaagaagaaaaaaaaagttatatgttgcttcttctactccttccaaattataaacaagttgttaattaaaatatttgagattatcttttgacctgaaagctacctgctccaaccaaattggtgccaaaagaaataatttattttagttaaggaactttctatgaatgaaatgaaaaagtatcatgtgaacctttaataatcccaaaaagtgtcaaattttatagagccaaatacatgcaaacttggttaaaatagtttctcacaattattggtttttcactacaaaaccaaatttacactttagttttggaaacatgactaatatgttttctaattgtctaattacaaaaatagaaacttatttggaagctatagtgaagtaggagcgcatggcgggtggatttgcgcgggttttgagcggtttgtgccgtttttttatttagcgggtttggaatacaatggcaataactgcctaataagtgaaccgtttgcgctttttttaaatgacagtttattacagtttttttggcgggttggattgattaattaagaaaataaataaataaagtagacaaccttttattgaagtgataatttattaaaactatatttgcacaatatattttaacttatattgattttgtttcaaaagtagtattttcacctaattttataatgttttgaggatattaattttagaattctaaatctgaatgcatatctcaataataagatattatctatgaatttaaattttgaaatatttagacggtttattttttc

SEQ ID NO: 304361 - DNA, 1611 bp, Cannabis indica
caaacatcaaagccaatttcatgctcgaccgaattgtaaaaagaaaaaggctcacctggcgctagggacctttcttggaacttctggctcgagttcagtgggcaaacccagaaacccattgaacctatcgaaggtcacgtgcgatacatgcctcacctcagtcggccagctgatgtccaaggacgaatgaacgtcttctctctcgacactgcacgtgactatggactttctcagagccgctgccagaatattaagtatggcaaattggttctgctgataatgtcgaccttgattattagctttggaaccttgttttatgaatggggtcgatattcgattacatggagactcctcctcattactaccttgtttcttaaagtcttcttcttcaccatcattgtcctcctcctcctcttcgtcttcgtcttcctcgtcgttattacaattgaagaaaggactcggtggggttgtgttgaactcggccagccccaccagaccacaagatttggatcggaaaagccgggtcatttggtttctgaatcaagaacccagaaaagaaaaaaaaaaacagagagagtacactatacaaagatgcgatgtagctttacatatatatgaaaagggtgtatatgacaaagaagaatgatgaatatttagaggtaaagaaacgagagctgggtttggtaagatggcatcaatggtggaaaagtctggtttggttgagagagaaaatgaatgatatgattacagggttgagaggaagagggtgtgatgatgcagacattttgctctactttttgtttgtattcctcgtttgtgttcttacttttttggtgtcaacaacattattcattgttgagcttgtgagagggaaaaaaactagcagaaaaggaaaaagactaattgacaaacacaaaattgggacataacctcatgagagtgagtgaatactgtgaaagttttggaaacttgttttgaatattattgtattgtatttgtatataagagtattacattttacatgtttctgcttttttcatgtattatatatatatatataattatttatttgtatatttttcaatgcattgaatgaagaagaagaaggatgagacatggatcaattaacaacaagttgtgaatatgggccctttttcctaaggtgaaagagctgtctacctattaatgtactttgtagtgagttcttttcctttttagcattgaaagaagaaggaaaaaaacccaaaaagaaaagaaagaagaagaggaaagaaaaataatggaatttttttttgtattgttataagctttgccttatcaataacatgatattgagttcatacagtccatacaatttgatggggacacaacagctttttataaaaaatagaaaggttattttattgtagtgatgtagttttgtcatgggtaaaataaaatagtaaaagatttggagtgtatgctattatgggatttgtacgaaaattattgtttaatatgcatcttcctgggctggaaaataattttgtttaatttacatataatatatatatatatatgtatatttagggtattgcaacataactcatttgccatatttctatctgtaag

SEQ ID NO: 304362 - DNA, 1626 bp, Cannabis indica
tatattatttgtactccaattctaaaaaatgaaacaaaattaaaataaattaagtatttttaattaagataattttacaattaaaactataaaaataaaaaattaaattaattttatgtacaccattaaaggcttaaaatatataaatttgagccttagtcacatattcattggggaaagggtcgaaagattttacttgagggatattgtctaagaattcatattcagagatattgttgtaagagctacaagaaaggaacctctctccttgttcttgagttaatacaaataacgaggattaggctattaccgaaatgctctgggctgaacctctataaaattcttgtgttttcatgttgctttattatatttcaatcgttataaactacttgtcgcttactaaactagactcaatgtagttggctaaaagcgaggtcaacaggatctaatggagaaacatcgtgtgtagggctgcttacttctttccaatggtgattccttgattgattccaaggctgagaacaaaacattctagaatttggtcaactccaaaactccgcatgccatttcccaaagatgcttcaattatatctttggggtaatttttttttcttgtatctctctggttgacattcttttattcatcatcacctgactttgtctttttgtttcaagcttgtgttagttatgcttacaccattgataacgaacacaagaaagtgattaagcttgctagaaagctcaccgctgcagaggagtgtgctgtcactgtagaagattaagggacttctttgaggagagcattgattttctaaataaggagatggtcaatcttcaagaagtggctaatggtgccaatgctcaggagaacatcttaaaaaagagcttggctgttgcttgcaaggaaactttagatgttgaacaatcttctcgtctgtcactttatgaagagacctttgttgttgcttagtttaaagatcaagtcaacatccccagagagcaagtgactaaacttgaagagaaagttgctactgatgtcaccttttatgatggcttatgctttgatgccatctacaatgcttagtcatctaatggaggatcacaaccatttgattggtcgactttccctatgagtagcattttagtgaacctgttctccaaagaatagaatttaacttgaatggctgtgagccagtggttgaataagctacaagagttgaaggctatgaccccgagcataccgactttcctccttctacatttaatgcgctagttgcagagaatgaggtacaagatgaagttgttcttgacataataagcttttaagatgttgtcttagtccattcttcttttttgtttttagattttagctttaatgacttagttggtcatcccgagcaaccttttaatgtgaataagccttagtaaaatgttatcagaattgtttgaattaaattagaagttactccaacttaataaaaactattattccaatgtttgcctttttgattttactttatttgtttccacttcactgtttaacacttgcatagtacaccatgtcttaagaaactcaatcactgcgagtgatgtcactattctgacagttatctttaccatgagagt

SEQ ID NO: 304363 - DNA, 3265 bp, Cannabis indica
aaaaaaaaaaagaaagaaatgcagaattgattaagtactacaaccttcggtgagtggagccactcctcgagggggcatttgagcttataaactcgtcgtcagtttcgtctaccctgtactctgcaaattctacagatgccacagaaccctcgtcggaatttgaagtatcataacttgatctgcgactacctcttcttgcatcactaactcttgaccttcttttatttctggaattcctgaacttatcaaacacctgatacaagatacaggaggtccaccagttacctttattcccggggaagtcctcgaactcatctccagtttcatcatcgccatattctatcacatagtctcctagaaccacaccccgtgggacttctgaatgaatggtgctcaaaacatcaataatctcagaggactgctggaagttttcccagtcaagctgccttgcaggatcaatttttgatggtcgagcatgagggtgctccttttgagcatgtttctggagttctgagtacgtgcctgtaaaagtacaccgttcctcatcacagcaacgctttttctcatccagatatgaacggacctcatcaacgaccatccaaccagtaacatcacccctacacaggggacagcttgatttggagttttcctctgaaaccaaaggctcagtgttttcctcgttaactgtatcaattgtggatgaaggtgacatcccatatgcacttttaaaacgatctaaacagtttgagtgcaagtggtttgtgtcacaaacaaaaggacggcatcccttctcataagatgagcaatgaagaagtacaccattgtgaggaaaatccaaacatatgggacaaatcacatcttcccagttggtaatcaactgaatctcatccatgtcagatattttcagttgaaaccttctagtgctataactgttgaaaggcatgactggtctaatttctataagatggacaagagcatggcctgtgttttgcacatgtatcagaaacaccaagccaggcgatcggctagttaccagaagaaacagcaatacctcgatccagtaaagaacactttcgtataaggctgcatgttataaatagataatataggtttttaagtgtaagtgagatgtagactataaacaggtaaaatattatacataaggcataatactcatgttgttcaatcaaagaatatttcaagatgccagttaagtataaacgaaacctactctagctcagtctatattagattagaaggaaacaataatccaacattcagatttggggagggaagaagtgcatagcatcattcttcaagttcaaacaatgaactagtagtcaattccaccatttatacaacaaaggcttctaaagatcctagtactcctaaaattaattgaaaacctttaattgaatttcttttgttaaaagcagtccctgaatatcataataaaattaatgaagtggttatcaagacaaaactagttctaattaacacaatatctatagaggaatgatccctaaattctccctaagattagaattttggtcattcaaccaacctcaagagccttaatactagttaaaatttctttaacaattcacatctctttttcccttactagatgtgccatttccacaaatttcacagctttattttcaacagaggcaaaaatggtgtcagcacatattgtcatattttgactaaagtgaattatagaaagaagagtcaaacacaaccaaaacagctaaaacaaaagataaccggcaatcttaatatcttttgcctgctcatcaagagcaatagttttcagcatgaaatcaattaactttttttcctttggagacagacaataaacccaaaaacaatacataggtcggtccactggatggaaatctagtcaatcaatccaaaatcaaagatataaacaaaaaagtcagctttcagaaaccgtaataaaaacaaaaataagagaaactgaaatgatcaaattcactcacaaacaaacgattcatgaaaaaggttgtgatcaaaatcaagaactgataaccaaattgatcaattcacaaacataggttatcattaaaaaataaaaattagataaaaacaaccaaaacatataacacaaatccaaataaaaagtgaaaaaacaacaaatgggtatttcagtaaatcaaataaatttcatctttacaataataataaaaaaaaaaaataacccagaagaaaaagaaagctttgtctcaccttacataaacgtatatttatgtataacctgcaatagaaaaagaatcccagaagattgaagaggaaaagatggtttgaatgattagaagagaagaaattagggaagttcttatgggtattatgtttggtttgattgtgtgcgcctgaagaggtcagttttttctctgaagactctcagagagtaggtagggtcccggggtcccttatctttttcttcttcggttccctttttcttttttccaaaaattaaaaacaaaacaaaagacttaatacgaaatgactaatatacccttcctcgttgaccaaccttcacctgtaaaaccttctcatctagtttggtaatttggtccgtacagggttaattaaatgttttctcgatttcataaaaataaaataaaaaattactcttttttatttttaattagtgaaaaatgaaatgaaaaactaactgcagttcagaaataaaagggatttttggaaatagtcattaaccgattttattttttctgttttcggaatctaattttttttttttgaaatggagaaaaattattttctaaatatgaaaaactaatacaaaaagattaatattaccattaaatctcttgtgggtgaaagtattgatattaccaatattatatcaaaatttcattttctttgactctttctccatattcaaaaaatctccttttttttttatttgccatacaaataaaataaatatgcataattatcaaaagtggtgtatgaaattaattgttttgaatttgtaaaaaataaaataaaaaatcttaaataaaggcacaccagccaagtgactatataaatagtcagccacttttttttatataatgtaatgacttttattaaacgagagacacttgttctacatgccatgtttgcaattaattacatatatagggatatgattttgtcccgttattgtactttcacggattgtaatccgtgatgtacggcagccgtcagataatagagttatttgatctgacggctg

SEQ ID NO: 304364 - DNA, 2887 bp, Cannabis indica
ttgtaaggttttctttaacttttatatgtgttttaattttatcgtttttagaaagttcatatttaggatgttttaaacaacatacttgtgagtagatctaagatcctggtaaaaataattcccaacatgctttccaccattccaactactatttcaccagaaaatcaagcttctttgtctcagccatacacagcagaggaggtttatcatgcattaaaatccatgtctggagatagaagccctggtttggatggtatgtcagtgatgttctatagtaattactggtctgtggttggttctcttgtaacatctgctgtccttgatgttcttaacaatgttgtgatccaaccttgctcaatcgtacattgattacactcatacccaaagttaaaaagcctaccaagatcactcaatacagacctataagtctctgcaatgtcttgtataaacttgtctcaaagaccattgtactacggatgcaaccttttcttcatgtggttatctcagaatttcaaagtgcatttctctcacaaaggctcattactgataatgtgcttgttgcatttgaagttcttcattcactcaaaaatagaaagagaggtaacaaaggttttgcggctatgaaattggacatgagtaaggcttttgatagggtggagtggcattttgttcagcaagtaatgcttaaaatgggctttggtgatacaattgttcagctgatttctaagtgtgtgcagatagtttcctattcctttcttttaaatggtgctgttcttggcaacataactcctcatagaggaattaggcagggagatcctctctctccctacctatttctcatttgttctgaaggtttttcacgcttactgcaacatgaagagaaccgaggcaatttacaaggcttgaaagtctctagatctgcaccatcagtttcacacctattatttactgacgatagtgtcttgttttgtcgggcttctagatcctctgcaactgctgttaatcggtgtcttgatttgtatagttgagcatcaggtcaagctatcaatcatgacaaatgtgtcctatccttttcgccaaatacacgagctactgaacaaaatttttttcagcacctacttggtatgcctattcaaccatgtcatgaacgctatcttggacttccatctttctcgggacatgaccaaaaccagctcttcagtggtataactaatagaatatggaagcttctcaactcttggagggaacaattattctcagtaggtggcaaggaggttcttctcaaggctgtagttcaatcaatacccacttatgcaatgagttgcttccaacttccagcgaagctttgtcatcaaattgagcaacaaatggcaaggttttggtggggttcttcagcgtctggacactccattcattggaaaaattggaattttctatgcaaagctaaggtcaatggaggtatgggatttcggaactttattcatttcaaccaagctttgcttgcaaaacaggcatggcgcttaatggaatctcccaattcacttctgagtcggattttgaagaacagacactatgttaatagtgagctgttacatgctggtgtgggtattacaccttcttacacatggcgatcgatagtctggggtaacgaactacttaagaaagggctgcgatggagagtaggatctggctcaaatatcttgtgtaattcccaaccatggattcctaatcactcttcttttttaccactggtttataagggagacaatgctatgacagtagctaatctaatatctgactcgagagaatggaacttggaggctctgcagaataatttctcacaacctgatgttgataacattctttccatcccactgagcctttatccatctgaggatatattgatttggcattactcttcaatgggcagctacacagtcaaaagtggatatcagtttgctgctgaatctcccgatgctactgctcctagttgttcaggctcctctgttgattggtggcaatatttttggagcttgaaactaccttctaaagtccggatctttgcttggagggcttttcatgatgcactaccaacagcagcagtccttcatcatcgacacattgcctccgattccttatgtccactttgtaaactccactctgagacaatcccacatgcattactctgctgtaagagagctaaacaggtgtggcatcaatggattcacttccctggattgcatctttcaaggataacttcactttcagatttcatgatacatgtctccactatcctttccaaagaattgtttgagctctttataacaattatgtggagtttatggagtgaaagaaatgctgaatttcatggtaaaaagactaagccagtgcagttcatttacgattatgttgttaagtatttggatgattatcgaaaagcacaagatcgatcatcaacatctacactgcagcctgtctcttcttcttgtgctcaggtgcctgctgctacttcccaatccatcaagactcaagcacagtggaaagctcccccctccggccagtttaaactaaacactgatgcgaccataaatatgtcttcaaatgtgattggtttgggtgctcttgtgcgaaattcccatggagatatagttgctgctatgacaacatcactcataggacgtttcaaaccaaaagaaatggaggccatggcaatatcctggagtcttaaaactcttcttcggcttgaattaccggtgcatttaattgaaacagactcgcttttggttgtttaaaatatgaagaagtcatctaccaatctcatgttaggttttatgccctaaataaaactccatttcaatgtaatctattttattcaacatcaataaag

SEQ ID NO: 304365 - DNA, 3890 bp, Cannabis indica
aaaaaaaatatttcgacatataatttcgaacgtagaggttgactaagaggttgtaataggaggttgaaattagcactcgtcattagatattgggtaaacatttaagaatggttattttgaaatggaaaatatattatgtatgagtactaaaaaatctatttttgtatttggcaaaatagttttttattttattcttatttatttcttgatttttcagtattaaatttattatatttcaattcttaataactataaattgaaactttaaatataactattaatttgacaccaacttgtcataattcataatattgacctcgcttttgccaacaacaatgagtcaaattaaaatcattaagaataataaaataataaaatataaataatataaagtaaaaattaaccagatttttttactggaaattataatttttattagacttgaaaattggtgaccaagcaaggtagcaagtcacttagaacagactccaaactaaaatggcaactaggatataatctagcagctctagtaaacgtgtgagccactacattagttgatcgcttaacaaaagaaataacaacattattcatatttgcaagtaaatctttacaatcttgaatgaccataccaaacaagaaaattattttaattgagctttgaatagcttgcaccgcacacagagagtcagttttgatgaagacatttgcccaccgcgtctctttacccaactaagaatctctcgaataccgattgcttctacaagagctagctccacatggcctgaaagaagtttagtccaaccttctaccaaaaaaaccatatgaattacaagcagccacacccaaatcgaaactcctaccgccatcaaaaagagatgcatcaacattaaccttaatactattagcttgaggtaaagtccaatgctcattaacatcactagcctgaagaataggccatgacgaatccacaaaattttgagcacttttccattgatcaaggtagcgaaacacgaacgcaacaatgccattaagaaggaaggcttttcttttccaaaccaagttgttttgggctccttatacagcccaacaaacagctgctactttgcaattagttgttgcaggattgttgcagaagacattcgaacaccaattaaggaagcttgtaccctgaacttgcactgttctgatgcccactctgtcccagcatttcttaggctcacggtaggaaattagcacatggaaaatggactcgccctcctcattgcagataggacatagcgaaccaacaaccacatgttttgtccaaagttaaaccatcgttggtagacaatccgtacacacacacaccaaaccaaattttggatcttcgatggcagcttcaatctccacaacgtgggccaaaaagagctattagatgcttcaaaccagtaaccttgattttctacaacagggcatatgcacttttgacagaataaaaatcggagttcttatttctccaaaccaaatgatcttccacttgtgagacattaagaggaatattttcagtaatctttctatctctgtcattaaaaagatcattcaaaatctcattgtcccaagcaagctcacctcatctcatcaagttgtttacccgtgcattacacagagcatgatgattggaggtgatgacaagttatcttcatcggggagcacgattcaccaaggaccataatgttaccaccattacccacacaccaatgggcttcttttcgcactaagttttgagactcaaggatgctacgccaaacgaaacttgggttggagccaagttgtgcatttagaaaattgcctttgtggaaaatatttggctttaaacactctagaagctaaagcatggggtctagtaagcagccgccaaccttgcttacccaacagcgaaagattgaagtcatgcaaattgcaaaatcctattcctccaccccttttatgaatacagagtttgtcccaagccaaccaatggattcgtttgtgatccccatttgattttgccaccaaaatttcgacattgctctttccatgtcattgctaatatccagtggaagcaaaaagacatttatagcataactagaaagaacttgtaccaccgacttaataagcacttcttttcccccttttgacaaaaacttcccatctcagttttgaagtctttttcaaactttttcccttagaaaacctaacactgaggtcttatttatactcatggtactaggtaaatccaaataaaaaatcctctcatccgcaacattcatgctgaggagattacataaatgagcttgcagcaaagaatctgtattgctaaagtacactgaggacttggtgaagtttacctgttggcccaaagctctctcaaatttgccaagtaactcttgaattcggtgagcttcttggactgtggctttgcagtagatgtagctatcgtctacaaagagtgtgtgggagatcctaggagcaccattagccactttgcaaccatcaatctacccatttctttcatattttcaaagcaaggatgttagaccttccgcacaaaggatgaacaagtatagagacaacgaatcaccttgtcttgtgccacgagtagggtagattgggccaacctcatgattatcatggatgattttatactttgtagtggagacacaagccatgatcaatcgaatccaatgctccaaaaaagcccatcttacgaagcatggcttccaaaaaaggtcatttgattctatcgtaagccttactcatgtccagttttaaagccataaaccctgtcttgcctcttctcttccttttcaaataatggaagaccacaaaagacaccatcacattgttagagataagttgtcccagtataaaagcactttgcgactctgcaatggtagtgtccataaactgtttcatatgattagtcatgaccttggttatcaccttgtacaaaacgttacatagagcaattagtctcaagtctttcatacattgtgaattcttcttttttggaattaagactacattggcatccccacaaccatcttcaaaggaacatgtttcaaagaaatgttgaactagctccacaacatctactttaacaatatgccaacatttttggtaatatgctggggtcataccatccggacctgggcttatatctgggtgcatctggaaaactgcttttctgacttcatcttcagttacagggtgagatagctcaacgttagcatactcaggcacaacaaaagagatatcatcaataacttcttggtagtaagtgttaaaggcagtaaacaaagaggagaagcagtcggacatcaaaggagagagaccattttcccaatcgacccaattaccgtaatcatcttttaacttagagattgagttgtgacgcttacgactactagctgacttatgaaaaaacttactgtttttatctccagcgttcaaccagaattgtttggctttctatttctaaaaactttccctttgctccaaatttttgaataacctatttctcatctctgcataccgatgaatagactcaacatcatgtttagtcttgagtgctttcaactgtcttttacactactttatgcgacccttgaagtcgcctatgacctctctgttggaaattattttaagtaaaagacgagctgagaccaaagaaaaaacacaattgtttgaagaataaggcacatcgtggccgcggctagacacagcgttggccgcggctagaacacgaaacgaatgagagattttgggtgctccagtcgccgcggcgagggtatgtgtggccgcggctaaatactcgttacagaaccagggattttcagcatttatctggccgcggcgagcccatatctagc

SEQ ID NO: 304366 - DNA, 2296 bp, Cannabis indica
aataattaaccaaatccaaatttaaattcctataatcttaaatttaactgataaacataattccccaaaagaaaattcctaaaaatcttatgtcttcaaaagtcctccaacaccaaaccaagtcaggaggaggcctaaaaaaattagaaagatgcagtgttgccacataactaagataaagaaactgttctagaaaaagaaccccaacaaacagtaaggcctgtaaaaaagggcctattaaccaagctggtcagcagcatcaggtttggaagaagctttctgaagcacttccattgcttcagccaccttgtccttcagagcatccggggattcgataagatgcaaaacttctgtttggtccatctccagcagcattccagtcaccttcgcagaatgttcccgctcaaggcactcaaccagtggatatagctgttctccaagcatctgtgattttcataacacaacaagaaaaaacaggttaaatttggatattcctcataatggctttcgctttttttactttatagtgagttcttgtggatgtaccaatcgctggttgtcgggagtagctgaagccaaagcagaagcgagtgccgacattggcactggtccagttcggtgaatttcgacaggagaggcaggcacgggagcatcaaatggcaatggcattatcgaacctacaagactctgagggaccatcgatggctccaaaccatttcttccattttgcatgtatctaacgccttggttagggttgcgttgatgcagcagctgaagtcaaaaaagaaagtggtgaacaatgtataaaaataagaatttaagcatttgaaggatgataaaagcagagctacataaattgggaagacatggatgaaactcaaatcttatcagaacatactgaaatttcttattgaagggattggaccaaataattacccacataagggggttaaattggaacccaaagacaatattataacaaaatactgataattacctgctgctgtggcacttgtgggatgttcccaccacgacgaacccccatcctttgaccaggttgcccttgtctctgaaggtggtatggcatcatgaaatttggagccacaccaggccgcattcctggcaagatttgctgctggaatccgtaaccagcaggctgagggggtataatggcaggagaaccttgaccataatacatctgttgaggaccaagtcttggtgcaccatgatggaatccaggaattcctgatggaagaggtgccattgcacctggagctcgaatttgagcgaaatgggcctggaatttaaaacatttagaaaacaacataagatttcaattttgaccgaaatgtcacacaaacctccatcgattatcaaaaactctagagttgtaatctctaaatatttttacagtaatcttataaaatatagagcaaaaatgactatactatcgaaaaagaacaaaatgcacctgcaaacgagcctttctctcttccttccgctgagcaacagccacatacagaggctttcggcctagcatctttccattcatctcattcaactgagaaaacaaatagccatgttaattaaagcaaaataattgagtgcagaaaatgagtatcggtttttttatagtagaaaatgaacatcccaactcctacaaggacaaaacgcttacagctttagtagcttcctcaggagtggaaaaggcaacaaagccagagcccttgcttatcccttgtgaatcaatcatcacctttagataaaaaagaagaagagatatgtaagtatcaatgcatcactacttaaaatcatgaaactcaattaagaaccaacaaacaaaattaaactcaaaactaatatttgactgggaataaatgataccttgcatgatgttatcgttccaaactcagagaaaagctccctcagtttttcatcagtcatattgtcttcaaggtttttaagataaagattagcaccttgaagcttttcaaatctactaattctttcttgttcaaatttagctcttaactcagcttctctctcagatttcctttgagccctcccaacaaaccagactttgtcatcatgaaccttaccattcagcttctcaactgcaacagcagcagcatccgagctctgaaagttaacaaaaccgaagcctctagagttgccattggcatctctcataacaacagcactagtgatggttccaaaagcgccaaaaacttcctcaaggatctcatcactaactgaatcagcaatgtttttgacaaatacattagtaaacttgggg

SEQ ID NO: 304367 - DNA, 2774 bp, Cannabis indica
tatatacatacatacatatatgttatataagagagagaaaggtgagagagaatgagaatgagaaaaatggaaaataataatgatgaaaaaatgtcattattgagagcaaaaaaggtagaggaagaatgatatacagagtatttggttcatctatatttgttggtatttgtgtaatttggttttacagattgagttttataccaaaacaaggccaaattggaagatgggcttggattggtttacttgcagctgaactctggtttggtttctactggattttaactcaatctcatcgttggaatcaactctatagaaatacttttaaggataagctttctcaaaggtaaatataaataatataattaatctctcttcaaatatatatataatatgtttaaaataataataataaaaaaaaggttgtaactctagttcttttgaaaatggtaagatcttcggtgcaagaagaagaagttgattcgaattatcgaagaaaaaaaattaaaaataatgaatcggggtcttttcttacttgtatcgaatagaacatgttgagctagtaactacactaaacgattacgaaattagaatttaattttgtatttttttttaatttttagtggaatttatattatttcaattttcatctatcttaaatttttaccatataataatatgttttttagctcaatttatgtaacaaaaaaaaacatataaaagagagattattattgttagtatctcaaactatttttctcgacaattgaaaactgtcgagataggggtatcctatcctatctcgacagcttgtacttcaaagataagttaaattaattgagcggttattattcgttgagtaaaatttatttattttttgttgtaatgcttgtttgtttgtcttgttagaaaatgttgtccaataataatacattttgctcaccaaaaaataagaaaacaactaaaaaaatcaaaaatcaacctctcaataagtagaaaaatagtttattatttttactcaagatgtatttttataaataaaaaaattcaaagagtaaaaaaaaaatcttattaataaagtaattttgtaattttttttcttcagatttttggtctattttataaatttttcttaaattaattaagcaattattaatcgttgaataagatttattatttattttaccgtagttgtttgtttggctagttagaaaatgtggtccaataataataatattatgttactatattttatgtgacagatttgatgatagtgaattaccatgtgtggatatatttgtatgcacagcagatccaacaatagagccaccattaatggtgataaatacagttttatcagtgatgagttatgattatccaagtgagaaattgagtgtttatttatctgatgatggagcttctgatcttactttctatgccctaatagaggcttcaatttttgccaaacattggattccatattgtaagaaatatcaaatagaaccaagatcaccagctgcctatttcaaatccaatatttcgtcttcgtcttcttttataaaagattctcatgatcaagctcgtgcatttgttattatcaaggtgagtactatggttgatacgaatttcgatttttgttttgttttgtttggatgttctgtgttttgtattattagttgtttgaactttgtgttttaaagaattaattttgaactcggtgttttgttaaaaaatttaaattatttagattcgattctggtcaaaatactttttaggcctattttttatagtataacttgatttgaaaactatgttgacaaaaatcgaatatcttaatgtataattacaaaaccctatattaactttgcatataaaaacatgtcgtaatattttttatatataatttttttataacggtttttgttatagttacaacaacatttcaataattttttttaaaaaaaaaaatctaaataatttacaatgtcgaaagtaagtttcaattttttaaatagtaaattaaaatattaacaactttgttgtcatactccaaattatttagaatttttttaaaaaaaaatcttgtttgaatataatatttctttttacactatagagtccaaacaagttgttgtgattgaaaacaaagtgagtcaaaaaaaaacaaaagaaaaaagtgtaaacactaataaattacaaataatttgattaaaattggattaggtatttgttcattcttgactaattattttatgatgtaacatgtattataatactttttgtaaaatggtctcccaagtacattggactagacctatttttcaccacctactacaactctttacttatttaagaattgtttataaataatacaagttgttatatattataatcacatgttgtccaattttgattttaggaaatttatgaagagatggcaagtagaattgagaaagtgacaaaatggggtcaattatcagaagaagacaagtcaaaacacaatgccttcactttctcacattgggactcatcttggtctaggagtaaccaccacaccattcttcaagtacacatatttatatatataaatagtaatttctatatttcaataatgaaaaagatatcttttttctttctctttcaacttctttctaattttatgatagttacacacacaaacataacatttctaaaacaaaacttttcaatagaataatcttaaatagtttaaaaaaaaaaattcaaaagtataatttaacacatattaaaaaaaaaaa

SEQ ID NO: 304368 - DNA, 2767 bp, Cannabis indica
acataattattaatatttataacaattttttttattaggggcctaaaatttaaaattgaaacagaatctttaaaatgtttaagacggctcttagcataagcaaggggattcgaattactattcctactagacatagagagagataatcattaaaattcccaacaataaactagggaagtaaaggtgtattatcaaatgaaataaacatatttttacaaatttacaatttaagaaccataaaaatacaaattcccggcttgattgttcagtgagtgagaatcctcttcttacaacaagtagtcaataggcagtctgccccggtaataatggtggactcgcggagtactactagtagctcgtcttcgtatctccataactcaaactcaatcaataatcaaccccactgccttttggcacgccacaggagtcaatatactactccttccttttgctacaatattatatataacccaaatatttatatatatatacttcctccttcccaattctttatagtttaattttgggcagggtcagaaaaacgcagagtcaatcgaaataaagtcatggcttctggtaacctacgttgcgtgatcgtggccgtcgatggcagcgaggagagcatgggcgccttgaaatgggccctagacaatctcaagctccgagcccctgattcagaatctgattcctcttccgccggtggtttcttcgtcatacttcatgtccagtccccaccgaccatcgccgctggtcttaatcccggagccattccttttggtggacccagttaagcgtattcttttgcaaattagtacaaattggtgattattatgttttcttttctctttttgggtatgtagtaattacaatttttgtttgggggatgggatttcaggtgatttggaggttccggcgatcactgcagcaatcgaggcgcatcagaggcgaatcacggaggctgtgtttgatcacgctctcaagatttgtgctgagaagaatgtaattttttttttgagtatctattttgctttaatataattcatttgcttttgttttattgaagtttcgagtattgaaagtgtttttattgtttacatataaatagcaggggaatgtgaaaacggaagttgttattggcgacccgaaggagaaaatttgtgaagctgttgagaagttgaatgctgatcttcttgtgatgggatcccgtgcttttggtcccattaaaaggttacaacttttactcactgtataagagagttatcatactttatgcgctttgcatttcaatctcaagttgtttgtaacctcatcaagtggtccaaaagtatgaactttaatcgcgaaatgcttcttcattatgcttaagtatggtttgtatttgtttaggatgttcttgggaagtgtaagcaactattgcaccaatcatgcccaaagcccagttatcattgtcaaggccaaagacactggtgcttgattgatagtcataaaaaatggtatgcatttatccattctccaaaacttcttagtggcattttttattttaattgcccagttctctttgttcctctatgcgattaatactgcttttaatttccttgtgttgaagtaagcaatcaagttgtaggcctttctttttccttcacaagataccgttatcatttatgctatgtaaatttgctctgtgcatcataagctgggttctgtgattggatacctttaggatctgttctgttctgttttattgagggagggactaagggaactgtgtagcatatcttcattgtcaaatttaaatgtcagttcactagagcagttttaatgacattttaattccaccttctctttcataaatcttttagtgaaaatgctagatgatgagggagggaggtggcagtgtagcatatctccattgttgaatcacaagagcatttcaaatgaagtttgaattccggattctctttgataaataaatctttttgcgaaaatgctagatgatgagggagggagaggttgtgtagcatatgtccattgttgaatttaaatgttgttagctctttagggaaatttaataaaatttgaattcagcattctcttggattgattgaataaatcttttagcgaaaatgctagatgatgaagggttgttggtgattttttttctccattttatataattctaagatggtagtgcaagtattataagtgataaacctctaacaggactttcagcttgtaaaatcagtccatacatcacatatgcatgcatacatgcactcatttatctacttacaatacacatatacatgacattgatatccctatttacattgatgcaacacatgggcacatttgataatttattttccttgttaactttttgttgctgcatgcatagcttgggtgcatgctccagatggactagttgttttgtaatggatgggtgatcatatagctgttgttgattgtggattatttgctatggtagtatgcttcttgacgagtttgaaccgagaaagtttctgggtgtatttggattgacattctttttttaaaaacatttactgttgctgtaaatggatgtgtatcatgtaataataatattcacaatatgtatctacttaattatttatttaacttttagttgtgtaacataaatttgatataaccaagtagaagttatataatgatttccaaaggaaaataattggaaaaagaaaatcaactaataacaagaccaaatgaatatatctaatctatataaagtgtg

SEQ ID NO: 304369 - DNA, 830 bp, Cannabis indica
aaaaaaaagaaaaaaaagaacattaacttctttttgaaagaaaaaagacatcaactttaatatgtacttgtcctgattttcttagttctaacttcttatatgtttacagctaataaataattaataatgagtaatatttatttgtcaaaataatatttatttgtcaaaataaaaaataagtatttacatgtagttgttttaaagattatttattgcataaatactatatatttttaatttggtacacttatatactacataagttaaatttttgttaattccattactacctatttattaaatattaactagacttatattgctacacatgttagtatattattagtctatctcatattaatattattttaataaataaaaaataaaattcatattatatatatttaaaaaatataaattttaataaaattaataaaaaaagttataaaaataaataaattcctaaatgcgatcatatcagatcgaagtagatcaatctttcttttttttggatgaaaacgatcaaaatgatctcacccactctctcttcggcttctcactccgtctcgctttcgtctttcgtgcgtcttccgccctaaaccaccacgacattctatcttcctttctcttttgttttccctcctgtgagttcttcatcgacgttaatggcggaccgtagtctgcctagaatcaacacaacaatctctgaccttcgtctgtcgaaatgagcaccacgaatggtggttgttctctctctaacctctctctccacaagtttgttacactataaaatagtgtaagggcttattagtaatttgtaaatagtgtga

SEQ ID NO: 304370 - DNA, 2258 bp, Cannabis indica
atgcaagggaagcattaaggctaaatttggattctgtgtggagaatttagcttctccttttctctgtaactgttttcttgtccagttacttcaaaaaaaaaaaaatactacaatgtcatctataatacatctcggatcatcaactttaacgcaaattgctcttatgaaaactggaaaagtacaaaattagatatgtcaaaaaaaaaaacctactcatcacaaaccagtagacttgcatagttccaaccaatatgaccctctagaaatactgtagagtactaagaatatatactcacaacagctcgaatgcagattgcagggttaagcaatttccatctcaaactcaggtttcaactctcaaaatgcagactaaaatacaaaagcttattcaagccatccacatatcatgcagaattgctcattcgattcagagacccacatacattcaaaggaaactgaattattgtttgttttaatctaatctcaaattgatttttaacaaaaacaatgcaaccgagtttccccagcatcaaccatcttcctcctctttgcaaaatcatcaatattacaaaaagaaacaaaatgtaataaacaaaaataaataaaaataaaaaggtaaatatagcttcttgttcaaaactaaaacaaaaactgctcaaatttctttgtaaataattcatagaatctaagggcagtggtgagtagtagtactctagttcgttcttggggtagcccattccactcggaggataagattatcataaccatacccattgagtttattaatggctctctgagcatcttcacgattaacaaagttaacaaacccaaatcctctgctcattccagttttctgatccacagctacgtaaacacggctcacagcaccaaaaggtcggaagagctcaagcaagtcaggctcgcgagtatcctccgaaaggtttgtgacccgaacagagttctcatcattcctccgtctcatgtccgttccgcctctctccgccaccgctcctcctctcattccaggaggaacataggttcccttccctgaactaggagcagctcccggagccgctccatcggatggaccagccttatcaacaaacacttcagatggggctgcgagatccttgtaagggcatctcgaagtccaatggtcacctttcttaccacatgttctacaaaccatgagaacagcaccacctttcgcactcaacggatctccagaattcttcgcttcttctgccttgctacctatattattccaattttcaaaaacaaaaatttatatatgtaaatccatgaatcgaaatagaatcagttgaatcatggtagaataataaagtaccgggagccctaggtcgctcgaggatgatctcctcagtggagaccatggtgagcctgctgccaacatcttcttgcaccgcgtcgccgaacttgggccaggagcggcgctctacggcccgcttgctgagacgagcgttggctagctttctagttcttgtgatagtggtgatcttaaccttattaccttcgtcattgaatttatattcaacgaccttcttgattccattctcatcgggtccgatgacctgacgaggaggcaaaagaaagtcaaggtcctcgccatcgtcttcttcaagctctccccaccgaagcttggcaggctgcgcaaggtcagttctcaccatcgccctagttatcgagtggtgttcgactgtgtgcgtgccaatgagataaaaaagattagggttttgatatccttatcacattgatatcaatgtagtttacttgcgtgctataatttcaaggtattagttaaagtaaacttgaattagatcaatggaatatctatcggaggggaacgatattgaacttagagacgatatattaaacttattataatatctatttaattcaatatcacatagttgattttagatcaaatgatctcaatcttgagatggttaggttttaattcaattatattatttatgttcatcaatttgttcgttaaagtcgactaatagatcttctcgtgacatacatattaaggacgtggtagttcaattgagtgagagtgctaataatatatacggattctatagcttctatttggacattaaagtgaaataataatttcattcgagcttggcttaatatagataaatggttgagtactcatttcagtaattatattattttagtgaaatatcatttataggtagctaagtattttaaagataaagtacattgaa

SEQ ID NO: 304371 - DNA, 1856 bp, Cannabis indica
aaagataaaagtatatatatatattttgcagactgggaaaatataagatcagatcagatcagatcattgagcctcacctaaatgttcatgagtagtagtcgtcatgatcatcagcaccaaaagaaatcaagataatatgtataacaaaattaaaatcatattaagaaaaaaaaagcttaattaaggtactacattagaagatgactgctacacaagttgaggtcctccaaaaccaaattgcatcacatgagaattatccaaattaggtagcaaattatggaactcatcaccagttagctcttcaaatccaagaaaaccttcaagaaaccctgttgttgtacaattactacttgaaatagcattctcatcatgacctttattattaatcatatcccacataccatgatgatgatgatgagcttcatcaacaatttcttcttcttcttcttcatcttcctcctccattttaactaccctttgttgatccgccatgcccagataatcaaaaccctgaaacccaccactagtagtatagtccattttcatggctattggcttagtgggaaagtaggcgtttaatttggagtaataaccaacttgattatcatcattattattatgattatcataataataattactattattatctaatgatgatgatgaagaagcaggtgttgtgggaataataatatttttgactactgatgatgaattattattcttgggcttacttttggtaatactctccttcttgcagcattgatctttctcggttggttttccagtgagcctttggactaactctctgaaatttgccacatcagtcttgataatctctggtgcaaatatatggataatcctaatcttaggcttagtggtgttaattatggtacttgatgaagctttagatattgtttttgaatctttgtgaatggctaaagatggtgatcttagattattaatctcctccatgaaaagattataagaaaatttatattattagataagagatttaagatataagacaaaagaaaataaagggtttttttttgggtaagggagagaaatttgtgtttggttaggaagggttgaggaaggtttatatatataggagagaaaggaagtaaatgggttattaaaaatgtggtttgatgggaatcagggaatactataacagaaaaaatatattttatattaattagagaagaaaataaaataaaaattataaacaataataataacaaaaagaaaaaaatataacaagctgtctgatgggagcaaggattggatgaattcttgtctgacaaaatgcacgagtcaataaagtaaatggaactcaatggtcccctaagtttcccatttttagattttgtattatttagctataaaaataataataatatatttctacaatatgtaattatatatttgtttactgttaggtttagataattattgattaaattaaggtgaggggaggtgggctggcatgatgaggggttggatgtgaacacaaacacatatgcagtgattttttctatcaatgttaattattttcacactataaaatgaatgacctcaacatatatgtatatgatgatatgaattatggtaattaataatactctttcttttttcaaacttaggatatattttgatatgcttgattttctttgccttgtattacttgcaatatgaaatacatctcccatttctaactattactcttcctcgtgtgccttgatacttgacttgacttgagattagtaggacctatttaatttatttcactaatcttttaataaaatatatatttctagggctcgtttggaacgccgtattaggtcgtattg

SEQ ID NO: 304372 - DNA, 1183 bp, Cannabis indica
ataacctaggggcattttggtaattttactaatccattaaaccgacattctaaaaattctaacctagtccggaataccctcaaaataattcttccattaatgtcgtgacatttctcaccataatgctaaatttccacagtagccgggcccgataaaatattttactcgaattatggtatctacgatacccatatatttcaatacaatctccgtaattaataaattacgctttatttattcatttactcaaattccactaattaactcgtaattagcttaagtaagattataatcttactctaatatccacataactacatatttaataaaatatggccaaataaatatcaataaaattttcgggatattacaataacagaattctattgttaaaagaaagtaccaacacatcctcaatgctgctcgtgctttggctttaaaatcaaacttaccattagcatactggcctcaaatggtacacactactatctatctcgtaaatcgcattccctctatcacccttaaagagaaaacaccacttgaactacttcacaacaagccgccacagtttactcatcccagaactttaaatcaataacagaatattgatttaaactacttaacatatgcattacacatccacatctctcataaacttttcctccgtgcaagagctagcatttttataggttatcttgagcatatgaaggcatacactctgcttgatttacaaagcaaccaaatcttccatttgagagatattgttttctatgaaagtatctttcctttacaaaacaatcaaaaccataacaatatcaacaatttcttcaatagcaacatccctactccaattgacgctattgcaacatcaactatagattccactccattacagcagccatccaaacacacaaccataaccaaaataggaagaacatcaaccaaattatctataaaacaatacttatgattctaatcacagtactgcttaccctcttgctaactacctttcataccacatattttccaagctttttactgctgcaatgcttgctactgctcaatgttcagattccacatcctatgtagaagcttcaaaacacaaaatctggaatactgccatggatgttgaaattgatgttggaaattattttaccaggaacttagatctactcacaagtat

SEQ ID NO: 304373 - DNA, 2048 bp, Cannabis indica
gcggacagagtcgtggaggaggaggagctaccgatcctggagtaaggacgaggaggagccgaggtcgtcgtcgatcccatccctgggtcgtcgtccgccgtggcgtgggtgaggtctgttgctagacgctggtggctggtgtggtgggttgggtatggggtgggaggctcgttcgtgttcgtgaggtctggtgtggactagaggctgctgaaatgagtttttaggggctaatgaaatgtaaatgatttagggttttttatttttttaattaataatttaatatattaatataataatacaataaaaatatatatatatttatgtaccgggttggcgggcgggttctcgggttcaacccgaaacccgatacccttaaaatctcaacccgcgaacccgcccgaagggtaccggcttgaactcgacccgaccctaaaactttttttttaaaaaaaatttacgggttcactggttcggcttcgggcgggttgctcgggttcgggtcgaacccgctcaaaatgttcagtcctagcgtaaatagctttcattaaagatttttttctgatatgattttctaaaatagttgtgtggctggactaaacacttttttttgctggagaaaaactcaattaaaacaacaaaaccagaacacaaaccagttcaattggtcacaagagggacaaactcctctattgcaataaaaccagaaaaaaaaaatgtctaaacacccactttgagagcttatgtgcaacctaatttcgggaacgaggcagccaaactacctccacttcagggagttcatccaacagctccaacatgctccaaaacacacccgtcagccgccaatctggggccctacccgcctgcaaaccttgcaccagcagctggcaatccgagacaatcaccacctgcctccagctccgggtttggcaccacctaatcgcatgaaacaaggcccaagattcagcttccagcggttgatttgcatcaaagttcacagccatcgcctccaaaacgctaccctccgattcaaacactataatcccagcagtggcacgcaaatctttgaaggttgcatccacaaataaaaccagtttgccaaagtaaatctccctatgaacatgctgcaacacaaccgaattagcctgagtatcccaagcagtcaagagacaagaggcggccttctgaactcttgccaaaacaccccttcaagacgggttgacgtgatcatgaaaagctcgattccgagctgtccacagttcatcaatcaaacagatatcgaatatgttaaactcccctatatctcctgcatcagcaccactcaaaaaattaggagttaaaagccactcaaccatcgttctcggggagtcaaaatggaggttctcgcttctaatggaccagcggctagcaaaccacaccgccttagctagtggacatctccaaaatagatattgagctgaatcatccgcttcaccacagataacgcaactaatattattgccaaagatcctccggaggcgacaaccaaaagggaggataatctttgcagagtttccagaggaacaattttagtctctctatgatcttgagcttccaaattcgagtccagaacaagtccagctcacccagcgacacttaataatggacttataagcaacgctcggagagaacaaaccattagttgcgtctttctacaccaacaaacacttgtgatatctttgtactgttttaacatcaatacatcttgaatctactcaaacctaaaaatacatcaaaacaaacataaatttgtataaaatagacctagataaactaaaacttaacttaaattaacgccttagagtgagtctaaaattcacttagggtgcgtttggaaagccacgatgtaattgaatttgtgtgtaattggaggtaattacacaatttgacatgtttgtctaaccatgtaattacactataacagtgtaattggaagtaattgagaggttccaattacactctccaattctcatggccccccatgagaattgaatgtaattacactgtgtaat

SEQ ID NO: 304374 - DNA, 1967 bp, Cannabis indica
ataacttaggctaattagactaatttattagattaaattctagttaagaaatgacatcgagaatatatagcgtatagtgaaatactaccacgtgggcattgtgaagagacattaatttgctggtcaggtttataagatttattaattaattatcatgaagtcatgttctgttgttttatttatataattatttaagattaattttatgatttatatttaatagtcatttatgtgaacgaaaccctaaatatatatgattcgttgatgatctgatcttaataatgagccaaactggccactatgtttttctaattaatccttatttaattattagttggagccagaactagtacgtactattaaaatagagaaatgttagtggtgttcagcacttctcctatgtgtcaatattattattggtccaactaagtatcggatcgcatataatttaatataatagtttttagggaatatcgttagtcaatcgcaacgcaacatgtcgagaaggtgctagacgtaccactgatatctaatagcaatgctcattaaaataagctccctctcaccagccaaaactacatatatatttttaatttttaatcttatcccatttcttatttgggactatattttattttattttttggttgagttaaggtaatatcgtatctttatataggattatagggaatcataatcacgtgggttctagctaatctcagtccatattaatataagaaactcttaaccctttatatatccttggaaaattgcatactcctacaaatggtgcacccattatgatatatttggtattttaaattatattttattttaatttttttaataattgtgtacgttgtaattatatttaaaatatctggtaaagtttggagaaattcaaaaaaatttaacacgcaaaaaataaagttggtcaaacagtattttacacaatcgactcttttattttttacgcgtataaaggttactcttttatttaacattaaacactgctttccatattatgaattatttcaaatttttcaaaactttgtagaatgttttcatgaataactataatatacacaattatttaaaaaagtagagtaaaaattctttcgaatgataacatacacctgttttatgaagttgcattgtaaaagcaccctgtgtcttctttttttctttccttttctaaaaatatatattttaattagagcattcttatgagacactaaggtatctacacttttatgacacgacgtcttataattgattaacaattgattctttataatttttattaaattaaaataagtggagtccaatattaaattataacaatagttatattatatctcataagagtgttaaatactatggttctctttaatttatagatagatcatgtacattttaaaataaaataaataaattaattaaaatagagagcctagaggcacatagattggtcccctttttaaaattattgcctaccctagctacatgataattaagaaaccctagttagttatttagtataattacaaacttaattatatagtttcattaatatatatatataccatgagcatgcgtagtaagaagcttagtggttgtattgtacggttgtttcttatgctcattagtcttttttttttcttagtttaaaattaaattaaatagcaaatggattttttacttaattaataatagtaaattaatatataattacatatatctgacatgactgacttatattgtactggcctttggaagagaccaccttagtgaaatcgaaatcagtcaaaagcttcctataatagaagttttgcacactactataatatatatatatatatatatataaaaaaatgggatagaaatgtcgacatatatatatatatataatatatatactgacctaataacaatattatgagagatatatagtaattagtttggtt

SEQ ID NO: 304375 - DNA, 760 bp, Cannabis indica
aatatatataatttacattttctctcacattatttttaccgggtatggctagggtcgagtccaagatttgtgtttgggtccatgtatcgggatcagtttctaggttctggcttggtcaaggtttgtgttgagatatgaaatattgaaatattattattattgtaataaaaaaatgatagaaaaatcatttttaaaaaatattaatcaaacacattttgtactttgaaaagtgtaaagaactccatggaaggaaattcagttgcattggtgtcttcatcaattgtcaccgaaccaaccaagttttggcttggtcactaagatcatctttgtcatcttcaatagattttacttcacaatctttagataaaaaaaagtaagtgtttttgatatcaaaactatgtattttcaatgtaaagggcgcatttaaggcaccttattttgttctgagttgttaaatttaaaatatgtaatcttactataataattatactttatgtgtggttaaatttaaaatatataacctcactaattatagtttattcagagttattgagaactattaatctagcatattggtttctagaaaaaaaaacacacattggttacaagggtagccaataataataataagacatatttaggtaaatataaaaatataaagctagtttatataaatatgttaagaaaatttaataggaaaaaatatactattaaagtaaaaacttaacacatatagaatatgtcattttgaattaccata

SEQ ID NO: 304376 - DNA, 2651 bp, Cannabis indica
  modified_base (222)..(222): a, c, t, g, unknown or other
aaaaataacttgctatatataagtgtgttatgtttgtatgacgtgtgtatatattatacgtattaactactcaaataattttaatttaaaaataattatataatcactagatagtctaatatagttattacataaacataattattctttatttttaaattcgagatatattatttaaatatgagacgaataattaaaaaaaaatgatatattatttttaanaggagttttttttttttttttttgaggaagaacaattcattaaataactaaacgattacaaggaaatggcaagtcccgctcaattgcggaacgagcacaagggggagaaaccccaatccacatagcactaactttgtgtttcaaagcataattggctaaaacatgcgcaacctgatttgcttccctaaaaacaaaccgcaccccaaatatttgacaaaaaaaaattagtaattacataatgtaattacacttaattttaataattaagagatagaattaaaaaatataattaaaatttttcaattactctaatatgtaattcttaattaattcttatatttatttaatttttcaaaaaaaattaagtgatacatggaaaagaaatcactaattaattttaaatttcaatttttggaagtttttttattgatgaaactatttttggaaaagttttaagttgatggaaggtccacgtaacaccaatgaagaatgaggaagccactactttctcaccacagaatgctattagatatttttcttttttcttcggattaaatcactgtcgaattataaaatcactatcaatccgatatttttatattgattttagctgagaaaaaaataaaatataatttatacaaaatataggatggtgttcaaagcgatgtcaccatctttttcaaaaattatttagaactcatgaatatatgtgtccttcccataagtttaggaaaaataaaattttcatttgacttttgtcagtgtttttatttttttccctccctatgagggttgagaatttgtgttcatggattatatttatgctctattatgttgaaacttgcttattaaaagtaaataccaaactcactctatttatttattattagttgtgttaaaaactaaaacaagatgtagtttgcttgtaaacaagttgatgtagcacggcctaacacgacttatagaccctaattaataaattaatgtgacagataataattaacaaaaaataaatatcttataaatgctctttcttaccaaaatttactaaacaagttcctaccgaaccgaaaaaaatgacatctcagaaattttaagcaaccaccatatgctcaaagcgatgtgcatcatacccctaccgaactatatataagcatttgaaaataaaaatcaaaagaaatcttcgattattcgaacttctgagtttcagctaacttaactctatcttgttcaacaacaacatgtatattggagaaacccaactggttaatctctttcaacacttgcttcaaagccttgagcttactaacaacttgatacattggaattcctgatttcttttgattccaacaactctttactcggtccacaaactcaagataataactccacattatgaagtacttaaacagcttcttaccattaaaatcatcttcatacacagtgttatttcaatttttgctcatatgacgtggctgttgggatattacgtcctaaataaaactcattacgtcctaaataaaactcatttcaatataatctgatttgttatcaatagaaaattagaagtcatttatgtttacatgtagttttcatgtttatggtttaatgtatacaaattctgttaagtccagaacatatagttattcacaattgcagtgatgtcaacacggtggaaggtaattgtgattatatgcttcaaaagttaatgtcccatgattcatcagtgcactagattgtgatagtcagcaataaagcttacttacaccttggataagtgttatgttctttttagaacattggcaaagtatatgctagtattggatgtatggagtatacattagactaccgatattgatcttagtaaaagtattataatcttaccattgtatctttttaagtcaatatgattggttgatcttagatcaaaatatcttaatcctgacatggttagattcgatctcaagagtgttatttgtgttctttaagttattagtcagagactaccatttagttcgggtcacacgtacagcttgggaacatgatagtacaattgagtgggagcgctagtcatagatatgaaatttatagcttctatctggatatagaagtgaaatgatgatttccttcgagcttggcttaatagagataaatggaagagctcttatttcaatgattatattagttgactgaaatatcatttataggaagctaagtgttttaaggataaaatacgttgaggagtaaaacggtaaatttatccttactctgtgcaaatcatctatagatgatctttgatcattaggattagaacgatagttaaatttttatagcgtatctataacgtggaacatatagagttaacaatataattgagagtgcaattccaaatctataatggtgcaatgagcaattaataagttagggaa

SEQ ID NO: 304377 - DNA, 2469 bp, Cannabis indica
agagagagagagaaatccgagagatagagagagaaagtgttatgaatttttgttatttattttttatttgtttaggggtaaaattgtaaggaaaaaatgatttaagtatattttgcatgatgcaaaatatcctagcatatttttagtgtacaatttatttttaagcatatattgtcaaattttccttttaaaatacaaccaaataaaaattgtttctttatcattccattttatttcattacctccaaccaatttagcatcaaaaattctattattattattgagtttcttgatgctgtgcctttctggtggaatccatatcgtaattgcacatatttttcatccagggtcatgtcgtgatcgtactatattttttactctactttgtgcctgcacttataccattttgtatcgcgtcgtgtcaataggcctccgtttttagcattagcattgttttaggagctaaaatcttttttctgatgattgaaaaagtttcaacagaaacacaacttctaatattctatttacagattacataaatacaacaacactgctctttcttttcttttttggggataccaagacaacactccatcaaaaagaaactcatattttacatattttcaattctattttatataaatcaaacctccacgcagcagcctgattgtacgaacccatcaaactcttgagggacctcaatcttgttcattttaccactttgcccttccataagaaagaactcctgcacccctccctgacaacccgacccggataaataggtccgattaccaatttcaatcccgcatgacccgacccgaactaccgagacggaatcagcccagcaaataaactttccatctttgcccaccccaatattcgacctcggacaccgactcgtccaccaaacgttctcgactcgccgccactcgcccgagtcgggatcgtaccactcagcactagtttcgaagttaccttggctctcggttcggtacccgcttacaacccagaacctggaaccgattaccagtccctcgcactcgtctcgctcctgactcatgtgagtcaactcggtccactcatcgttcctcacatcgtaaacccgcgccgtactcaacgcgtttttgttctcatcgtggccgccagagacgaatatcttaccgtcgatttcaccggcggcgaaaaacgatcggcactccggcatgtccttcccttgcctccattcccgagttgtgaactcgtagacgaacacgtctctaaccggttcgtaactcgccgggtcccaaccacccatcaccacgagcttcccctccgagctcgacacttggcagaacaacggtaagccacgtgggtatttgggaacaggatcgacccagtcccactcgccactcactgggtcgaatatggacacgccgtaagaaggtggaggcgtctgtttgaggcctttgggttcgggtcgacccgggagtaactggaccaaacaggccactttacgtgtatgaccggcgagcttcctgtgatggtaaaaatgtgggctttggaagagttttctccatgatcggcaaactctagcggcaactcggtgagttgagtagtgaaaacgagtcaagcactcgagtgcaagatcgtcaggaagttgagggattaattgggtaaactcagtcatactcatacatatattctagaaggtttctatttgagaatggaagttgtttttaaattgaacacttcaatggtttttataggatatttgggtataaaaaaaaaaagcaacattatttaaatattttaaacggattaaatgccacgcgacacacactgttttgacagtactttacacttggatttatatttatttatttatttttatatatctaattatttttattaatttaacgaaatgtattttaaatataaaatcatattttattaaatttaactaaattggttttataaatatatagacattaatattatttatttaaattaatttaaatatataaatattaatatattattttaatattagaagtatttttaattttaatattcttaaattttatacttttttaattttaaaaaaataaataattttcttttaatttataaaattttaaaatatatataataaaaattaaaaatataattaaatacgagaaagctataagaaacaaaatgataaataatacaaagaggagtgactgtgacaaagtgaacatccaattaagacacatttaaagggttaatttcacaaatgcacaaaaacaataaaaatacggttttacggaattttaaattttttacgatttatttgattttatttacataaaatacggtatttttatgttaaaattttattcatttattgttaattttttattatatgtatgttattttttgttattttctttttgattttatgttgttttcgtgttattttttagaaaaccgtaaaaatatatataaaaa

SEQ ID NO: 304378 - DNA, 2308 bp, Cannabis indica
aaaaataccgccggacagtatttttgtaaaaaaatgacaaaagttagtataccatgtaaatatcccttattttttttttaattactaccatttaatttcattcaaatacaattagtaacttaagttactaatttaaaaaaaataataatgaagatgagttgcaactttttatgatcctcaatgtaaatcttcattataatttaataataatgaagatgatttataactctttttaaatcatcatttgcaatttcatgtttttatgtttccatttaacaaatatcacattaaattatttattgtttaattatttattctaaatattaaattatatagaataataaactagtgcaagagtccaactattggctacgatttttcactaagaacaattatttgatacttattttgaataattattcgtttcttttttaactattaagatctaaccttcctctatttattcatataatagaccaagaaaaaaaactttgctctgtaatgcaatgcaataaggttttttaatataataaaatttaatattagaaagtaaacgtaattattttttatttttatttatctacttggatttaattttatttttattttttctttacaaagtaactctagtgagccagacaaaattaattgtagaaaaagaataatggtttcaatcaataaaacttcaaaagggaattgcaattgttccaatgccacacaaaggattcaaaaatcaaaaattaaaaattaaaaattaaaagactgcaagaagagctgctccagcaaataaaagcccaccaattgagcctgatttgaggctcaaagcaccagaatcgtcatcatcatcggggcccttagacttggccggagcatcatcagaatcttggtcaacactcttaacaggcttagaatcagccacgggcgccggtgccggagctgtagccgttccaaaaatatctaaaggaagcaaaacttggtcgacttcgaatactgaaagctggccatcagtatagacggtattactgacggtagcattgaccacaccagtggtaatgttcacctggttactagtcgaggttgttacattaagtgggtactggccattttcgctattaccagcttgggtgtgaattgggttggagacagtttggaattgggagatggtataaaaggctgggaggacatggtactgaactaggtgaagttgttgttcactggtcaaggagttgagagtgcctgtcttgaggctagagaaggctgagtcggtgggtgcaaagactgtaatgccctgacttgaaccactaagttgggaattgatttggtcagatacttgggtaccctttagaagcttgatgaatgtggtgtattgccctgcttttttaagaacagctattatgtcaacagggcctcctggcgccggtgacttcgccggactttggcctgagataggtttgcaaaggaagaaaatggctgtggttattagtagagctaatcttgtgattttctccattttgttttggttattacactaccaacgaataggaaagctgaacaagtttagaggaaaaggggattaggagtttgagatggtatactatagtataaggtggtgtttttatatcttgagatttgaattgagaaggatattttgggtattatattttggaagttaggtaaaagggtttgtaatttaggtagaaagattgaatcaaataaataccccacattatacatatataaaaacttatacaactatatatattattagatggaaaaatataattttgcttggtgatgcaggaaaaacagcaaaatgtaccagagaaagaaaaaaagaaagagagatttttttttttgcttaagagagagagatttgatttgggaatatgagtgcaaagtgggtgagggtgatggggtaatgtttatgcatttgttgttgcttgagaaaacagttactaaatttgttatatttttgtgtactgttttagcatgttgtggtacacgtaatatcactggaattggaatgggaccaatttttgctttagtgattattttctatgacccattgataaataattacccccttttttttcattataaaagatcaaagataatttgtattgtaacaagtctagaatttatgctgcgggggttgagataactgcggcgattccccttaaacgagacaatacagcgtttggtacgaggtgttcaaaataatttgattatagagaatattatgaagaagaatatgattataggaaaatgtgtaaactgtgtttggcaatgtagggtaatatgtaatcat

SEQ ID NO: 304379 - DNA, 1982 bp, Cannabis indica
atcttgtaagaattgaatagggactgggttggttttgtcttctactacatcaatggataaccaggcaagggtatttgctatggcattttcttctcaaaggatctgtttgatggtcaacccttcgcattgacttagcaactcttgaatcttgcttaggtatgccatcatcattttccccgagtagtgtatttacctagtacatgattaatcacaagtttgaagtcactgaatatatctaggtattctgactggacctcgtgtgccaactttagtatagaaataagagcttcatattcaacttcattatttgaggctttgaaaccaaattttatggcaccatggagttgctgcctcacaggcgtaataaggggaatccccgtgcaacttccagaccaatctttcttgctattgcttcttctctgactctctttcccataagcttttagagtttacaagagttatgtttgtgcattcagcgacaaagttcgccagagcttggccctttattgctacccttgggtggtgggttatctcatattgtccaagtttgattgcccatttaagcaacctgccaggcgcttcacgattttgtaatatttatctcagttgctggtcggtatatactctgatgggataggcttcaaagtagggccatagttttcttgaagctagtgactaagaatgccttaatgatgaaatcatttgtgcacaacttttcgacttgattttttcaatacttgagtttattctttatccagtaacctctgtttttgttgtattgggcgaaagtttggatctatgttaagggcgtgagaaattactgatggattgatttttatcatgtcttcatctgactaagaaataatatcgaggtttgcccttagaaatttgatcaattcgaattttatttctagcactaaacttcgactaattttgagtttcctagtcagcatggaggggttaatctctacatcttctaattcctccacttgtccaaagttgttagcacgatccctaaagtaaggatctatgtctatttcctcaccttaggcagactctcactgcccttggccaaactcgttgtttgaactcttagcaggtgagtcttccgtttttgctttggacagagcgatgttgtagcattgtcgggcagactgttagtctccccctaggcattcaacaccattcctcattggaaacttgaggcatatgtggtatattcaagcgactgcttttaagtcatataggattggtcaacctatcatgacattgaacgcagatgccacatcaacaattataaattgggtcatgattgtcttctttgtgggactttcaccgattattataccagatgtaacctagaggagccaattcttggcctgagaatctgtacatgagctgcgcacaaggtgtcaaatctttcaaatggtgccctatcttctcgtatacaattttgaagatgatgttaaaagtggctccatcatccaccatacactgtgctaccatcatgtccctatttgggtggttatgactagagggtcattatgagggaacctaacatggacaatatctttttcagtgacggtgatgacagactcttctacctgtggttgctttggatctcttttctctacagctaggacttcgtttctttgctcgtgacgaaatgtccgagcatagcggtccaacgctttgctagtattcccaacaatgtagggtccaccaatgatgacctataagttaccaacaatctgggggggggggcaatgggtcgttgttttgttggacctgtgcttagttttggtcggcttggacatactaatgtaagtggggattgttccttcttatcaggaactcaatttcttttaattacttaacaactatttcattctcgatatagagaatgaactactgtaaatttgttatgtatctcttataattacttaacaactatttcattctcaccaatctagcgagcgggt

SEQ ID NO: 304380 - DNA, 2489 bp, Cannabis indica
catctatattatactacttgtcgcttacaattcagactcactgtcgttggccaaaagcaaggtcaacattttggtgctttcattgagagctgaactcaaggatcgttctttacttcaaatctaattataaatacgatggtggtacagactcgtagaggcatagttgatctagcagatccacaggcagtggatcctgcactgcagaatccagggaatgcaagggttccaccagccacaaatcctaaacaatcgataactgtaggtcaatgtgtgacaactcctttgagcggaatcgtgcttggtgtgcaagagactggaaataccagttcagcagccaatcagcgcattcccaacactgaagatctgcccccaataaatgcttgaacaaccattagagatgacaccaacatccaaaacctccgttctgctcttagaatcatgcaaggtcataccaacaccctgcatcatgatcagtaggaacttcgtgctgcggtgaatctcggatttgaagagcaaaggcatgtatctgaatggagggataaagagatggaaacatggagggctcaacaagcaatcattgacaaccgaataagataagccaccgtgctgatacgaagagcctatcaggctaccaatcaacaacgtacaacagaatccccctgggcgagttagacgaagatccatccgtgaatgcttctcaaaccctaaatggttagccgtccaatccccattaacaggttccgcctatgggccaagcggtaggcgggtagaccttttttagtaattcgtcaaaagaagtcacacccaataactctgccaaagttaatggttccggccaactgatcaaccaaaccaaccagtcactgagacaacctagtgtatctatatttaatagattgggaacagttcatgatctcagagatgatctaaatagaaggagagggctacacgagcagcatgtcgcgccagtcgttcagcccggatcccatgctcaaaatctcgctcaaagagatgccgacgtgactctggtcggccaagacgctgaacaagttctagagcaagaggatgctccgagactggttcttaattatagtccatgggagatggaccaacacctcaataaattttgcatatataataatttaaggaagtacgtgactcagtgagggctcaaaaatgttctgagattgtactagaaaaggctcttcattcatggggagaagccaagtaagtatggagattggggcttcaacatctagcactgggcccatgtggaaatgggcatacaccttctattaaggtgttactttgccaacttttgcaccgtggacatagtggcaccgttccaatttattcctctgtatacctccttttatcaaggtggtgtatcatttgtgcctaacataacaaattttcaccaacaccggaggagatcttgtacatctacaagattaaatctaagcccatgaggggccacaaggaaaaagggggcttctataggctagaccaccgttccaagagtatatcctgcctcattagttcaatgaagtacacacatgacttttgggacttctggttctaaacttttggcttttcaatgaagagagttcctacactaaacttggactttaatacaataagtaagtattttttcttttcctgggtttcacttctcgttttcttcccttatatatatattcttatgtacattctgtgtcttctagattgccttctctaattgccactaattttgaaattggaagagataattattttctacaattccttatcgtctaaggaatttcaggtggctcagctggcgaccaccacgaaccttcaaagggttggcctcatcgctcctcatcaaaaaatttgcccaatgttagtgaaggagtctatttaggaatcactctggggggatctcgacaaggtgaagaaggccattgcagccataactactgaagagaccgtaaaagatgtgaaggtcaatgaatagtgtctagttgattggaagagaaagttccaataagagttgagtgaagctaaagagctcattatccctttcagggacgtagtcccaaatgagggtgctctgggagatagtacttctggaagtggtgagacacccttttgtataattagggctccatacttagtagatttaagtagtgtcgaccaagggggatttgtctcatatttattaaacttagaccagaataaataccctagtggagattacatagataatatagattcgagaggatatttccctttttgtaagagggaaagtcaattataataagataaacaatttgtatctttctgtcatatcatccagtaacttgtttttctaatcatatctattgtgatttgatatgctatgtattttttttttaattttttcttagtaaccacctgccaccttcaaaatgggtatcctcaatgatttttttggacttacatcagttctaggtccaaaagaggtccat

SEQ ID NO: 304381 - DNA, 1119 bp, Cannabis indica
taataatatttacattttttttttgacaaatgagtacgtttatttattctcaatatgttaattttcaatctgaatgaaccctttaaaatatttattggtttgaagtggggttgggcttggacttttttataggaaaacattggaatttaaaatatttattggttacaaaaatatttatttggttacaaaaatattggaatttaagttaatttttacaaaaaatactgtcacacagaaattttttcaaaatagtgtatttttataaaataataatgaaacacaaaaaataataacgaaaaataatagtgaaacagctaaaaaacaactgtaaaaatacataaacagtgtaaaaaaaattctgtcccactgtaaaagagtgaaaaaaattaaaactttcaggatgtggtgtaaatatctcttcttatatataaacagtgtgtgtgtgtataatgaggaaaaaggttgttaagtgccccaaaatgacttcaatgaagataataaacaatattttgtaataatgccatttttcaaaagtagttttaagtcattttctagaactgatgactatgggtcacaaacaatatactaaggtcaaatatgaataaaatggatgcacctacttacattccatttttcttttttaaaaaataataataaattaataaatcatgtcatcaatttttaaatatataatgaccattaataaagttaattccgtttccactaggaaaaggaatcaattgatcaaaatgaggaagataaaaaatataattccaaaactatgttaaggtgtagtttggtaaaaaatttatttattaattttttaatcacaaaataaaagtaaaatttttgtttttaaaaaacaaaaatacatttggtaactacttttgttttctaattttgaaaacaaaaaacaaaagtatgttctgtaaagttcatttttattttttgagtctaggtctgaagtcgaattcgggttcgggttagaggtcgggttcagcgccaaggccgtgggagggatttgggtccgggtctggtcggagttcaaaatattaattaagaaaaaaaactatttaaaaaaatattgaaaataacatttttctatttttaaaattttga

SEQ ID NO: 304382 - DNA, 2360 bp, Cannabis indica
agatcctggtaaaataaattccaacaaaaggaacatctgtttcttcatgtaccatggcttctcatctttcgagagcatcttcgtggggcctcatccctattcaggattcaaggactacattttggattggggcaaattcatttggagtttgaatggaaagaacgtaaatgttgatgatgtgttcttatatgcatctatcgttgttgaccttatatggagagcgagaaatgagaaggtacataatatccacctgcataacatacattattttatttattatagtgctcattatggtcactctcttttgtttcatttacaaccttctcttgttgccattgagtggactcccccaactgtggatcgattagaccaaaattaactacgatgtggggtttagggagggaaaagtgatgttggcagtggtggctcgtgatcatgaaaggaaggtgctttggactagtacaaagtggcttaccttttgccaatgctctttatggggaagcatcctcttgtctgttggggttgaaacttgttgcagagaaaaacttgctttattacagtgaaatgtgattctgacataattatcaaaacgatctagagtttaaatccaagataagaaattaaaatctatgtagcacattgtaagaactttataaaatctttcataggatgtaattttttaaaaaaatttaaatcttttaatgttgttgctcacaatttaattaagtagactttcaatcaaagtataactattagaattgagactttttcaatactaaataacatcattttgtaatggccataaaaactaatttgattcatttatatgaaatctatattttaatatacattctataaattcccactattttatcatcatctccttaatgtatttcatgtgaataaagtttgacttattcacattaattaattatatattccattgtttatatataataattaaagaacatgaatagagtatctgagtatatgttgtctctttacatttgatcaatctgcaactgccattagttttgttattaacttatatttattttgttttggtttaaaattaaatattctttctaagtgtggacaatttccttaattgatcactagattagcaagtgacttttgtataaataaaaataaaataagtttgaaaacattaaaagcacacaataatttcggcgatacttgctcataagaacatgattcaccatgttcttaattaatatatataagtatatatacataattactaaatatgtactatattatataaactaatatataaatgaatgttgtataccctattgtggaaacatagttgcagaattaatgggattagtttgctttaggtttaagacaaaaatatagctcattttaatgttaaaacttttgaaaattttatgcatatcccatgaaattatggcacttaattgtctttttggttgcctatttatttttgaatgggagtcatatataagaaaattgatgtagtgatgtacttcttatatgtttggtagttaagaaaaattttttagttttttttttattattgtatacgttgtagttatttaaaacatcttataaaattttaagaatttaagaaaaatttaacacgtcaaaaataaagtttaagtaatttgttgtacgagtgtctcttttatttgatacttatgtgaaatagactctttgacacgaacaagatacgaggacacgttttgccacccctagtatagatgttgcaaaaaaaaaagttatttaaaggatggtgtttgaagttaaaacaacaccttattagaaaaatgttaattacataaatttgtaatttgacaaagcatatgactcaaactaacattaaattttactttttttttcttagatctaaaatattgaataggttcgattcgatccaaaaaaaaaaattatgtcagaaatattagagaaacttaaattaaaccaataaatatatacaaaacacattgaatgaatagaaccgatccaatccaacatctaatggatgttcgatccattggatgattaaaattacttggatcggatcgaatagtaaaatctatctttcaatatataatgagattagatctgcattaactaaaaatattggatgtgatccaataattttttttcttaatttttataaatgataagaattgatttttgaaactcatgcatatacattgtactagtgccgatcttgagttgaaatgggctataagcaaaaaaaaattttgaacccttactgtaaagataaatagtattttttttaataattaaaaaaaatatgtatattttttaaaaggtaatttttttatttggacccctaaaatgagtgg

SEQ ID NO: 304383 - DNA, 1663 bp, Cannabis indica
gatggccagctaaaactacattgaatcttctatgctatacacaaaagcataatgaaagataaatatttcctgaaaacacatactgatagctaaagttactgcacaaataatctagaaaataagaatcattaattatggcacacttggtgaagacacatgatataactatttctacacgaacgttcctttgaaggctaaacaaatatgtgcccctcccgcttaataatctcgactgtcattcctttctcctctagggaattgagattagtctcattactaaaaaatatatatgatatttacaatatgactccaaaaaagctattactcttgctttagcaccttgcagatatctttcagatcttgggtcttcatataactgtccacaaggatgttttgactgagaatagcaaattcagatatgaaacagagtacaagctgagaagcttacactggtggtgctccttagacatggataattcaaggccagaaactgctgagaaaactacaaagaagaacatgcataattaattagttctaaatacagagtaaacaaatattcattatattgaaatgaaatctacctgaaatggcaggggtgagaagcccatctccaattaccatacaagtaccaagaagaaccagaatcagcacagctgtatgcaagcccttgtacttctccagtatacttttcacccttgaactgtttttactttctggtgtgtgttctagtttatatgtagaaagtgattcatcaacagcttgtcgattgggtaaaagactcacttttgcatgcctacataagagtgaatacagagcaaaagtaccacctgaaagagcattattaataagaggttacataacaaatagaagaaaattacaaatgaaactgacaaatatgttgctcaatcagtgacttaccctctccattatcatcagctcggagcacaataaagacatacttgcagagagggactaaagtaagagtccagaaaacaaaagatagaaccccataaatctcttcgttagtgtctgagtgttgaatgtcttctgcaaatgtgctcttgtaaacatacagaggagaaatgcttaggtccccatataccacaccaaggctttggtaagctaagagaagggtgttcttccatgaaccctgaaacaaataaaattgttaagatattaatcatccattccagtgatataaacagaaacttcagaagggattagttaactaatatgtatagcatataaacgcagatccatgtaaattgaacagatgaagtgaattttcaacctttggactgttccaacactttctgtagttgagatccattgtcctcaacactcaaatcttcaaactgaatttcatctgagaactgttaagacagtagttacctgcagatctgcattgagataggagaacgttctattggttatctcaaacagaatcaaagattttctacgttaaacaaatgaataaaattcattaagaaattttcccaaaaaacctatccaattctctgccttattcccacagatagagaagacaaaaggacacgtttacccatttcttttattaaaacccacatgacatccatacttctatcctattcccatccccaccatatctatagaaagttgggcacataatttctttttttttttt

SEQ ID NO: 304384 - DNA, 5811 bp, Cannabis indica
tcgaaaaacaaagaaaaaccaactaccaaacaaaataaaacaaaattatgtcattaaaataagattaaaatactcaaaactatattacagagacaaaactaatcgcaatagcaaaatataaccccgaccaagtcacacctaagtccaaaaaaaatcagcaagcctaactaaagaaaaaaaaaatctcccatagctttagatttaagaataatattgacacgtagaagaatactaaacactaccggtatcttttagcaattctctttattataacttaactagttaaagcaatagggccttgcattcaataataaagtacaaagccaaattagataagttacaatatttttgaagatattaaatgtatttcccagtggagatcaaattcatacattaactataagcaaaagccgtttttctcagactttctactacctatgttttatactaaatacaggtctcagcatccattcgttccagaatgcggcgcgcttcttcctctgttgccggaaccacatttcgaatcctgaagccattcttcgcagcctttgcctccggtcgcacagtgaacgagaaataaaacgtatttgatacctgcatgatcaaatatattagaaaggccaactcgggtactaaagaattgattcgagtagtgtttacctcgcttgaacgtagctctggcctactaacatgagcaacaacttctatgttaattaaaggttgatccgggttatgtagttcggtgtagagcacgcatgatttcaatctcaggaaatctccaacgtccacctgctcataacacattgtttacactgtcaagcattgcttaagtaacttaaaatgtagtgaagtattaagtatttactcacaggtcttaagaaatcaacatggtcgatttctagaaagtaagggaccgagcctgcaaaggcataggcggtagagaaagcaagttcgaatgctcgatgcagcaagaacccaccgaagattcgaccatgaatgtttctctgctgtggttggcagatcagagagttctcctggcgtgtatctcttaggagaatgctatctctgtctgctaaagcaggcatgtcacagaatattctaccttcggctaatagtgttttaagtctatttgcttctccattctcgaattcccttctatcttgttctcccctctttcttttcctcatgttgctccttgcttctgcctcttcaaagagtaacttttcttgttcggttactggtgagagtcgattaacaggagcagctttagctgtttttgagtcacgagctacaaaaatgaagttggctgagagagctacatcatctgaagaagcattagagccttctgcaaaaccgaaatgctcatgttaagacgattacactactcgaatctcttataggagagacagaacaatcgaaatagttcgggaagattgaaatattaccttcagtggactgaaagacttctagttgaatctcaattgatgaccttccaacccagatgacagcaccaactattttcagatcaatgtctacactaatcggtttctttaagacaatcttgtcaacagaagcagtgaccaacaatagcagccttgttgtgctatcatcatcagaacagtgctaatagaaaaaggaaatctggattagtttattatttcaaatgattaaacttaacactcatttcatcataatcaatttatgaagaaaaacacattattagcatgcaaaatcatttagcaaaaaattaacttaatggaagaaaattatagtaataatcataacacacaaatttggcttctaagtttcttaactgttagagaattatagaacaccaggatacaatattgcatatagtttaaaacaatgagtaatttaatgatatagaaatttctctatagacatcaagattggaaatgcattaggcgtgttgaatgaaccacatttaatgttttgaagactatccagatccgatccaattatatattgaaagttcgaatttgttatccaatccagtccaaaaaaatagtaaaattttaattttaacatatacatatatactttatctataacaacaaaaaatctaattactcatgaaaatactaattagttcgattagatgttagatgtattgaatttttagacatcacatctattggagaacattatcccacatagattaaatgtaaaagtattgagtcatatataagaacatgagctactccactcatcaccaattgattttgagatgaaaccccatgattctcatcatagtatcagagccatatccctagcgaaccttccatccagatggttagctagtatttatcccctattcaatattaacctactattaataagtcttcaactaaaaaccccaaattttagtctaatttatcccctcaagtgaggttaacagacgaccttgttgtgccttggtgcactaagagtgtgtgcacaatgcacccgcaagtgaggttaacaattggtgcactaagagtgagtgagcaagacacccacaagtgaggttaacagaggcccttgttgtgccttggtgcactaagagtaagtgagcaaggcaccctcaagtgaggttaacaattggtgcactaagagtgggtgagcaaggcaccctcaagtgaggttaactgtgcacaacaagtgagattaagcaaatcaaattgacaaaaccccaattgaaggtggcctcctcatcaaaaacttcagttaactaaaaaaccttcaactatacttcctatatatgctaaatttattaactacaaatcacaaaccatatgagctaaaacggcatagaaccatttaaaacaaaggttaatgtaacccaaaaataaaacttttatcctaactaaataaataattcagatcattccatccaaagatataatgaatcaaaacaaaggattctggatcagaacataatcttcacaacaaaccatgagccaattctgaaaaagatgtaagagcaaaggtgtaccttaacagagatagtcccagctaaagcatcaaggtcttcaagcaactttccaattctaacctcattccatggatctctgtactgctctctcaagatataatcagtagagaaattataaagaatggtagttctgctctgagaaggagttttggtaagcaattcactttgtggaggagcatccttaggtgggtcaagaagcctctcgaagatctgggaacgagcttcccacaatgcattagtcaccggtgaatggtacattcctggccacaaaattatgggctttctggctgaagagttggaatccccaactgaaggaggacccccaaacggtgaagcgaaggttgaaaccactgtaatgggttgattaggggaagagttcaaatccatggatgctttttaagaattgtaaaaaataaaaagctcccccttttcccaatgaaatgggtttcaaatttcaatcgaagttttggggttttgctttgtatgtatatatgtaggtaggagttagttgaggtgcattaaaggctggattttgtgaatgaattcttctgcaaatgaatcagaaaaagataacccagaaatgtttgtaatgataacacttgtaggcatcgacaatttcgaagctttttccacaattgtgggactaagcagacaagaagatgctttcgtcaatttccattatagatggccaatgaatctgtgttctctctctggttagcgttcctgttttgactctctcactttttaattacttttttgctttgacttttaacgatatattgttacgggtaaaacgggtcagataagataataaacataaatttgttaatgggttttggtttacattaaatgggttcatgtatgtctttgttcggatcgataatagtggaaattatattttataccaactttactttatatattttaatttttatttttatttttatattcttttaatatatacccacttttataggcgatgtttctattataccccttaagttaatgtaatttaggtgctagatttaagtgaaaaatgagggtatattagataatccactcacaaaagtgggtatattttaataaaatataatataaaagtattttttgattaatgaaaacaaaaaagaggtataccccaacttatcctattatacgaaattgacatgttaataatataaatatgttgaatatgtcatcaacttattattaattaatattttgaaacaaaatatgcttataaataagatatacgggttgtacaatatcaacctgtttataaatagattgtgtttgaattttattttctaacacgattattaaatgaattgttttcggatcgaatatatacttactttacataagtctcgacatgatacgaatacaatttgggaacataaattgtcacccttgatcctagctaaagtgattctttaagaatatttgtttatctaggtgttattttataagtgcttttataatggattcttttatggggatttttttaatgtactttctatttattttagataattttttagtttatataatcgtttatgctatagttatttaaaacatattgtaaaattttgagaaactcgaacaaatttaacatgcgaaatatagtgttgaaatagtatcttgtacgtatgatgtttttattttataccagtgtaaaatatagtgtttaatccttaatttcagtatattaatatttttcaaatttattaaaattttacaagataccttaaataactacagcatagattaatactattttggactctgtgttttgcaaaagttgccgattggatcctctgttttgttaaatgacaaaatggaccctgtattttctaaaatggtaaaaataggatcctgaactaattttttattaaaataaaatttaataataatccgatgtaaaagtgttatgacaaaaccgtttagattttctgtatctgtttgtattttcaagttggttatattaaaaaaaaagttatcaaaaattaagctcagggtcctatttgtaccattttggaaaatacaaagtccatattgtcatttaacaaaacagagggtccaattggtaacttttgtaaaacataaggttcaaaatggtatttacccaaaaaaattagactaaaaaaaatttctaatataccaaaatatataaggtgtatcagtgcacaattttattattttttttaataagttgcacaactttatttattattatttatacacttttgttgaatgaattttttttccttattttgtttaatattatttatgcacttttgttgaatgaactttttttttaaataattgaattagaatattaggaagagcttaacttattatttattaaaatattgtatattctttcaaattttaataattaagttaaactttctctatacaattcccctacctacactaataaaacttcattaattattttttaaaaatggaaaaacgaatataaacatcaataatcatataccttgaactattttttttttggaccaatttacttattcaaacacacttgttactctctcctttatggattttggattttccgtatattttgggtttcgagtgtgtggaatttgtgtaccaaacccacccgtgggggagaacgggtttaggggtttcgggctcaggtgggttgggtacgggttgggataggtttgagtggtggggaagaaattagagtctgtaccttttttatattgtactcttttatttttatcttttttttttaaagtctattatttttttaaaatattttaccaattttacccctttcactt

SEQ ID NO: 304385 - DNA, 2624 bp, Cannabis indica
aaaagttcgctttttgattttcccaaacatggtcggaagatcccaagtatttatcatgagaaaccaccaaacttagtcccaaaatatcacttctatcaatctgcgtaacattaggactaaatgtaattgtcgactattccatattaacacactgcctcgatgctagctcatatgttcttaagactcgcctaatagtagctgcatcatttcagttagccttcccaaaaatgaaattatctcccacgaaaaacaagtgagaaactctaggcccagactgagagcaccaaaagctgactagcttcagcctattgtaatatataataacaaagagccttacacaaaacataaataaataagttgatagcgaacactcttgtctcaagccccgattaggcaccacccaacctctaggccttccatttaccaaaaaagcgtactttggagtagttacaccgtccacaatcaactcaatctagaggggtgcaaagccaaaattccccataatctcacgcataaaactccattcaaccctctcacaggctttgctcatgtcaagtttcaacatcataaaccccttttttccattatttttcttgaacaacgaatgcaactattcaaaaccaacaatcacattatcatgaataacacgtccaggcacaaaagaacattgaaaagatgaaatgagcgaacccaaagtacttttcatcctcatatatagtcaaagccttagcaataattttgtacatgacattgtacaaactaataggacgatagtttttttaacaaacttaggctttgttaccttaagaatgagagccacattcgacttattaaatttattgaccgaatttacctcattcagaatcgctaggaaaatagccaccacaagaggaccaaccacgtctcagtattcatgaaaacaatctgaacctggtgccttagtagcactaatggctttgaccacttaataaatattctctttagtaaacggagagaccagtcacatattatcttccccattaatccttctttcaatcacgtgaatgccgacctaaatatgccccgaggacaggttattagactaaaaaatacgattaaaatagctctcaatttctacgacgatatcctcatcaatactcagttgttgtccattcttagtcataatctcaattatggcattcttcttcttcctagaagaggcttcgttttgaaaatactttgtaattctatcacccaatggtaaccacttagatcttgatctttgcttctagtagtattcttctcgtgacaccaaatcttctagcttaatctcaaggcattttatttcatccatctgaaccaaaagggcatccatactttacatagtatcaagttttttttgggtttcagcaacaagttttggaagtgaaccaaacttattcttactccattccattagttgagacacacattattgaaaatttgtacgttactatcttcgctttgtaattccacactcgacagctgccatgaattaagcacaatttggtggcattcctcatctttcaaccaatgtggctcaaaacaaaaccatctttgaccaggttgtatcttctaccgtaccatattttcatggacatccactataagatgatgatccaagtgagaaaatgctccattaatcactttggctgaagaaaataaatttttccattgctgattgcaaacaaaacgatcaagtcttggacatgagccccacctccccttttgttcatccaagtaaacattcaccttcataaccaagatcctatagcaaacacttatcaagaactcttcgaaaatctcccatagcattaagatttcgatcaccacccccttcttctcgtttaatgaaagaatcttattaaagtcaccactgtaaagtcacaacagctaaaacatctcctcaagtcgctttaatagccgccaaaattcacagctcaaatgggatttctgataccataaaatctcataaaactccacagccccaaccccaaaaatttaactaaagcatcaatatgactcttagtgttgactgaatttttagctaaccaacgaaaaggtgtaataaatgagaaattaaatcaaaattgtaataaatactaatgaagaataccataatttaaagaggtttgactccgagtttgataatgtcctgcttcccttatattttattaatatgagttgcaaagtcaagaataaattcttgaatgtaagaagtaaattgggtagagtttatgctcactaaatgataatttttggatcccctcttatatgaaatattacaatttctattcaactaattattataaaatgttattttccatgtaattataaactaatttgtatataaaagtaaaaaaataaatatataattaaatcttaacatctgaacatatctttctattttaaatagagtttattaaacaattagtaaatgaggtgatttcaaaaaaaacacaaaaaaaaaaaaaactacaaaaatgtagttgtacggaattttaatggttttacgattttaaattttatttatataaatacagtctttaatgtattttatgttgtattctttttattttgtttgttatttttttatttattttatt

SEQ ID NO: 304386 - DNA, 2632 bp, Cannabis indica
attttaattagtttttaactaagtgacgatgatgactagactaggaaagcaagctaatagtattaatgaaaaaaataaatatttttttaaaaggaaacatatatattttttatagaaaaaaaggaaagaaattgtatttagtttagcattcaatattttgatgataagaaaattaacactttaaaattttagtttgacttctttgtgaatgaggtacaccatatgataaatacgaaaaacaaaagtttgcataatataaatttgttaaaaaatatgtacatatatattttctttgggggaccatggccactataggcttgagtgtacatacgcccctgattatatacacaaactaaacaaaaaaaaaagaaagaaaagaaaaacctcaaaaaagagatgacgtggtttttcttctccatataaaagaaacctaagagcactcacaagagaggaggtaaacaccttgtacctctcaaaaaatgaaatttttttagctaaagtgtataaatgggactccaatagataatgtataatttaactataatagctaaactcttggttcaaaaaaaattgtagctacatctagctaagaagagagagagtgagagcactcccaacagcttctttactctattctttaaaataactcatcaaaactctattttctttattttacctcacacatttacattacaccatactttctctctaattttctctatatcatttaaatattatatttttaccacatattttattaattaaaaaaatgaaaatgagtaaaaagaataataaaaaattaattaatttaatgtaaagagagaaagaaaaagcataaaataatgttttaacctcttcactattcatgagctcaatgtagagaaaaatttcttgaagtttgggatgagttataatagctaaagcatttgttgagcttaattttaagctctaagctattttttttttagcttttagctattatagttcacttgttgtgagtgctctgagctaaatactatttaactattttttttatatttatttatttgttttctctctctttttttctaaaagttattaattttttattattttttaattaataaaaatgtttcaaaatatattatttaaatgatgttgaagaaatatagagaagctgatgtatgatgtaatgtaaatgtgtgaggtaaaatagaaaaagtagaattttagtaaggtattttaaaaattagagtagaaaagttgttgggagtgctctaataataattctaatgaatctcaaattagggttacttccacaataactaaaaaagaaaaagaaaaaaaaataccaaaaaaaccatcaaaagattaagaaacaaaattgttaaattgactgagtcatatatacatattactaatgctaatctctactgatcaattctaatttaattagataattaaacccgatcaagatttgtggtgtggccaggtctaactgtaccacgacaaagcggacaatgattatgacaagagagccactcatcaatgcaagccttatgaaatccatggttacactccacaaacaacttacattcaaccccatattcgaaattctcgaagcaaatagcgcagtcgaacccaccatcattattcttttcatcactactaattggggattttggtttctcaattctatacgtgcaagtaatcgcaaccacattatcagtgtcattcaccggaggcagttcaggcggaggaaaaatatgtgccatctctaatggcggaggccggggatgactacttctgcttgccctacacaccctcctaggccgactacaattaactgtgctggcgaaaaccgccaagaccagtactgcgacgaaaagagccagtagaaaccatctggtcaccattcgttggaggtcgtaatccgaatccgaatcgaacgacggaattggaaacggaaacggcgaaggagaaggagagtagtactccatcgattcatccattcttttctattccaactcttttcgtttttcagctgaataaatagtttaattataatcagtgtatctctatttatatatgtgtgttatgcctacgtgtaattaagtatgtgtttagtttttgctatttaattaatgaataaaaaataatatttaattatgattgatattaactaactaataaatctgattataattattcgattgccactaagtatgagactaatatatattaatcctttaaaataaaagaagtgaagctaaaatccagggaaagctactgggaaattatgttatctttttttatttatttattttgaaaggatgttatcttttcattttatttttattttgaaaggatgctattaattattaattttgaaaggatgttatttattctatttttttcttaaaaaaaaaagatgttatcctctttacatggttgaagggtttgcttgcaaaatattgatactgaattatgcgtttaactccgatagttttgcgttaattattatttaagatttttctaatttgtatggagtacttaaaaaaatattgtgttactccataaagattgcactggaacacgaagttgtagtttctaataagttttttttttttattaaaaaaataaataaaaagaa

SEQ ID NO: 304387 - DNA, 4179 bp, Cannabis indica
cctgaatatgctcagtggaaaaagaaggaccagcttcttctctcatggttacatgcatccatgtccgaacctgttcttgcgtctgtggccaatttccacacatcattcgctgtctggcgcgcccttgaacaacgtttctcaagtcagaccaaagcccgattgttacaactcaaaggccagttctcccacttactcaagaacattctctctatatctgaatatgttgataaagctcaatcgattgctgatgctttactaattgctggttcgcctgtgtcaacccaagatttgattctgcaattactaaatggacttgggcctgattttgatcctgtcgtttctggcataacttcaagaagcgattttctctccttcgaagaagtacaagctctccttctctctcatgaaactcgtcttgatcaccatcattctgtcaatgacctgtctgttaaaatgcaagcaaatcttgctgcaagaaatggcccctacagacctcccattggctcgaatcgtggctctcacactgaatccaatcgaaaccgattctatggtcgtccccctggtgcaagattgctttgccaagtctgccttcgcacaggacacactgctgccatttgccactaccgattcgacaagaattgggttacccccaaatacggtaattctcaatctcaagcatttcttgttgaatctgactttcactatgatcctcaggctgctacaactaccatgtttcatgaacttggagatgatgaatcatggtatgttgacacgggtgccaccaatcatgtctctatggatacatccaatcttgacatgaacaccaactctactggtaatgaaacaatggcagtagggaatggtaagaagcttcttattactcatattggtcatgtttcttttgcttctaatttaccgaataagccattgcatctcaattctgtcctaaatgttccatccatgaccaagaaccttattagtgtttcccaattaaccactgataatgatgtattccttgagtttcacaaatcgtgttgttttgttaaggacaaacaaacagggacagtgcttctcaaagggaaggctaaggatggactgtaccagcttggtgaagcagctaacacttctcttcaatgtcatcttaccactctgtctagtgataataacacttcctcattatgtacttgtaattgtcactcagataagaatgcaatctcttgtaataatgatgatatcaataaaatcccattctcttcatgctcttccaatctggcacttaatgttactaaacagaatgacattaacatctggcaccataaacttgggcaccctgccctcaataccctcaccaaaattctccctcacattaaatacacagggacattacaatctttaaagttctgtactgcttgccatcaaggcaagagtcacaaactccccttctcaatatccacaagcagagctaatcaaccacttgcccttatacacactgatctttggggcccgtcccacatctcttcaaaggaaggttttaaatattatgtgcacttcctagacgactttagccgatactgttggatttttcctcttaccacaaaaaaccaagcctttgatgtatttgtcaagtttaagagtcttgtcgagaaacaatttgatttaccaattaaaagtgtgcaggcggattggggaggtgagtaccggccttttgctcgcttcttagctgaccaaggaatacatttccaacatccttgcccccgcaccagtgaacagaacggccgtgctgaacggaaacaccggcatatcactaaaacaggcctcaccatgttagctcaagctggtttatccctcgaatactggtggcacgccatgtcctctgctgtgtttacagttaatagattaccaaccccggttattggtaatataagcccttatgaatgcctattcaagaaaaggccagacttcaacattctgaaaccattcgggtgctcttgcttccctcatcttcgtccatataatgcacataaaatggagttaagatcgaccccgtgcctattcttaggttactcatcacatcacaagggctatttgtgtgaacaccctgatggcagaattataatttccaggcatgtttcctttgatgaaactcaattccctgcacattccacaccagcagaaatgccacaggtatctacttctatgcaccctcccactttttcattcaatacatcacagttcagtactagtgttaatactaataattctgttgtgatgcctactgttaccaatatcatccctccaccaacatctggagtgagagaagacccatctcccattaatagacaggtgcctcatgttcatgatccaccccacacagctgcccgaaccactcttgaaccaatcccagagaataacacctatgtccatgactccccaccactagaaaacaataccacttcccaaataccaacacctgtcccactcacatccactcaccaaaacttgccacttgtctcctcacaaataaaccatataccacccactgatagcaactcgtctcaaccaagtcactctctcagaacacatacaatgatcacccgaagtcaaaatggcataaccaaacctaaagcttactttgcaactaaatttcccctccctgaagcccttataccctctgaacctaagtccacaagtgctgcaattaaaaaccctcagtggttcaaaaccatgcaacatgagtatgctgctctaaaaaaagctggcacatggacccttgtcccatacactccagggatgactattattggtaacaaatggcttcacaaagttaaactaaatgcagatggaagcttggatcggcttaaatccagattggtggccaaagggtacttgcaaacacctggcatcgactatgaagaaacgttttcacctgtggttaaaccagctacaataagagttatactcacccttgctgtgtctatgaattggagggttaaacagttggatataagcaatgctttccttaatggaacattgcatgaaaaagtatatatggctcagcctgaggggttcattgacactaccaaacccactcatgtatgcctattgcacaaagccctttatggtctaaaacaagcccctagggcctggaaccaaactctcaaagacactctctctcaatggggtttctcggcttcaaaatcagacaactccctattcatctatggctcaggagatcaaaaaatcatattgcttgtctatgtggatgactttctagtcactggtcctaatgacactgtcattaacaacttcattaccagactacatcaagctttctctctaaaagaccttggtaatgtgcactacttcttgggtgttgagatattcagggacacaaccggcatgtacctatctcagtccaaatatatcactgatctccttgtgaagctcaaaatggaaggggccaaaccctgccccaatcccacaagtgccagtgtcaaactatctcttactgatggtgaaccccttgaagacaagactctgtacaggagcacaattggtgctttacaatacctgaccttaacacgacctgatgttgcgtatatcatcaataaactgagccaatttattcatgctccaacctccattcactgggatgcatgcaagagactcatgagatatctaaaagggaccatctctgttggactacactttacacttgcctcttccctaactcttcaaggttactctgatgcggactgggcctcatgcatcgatgataggaagagcacaggtggatacgtgatgttttttggcaacaaccttgtctcatggtctgccaagaaacaacatgttgttgttcgaagcagttctgaaagtgaatttcgtgcccttgctaacgcagctgctgaaataaaatggctggtgtctcttctctctgaacttcagattcatcaacctcagtgccctatactttgggttgacaaccaaaatgctgctgctatcgcagcaaatccagtcttccatgctcggtcaaagcatatagaaattgatttgcatttcgttcgagacctcattcttgccaaagaactatctgtgagatacgttcctgctcttgatcaaattgtcgatgctttgacaaagccactttctactgacagattcaaatacttgacagccaaa

SEQ ID NO: 304388 - DNA, 2027 bp, Cannabis indica
tgtgtttgttggataaaatgtgagactaaaatgaagaaaaattgggagaaagatggtaaaaacactttaaagaaataaaaagactgataataatgagttattttgtttaccaattaggtaaagttttatagttttattatgtaatttttggttgaatgatttttttaaacgttctatttattatataatttattttataaattttataattgagaaaaaaaaaactatgaaaatatatacaaattaaaatctttatattaaaataaataaataaaaaaaatgtgacatgaaaaatattgcaaatatgctaaataaataaatatgttgagatttgctctatcttgaatatgagtgcagccactgataacatcatgtatctcggtcttcccaacataataagcagaaataaatcatccatccttggtttcttaaaaattaaaataaagtctagaatcaacagttgggatggtaagcttctatctcgagccgcaaaagaaattcttctcaaatctgttgtccagtccctgccatcatatgctatgagtgtcttcttgctccctgtcaaaacatgtactgaaattgaacgtcttatggctcaattttggtggaagactacttctagtaaaggacgcggtattgtctggatgaactgggatcatatggcctctcataaaactcaaggcggtttagctttcggcgacttcttgacttcaaccttgctatgttagctaagcaaggttgacggtttttgctcaatcctaattctttggctagcagatttttcaaagctcgttattttccaagaggagattatctgactgttgagttaggaaataatcccaattttatttgacgaagcatctggagcgcccaagatcttcttaaattgggtgttcgaagaacaatcgggactagagaacaaactagtatcttacgccacccttggcttcctttgcctaataatccgtacgtgtcctctttgcatcctgctcttatgaatcaacaagttagctctttcctccaaattgactctagacagtgggatgttggcattgttcgcaattcgttcaatcaagttgatgccgatgctattatgagtatccctcttagctttttagccacaaccgatttctgggcttggagtggcgaaaggtctggtcagttctcagttaagagtgcttatcgcctactgcaagatcaaaaggatgagcaaactggtaataactattcaggattttgggtgaaactttggcaattaaaaatccctcctaaagttaaaaatcttctttggagagctgtttcgggatgtcttccaactagttttatgctttgtaccaagaatgttgatgtcccagccacctaccctgtgtgccaaggcaatattgaaactattatgcatgctcttgtcactttccctttcgctcatgcttgcctgaacaaggtgtcagcaacgactagtttggtaagtgttgttacttatggctcttggcttaacaccattttctatagcttcaacgaagaaatcattaataatgttgttgttctttgctaggtgtaacatgcgtgctaagatggcacgttacaagctatgtgatgcccacaagttggccaagcggtggtcaaatggtggtgcatgttgtggtgcatgctggtggcatgttgatgcttagtttgtatgcagtggtattttcgtaaatatcttcaatattgtgcagaatgggacgagacttggtattcgccatttatttgagactacaaatacaatggtataatcggtttggcaaaaatatgtgatttggtttacggtttggccgtatgtctacagagccaaaatcatgtaagttcctggtagaaggctaaaagctcagtatgctttttaagggggtatcctggtgtcagctctccaccaccccctggcactttggtgctaagtgagctactacttgtaacgccctaaataattaggcacgctacccaaaatacttatgaagccctaatcccctaaccgggattactaattaaaatag

SEQ ID NO: 304389 - DNA, 1832 bp, Cannabis indica
tattttttaatattaaaatatactaaataggtatatcatgtctaatggtattaaatgtatttcataacaatattgttatgtatttattagtgaatgttagattgtgaggggtgtggggttgggaagtagggagttgggtgaaggtagggtctaaaatgccttggtccaaaaatagaattttgtagaaattttcaaaccgacctcatccaacactatactatttgaagaatataaaattcaaatttatatattttttatttttattaaataaacaaataaacattctaattaaaaaaaagtccaaaatagttctctatagccagctcattatgctaagaaagggccccaaagaagaaaactagtcatagcacttctctcattgttgttcttccattagcaatgattgaccaattttctagtctaatgagctatatagtcaatcaatgaattggcaaaactccccataaaatattaaatgaaataaataaataaaaacaaaagcatataataccatagcccacctacccaagatcttgtttcctctattttttatgggtacataacattttaatttaatggttcatttatttatttatttaatagaatccaaaatgaaatgagaaatagtcaaacagaacatgtatttgcttgcagtgacactaggactgtacaattagctgtgaatctataaagaaagatattataataaaagattatatctttataagatttgaaaagaaattaaataattgaagaagaaatcttagtgatcatgtaaataattggttggttggatttttggaggttatttttggtcttttcaaactctaaaagtgcttttacaaaattgattaggttttcaatatgtttttcattttagctctaaaataatattttaggagaagcttaatgagatcttaatgaacaatttattaatttcggaaattgaaagctataaagtgaaatattaaaatagtatattagggcgttcaacatcttatattgttatcagtataaataaatatcgagtcttacttgcgaggctttgacacgagttagggtaacaagttttatattatttttaattactctcaatgttaaaagaatattataaatttgaatatgtagttttcacttatgaaaacaaggtttagcttttagacattaaaaaggagaattatggtgaaatgaagagcatccacaatttatggatatggatggtgattttacattataaataaataatagtaatattaataatcatgtggatgatgtacctaaaaattaaaaagtgtatgatagagtgtaacactagagtgactttgtttactacttaaaattggcattgtctattttagtttggacttttttggatgtgatccaatcaaatgggctccagcccatgtgatgccctaactccatttgggccctactttcacctccttttcctcagatatgaaagcttcacgcgcctatcacaaattaatccatcctatattattattattattattattattattattattattattattattggcggctaaaccacttgaactttacggtttgtaacacttaaccacaaaaaccgaatttttggcggctaaactacctaaactctggttccgttttgctctgtacacctccgtccaaaaatcacagttaaatgtcacagtggactgtccacgtatacacacttgtatacgtggaaaatttttagttgttcatgtaatactagttttaaaaataattataaatatttaaaaaaatacaaaaaatacaagaaaaaaaaatttaaaaatttttttttaactttgtttttttttttc

SEQ ID NO: 304390 - DNA, 1222 bp, Cannabis indica
tttttatgggccaatcttaaatcccttaaatgcgggtttcaaatattatctaaatcttcaatctcaatattataaatttaatatattaaaaatatatattaatatattaaatttatagataatcatttgatcaaattattttgaacacttactaaccccctataatgtacaattcaaatttctaaccatcacaatacttcccccttactacaaacactcccgtatcaatatgtaatgtaatagtaagggggccttcacggatcataattcatgtattaagtatatgctcacattaaacacaaccatgtttaacaattgtgtaaaaaataatagtttttttttttttaggagtgttatgtaaaatatagaggtttgagatccttcaaatgggataaaggaattgatactgtagcaatagtgaaataacttggtaaaactaatttttgtgaccggatgatatacttttctttgtcaaataaataataatttaatgtatttttttaatttgaaattgagtatattactgagggtaaatagataatttgattttattggacagttgtatttccatagaaagtgatagtattcattatcatttatatgcttctcaatggcaagatcaacattcctaaagtcatatgtttataatatgagttcattattcattattcattattcattattcattattcattattcatatctattttgcaccacacacacaccaacttgttgaagaagaaaatgtgtcttacccataaaaagcagtcttgtaaccaccctggccctgttgtttgaacttaataaattcatataatatgaaggtttttccgactgcaccagtttcaccaatctctatgttaaaactttatagtttcacttgatgcactcttcaaattctatcaaaatagcccatcaaaacatcaaattccttttaatttagtatgggaggagtagatcaatcaacactatattaaaaattggggttgtggtggtgcggggatcattgcaaaagttggagaagagtaaaactttttgggtatgtcttattcgaacccgacaaagttgggattttgtccaatttttaaaacaaaaggtatgtagttgttgagtcttcaattggaaccaggacaacacctaataatatcaacaacaaaggctgttcttacaaaaataaaaaaactaattagtaattttttccccgaactttgacgtgtactaa

SEQ ID NO: 304391 - DNA, 691 bp, Cannabis indica
atgataatttattttgggtagttgggatttagatgagtattgactcacttggaagagacaatcctctcgaatagttaaattggagagactagtctcttgaaagttaggtttgctttggccactaatactaataaagtaatttcttgagagattgatttctgttgactgtaggtagaaacattttttgatttgaagaaagttttatcaatttggtgtggtgattgtgaacgcgtgcctaacacaccagcaattgatgctacaatggtgttcgaagaggatcttgaagccctaaaattaaaggtttcgaaactcaaagattctccatgattcactttagggtttggctctgcggattcaaaaacatctccaagaatcccttcaaaaaatgatttaagaactgtccaagatcccagggaagaaatactagtagctgctacgagcaaagaaaaagatgagatagaagggtcagcgaataaattgaaatctccacacagtacttgtatccataaatcgctccacaccaccatgggaacacattcgacgtcagaattttgtttacaacaaggtgttgtcaggggtttttcggagaaggaccgtaacgatactcagtatcgtcatgagaatcgtttgaaaaaaaaacttgaaatgcttatttttgatggagagaattgatgagtgcacatttgtacac

SEQ ID NO: 304392 - DNA, 2191 bp, Cannabis indica
catgttcttgaagtacttttcctttaacttgttcttacaaaaacaagcttcatttcttcaggtgttaagccaccattagtgtacaatccagatactattgtaaactcttggagataaaatctcacaaatttttcgttaatcaaaaatcattactcatgtctcttttgataatgtatcctcctcaaaattatctagtttactaaggtgtcaggagaaaatcctttggtgtcaaggtccaagagacgatccaattgggagtaatatttaaaaacagtctggtagactttgtgagccaattctttatttggcctattacacttagcggagatttcatggtaactttagattttgcagctgtattagtagtaatggcatgaggtatgcatggaagctctgctgtaatatagttttgggcatctacaataataatgcgtgaaatgaacaaaaatatataaacgataataatatagatataacaactataaaaaaagtttacaaatttaacaaaataagcagggttgcacatggtatgaaaatagactgtgcaatcctatgatggttgcataatgtaaattcaaggtcgtttatggttgtttagagcaaattcaaattctttaaacttggttgaagaacataaaagaccatgatggtcgcatagtgtaaattcaaggtcgtttatggtcgttcagagcaaatttaagttctttaaaattggttgaaaaacatgaaagatcatgatgggcacataatataaattcaaggtcgtttatgatcatttagagcaaattcaagttctttagagttggttgaaatacataaaagaccatgatagtcgcatagtataaattaaagtcgtttatgatcattcaaagaaaatttagtcttttatccacaaaattataaaaatcaaaattataattgaaaagattgtaataaaatacgtatgttatctatttatattcattgggttgtgtggctattgtagtttatttatcacttgttgatttcattataattttgaatgattagttattataaataagagattgagaaaagaaaaatattaatggctacaattgaaaaagattaaagaagagaagaagaatgagaagatacaataaaaatagttggagtttacctctattggaatgattttcaaatttttttatctatgactgccaccacttgcgatcattcatgaagaatggttggtcttttggtctaaccagcaaaaagaaaaaaagaggaggaaaagaagaattgttcacttgcgaccatttgtaaagaatgggttaaatggtatttttgatcttaccagcaagaagaaaaaagaggatgaaaagaagaaggattgttattctctatagttaggatttttattttgtttttttttatgaggttttaaacctcacctgtttaatactaatctaattttttaaattaattgggtgctacttgtacaaaataaaataaaaaaaaatgtattttgcaaattttaattcgtcaaaaagttattttgacaaatttttcctttatattgctacataactgtaaaataataaatacgtaatcattgaacttttgagattaaagtcagttattgacttttacaattcttagatgtaatttcacttctctttaaagttttttgattttcttaagtcaaatgagaatgaataacattgaagatgaaatacttgattatcgttagtaagatgaagataataacttagatagtaatgaaaaactaagttgaagatgaaaatgaagagaagtcaggtgagtttcttacttatgagtcgtgtttaggtgatgtaattttaggtttggtttttttaaaatgatgaagaaaagttaatgttaattgtatttattatattaattattaagtcagatacaaaagaaggtcattttgctaattaaaattcttgaaaagtcattttactattaaaattttttataaaggctattctgctaacccacacaatatacaattagatatttataggcttttgcaaattaattttcatagtctaacacttactcgtcagttactagcacagatcctcgtcaccacaatcgtttcccaacttatttacttttggccttaactatggtctcttctataagaaaggggatgaggttaagatcattggctactgcgatgctgattatgttggagatcatgata

SEQ ID NO: 304393 - DNA, 4959 bp, Cannabis indica
ttcatatttaggatgttaattcaacatactgttagtaaatctagatcttggtaaatattcccaacacatgatcaactttcttcgagttgtaaatagatctctacacggtctttcacaatttatgagtattaccttgactagtgtgggatactcattcacttttggctttgtgtgataggaaaaattgagagagagagagagagagaggcgtgaaagagagatagatatatatatagagagacagagagaaagagaatagaaagttttatgttaagatttagttgtctgaattgatttgcgtactcactaatttctcttctctttctatttatatccatatactaggtttaggtttaataatattattttgatttagaaaaataaattaaatcttttatttatcaaataaagaatataatatatattctctgccaatcaaaaatactttttattattttttaaattaaactttaaattaattaataaaataaataaaagataaattggcccaaaaataccaagcttggtcgtgcaccctaattggaggctcattgtgatttttgctatttattttaaatcaagtgttgattaaaaataaatttatttttttccaatttcttttgttaactcagaattttgttaacattaatgagtcttccataattaatgcctgaaattaattatgtaataaattatatatattaagttgtaaataatagtgaagaaaaaaaaagattttacatggttttgtcatcaaaatctacatacttcatgagtctatattatttttgagtttctttgggttgagattacacattgccagagtttctctaagcctgaaattgtgtcatgtctttaccataatttcttagctacttataggattaagatacctttaatcttatctacataaccattcataaaacgtagacaatctctacgtttcatttaataaaatatgtaggaaataatatacaattacttatattcataataaaataaatgatatgtttgacttggtttgtgttttgtggcttgttatcgtcgagatgcttgattgttgaaatgtagtccttgacgaattcactgatattcaaaatgtgtgtttcaagtggcatactacttagagaacatcttgacttcaattacacattttccgaggttgtgagtaggagtaaccttaagcaagttaagccttttaacattaataatattgacactagaagttctccttaatactccttggagcttagcaccctcagtttaatatttggttcctgaggtgtctaccatgcatactctataatggtcatacacccaatattgcccatgataatttgccccgaggagatagtgcatgaccttcatattcaaaagaggtcattagtttcagtcttcttttcaaataagtaaatttattatcctcgttgtacacatgtcacataacttttcaaaaaattagtataacaattgcctcctcaaaagtcttttcaatttactatttgctctacacattgagtacaatttattgtggtggttttacttttccaataatttttctttgatttgcaactaattatgtcctttcatctaactcttgaattatccaccgttgattaatcatcattgatgatcacacagtggtcgcgagataacttataagtgggtatttttttacttctctcttcactttcaccattttcataaaaaaaccaagcttcagagaaggaaaactctcaaatttttaatctcacggtgcatgcccatctaattccttctatacttttttcgagtcacagtcatttttccagtcaatgattgcacgtcttttaggttctttgaagagggcattcgagcaatgcttttatcttcttagaattttcttctatacctcttgcatttactataaatcctaataattttcttgacgaaactccaaacaaacgtttcttggggtttgacttcattttatacttttctaaaattgtgaagcacttaatgaggtcgaagatgtgatcatcagtgttaatggattttgtctatgtatatcttcatattacgacctatttttccttcaaacattttcttgacaagttgttgagatgttaccccacaattctttaggataaagggcatgactttgtaataataaagtcccatgttagtcacaaaacttgtatgttcttgatctgggacattcattttaatttggttatgtctagagtattcatccataaaattcattagctcatgttctgtagtgacatcaacgagttggtcaatccttgtcaaaggaaaaaagtttttaggacaagccttattcaagtcagtgaagttgatacaagttctacagggttttgagactgaattgggtttgcaacccatatcagatagaatacttcccttatgaaatcgttaattagaagcttatcaacttcttctttcaaggcattttacctttcaagatcaagggtgcaccttttttgttgcctcagtgggtaagattgtcaatattcaaatgatggcaaatgaaattcgggttaatcccaaccatgtctaaatggctccacaaaaattgatcttggtttgccttcaaaaagaaaattgattgcaattttatttgttcccccaatcctttacctatttaaacaactttggtaggattaagtggatataaaataacttttttgagtttttcgatgggtttgagggttttttggtcatcagttatgtgaggatctgtatctccgtttttccttcaaaactaattttagctattatgaccaacgtttgatgttctaaggactttcctctcagttcagcattataacattacttttccattagttgatctccttaaacaattccaactcccgattgggtcgggaattttagtgataggtgttttatagagctaatttcccccactcctgtaagtgttggctgacccattataatgttttaaactgagggtaaatcaaccactaggaattcttacatctgagtcattgataagggggattctcccatagttatgggcagcttgattgtacctagacttgcaacactatcacatgtaaatccacataattttgcagtacaagacttcaactttacttttttcaatcccatcatttttaatttttctttgtataagatactgtcgttatcaaccaataccctgtttatccttttgtttgagagttgcaccatgattaccaattgatatgtatccagaaattgaacatgtgtcgcatcctcctcagtgaatgttataaggggagtctcaggttttgcacattttagaactttcgatgcaaatatcgagacctgattcttaacttgattaatatatcttttttgggcattattgcgggtactagcaatatgaggccctctagagacttttaatatatcctcaccatcaactgttgggagttggagattatgattttgattatggttattgggatgattctgctcattttgcctattttgaatatattgtcagatatatccactagaaataatattttcattttcatctttaagttctctgcattcctcactgatatattttatacccttatgaaatttttttgctcctcgcatttcacgtaggttcaggtttgcaaactgcaacccgattctcattggccaaaaagatattttcacgtgtttcattcaactcaatgtagaccaagtagaaaggcacatattttctatgcttttgtgcttctatttgctttttgatgaattcttaaaatcatcctttcttttccctttcaatcatgtgctccattagaatcacttgagacaatagtggttgtattggccatggaattactcgcgcttggtgttgcctcgttttttgttagaatttgtcttaagcaattttaactctgtacgagcctcttcttttcatacatagatttgagctcgttcattaaattcactgattgatctgagtggcattccctgtagatcatcccatatctcgcatcctgtagtaattccagtctataaagtggttagttgaatgttaatcattaaaattttaagcccttgttgttgctgtattagaaagacttaagtacatttttagcgactcgcctggttcttgtttcacattgatagcgaggaggctccaagccttatatcccttgaagcttggaattatttcttgaattcctaggataattgttcccatgatgtgatgtaatgtctagtgaacttgtcaagccaactcttagttacccctattaaagaggttgggaacaacatgcatcgtaggttcaatcctacattgatggctcacattgttgtgttaaaatttcttaagtaactcacatggtccgtagttccatcgtacggagccatatgtggatcttttaaatccttttgggtatggagtggttgttatattagggtgaaatggctgtaaatcctcgtctgagtcatacttaagaaaatttccatactctccattttgatacttgtgaaactactcttccaactaaataacccattaattgtattaggtctttaggcacacagtattcaatcgctcgcataggtcaggtgcattgaagtttagttgctcaagtatatcgagaatagtgctatttaactgctcgtgtaagtttagctatcttcgattcaaatgttcttagagattagattcattttcgtgaccgcggtgttggtctcatctagtattataattactgacttatcttgttggcaaggcgacttctaactagtaacttaaaggttactcagactagtttttctattgggattgtgacggtgagtttcattttctctttaatgagaggttgaaaattaatttttgaattaatttaagatcaacatgaattagaataattttttcagcatttttttttatttaaaaacaattcaaaaatgtattattttaaatacattgaattttcgaat

SEQ ID NO: 304394 - DNA, 2934 bp, Cannabis indica
tatttacaatcgtttaaaagtgcttttacaacataaattttatattcccagaatacaaaggaacaccctgatcactgggtcgtgccactacgactaatatgtacattactgctacgaccttcaaacgcatgggtgctcaacttttgccttccctttacttgcactatatagcacccgtgagtcacagagactcagcaagaaatgtgaataaacaataatcaatataacatttatccaatcaatctcacactaacaaacttaaacaattacataatatcgtaatcacacaatcctggtacttcataaagtacccttaccactcgttaaccacgagctgaatatgtcactatcgttgcctggtaaagcaagcgataagtaagaaatatatcagcagttttaggagtaattactcgtaacggtaatgaccgtttccaaccctcagtcataaccgaggctcaacaaagatttaaccaaaatattgataataatcaaggctataatcattcaaccgttaacatttaaccacatacggtgcttaccactttatttcttacctcaattcagaactcaagtgtgcgggccgacctgagtagaaaacaagttgggcgatctcggtcctatgtcacgacaactgaaacttaatgaataccttaaatcgaaattctggaataaaaccctaattcaaagccgaataagaatctaatttccaacaactccaaaataggctagacaactcataaataacctaaaacagatactacgcaactcctcgggacaaaaactaaacctgaagaaaacccaagaattctccctgtagggcaaccgatcgaccgggtctatagcactagaatcaaccagtcgaccggttctagtagaccagaaaaccttgggttttcttcctcaatttcaacccaaacctaaccaaacattctagaacagtgtaataacataaatacaacatatcccaagcttcaaaactcaacaattcaatcatattgaatcaaaattacacattcaggtgaagaaaactcaactttagcttcacctaaccaaactcaattcaaatagccaaagaaattgctcaaaacactctccaacatactcaaaaacctagtctaaatacaacctaaactcagtttaattcttacataaatacaaaaccctaacctaaaaccaactaaaattcatagaattcacaatctataaagtgtaagacttaccttagtttcttctagattgatcttaagcacaagaatctacttaaactcaatggagattggtgaggaaatctctctttgctggctggttctctcttgcacgagaaggagagggggagatgaacatttgaggttccttagtttctaagttattaatacaatacccttaaaaagaaaagtcagccttttattaatcctaaatcaattaacttcatcttattatccactaaaagacaaataaattaaacctatgaaatgaccataatccccctccctaaacttaaactatttaaaaatctaggggcattttagtaattctagctaatccgtcaaaccgacattctaaaattttaaactagtccaaaatactcccaaaataatccatccataagtgtcatgacattcctaaccatattgtccattttccacgattgccgagcccggaaatattttattctagaaacggtatccacaataatcacatattccaataaaatctctgtaattaataaattacgttttatttgatcatttaataaatccacaccaattaccctaagtaagatcataatcttactttattaccaaaataattacatatttaataaaatatgtccaattaaattccatattattttccgggatattacatcaatgaatcttggagcctgctacataaaaactatttcagtaagctcttcattaaggaaagcattgttgacatcaagctatttagctggccaattcaaagaaactactaaagtgagtacaattctacttgtaactagcttaattactggagacaattttttcctcatagtcaattctagctgtttgagagtagcccttcgcaaccaatctagacttaaatcttttcaaagagccatcaacattcaacttgactctatgaacccatttgttccctataatatgcatcacatggtaataaggaacaaaaacccaagtacttgcagctttcaaggctttaataaactcatctaacttagaagagaaccaccatggaatcctgtaaggcaactttaagagaccttggttcagattgtattaaagactctggaagagagtgcttggtagagatataagcctttggtttagtaataccatttttgagatcaaatgaccatggaatgttttcttgcggtaatagcttgggaagtatcacttccagtaggcagaggagataatgttgctcttatggtattattttgaattttctccaatctgttagcaataggttgaggatttttagtggatgtaaaaggaagattaatgtgagatggttaattggcatttggaaggactattttttggccaatgaggttaattagtgttgggattaattgtttattgtaggttctgattggtgactggaataggagattgagaaatgatggagcaacatcaatttgtggtgatgatgagcatggaggagcatatatagattgagaaatgatgggcacagaggtaacattggtattcatagaagaaacaatagtgttagaacttgaacaagttgaaaacgttggagtaggaaaataactagtagaagaaccagattgtaccttaagtgttgatgatggaagagagatacctgggtaatgtgtgttgggttttatgccctaaataaaagtcatttcaatataatcagatttacttattaatatagatcagaaataacatttaatgttgcatggtt

SEQ ID NO: 304395 - DNA, 6853 bp, Cannabis indica
acataaaatgaaacaatgacacctattaaaaaaaatgactctacataaagtcatttttaataaagtcatttttaatacgtctattgaagtattatccaataatattattatttaaaattaatatataattatttttaaaaatcataaatattaattaacaaatattgataccatgtttactgtacaataatatttagacatacttcaaatttagaaatatcccatatatattttcaagcgaaaaatctcaaaatattaaggaacctaaaccatgcaacaaattttgcaaactagaaaataccataaccaacagatttagtaaatgataaattgttttgaaattgtattttttttttcatcagaaatatataatttccaaaattagtggggagatatactactaattttgagctagctaattaaacaataggttttaagttaatttattaagaacaaacaacatggttgatatatatttttttttaattaatttactctgtacataaagtattaattgcacgtttaattttttactatattctattaaatatatttatatttataattgagacgtctcaaaatgagtttgtctatactcataataattttacatttacacctaatatatattattaaatttttttcacatgcagcaaatatggtctgctttgacaaacaacattaattaataatattataatgaatagtttgtgtttgttttatttattaaatcatggagttggtaagattattaataggagattatagtaatcaaatatataattactaaacgtgtttagataggtttgatttaatttcacataaatataatacagcgcattagagataattaatggatgaattttaacttaccccatttcttactacatttcatataaaataatattaaacataatattattcgaaaaatatatattaattaataatatttaagattaacgcatgcgtttcacgaggaagcaatagaagattaatatcttccacgtaaaaattgtgtacaattctatataaataataaataaataaatatctcatataaataatgtcaaattagtgaaaaaggattaaaaattaattttaattattagcttctttttctgactttgtgaaatattaatatatataatatttaaataatatagaaaaaataatcaatgtaaaataaagttagttggtaaaaataaataaaatgagatttgatatctaaaaatatagatagtagtacgctatttcttattgtgtacgtgctcttagtaagtcaaagatttggtttggaggattgtttctaattgtcttcctacccttgtttaattagacgtggaacatgttcattttcttttgttgtagtgtccaaggtgcttgcgagttggagagtttatttctcatttttttgtggggtatttgtttgcttttgcttgctgggggatgagggatatttcggtaatagagattgctgacactctttcaagaggtggcttcacgatagatttcagcgtttagtgttgggattctgggatgaaacataaagttgttagtggtctgtgcgcaatgaaaatctgtagaatagtaagaataagactgttaaagtggtggtttcaatggttaagggtagttttgatcaatggagttgtggtcaagataaaattttggtttccttcatttttttcttttaaagacagcgaaggacacgagcactggattgtaccgaatggtaatgcgatcaaaatcaatgttgatgcaactatctttagcaatcaaaataagtatgggtatggttgggtggcacaaaactgatcttctggtcaaattattgtggctcggacaataagccgaatgggggtggttgatcttgtttgttatccatatatattttcagtaagggacacgtggattctaaatagaagcttaaggcccatcagtagacccaaataacataaactgggtcaagcccaggatccattctgcattgggggaacattaatacaactagcccatgcgaggttccgtcaagcctattcagcattcagaaagactatatctgtgtatctagaagaggtcattagcatgtatccggaagcctaatatagtttcccatttattaccagattgtacaaaattgggaattacgttcctataatctcgaatgtaaatcatatctcactaaataaagatataatgtaattagaaattaagtaattaatgtgtcactaattactcacgaagatagaacacagttttgacaactagcatcatgatgtgacatccacatcagcatacacaaggtacctcatgggctgggcttcactgctcaaagtcaatgtattatatgtaaagtctctagtctctattacagggaaaagggtaactagtatgacatttatgcactataaatactcattgaatccttcatgtaaatggttcgaaattcttggcttattttcttaggcgaagaatagagtgcccatactcattgtaatctcttaaacttttctagctaaacatttaataatattgactcgtagactaatgctcgataacgccccaaccacgtaaaaaattctaggtgtcttctttggttatttctctttaaattatattttctttggcttaaatatttaatagtttgttttctgaaaaaatcaataaataatgttcttgctgaagctattggggttacggaagtattgagttggttgaatgaaacagggcgtcatgatatggtggtggagtcgaacagtttggtcacgatccaagctatttgaagtttgttagatatgacttctgtttttggattttgcatttcagattcagagtgcagacatattctttctagtttgaataatgtcttttttatttttgtcaaacgatctgctaattatattgctcactattggctaaagtttcatggttaaatgttcgttgtacctattcagattctatgattccgagtagtttattacgtgatgtacttttgaatgatttgagtgaaattacatttctattaaaaaaaaaatgtcacctctctatatttatttatagaatatgtatgtatgtatgtatataatgttagattgagttggatgaaatttgtgttttgggtgtattaatttgattatttgggcttggttgtatagtattgtattatatttatataatattatgttagattgtattatattatattagtattattttaatacaatactatatttggtagtgacttgtattaataaggtgttaaattatattatttttattataaactctactcaaccttgacctggattccatctccagccttgagcacaaaccatgagtcaaacccgaacacagatcccaaggtgtttgggatccggggtcagggtctaggggctggatcttggttcagggtctggggtttgggtctgggttcagggtctaaggttggagtcaaagtttggagtttgaggttcgggttcgggtcttactacaacattcaacattattagctgtggaaggggcccgccactaataaccaaaaaattgtgacgagatcctatcgctaatatctcgccgctattaactattattagcagtagattaagcatttgccactaataataattaatagcggctagttcccatttaagtctgagtctggggttaaatttatattatttatttaagtaaaatatatgagattcgataataaattacactaataatacaatattttttttttggttagtgtttaacacctatctcttagcatttctgttattatctatttatcggagtatttgacttggattaaggaattgctatttgtgaatgatggagtagttgaaaacttgtaatatgtaacatatgtatatgcatgcacataataacaaataaagaattgcaaacccaaccaaatatatccacatatatatttgaaaaacaaaaatgggtttttcctaaaaatatatatcaatgttattatttatataaataaattaatgttgaaatgaatggattggtgacccacacatttgattttttgtccacaaatgaacatatggattggaaagtagtgtggatgaatggtcacataaatgatttgtggctgtgattggaatgaatgcagaagagtcgagtgaattaataatacgtgtatgggtttcaataattattcatgcattctctcacatgtattattcttacaaacacatccattctcacactagccgagccaccacattactttactttggagtattttattattattattattattattattattattattattattttgttaaaaaagtattaaattttcataaatatatttataaaattttaaattataaaatacattttggtcagcaaaaattaacaaaaaaaacaataaataaactataaataaactataaaacaactaaaaacaatcccatgagaacaataaattaactataaataaactataaaacaactaaaaataatttcatgagaacactaaacaaactataaaataactaaaaaataataatttattatttttactgaaaaagtatttttataaataaaaaaaaaacacaaaataaaatgaaaaaaaaaatcgtgttgaagtatttttgtgattttcttaaaaaaaatttgtcaattatgtaatttttttaaaaaatataatatttatggatttaaaaatagaaaggctaattaggattttttttcccttaaactttgacatgtaccaaatcatcatgtcccttgaacttttgtagccgttaaaaattttccccgaactattgaggtaattggatataaggacttttgtccaattttattcaattttactaattcggtgattgtttatgtactaaatcatgctcctcaaactttgatatctaccaaattatgcccctcgaattcaacatgtaccaaatcatagcctctgaactttcattcatgttagactttttttactaaaattggacaaacgtccttaaatgtaataatcataatagtttaggagaaatttttaacgcctttaaaaattcaaggagcatgatttggtacatgtcaaaattcgggtgccaaaaatcctaattagctagccaaataaaaatatatgaatttaataataaaaattataaatttaatagaaacaaaaataaaattacgtgggatgaaaatgaatattagtttcatgtgggtaaaaaataaaatatttaaaaatttatacatataaaaattaatttgtaaaaagttgaggggagaaaatgacaacataagacccacttcctccgcccatatttatatatatatttatactatgttaatattacatgaaattaatgcatgtacattttagttataatagatattttttaaagtttttaaaatattctaataatttatgggatcaaaaactaattttaaatctggtcataggtttagacgtctagtggtttcgcacttttcaccacaaaaatattgagattacaagttcaaataacctttcacccaatgtaaaaaaaaaagcaagatttaaattctttcattattattatttttaaatgtgtacaattgattattttaaacttttattttcagtcttataaattgttaaaaatttctcaaaatttagtaacaataaaaattaagttataatgttgtagcaacatgaaaataatattattttttctctaaaaaaaaaattacaaattcataagaaatatatagagaaaaaaaagttcataaaaatatataaaaaaagtacaattttagatactttgtgtaaattttcttaatttgtttatatgtgctgaaaattaaatactccgatcgaaaggaaccttattatataatgttcttacttctaatagtcatgatatttattaagaagttttctatatatatatatatgtataattgtatagtagttatattaattaatagaacagatggatggagaagaagagatgcaaatacatatggccaaagtttctgttatgtgatggttagtataataattaatgagatgagatgagaaccacaaaagattggatagagatacttacttgagattaaattcatgatgagcatgtgaaatcatattcatgtatacactgttctcatatatttttcttttttaatttcctttaatttaataattaagggtggttggaacttggattgtgtataatatggtagttgcactacttgtcagtcaaaaaataggatgatatatatataaatccctttttgtagagcattcctattgggcaccagtggtgcctagcaccttctaaatgtgtcgatttgcaattggctagcgatactttataaaaattattatattaaactatatgggacccgatacttaattgcaccaatagcgatattgacacgtaggagggtgttaggcaccagtaatgccctttagcatttctcctttttgtaatatatatatatgatccacaatgcacatgcatgcatatgttgctttatatatacaagtcccaagtctatctactttccgattacattaggttcttaatgagtaaatatggattggggttttttgacacggtacgatatcggcacgaacattatttgacacgaaaaaatgtgtttatgtatataatatggtatgatacaaaaaaatatagacatgtatacacgaagcagtaggacaagcctgaaactatgacatataaatacaaataaattatcttgatggcatgatacattaaaaaactcaataatttaataataataatgataaatatttatcaattaaaatgataataactataattattttttatataattatgtgtaagggtgactattcaatggt

SEQ ID NO: 304396 - DNA, 807 bp, Cannabis indica
ctttatgtaccaccaccggatttggaagctcgatgtgaaatccttcaagtacatactcgaaaaatgagaatatcagatgatgttgatctatcaagtattgcagaagataccgagctgttcacaggtgctgaactcgagagcttgtgcagggaagctggaatggtagctctcagagaagacatatctgcaactgttgtatgtgatcaccatttccaaaccgtgaagaaatctttgaagccggcattaacaaaagaaacagttttatcctactcgtgtttcatgaagggctcgtcggggacagtttctaacaagtttgaatcaaatgcagagcacaagaacaaaagacacgagtctttaggaataatttgtgcaatgaaaattggtgttttgagtttggtatttgctgttgctatgaaatattttctcactagtacgggtcgtactcgatatgaactagcaactacatgaacaagtagaaggctggagattttgtatgaactagccactgctttctttttgtatttggttctcttctcattcccattataatataaattaatttcaattaaatcagttggctagatttctgttattaatcaactgttatgaacagagcactacatataccccttggctctcattcacttgaaacaacaatccaattcagatagagagagagagttcaagattcattgttagagagagaatagactaggattgccattgttgagttactgtttcagcttgtgtatgtcgatagatgttaaagagattgttcactcttgaagtgacttctctcaagtgagc

SEQ ID NO: 304397 - DNA, 2030 bp, Cannabis indica
cacacagatgctaagcccattaacaattgatcaccaacaatatgggctaacgcagcaaagaactatccaatcaacctaagttttaataaaaccaataaaatttaatgtaagcccaaataaaaagtctaacataacattgttgctaagtaaattcactatgtgaatcaattacaaaatatatacatgatcaaaacaccttaaccaactaacatagtagtccggttctaatagttaaagagatatgctaattacaaccttctattacaattttttagtcaattcttactcttacgtctgaaatcacatgccgaaatatttttttttatagcggtattcgttatagttacagtatcatctttgtaaattttgaaaaattctgaatagtttatagtaccgaaaacagagttcatgatattctagtttaccacgcgcgttaaaaaaacttcaaacgtattttcggcactgtaaactattcgaaaatttttaaaaatttacaggggtgatgttgtaagcataacgaacacccctgtgaaaaaaaaaatattccgacatgtgttttcgggtgtggaggttgactaaaaggttataacaagaggttgacggtatcactcctcatagctaaaagctaaattactaactgaaaataactaactccaaactactttaagtgattcccttaacatttagtctcatatcaaaataaccttaatcgatttaaaaatgacttttttttcttctttctccgcgattatgtatctagttatctctactaaacaattattaatagggtgcacaatatactatttttccgaagtggtggaccatgaaatttatttattttatgtattgttcatattcattactttacactaattaattaatgaatataaatttaaagtttaacccagatcaacttctaaaccacatacttaattatgaacgtataatatgtaattaaaagaaaatacaactttatcataaaattagcattcgtgatcttacataaatatataataggtacgtcccttataactcgtactaattaaatacacaaatttttatttcatgaagcatagccactactatatgatatgactattgaatagtgccaccacctctttcattagttgcatattaatctttagcagcatactcaccaccgcggccgaggccaccgcggtcttctccttcaataccaagtccttcttctgtagtaccggttcggttatcgctttctcctctaataccaccaccaactcctccagcactacctcgttcgccgactacactttcccttgttccaccagcatagccgggtgtgccattagtatcaaagaaagcactagaggcgtaagaacaaattaccaaaccaaataaaacaattaaaaccacacttattgtaattttatttgtatggatacccattttgggaatgaattgatattattacttaaaattgttatatatgttaacattcaagaaatgggagctataaatagggaaagaaagagtttaataaatagatttgtggtgtggatgcccacacataatcatactatggttaatacattttatgtatggttcacttaatgacaaaatcaatgaaagaagacatgaaaaacaaagcataagacacattggatttgtcaaaattatatatatatattttccccaacttgccattcacaataagttgatgttagctcctttttattattgttattttattgctctttaaaaaatggattagtgttaatggaatttatcttgaattaatgacttaataattattctacgatatttaataacattgagaaatcaccaatctcttctggagagctgtagatttttacacataggattattcattttcctaaatgtcactattaagatatggctatcttatttctctcatgtgtattgtataattaattagtcgataatgaccattaattacatttttattataaccatcatggttatatttttttaagtcatcattggattattattaaatggttgtgattaat

SEQ ID NO: 304398 - DNA, 2438 bp, Cannabis indica
agggattaatatatgagaagaagacttgggctctacataatgggaagcaatggtcttcaaagagatattattacagaagtcataaaatctttaacaatgatttaacaaatcataaaagtggaccatctagcacatggcatggttcatggaaaggtaagatattaggagaccaagtggatcttgttcttggactagttttttggtcttacctaatctgtcctcacttactattggatcacgagaatgattctcataatctgagtagttttcttgataatacaaatgaactgtagacacaaacatgtgactctgcatcagaaatgtgcatataaaagtatcatattatctcgaacaggtcttgaatctagcttcagaatctattaatgaatagacagcaaaataataatgacataatctcagttcccatgtttgtctatagatctaaaggtattcttcagtcaaacacaattgagatatttgtcatatttcagatttactatctaatcaacatcagaaagcttaaggccataacagaacatttcatcattgatttgcagaaacatgaaaattgagaaataaaaataaaagaaactgttttcttatcacaataaaacaaacctttgcatgttgttatcctttctttttagatgttttacatcttttttatgaagtcttcaatcttcccagcagcatcatacatgtacttctgtttgagctcttccaaaagcaaacgacatgtcttatatcttggcatcaatccttgaccaatcatctcctcaaagaggaggtaagcccactcacatttatttgctcgacagagtccatgaactaaaagtgtataagttgacatatcaaagctaagatgatgtctgttcaccatgtcatccaacaatttctttaaacaatcatctgttttgccatttctaaagcaagatttaagcaatggatagtatgtctgaacatcaggcttacaaaccccagaactttccatctttgcaaggagattcaaggccttctgttcttgattatggtaacaaaacatagcaatcattgtattataggtcgaagtattaggttcaacacttgtattaggcatttcagtttcaaaaactagcacagcatctcttactttgccagtccttccaagaatatggatcatagaattataaaacagtgtatctaacttacacccatctgatttcattctcttggctatctgtaaagcttcatcaaacttctctgacttggccagagaactcatgacagtagtataagtaacaatatttggtggacacccttcaactctcatttcgtcgagcatttcataggcattgtcaaatttctgttggccacaataagacttgattatagttgagtagctaatgacacaaggacggcagccatgacctttcatctcctggattgtccaataagcctcctcaaccctacgaattttgcaccaaccatgaatgagtatattaaaagagtgagcatttggcaatatatgtggtttcaactccaaaaaaatcccacgagcttgctccactttacatgctttgcaaagagtatcaagcaacaagttcatggattcagtgttcttctccaatccgtacgtacccatttcatcaaacaccttgactgcattttcccacttcccagaaccagcaaatcttctcataactttagctatggtgttaagtgtgaccaaattacgagtacccatttcctgcaaaatcatcatcatcgtctccatttgcttcatttttccaagtatgtcaagaatcaagtcgtacccatctgggttgtgttcataatctaaacgcgactctgcccatttgaaaactcccaacgcagatttccaatcgtccttaaaccgattaagcaacccatcaacgaggttctgagataggttaaagctattacattgctgatcgtttagaagagatttaacaatatcatcaacgttgttggagttggataatcgtactttagagacaatggtatcaagttgagagagcttggtatggtcttcgttttcggatgagccatgaatgaaggctccagctttagacgaattaaccagaaaggagagattttttctgattctcaaggctcgtgagatcatcaaaaaacttcagtcaaaactcaaatttcttttcagattgtaaatttgtatctgaaactaacatacaaaataaatagttgttgtatgttcaaacatagaaaaattaaaataaggcctttggttgggaggaatgaatcaagggagaatacaaaaaaaataacaaaaatatagttttatgaaattttaaataattttataatttttttaatttcatttacaaaaatacggtctttttatgttgtactcttgttaatttgttgttgattttttgttctgtatgttattttttttattgttatttagatgttatttt

SEQ ID NO: 304399 - DNA, 1499 bp, Cannabis indica
gtcccagtccgggtctgggttcgggtcctggttcgggtatgggtccgggcgctgggtccaggtccgggtttgggtctcgggtttcaggtgccaatctaggtctcgagtttgggttcgggtccgggtccgggtccgtgtcccgagttcgggttcgggtttggtctgggttcggattcgggtctgggtccgggtctgggtccgagtctggctccgggtcccgggttccggtccgggtctgggtcaaccagaaactccaattattattaaattacacttataataatattatacttgataaaatatagtatatttaatatttatcttataataatttagagggtgatctattttttttttttgaaaaactaatcttttagagaaggatatttccaaatcactttttgcaatttgggtcccagtaaagtggtgctatttatgataggcatgaaatgaaagataatagtaaaataaggatgatatttttgaaatgtaaaagtgtttaacacaatatcatcggttaactactacaaggttagattcggattgtaagcttagttgatgaactcgagattgatcaaaaattttaaagtagataagacaaacaataaaagagggaatagaatgtactcctcttttggtattagtccctttgctatcaaccttgtagttatttgagctaaattttgattaccatgcatttttgaattgcttaccatacttataatgtttttgcatttaactatatgttcaggtttagaattatgcaatccaaaaaatatttgcataactttcatatttttgacatatactttgttttcatgtttagtttatgttcaatttagattggtagcaagtagcaaccaagtgcgttagaggagtttaatttttaaaattcataaaaggtgatctaaaaaactatgaataaagttcatgttaatcactttgtgcgtaatattacactacacattatacagtttgtgaggacatgatcatccataaggtactaggttgagcatatttgacttgataaaatccttagaaacgttttaagagagttcttaatgtttttgtgaggaacaaaataactctatagggataaaaaaaaattagaatcttgtttataccttgtgtgtatctttttctttatcgttctaggccatataaaatatttaccttccaaattattatcactactaaatcgtatcccataaattattttgtgagttaaaaattatcctagactagtaacaatgctaaaaatatgacttttattatattttattatatgtgtctaacgaagtgttgtgatgtggttaatgtatcattaccacataagtataggcgggacctaagggtgttgagggaagactaaagctcaccctgagattgagagtctccttagcactcttcatatatagcaaagagagagaaaaaatgattgagtgtcattgtatataaatgacattaaccgtacatgcatgatgttggaaattatttta

SEQ ID NO: 304400 - DNA, 4997 bp, Cannabis indica
cacgcctaaagaatgaaatcaatcagcgaagtatcaaaaaattacaaaagcaattgagttaaataaatttacactccctctagtaatttgacgcaaccctttgtaatccaccttgctaatgtgatctctgaatcacaccaagtagtgaattccctatagttattgatgtgtgcttacttcctctcgaagtaaggcttaaacaaatattttcttgtagatgtatgctcacttcctcccgaagtgaaacttgtaaaagtcttctcctgaagacctgcacttgtttaaagtttctcttcagcctattttatgaacaacaagagataattacaagaaaaccaaaaacttagttgaacactctagttttttacaaaagaaactctctcatcacaaagataaaattataaaaaatgaagctagaagaggtaataatcgtttggctgctctctaggtcctatttatagaacatagtaaccctagagacagccacaaacacaatttcccagttgtacaaaacttgcttaaaaaatgtcctgatttgtagtatcaaaatcggactctgcatcaacagatcgggaccaaaaacgaaactttccaaaatgaaccaagatcacgaattcagacttcaatacctaccaaatacagtttatttgatcttctctaatcaagacaaaactgaaatcattaataagaaaaaaaaaagtcaagtttcccaaaaataaacaattttctataagagaattccttctcttttaagacaaatttcctaaacaaatgaggtcagctgagaatgaatctttccttagtgttgaagagcatttagaggcacgaaattaatataataaaattaatttaattgcacaagaaaattaaacattaattaaaaaaaatattttgataactaatttaccaaaaaagactttacaatctgtctctttagcactttagataatcaaaatatttttaattaacaaacacttacaaaacaaagttaccgaaatcacagaaataaactcctccctgaaaagcacaccattaacacaaactacaatgctaactttaacacaaaaaccaaacccaactccccatgaaaaaaaaaagtccagaattaaacacacaaaccaaaaaattagaacttactacttcccatttttgtttatctttaagggccaaagacaaaaagaaaacaaaacaagttaaacaactataaaaagtgaaataaagtgaagaaaaaaaaaatctgaagcttgattaagctggaccaaagtagacaatttcttggttatcgcttgctaaacctcctccataatagccaagtgagaattcatcaaagccacttctagtttaacttcgtgcacaactgcaagagcaacctcaacgtcgaccagcttccttggtcgaccaaggttctttgttttggccatggagattcctaaaaaataaagaagaaaaataaagaaataagacaaagagaagaagaactcgaagaagatgaaatgagttggtgaggaataaaagaaatcaaattgatatacatatatatatatatttaaaattagaaagggaaaccaatttaaaaaagaaacaaaataaaacttatccaccaagcaataaaaaaacgccccttttaaaagaaaatccttatttttgttttaaatgagattacacgaaaattagagggaaacccttctgaaggtttactttccgactaaagacttcctggtatcaatacatcttgtataatcaaaatttacataaccattgatcacattcaagtcttcattccggttattcatgccaaatactagtctcttctcaaaagttcccttcaaataacgcagaatctatttcagggcttcctaatgctcctttcttgggttttccatgaatctattcactatgctcaatccatatgctatgtctggtctagtacaaaccatgacatacattagggagccaaaaatactagcatataaaactctcgacatctctaacttctcaatttcatcttccagcatctgagtaacacttaatttaaactattgtgcaagcagagcactcactgccttagagttactcatttcaaaggtatcttgaacctttttgatgtagtttgtttgattcaagcgtagtagtctcttttgtctatctcttcttatgtccatgcctaagatcttactagtcgaactcaaattcttcatttcaaattcttctttagctggagtttcaagtgcttgatctcttgtacacttttgtcgacgatcagaatatcatctacgcaccataatagatacaaagtatctttatttctctctcaaaaatatattcaaggatcaaacttatttcttctcagacctatcttagtcacataatcatcaaatctcttgttccactgtctcagagattatttcaaaccggacagagacttccttaataagcatacccagtgttcctttctagcctctttaaatcttttcgactgtttcattagaattatttcatcaaatgtatatataagaaggaagtattgacatctaattgttctagttcgaggtcttaacacgcaacaagtgccaacaaaattctaatcaatttgcgcttaacaaccaaaaaaaaatacctcattataatcgactccttccgtctgaaagaatcccttcgcaaccaatcttgctttatatcgtgcctcttgtacacctggaatgccttctttccatctttacacccatttacatccaataaccttatcgtcttctggcatcagtattacatcccaagtctggctattcttcaggggggtgcatctcttccgacatagctccatttcatttctttcggtctttactttttattgcttgtgcatagctgataggctctttatgcacaatcatattagcaacataaaatgcgaatgagattaaatcaacaggtttgtacctatccgaagcctttacttctctctttgttctgtctctaaccagtttataacttttcagatcatcacttctgaaatcatctttcaaatcatcgctttcatggtctataggtgtttcaatctccactcttgtcagaggctccacctcaagctcagtcctcggagcttcaatttcatttcggttagtattggcttaacttccagcgggtttgtcaataaatcccataacagatttattaaataatattctatatcctttgactcctttaggataccccaagaaaatacattttaaggccctcgcctcaagtttttcttggctgatgtgcgcataacagacatattcaaataccttaaagtgttcataacttgttggcttcccaccacatttagcatcttgaaatctagtgttgttgacagacatttatttatcaaataaactgcattggacacaacttttgctcagatgactttaggcaatccaacactcaatattatgcacttgaccctttctagaatggttctcttgaacctctctgctagtccattttgctgaggaatcttcctcacgatcttgtgcctagttcttctttctttctttcagaacacaacaaactctttagaaaagtattctagaccattatccgttttaagccgtttcactttcctttcagtttgattctcaatcattatcttacagtgcttaaatctttcaagaactttcgtcttattcttcaaaataaacactcataactttcttgagtattatcaactatagaaagaaaatacctacttctagagtgtgatggtagtctcgagggtccccctaagtcactgtgaatgtaatccagtatttccttggtatcctttttttctagtgcatctctttctgatcttgaatcacccgtcttatgcctctctagacacgccattctgagatgctctattttcttacgaattcagcatctaagattattttggctatcagactgtgatttagatcttgattttactattgaacctttgtgactttctcttttctcacttttgccatttgtaaacaatccatcaccatttttagaattctttgacttactcctttgattcaactctttcgaattcaaggttgactgcacatcatcgagtgtgttcgactctcttccatacaatattttatgggagagagtggaccataggcaaaaaaaaaattttagacccttactataaagataaatggtattttaaaaaattattaaaaaatatgtatattttttaaaatatattttttatttggatccctaaaatgagtgggtcctaagcgtgggcctagcccgccttagcctagagtagaccctaattcaattataatatctaagttcaatatatatatagctgaagggcacttcggtaccaagaaaaatgctaaagggcacccattgagaggtataatatagctattggtataattcaataacaagtcttatttgttttactttaataaagagaaatactaaaaaggtaacagtgatgtttaatacccttctatgtgttaatatcgttattagtctaattaaatatcggatctcatataatttaatgtaataatttttagagaatatcgttactcaatgacaaaataacatatttagaagtgctaggtactataaaacccaataatcatattctttaatatatattatataaaatcactaattaataatgctccatactaataatgcccaacaccactagagagagcaccactaattcttaaataatattacaatttagttcctaaaactattattatagagagagattacatataaaacaaataaattaagaaacgtgggcgctaaaaagattactgttggtttggataaaattggctatttgagaaaagaaagaaagtaagttttgaattgtcaaaacaataaatagttcgtacacgttttggctgacaaaggtcctctcgctgtactttacgagtaaaagacctttctataccctttaataataataataataataataataataataataataataataaggctaatta

SEQ ID NO: 304401 - DNA, 3984 bp, Cannabis indica
caagaatttgatttcccgctttacgttgttacactcgttcatgtcatggccataatctccatgaaaatgacaaaatttagacatgtccctcttgcttatgtcctttttcatgggagcaggttttttgtatgggaccatagattaggttgccatgtagattgtctctaggtcatcactcaggatagagaaggcagtgaatttggaggcattttcttaggggtttgtttggctttccctgtaaactttcccttcttcccgttgtctttcctgccattgttattggatctttttctgctcggagttgagctattagggtattgtgggctctgagcaggcgctcctgctaaggggacctgcggctagcctgacctaggttcgacatctactcgctgaatggcctcttcgagcttgataaacccatctgtccggtctaagaactctgccatagatcctataggaccactcttcttaatgtctatccacagttctccaagtacttcaatgcccccagtatggcgaccaacctcccctctttggttaatcttgctactttcgtagtttctgtcatgaacctgcttatgtaagctctgaggggctccccaggtctttatttcacttctaccaggtcatctaaatgtaatgggagttggtgagaagaagagaactatgcatggaactctaaggagaaagctttccatgaattaaaccttcctggtggtaacctaaaataccactattgtgcagcttctgaaagtatggcagggaataccctacacaacacatcacctcataccccttgcaaatccatttgcatctcaaaatatttaagatgtgacaagggatcctccttccctgtgtacatcttctaggtcgatatttgaatttaatggttagcttcaggacaggtgatctgcatgcttggtctagctcgagatcagtgagtttttgatcggccaggccttggaacatattttttagttcatctaactgtgcttgcacagatgggtgaattggttcagcctcttgaccgacctgtgtcacgtcaagttctcttagagttggatcttggatgggaatacctagttgagtggccggttgaacgtactattcatccagaactcttcttctgttcaaatcattcctgagatcatgggctgtacccaatctattgaatactgaagcaccaagtggcctcagtgattaactggtttggccggtaggttggccaggtcgtgtcagtttggatggagttattaagtgaataattagttaggaaagttagggttattaccctaaaacttcatatggtagagtatacgttgaatgttttgtatgtatatacatgtcaagagttatgtgtataagacataattggattagacttgataaacatcatcaggataaaccactgtaagagcatactgtatgtattatgtatatatgagtagagttatgcgggtaaggtataataaggttagactcggtaacaataatcgagccaaacgttagtaaggccttaaatataaaagagaggtgtgagcataacacgtaggattacgctacatagacattattataaggaatagtgtaatttagtgcgatggcacaatatatatgcagtagcatactgtatgaagtgtaattgttattataattattcatgttgtattatttttttgtcttgctggccttggctcacaggtgttctaatgtccaggcattagtaaagtggtgtcagttcaactatgagttcgagggttttgaagatgagttgtacatgttctggccaagctagaccacgagggttgggtccaacaggaattgtatagaaattccattttctcgcttaggtcggcctgtttttgtaatattttgaaaaaaaaaattaagggatctcggatatatatctttaaattatttttgtttatagtaaaatgtcgatgtttattgcaaggtatttattcaaccaagttttatatttgttttaaattacctggcttatggaccctaattaacgagattagtagtttgtaatcgcgacacgcgacgtttctctgagtaggacgttatagctagagtgggtgaaaaaacttcaatgataaagtcattggcgcgcagcattgtgacttcatcttttagagcttgtgctcgctctttatctagaaaccttcttttctgctgtacaagtcaaaatttttgatctatttttagggtatgaaaaattactaatgggtcaatccctaccatgtcttcatgtgatcaggcaacgacatcgaggttttcgtttagaaatttgatcaatgcaaattttatttctggcattaaaccttgatcgatctttaacttcctggtcggaaggatggggtcaatttctatatcttttaattcctttatcagtctaaagctctctgtaggatccccaaagcaaggatctacgtctacctccctactttggggtgaacttcattgccctttgccagactcttggttagagctcttgacaggcattttttcaatcgttgctttggacaaagccaagttgtagcagtgtcgggcagatatttgatctccccttaggcatcctaccccataccttgttgggaactttaagcataagtaataaattaacgttactgccttcaagtcgtacaaggctcgtcgggctatcattgtattgaatgctaatggcacattcatcactacgaacagtgccatcaatgtccttgttgtgggacatttacaacttttaggggcagtcggatgtatcctaagggtggaagaccttggccaaagaactcgtacatcacttgtgtacagagtactagatctgacaattggagccccgtcttttcataggattatttgaaaagtatgtaggaggaggctccatggtcaatcatgcacctagaaactgtcatgttcccaatttgtgtagttatgaccagtggtcattgtgagggaacctgacctgggaagcacctccttctgtgaaggggatggaaggctctacaagctcaagctgcatggaatctctttcttctacgaccaggattggccttttttctcatgaaaaagggtccacgcatagcgctccatggcctttatggtttcaattactatatggtgtctgccaatcatgagccctaggtgacctgccactggcggtagtattaggtctccattttgggaaccttgtgcctgtgtctagccatcttgtacataacgacacatattgtgattcttctttctgatcaagaactcaatttccatcttcaagtccttgcatttgttggtatcatggctaaaatcattatgaaatttgaagaatttagaggtgtcccttatcatgggaggaggcttcttgtatgaaactatggactttgtagcagcatatactattttaggatttgttgttaggaaggtgaagcatgtgaagctcctctcattctcttgtgattcttgtgttttgggggaattattgaatttcccccttctacctttttcttgggtagagatgttgttgccacatttgcctccattgttttggcctttaaaaggctggttgcttatgctggtagttatatgggacgaacttgagcgctgtccatcactcaagccttgcccaagacctgcctgtctcccattttggcctaccggacagctttatcaagcttaataaagccttttgccctatcaagtaaattagccatgttatgggttgagtgttggcggatgtccctagacaactcacacaaaggtagtatgtcactcatgatggttttgtatctgctggaatatattttactaggacttagattcaataataagtatgtttttaacatcctaaatatgaacttctacaatgatgaaattaaacacatataagtatgagaaaacttacattggttgcagcagaattaaatgactcattccgcttttatctctaacccttgttcctttctatcgtagagtataatcaagatc

SEQ ID NO: 304402 - DNA, 1138 bp, Cannabis indica
atcatttttacctcattttttaaatattgtactaattttgcccctgtcacttcaagatactttccatgtgactctcttatgtcagggtattttaggtatcatacatataaaaagaggtatatttcaattaaatataaaattagaggtaaatttgattaattgattaataaaaatgttatttttcaacttacccctttcttctttctaatatatatatatatatatatatatattttataagttgaggaattactttttctatgatttaatcaaaaatattcctatattgtatttcattaaaacctgtccacttttataagtgggttgcctaatatacgtttgttctctacttaattatagcacatgatttatattaatctaaagggaggtataatgagaacatcatttataaaattgggtatgttttaaagaatatgaagataaaggtaaaaatgaaaataaataaaataaagtaggtatacaatgtaatttctatttttttgtttcttttaggagacggatgccaactctaggctcaatttgagtctatcacgattatgatgcgattatcaaagtaaacacaattttttaaaaagaaaaattgtgaaaattattaattcatgtaatcgtgttaatatgtcacaacacgacacgattattaaatatgcaaaaaaaaaaaaaaatcaattagaatatgacataattattaaatgtgtcactcaaacctatatatttcgtgtcattttttgaattccctaaatacaattacaagtacggtttgaaagagggtaatcactattagtaagcctttcatcaatctcaaaatgtttttcagcaattattttcctcaagtcgattaacaaaatttctcataattttcacatttatgaaaaataaaaacaaaagttaaaaatagccaaacttacaaaatttccacatatatatctcacctaatatataaaatgtctatctaacctattttgttgtgtacttaacagactattatatatttaacagaatattccaaaaaaaaaaaggttaaactactaacagacacctattctatttataaagattattcacaaccaagacaaccattcacaaacacccattcacatcctattctttcgcacagtat

SEQ ID NO: 304403 - DNA, 2232 bp, Cannabis indica
taccaaatgaccttgattgtagagaggacttcaaaggaagtaggggccctcgtcatagatcttaagtagtttcaaaccaataattaatcgttgcatgatgagtatccacgctctactcattgaacattaaaaagtcctatcttgggccaatgctaaggtgactaagatcaaatcagaagtagaggcatagaaaaattgggttcgagctgagtgcaaggctcaagttgatagggcaaacaaataggccaatgattagaatcataaattgtgttgaataagaccataagtcagagtagaactaacttaaatcccaagtatcttccctcaataatgagcgttaataagtgaaggaggagaaagaaaaaaatgggtgcttgcttggcaatccaaaatacgtactgccttgatcgctaaactctaggaggttaacactctacaaattgaggcccataagaaggacttggtgatccaagatgtactgggtaatgatgaggatctgaagagggagatcaaggatctaaagaaagtgagggatttactgaaagtaaagtttgaccagcaatgcgtgctttgacaccacaacaaagttgaagaaggaagttcctcataaaccctttaatggtgtaaaagcttttatagcctcaggagctatgtagaggatgaaagaaaccactggacagtctattaggtactgccttcaatcattagaaatgtcttactcaatggttcttcatatttcgtggaagaaagatcccaccatcattaggcaccttagactagatgaggaagaatataaccacaaggtgaatctgacacttttttcaaggaatttgggctccgtaacaaagatgatgaatctgtcgaggagttggctaaggatcttgaaccgaagaacttagtcgaggttgtggcttctttagtgaataattcttagagtctctaagacattcatcaagatatgcttgaagagcttccggcttctgtccaagactttctgtaggaccttctagatcatgcccgaaatacgcctctagtagtgcctccagcccaatggcaaaagcttgataccctcaggatgtgcctcaagtccaagaacttgttttttgttcatgtatgcttattttgctttctatatttgttttttctttctttttgctctttcttgttcactaggccatttagtaggttgccttaggatttttcaaagcttttagttccgaaggacaaagctttatgcccttggaatttttaactttgaaattgtttattgaatcttagaactgtgataccaacaaattccttttctttgatgtcaatgttgtcaaagcccacttttttacacttataaactttggcaagttaatcttgcataaagggatcaatatcttattcttggactaccataggaattacggagcttaactcccatctacgtgtttcccgattagccaatttaaaaagaatgttttagaaatgttttagtcatttagatttagtgagggtaggggcaaagtgtgtaatagactccaggcaaagcttctcacgaggaaacaaggttggacacatattaacgcttaggctgtgcttcccaaatcaaagtatcccaagaggagtagatatatagaaaggagtttaacaatataaagattttgtgattaagaagatgtaatggtggagaaaggttgcattgaatacaacttgtcagatcgtattacatagataatattgcatactatatttgatctgaacatcaaggtgttgagattattaaaatgcacttttatttttatattactgtaagtgggagtttgttgggttttgtaccatatataaaactcatttcaatataatcagatttactaattcataaaagatcggtaatcatttttatgttgcatggttcacatgatttctttcatgattatatgtttaatatataaattctactaaatcaagaacatatagttattcatgattatagtgttgtcaacacagtgtaatataatcattattacatgtctcaaagtttatgtcccatgatttgttagtacactagatttagactgacatgacaatcagcgataaagtatacatacaccttggataagtgttatgtcctttccaaggcattggcaaagttgttgggttttatgccctaaataaaactgatttcaatataatcagatttacttattaatatagattacaaataacatttaatgttgcatggtt

SEQ ID NO: 304404 - DNA, 2526 bp, Cannabis indica
tatatatatatataaattcactaaaatgtaagtagttaatctgtaacaaagtaataatttgcattgaaatgattactgacatgatttttttatcttttttttaaaaaaaaatgtcatttcattattatatttgcataatccaaaagttgatatgagcataaacaaatgaatagtctattggcatataatctcatatcaaaaaacagaagcaaatattagaaactatctagagcagtagagctagacagctgatcttccatgtcctgctcctccatcgggtggtcgccgcggtggttgctgctgctgctgcttctggtgaggagtatgatggtaagacggcggccttgggaagtaattatttggctgctgctgcggtggcagaggatagtaagactgtggcatttggaagtaatttggctgctgcggtggcagaggatggtaagcagagggtggtggttgtggctggggaaaatgctgctgatgaggctgcactggaaaatggggctgctgaaaatgcggtggcggttgtggctgggggaaatgctgtagttgaggctgcatgggcggatgtggctggggaaaatgcggttgttgaggctgtgcgggtggttgtggctgggggaaatgatgtagttgaggctgcagtggttgttgtggccgggggaaatgctttagtttaggctgcggtggtggttgtggttgtggctgttgaggctgcggtggtggttgtggttgtggctgttgaggctgcggtggtggttgtggttgttgaggctgcggtggtggttgtggttgtggttgttgaggctgcggtgggggtggttcgattcgggaagcattgggtgtaaagtctggtgcctttgggttcagatcatgaggtttcggtttagtataagtacagtataagtggtctggcaaattcttaatgatatcatcagtatcattaagattaagtttatcatgttgtggtgaggagctgggcagaggatcatcatcaaacaaattttttggaatgagattctctggatttagtaattgatctgttgcatcatcactttcactacccatttatcccaacaattactattctgcacaagaggatcatcaccaacatatatattattatttaattaccaaattaatatcataattatgaaaagtgtaataaattaactaatcaagatcattaactagtgacttgttcttcaacaagtcaaattattatacagaaatcactacccataacccaaagaacaactactacttctttttaataaagaactcaataccaaatgcattatcaagaactcatgatcatattgttaaagaaaagaaacagaactcattgtgtcgtgaaaaagaacattaattaacaaatatcaagactgtaaataattcaagatcattatgatgaaattcgtaagtaaaattaatccaagacccaaatgtacgaaaaatccatcatcacccaaatgaaactacttcttaaacaactcattaatgccaataaattcttaaagatgcagatcaaatcatagtattcatatatgattaattaaaagaagaaaagaattatattttgagaaaaagaattcaatcaaaacatattgtaattacgaaaatggatatacggtgagtaaaagaaaaacataattgaaaatggaagtggaataacagtcttaccagtcaagagatgaagagcgagagaagagagagaagaagacgaagaagacgaagaagacgaagaagaagaaggagatttcgcgctttgaggtcctctctgttttggaataaaatcgatcctctgcttaaatagctttctcctttctcctgttcacaaatcataatgatacacgtgtcctctaattctaaagaaaaaacttactttgttcgaaagtggagttgagtatattcatattggttatttaatagggtgggtgtatgggtttattataatattggttgtatctgatttttatcactgaataaattagtctacaattgagacatatattctatttcggtcagctcactaattaactaacttatgaccgttaagggctaggaatggcaattgggccgggccagctccgacctagtattgaccctacagtaatctggtccgacccgataactctcttgtatcagactgaaacagacctgacccatgttaaacaggtcggattttatcccacccgacacgaccttttttttttccctgtactagttttagaaatatctaacaatgcactcaaaaaaaataggctaattagtaattttctcctcgaactttgacatgtattaaattatgctccctgaatttttttagccgttaaaaattccccctgaactattaagattgttaaatttaaggacttctatctaattttagtaaaaaaatctaacatggatgaaagttcaggaggcatgatttagtacatatcaaaatttgaggggcataatttggtagatatcaaagttaggggagcatggtttagcacataaacaatcactgaaacagtaaaa

SEQ ID NO: 304405 - DNA, 4514 bp, Cannabis indica
cagtataaaagtaaatatattgtgcatgggcagtatagaaaacaataaaaacgggtttcgactgtaaaaatgtaaagtttatcgtgtcccattatttttgaaaatatttggtaaaaaaacagtattttgtaagtttccctttggataataagtttataaaaatatggcatatcaaataccatgaaaaattttaaatgtgaaaaaatactatagaataatgacaaatatataaatgcaatatttttgtaatttttttgatcaaatttcatataattttcacttattttttaatgcacgcttaatttaaaaaaaaaaaaaaaaaaagaaaagaaaggcccatttattttcaactattaatattaaatggtttccataaaaaaatataaaattatattaaatggtttccatcaagtgtgcgtggcacacgcatcatgtggtttaggaattaggataatcttaatatttaattgatagtatgggtttttttttttcattaaaaagaaaaggaagataagccacctactactaaaagtcttatcctacgttaacacaataataataattataaataattaatccacagcgcatgatatgctaacaaaccaaacgaacgaaaaataattaattttaattttaaacaggaagaagcaccgatacgtagaatattccactttatcacgtaggagattccgacgagatgagtattgacacgtggcaagtggatcagaatctgagctatgagaccttgatgacagcataaaaaacattttatttctcatatttattaaaattaaacaaaaataaaaatttaaaacacaaataaaaatttaaaatatatcatttaatacatgttaaaatttaaatttaaaaagataatttaataaatattaatgtttagagaacacaaaattaaataatttttttttaaaaaattaaactatttcagtaatttaagaattttttttaataattaaaaaattaaaaaagttaaaatctaaaaaataaaaattttaatgaattaaaaataaaatggaaataatgaaatgaagaaaaagaaaaaaaatatctgaagagaggaatttttttttaaagtggtccccaaaaaatgacgtggccggataagcaccacaattggagagcagctaatacaaaatccgcctacattggccctacccacccttggcttgacctagtgcttatcctactttaccctattttggaaaggacacgcgtcatcatcctaagtggagccgatggctacctttcgtagaatggttcctccccttacacaaattatttgtcgtttatttaattcatactatttcaactccaatcccacccatgttcttttttttattattattctttttttgtggcacgtattttttttttcattctttcacacactaaacaatattgtatagattttttttaatgacatttagacatattcaatatatttgtacgttcaaagttctattgagtgacactacttcttttcttcatgtacccttttaagtaaatttgaccatccatttgttagttaggacaactaaaataaataaatagtaatcaattctattttgtttaccttgatggttactaaatttaaagattatgcataatataataaatagcggaccacatgcaacatttacttataattaaaacaattaaaaaaataataattgaagcgtttgtaatatgaagaaaaacaaaactttgattctgcacgagtgtgctcaatttaattaatataaattaacttagaataacaaatcaaaaaaattcttactcatgtaattagaagatatgggttttgtaaaagttgaaaaggtaatgaaatcatgcataatgtaaagccgtctagtgtatgtatatatttaatgttgtgttatgctaatttaaaatataaataacaaaacgtggagaaaattgtattaaataatttaaatgaaatgtgaagagttgcttaatagtgtgtgaaaacaatgtgaaaacggtaagaagactataaggcgcaaaaagatgagatgaacaatattgaaattgttgaaacaaaagggcatatttatttttgtcaaaataatattcctatttaataatctctatccggataaagttggtgatgacaagttcaaggaaccatggataaaggccaaattattggtcattcaaaagttattttgtttacttctgagagtaaggtttatagcgtcatacgaggtaaataagtcaaaggaataaccaatcaaaacaatgcccataccacacaaaacgacaaaaacttcagagataaaaggcctagccctctccttgcaaacatttcaaacacttaattttctcataatcatctctttagatagactcgaacccttttgttttgtcaaaagtgatacaaacaacacttttaactctagttcattactaccctttttgagataacaataaccaacaatggaggccaaaactggttctgggcttcctcctggttttagatttcacccaacagatgaagagttaatcgtttattacctcaaaaaccaagccacctcaaggccatgccctgtttcaataatcccagaagttgatatctacaaatttgatccatggcaacttcctggttagtatactcaagtcatcatttaagtactactactacgacatgtttttttatatgtataaataaatatataaatattcatattgagtctcttgtttttaccgtgtagcacagacaaggcagagtttggagaaaatgaatggtacttttttagcccacgagataggaagtacccaaatggagttaggcccaatagagcaactatatcaggttattggaaagccacaggtacggacaaggctatctatagtggatcaaagtatgttggagtgaagaaagctcttgttttttataagggtaagccaccaaagggtattaagacagactggatcatgcatgagtatcgcttaaccgattcacgtagacaaatcaccaaacacgttggatccatgagagtaagtaaattttatgttttcttttccaagatttttgacttttttttttagttattgttttcatttggtttttatagaattgacttatcttctctttttttttttttcagctcgatgattgggtcttatgcaggatatacaagaagagaaatgtgaacaaagctctagacccaaaagtggaagatttaagtccccatatcgatgtgacaacagttgccaacgaggctattaatgaggataatgaaaccttgaaattcccaaggacttattccctggcacaactattggatctggactacttgggcccaatttctcaacttttgaatgacaatccattcaactccgcccatgattttcttctcaacaacaccttaacaaacccaggaactggttttgttcaaaaattcgagtttggtgaggaaataccataccaaaacgctgactcagggaggtttcaagtcgctcagaccagcacaccctttaccccaggatatgatatgtactgttcggaccgttaaaagaagttgaaaaaagaaagaaaaaaaaatacatcaattggggttagttggacttggacatttagtaaaccgataattgtctaagaaattgtacatttgttaaatgttacttttccttctttcaagacattttgtaaaaatgaaattattcgacttactcttaaattccaatttacaaacaacgttctattatcattatgggaacgaatcacgacaaaatagctaaagtttattctaaattatctaccttattctcagttgtctctaaaccaaagagatcatgattatggtaacgaatatgaccacgtgtcacaattattgaactataagtatgcatagcgataaaagccaaggtagttgggggctgaccaaagatcattgtgtacttacatcagcaagatgtgatttatcaaaatgatttaggtacttacatctattacatattttaataatataatataagaaaattctacaatacacatcttaaaatacatgtattgatacacttttattaatttgatatttaaaaaattacttagtctattttttttatggttgaacattatagttatttaaaacatttaacaaaattttaagaaattcggaaaaatttaacatgtgaaaattagtgtttaaagagtttgttgcacacatgatttttttttattttatacgcgtgttaaatagacagtttaaacatagatttctatattgtaaattattccaaatttctcaaaattttgtaggatgtcttaaataactataatgtatacgattataaaaaaatttagactaaaaattcttatagatatcgaaacagttaggagttgcatcagtacacactacaagaaatgtcacttttgccagcacattttgttgctggcaaaagttggtattgcgctggtaaaataaaatttacttagtgatgtgttggcaaaaaggggttggcaaatcaatgttggtattagaacttttgct

SEQ ID NO: 304406 - DNA, 2107 bp, Cannabis indica
aaccatgcaacattaaatgttatttctgatctatattaataagcaaatctgattatattgaaatgagttttatttagggcataaaacccaacaaatccaaccatatgtgaaaagaaaattggaaatcaatgacatagctgggacaaggctgaagaaattttttaactctttggtagttgaaatgagtggacatgataaggttccttttctagaaaaagattgtataaacttgcttggaaaagtaagatgattacgacttaaggaaggagatactgctacacttcaaaattatttttgcgtatacaaagtgataatacaagtttcttctacacaatgaatttagatgaaaaaagtcgaataaagaatatattttgtgtagacgctaggagtacggctgcgtataaggagtttggtgatgttgtgacatttgacacaacttatttaacaaacaaatatgacatgcccttcggtacatttgtggggattaatcatcatggacaatcaatattaatattgttagtatgtgtgttgctttcgaattaggatacagagacttttgtttggctttttaagtcttggttggcatgtatgtccaattgtgctccacatgccataattactgatcaatgtaattgagataatatttcctgatacacgatatcgttggtgcttgtggcacattttgaaaaagctaccagaaaaactaaaagggtatgctcaacatcattctattaagtgttctctatctagtgttgtttatgatttaataacacacaatgaatttgaagaatatcaaaatgaaatcattaagaagtttgagcttgaagccaatgattggttattgacactttataatgaaaggcaacgttgggttcctgtatttatgaaagatacctttagggctggaatgtctaccacacagcgtagggaaagcatgcatgcattctttgatgggtacgtaaattcaaaaacgaccatgaagcaatttgtagagcaatatgagaatgctttgcgaggaaagataaaaagaaaattatgaaaatttcaattcatttaattcacgaattccttgcatcaccttgtttgaaatggagcatcagtttcaatatgcttatacaacaacaaaatccaaagagattcaataagagtttactggtaaactttactgtgaaatttcttcgtgtgaagacatcaatgaaataagtttaaaatttattgtagatgaagatgtgttagttggaaagaaaaagcaatgtgttcctttcatagtttgcttcaataaggagaacaatgaagttagcagcaactgtggactatttgagtttaaaggaatattttgtaggcatgcactttcaatccttatccataagataattttttgagtctttgataaatacattctaaggagatggaggaaagatgtaaaaagatatcataccaagatcaaaataagttatgataattggagtgacaagccagaaatacaacaatttgataaaatgtgcaatttattttgtacagttgtagatttgacagcaggagatgagactaaatgcaatattgtattggaggcaattcataatcttaaggcaaagttactacgaattgatgatgtttgtggaagaagggatgagaccaattctaatatcataaatggtgatgagatttcaaaagataattgtaaggttcttagcccattcaaaatgagaagtaaaggttgatcaccttctaagagaaaacaatctaaagttgaacaaattattagaaaaaagagacaacaaaatattaaagttgggtcaagtggccaaaatgcaaaggaggttagtagttttctttaaaaaattgttgtttcaacaaaataaatgctcttcaaatattattataagggtaatttgcggcataacctccttaagtggccagatttttgcaactaactccaattctaaaattttggtggtaaaaccccctaaactcgtgttctgttagcagtttaacatttccatccatttttagctgttaactgctatggtggaatgtctacgtgaacacagtgtacacgtggcacaattttattggtccacgtcaataaatatttaaaaataaaaaa

SEQ ID NO: 304407 - DNA, 2127 bp, Cannabis indica
atatatataacatttagaaaggacatgaatgatgatgatgattaaggatagttatttaaatcagaacctgggtgtaggtgcagcagggtcatcaattgagtgagacccaacatatataatatagtgcacttaaagtgtacggtcaagccaagccaagactatataaggtggggtcagtttctcaatatctgatgcattaaattatacataatattaatattattattattattgatgcctcacccttagaacgagacaaggaataaaagtgatcagagggagccctcttatatattctttcactcatgaaaatatcatcttcctcaagctcctcatgtttttcttctttttataatcttataattattagctactgaaaactaagttaactaataatcatagaaatctgaaaaagagcaaaaggttaattaaaaatactaaagcgaaaaaaaaaagtgaaaaaatatatataagaggcaaaacatcatttcctcaacaatcatttctcttgagacgttattttcgccctttcatcaattgctaaatattgatattcaaatcaaaatggtcttaatcaaatatatatatataaatatatataatgtttagcaaagtgaccctttattgtttatttttactcgatccataggagaataataaattgttctctctgacctatctccctcttcttatatatgtgtgtgtgtgcagtgggggtttattatccaagtagtcaaacaataagttttcatggggttcaaggtcaacatcacaagaaataatattagacccaacatttatttatatatatatatatatatatatttaaaaaaaaatgtaaaaaagcaagggggcataaatggtgggtgggtggtaattaatgaaacaaggacatgtgtagtgcacacatgacatgagatgcccatttattcaaaatattaatgctttcagcaaagatcatatgcacctctgatggtacatatttttacttcttcttcttctattgatggctgtgagccccagctctactacacatcatcacaacacatttctttcataattttttcttatgatcatcaaagtaggaattaataaatatttatatgccaatggatttttcctctttttattcgtataagtacgtacactactacaaaaattccatttagaggcgatttttaaaccctttcagcgtcagttttagcaaagttcgctactgacatatactttgatattaatttgatgtactttgaatttctgataatattaacatattaatccaataattgtggaagtaaacagatatatatgtatctcctaacaaaatttgctcaattttcagcttttttcttactagttactaattaattctttgttttaagaatcaaagttgaaattagtagtcttattatacacccttttgttttacaccaaaacactatacatacttatggggcaggagttttgcctaatgggatatcatatccaatcttaaatgaatgtacttgaattttttgaccacatctaagtgtagtgcaatattttgacataaaaaaaagtgtatgcgaataattactcatcttattaacatcagtgttttgaaattgcaagttttgcttctttctatacatatcgtttctcagttgtctaaggtaattagttactaaatttagttaataattaataaaaatctataaaggactacacttatttatatatttttttttttgtaaggtaaaaaaggactacaattatatatattattaagtaatattaataacacgattttatccattacttcactctttcaatgagacaataataattcatattgttttcttattcttctcacttggacctttttttttttttttgctttaatacattgatattgtgaatgtttctagaaccacattcattcaccttacaaaataaaaaataaaattgattcttaataatttctttagtcattaaccaattacaccacatcattatacaaagaatattcttttgaatttgttatgtagcaatacaagcaacacaaagctgggatttttattttttatgatttttaagatataagtttgtaaaaatatagtttttttttttttgaaaaattattttata

SEQ ID NO: 304408 - DNA, 1240 bp, Cannabis indica
ttaagattaaggacattagagaggttgataccatcttaaggataaaaatgcattaagtcaaactcactatattaaaaaggtaattaacaagtttaatcatcttagtatcaaagaagcaaacacaccattcaattcaagagaaaaactcactaagaataaaggaatagtggagtatgcaagtacattaggcagcctaatgtatgtcgctcaatgtacaagagcagacatagcatatgtggtgagaaaacttagaagatatgctagcaatccaagtggcaaacattggagagcaatatgaagagtttttgttcaccttaaaagaaccaaacacataagcctccaatatctcaaattttctaaaagtacttgaaagatatttcgacgctagttagatatcaagagtgggagataactcttccacaaccggttgggcattcactttaggtggaggtacaatttcttgtggttccaagaaacaaacatgccaagccactcaactatggaataaaagtagagagagagagagacagagagagagagacagagagaagagagatgagggcggctgatactttaggtttaaggttaaagtataatgagtttatatagaaggggttttatgtaaccttaaattttgggtattttttcaattgacatgcgtaattttagaacagatgcaaagtaaccctggggctataaactaacgtaaattatcaaaatatcagttggtacattcgatgttcatcgaaaatggagattggtgggagcatgatgttcctaatggtagtaattggtattggaggcaaattatgacggtaaaaaaattagattaaagatcatatggatagaattgagtttttacaacataatttttttattaacaatttttatcaaaagttcttttctaggaatcataaaaggaagtgggacaccaagatttggtgtcggatgagcactcccaatgattgtttggcttgctatgtaaccaaagatagattgatgtattttgggcacttaaccgagaattattgcttgatttgtgatagtatgattgaaacccatgatgtaacaccctaactagcataggcgtattacgtgattttcaaacatactgtgcagctcgttgctaatcaacgaggttttatggaaaacgtgattaattaaaatttttgctttttaattaaacttgtaaaacatttatataaaatagtcgggatcccgattacaaaaccatttacaa

SEQ ID NO: 304409 - DNA, 2041 bp, Cannabis indica
aaaaaaaaaaaaaaccacaaaaagatagcgtattatggagattgggttctacatcttttgtcggtaaatttagattatttcaccggcataagtttttaattttgtcgggaaattagtgcgtcttcaaaagtgttacctttgagaaaaaataactcaccaattgcgaaatttttttaattcgtcggtaaatgtgaatttttgctggagaaattcaaaaaagtctgaattacattactatttttaatatttaagacaatatatatgtatatatcgttgccaaagaatgttgatgtaaacctaaatatattatatgtatacatataagatgaaaaagtgtctctttcttgtgggtaggtttggcagataaataattccctagggttctccccccatcaatgaaaaagaatctaaacaaaggaaaagataggaaagggaaaaagaaaaagaaaatgtagaaggaaagctatagaaagaaagaaaaagaaagaaagaaagctagagaaaccttcacccactttcaaactttagaaaatttcttttggctatccaaaaaattgtgtgaccacaatatatcttctaataaaacctaagaaaaccttttttggggtataggtgtggaatcgaaaaacccacaagtttcactttttcattccacttagcaataataaatataaatatattatttcttttcaaattagttttgtattaatcaaccttctaatgcatatcatcatgattcatggtatctcaaagagttgtctcataaatttttattgaaatcgaaacaattaattctttttttttctttttaaagcgtcatgctgatgcatatgcatacaaaagaaagataatattataatatatatatatatatatgtataattatttttaattagtgacattttgtggggaacatttttgcttagtcgttatgagaatttgggacccccattgatgggttacacatggactgaaaacattcatcttgtccgattaaattggccaatttctatgtcatataatttttcaacaaccaaaaaaaaaatgaagtaaaataaaattattaaaaaccttgtccattataaagcacacctgaaatgatttttaatcattatatttcttatttttccaagataattacttttcagacaaataatatagtactctatctcaacatgacaaaagaaaaacaattgagacaattaatgtattaatgtattaagaactaattattggaataatataccatgagtataaataggaatatatacacaaattttatcatttgtataaatttcttatattattataatcgttaatttaaagttggattaattgaacaatttttaatcattagaaaccaaaaaatatcaaattaagtttataatatatttgatactattcaatgaaagtaaatcaaaacaaaacgtacatgagatacatttattctattttgtttggtaataataaaaatacatatgtagagaaagggaagtgattaatttgttgagatgtcattttcatttgggtttattaacaaacaatgattttattgatgatcataaattcataatcatggtcaacataagaatctttaattccgctttatatatataatattacgaaattattagatgcatagggaagattttgtcaaggtggctcggataatcgggctcatataatggaaattaaatttatttattttgttattaattcatatattcattaaaaaaacatacgcacacatttttttatatatatatataaataaatatatagctcaattatagttatataaagcatatcttataattaatttataattttcaatatttacagtgaaattgaactgtctctttttaattaattttattataaatttaatgaaatattaatacactacaaaacactttatcctttcataaaataatgaataactacttcagtcggggcatttgttaaaatgcgctggcaaacatgatctttatcggtgggtgaaaatcgatctgttatggtcggtttttaaaattttataacc

SEQ ID NO: 304410 - DNA, 1111 bp, Cannabis indica
taaaaaaaaaattaaaaaattctcttaaatactaaaataaatagaaagtgcattactggacccgcatatgaaaagtatcctttattatatattaagagaaaaatttgtggatgatcttaaaagaaacattctttttgaatatttgtgatatgtcacagtcccaaaattttgtcaatgcccactaaaatatttccattcatgtcacttttatttttctcttgtctttttttagggtagcataaataaataatgcaatttaaaattcatagaaatagcaaattaatatatccctaaaattatagcaattaagttagtattttgctagccatatacacacttattttgattgttggattaactttcataatatatatttctaatattaataaataatatttaataaaaatttgcatgtcactaattttgtgacatttaaccataaactttatatttattaaattaaatatcatttatatgtagtttagttctaattaattaatatatgctatatgatcatgtgttatttaactattataaatttaaaacgtgtctaaatatttacacaaaaaatttaagatcatcgttatctcaaagaataggtcattgaccaattaattaataatttttttgtatttattatatgattctattaaatatttatatcaacaagtaatcctaccttaattaaatttaagtaattaatatatataataatttgatcagtcatgatatgaactaaaactatataatatttatcacatgtattgcatgcatataaattttttaagttttcgtatagatattagataggatgttagatgcaaaattatttgaattaaacattttgtcacacttaatcatacaaattgatatttcagtggtacaattctccaaattactattttgttttgctttttaatttttcattaaaagattttgttaagtgtcaaattgactgcacaagtatacatgtgacaaatttttagtatagtacacataatatcaattattaaaataatgataaaaacatttttaaaattataaaaaatcatttaaaatgaataaaatataaatataagttaaataaatcaattattttttttttctttct

SEQ ID NO: 304411 - DNA, 1069 bp, Cannabis indica
aaacggtgacccgttttgggtatttttaggtgcctagatttttgtgttttattgatattgagggtgttgtcacactatttatcgatagggaaacttcaggttttgagtttaagttttagaacgggattaaaagaattatttattcggtttactattattgtgaaatagggtctgggatcgtcgagcatttttcactcaagtcagcgcatacctgaatcaggacttgagataagaaaagtataattataccacatagcatgttaatatatgatacggtaattaccatttgtacagaggagttatcactctaatttgaaatcgatgttaggtttcttacttattggttgtctcattaggcagccatagtggcattggttgtctcattaggcaatgatggttagtggttactttataaagtaacgagaatggtttgtcttattagatacatactttaagttaatagatgtttatgttgcgttatatgacttcttgtattgtattatgtatgagattatgtgattttgattacatgggtatttttggctaactgtatgttattatgcgattgtgtattactgctttacttgcttagtgtttgtgactcactgttactttttggtacaggtaagggtaaaggaaagttaggacaaccatgagtcagcactctttctcgataaatgtatatattagctcatccaacatgcgatgccaaatttttgggatcatggttttgtattattttgattatataagtattttaatttagagtaaaatattatagtaatcttttgtaaagttttaaatagggattcccgaacccagaagtttcaaaatattgtaaatttatattttaaaaataattagtaaagttttaattaatcaataattttacctaaattattagtttattattataaattaatttataaaagtatccatgtggcgtctttagaggttagagtattacattatatattaataattaattatatatgtataaaaaattgggattatttcacaaaaatataaaaacaacaaaaaaataacaaaaatacggtttcacagaatt

SEQ ID NO: 304412 - DNA, 2121 bp, Cannabis indica
aaattgaaaaataaaagtggttacagaacactatttttagttttttttttaagaaaaaagtaaaagtaaaaaaatttactttcattttatgatagcacctttgttcagtatctttcagagtacttcttcttccttcttccataggaagaatgaaagccctactccatctgcacacttcgtgctagggcctattctaattgttttagcttgatctaaccattataaattatcaggctattttttaccattgactgtggtgaacaagacatccttatctaaaatgaagagaattactactacacataaaagtcccataagaagtctgaattatatatgccttttacctgcaatttatttcaattcaaattaataaataataaagcagaaaaatgttaagactgaaacataattgaacttctcttttcatctaggcaagtggctcaaaatataagatgctagtcttctcactcattaactatgtgcctttggattcatacttttttttttcaactccttgtagtttttattaagaaaagaaagagaaatcattttattgaattgcaagattcagatgatacagaaatgaaaaataggacaatatatatactgcagggacacccaactacccaaataatattcagctaaagttagttatatttaactaactactgacagaaaagaaaggataaggagttaaatgttaattaacagaattaattacttcctataaaacagtacaaaccagtaactaacaagtgaagcctaaatcctaatagtttgaatatctcaaattgttattaagcaaataataaattggtgagagaaaaaaataaccaatcgcaggtgttcaatgatcaatgttcctcaattaaacagatgaaaagatctaaatttttacaaaataaataaataaataatttccacatcaacaaattagtgtgagtaaaacatgttcaagtttccaatcaactaatgtaatccaattgaaaatactactctatatgatgatgaaatttaccagtaatctccaaaagagcaaatacccattggtgacatggtggaaaggatgagtgtctcttacaacaatttcatttcggttatcagtttcgctacagtatgatagtccccacaaatgcgaagattctttgtaattctgagttctgaattcataatttcacaaacaattgcaagcttttcactatgaatagctagttgacactccttgtcttcctcctctacatcatggagagttgaatcaatctctttcatttttcttacaaatacatccaactcttcatcaactccttgaactttagttttattttaagtaaaattaagtatattgaaagaaaatattcataacttagttggttggagtgtatgacacattacgcaatagtgtgagttcaattcataattaatctaactgtggtcacctcttgccacctctcaggtttcgcataaatgttggttgcaaacactgcaagcactcaacaaagcccccaacctcttttgttgtgctctgttggcatctcttcgaatcaaccatgcacgaatagttttagccctggaactatttgatacttgtaaatcatcaacttaaagtagtacttcccctcctcgagcaatccaacatggctgcaagcccatggaactgataaaaaagcaacagaatccggactcatacccaaatcttgcattccagacgctaaaataatcctaaaacttcatactgttaattaaatacttcacttgcttcttctaaacaaccacacttagcatacatacatatctaataaagcattttccaataatattgaccgaaatttcttcatatcaacatatcgatgaagacggctaccaagtaacagggcaattgtgactgcatcaggctctttttcacaactctccatctgtagaaatagatcaactgcttcaactggcattgagttagttataatcacattccatgaaaccaaatatttaaccaagttatctaacatcttcttaatgtatgagacattgtaagatgatgtgcagtgttgtaaaaggaaatttgaaattctatacttacatatacctaatattttttctctaaactaatacttttctacattgaaa

SEQ ID NO: 304413 - DNA, 1409 bp, Cannabis indica
acaacaagagaatatttcaggtttggttgcagaacattaagtgaacttggtataactttgcctgcgccataaaccagcagctgcagaaagcatatggaatttacattcatttaatcagcagacacaatactaatcattacagaacaataataagtagaagtatttatgaacattataaatcatagttatctcacttagcagtgaagcaatttctataattcaagttcaaaagaattttcgaaaccaacaatacaaagagtaatgaatctgggttggccacctactcacgttgcaggcatttgtagacaaacatgtaaaacctccttcaccagtacagggttcactgaatgatatatttacagaaaaattcaatgcatttgtaaaagaattagaggtggtaatagatgctgtaggagatactgtatctgcaaaaacaataagatgaaacacacattgacttagcatcttatgtttactcaaactgtaatgaatgactgcaaatatagcagctgaaacttaagctcattgtaatatatttattttccccaattttagagactaattgacttatccaaacttcacttgggcaaaagttccaatcttacaataccatttaatttgggttgactaagtgtgaatataataatattcttttacctcttgagctaaagcagggcaaaatacaaagttggtaaatttggggaaatgcatgtcttagtttcatttagaaaacataaatgtcttcaccaagctttgttttttaaagaaggattatttaccaattgtccagttatagctagcacagccaactccctgaagcctattggtgcagacttcaaatgtatgagtcccatcctgcaaccccaaatatgaaacttttctagtttcacaatttgaggcaattccaccatccagctgcatgcatggaaaaaaagttaattgaataattaaccatctggtgtcttagtttctaactagcacagaaaacaaaagaaaaaatctcaaaagaagaaaatttaaaaaaccagatgtaatagaccaatatagtgactaagaatccacatagctatgattgacactggaaacctagaaaagattatactttcactcatattttactcagaacaagattgaaaagaaagcataccctgcatgtgtaggtacaatctctacagatgctcccatttccaacaaggaaaacctcaaatacaaaagttgctgagttcaaatgtgagaatgcatgaggagctttcaagaactttacagggacctctgaaccattgcatcgttcttcaaagcacagaagtgaaaaagcacagaaaactaagaccaaatgagagtttttgagcaaacccattaagcaaaaaaaaaaaaaaaaaaaactaaaacctaacctaatacgagtgtag

SEQ ID NO: 304414 - DNA, 2590 bp, Cannabis indica
  modified_base (199)..(199): a, c, t, g, unknown or other
ttttaaacatgacaaatataaggcaataacagagtgtactcacgaaactaaaaaaaatacagttttacagccattaaatatttgtgccactagaaatagacattaatttataccacttacaaacataaaattttatatacttaattacccttattattattattattattattattataaatcagaaactaaagccttnaaaaactcaaacaaaagcaattgtactagaaggaaagtaaaagctgggtgtggctgcataaatgttaaaaagaagctagtataatacttgcttatatgttttctatataaattttgataaaacacacaaatcataacaatgacaaaagtacataaaatggcccaaaaaaactaaaggaaaaacaaacaaaatcaatagctttctacttatcaaaataagctttatattcagtttatgtttccctttaaatatgcaaaagaaatcactccatgtgactatctccatcttcatcttcactaagatcaagatcagctagcatttcctccaatggaatagatggcaaatcttctccgtccactgtggatgcaatctccgatggctggtattctttgttacggtacaaagatatattgaacctcatatcgggattctcctctaaatctttcaagaactgttcgtactctgtgttcgtcttctctaaatcgcctttgttaattctgtcatcaatctccatgttgagtgacttaagcttccacgaacgaggcttcccacgcttcctttggcgtttctcttcgtaactcttctttactaatattgcatcaggaaggactagacccctgtacttatccaactccatgtcattgctgttagctgcatacaaatcataaccgagagcttgatcccccgggtttagaagatgaccgagatgtgttcttatgttgaaaatagtatcattccttccaaaatcagacacacgggcaacttgagcatcagctagagtgtatccaccaagactaatttcgggtttaacaatctcgacatctagaataatgtactccacaagctgcctactagtaagaagcgatttgaaagatgatctccaatattgatcagcatccagataacaatgcctaagagtaagcgggtcgagtaaagcaatgctgttagtcactttagtacaaatcaccaaaggaccgagatttccaaggctcaccgctactttaggaggcaaacaaatcaaaatcctcacggcaaaacaggagatatctcaaacagaaaaatgtatacttataattgtagttattactcttaatatcatgagagacaagttgtttatcatgtctactcctaacaggagcaactttcccaataaactcaacgaatttcacaccgtggcttcggttagagaaaagaaatcaatcccttgatccatttgcttaatctttatagctgtagcagcagcaccatgtttcaaaatcatctgttctaagtaaaagaaagttcttctatgagtaacatgttgacgaagttgaacagcagctatccattgatcgggattcgcctgaaccctagtacaagattcacacatgtgttcttgttgaacaaactcaacaatgtaagattgttcaagtacagcaccattaagaacttccttccttactttcagcttaaccttaatccttttcgaatgcggttcggtccagataaactcagcatgagccaatgtaaccttattcaaattcttcaatctcttaacacaaaaagtcaagagttctttggattcaagttgggccttaatccatgttcttggtggttgtaaataggtatcacactcaggacaatgaacaataataacatgtttttgtaacccttctgtaatatcaacttcagaacgtaaacatttcacacacatatttgcagcatttggtaccataggaataccacacttacaacatagaacactgcctatggtttgattaaccataaacattcctgcttcttcagccatggcagctaatacaacaaaacccccaaaaaaaataaaaatgaaaactttttacaatttcagcacaaaaatcataaatcgaaagagtttctattaatcaattagggattttaagagaaaaatatatataattcaaagaatttcattttatcatgttttgatttgaatcaatcaataaagcatattcactggattaagaaaccattaaattaaaaattcatacctgtgattgagtgaagtaatgattgtttatccgatcaatgagttaggtatgctcaacaagcttcgcgcagagctagggtttttgtttggtttggggtttgagtgaaaccctaaaagaaatgggtggaagaagaagatgacaaaggtagtatgagaaagagattagaagcttaggtttgggcttatcttattgggcttattaaatgagtttggggcttatctcactgggcttgggcttatgacactgagtgaaaagaagtaataattagataaatcattggggtaagttgaaaaatacctattttattaatcaattaactaaatttacttctaatttttatttaattgaaatatacctctttttatatgtattgtacccaaaa

SEQ ID NO: 304415 - DNA, 2621 bp, Cannabis indica
tatttttttttttatttgttcttttttcatttggaattttgacaaccaagacatatgattactaacagaaagtacggaacatggatttttggattccaaagatcgattcattatggccacggaggcagcaaaagggcggcgctggtcttcctcttatttgtaatcctcacgttcgtgttaccacgcgccgccgcacagaccggagatcctccgcctccgtatttatacggcccgacccgacctcaaaaagttgacctcaagatggcaatcgtaatggttcttctagtcacggtcttcttcgtactgggcttcctctccgtttacacccgtcaatgcactcaagaccggtttcgaggcagcgacgaaatcacgctcggttatgtcgggaactcgtcgagggggcgtggacttgaaccagaaatcatagagacatttcccaccttcgtgtactccaccgttaaaggtctgaaactcgggaagggatcattggagtgcgcggtttgcctcaacgagttcgaggacaacgaaacgctgcgtttgattccaaagtgcgaccatgtgttccaccctgattgtatcgacgcttggctcgtatctcactccacgtgtcccgtctgccgtgccaaccttgttccccaaccgggcgagaccccacgactaggctacacaaccctcgcagatgtcctcagcccaggcaacgaagcgggtcgatccgaacctagaccaacacccgatgagcctacaccgaatcctcaagtctcaatacggattgtcacagaatcaccagagattactttgactaatccaacccaagatagggagacgactgaggaccgtgcgccgagatcaagatcaaccgggttcggggatccgagatcaaagtctaacggttgggggctcggcgggatatttcaaaggtcgcactcgaccagccggttgctggttccgccgggtgtgagtcaggaacggttcaccctaaggttaccagaggagataaggacccagcttgttaattcgacactaaaccggaccaagagtaccagcggaacggtgcttccaagggtctgcagtgccaggaagggttatcggagtgtgagcgcagggtttggtcgctggaaagataacgctacatcttacgaacggtttgaaaatagtgggcggccggagcggtgggttttctcggtagtaccgccatttttttcacgctcgggttcagctacgtcatccatgaagggttcgttgatagaaggaggagatgatatggcagcccatttgaaggcggcttcgtcaaaatcgaaagaaccaccgtccgatcagttgtacagagggagggacgacgtgggtgaaaggtcatcggatccgctccggcggtatgattaaatttaagattacgcataaggtacgtgagcgtacgtacgccacacttgatttattagttccaggctttgtgtacaaaacaagaaaaaaaaacaattatatttcaatttaaattattctttttttactccttatttgtaataaaaatcatcagatttgaaattttagcacttttgtaatttggtatgaatttagttttgagatgagatcagaaaccagaaagacaaaagaaacacaatatcacatggatttgcaattcaactccgctgtccttttcatctttccctcaatctttgtaatattaattttgtatttaagaaaaagaagaatcatttttattgatgaaagaaactggaatgaataattaaacagtagaggaggtgagcctttaaataggagaacctcagtttataaccgaaaaaaaaagctaaccaaaataatagaaaactgtctcaacaacaaaataattgatccaactaatttgccttaaactagctaactaacttacaaggaaaaatagagaatcttaatagctctcctcaagatgaagcttatatgtgatagactgacatcttggatacatgagaagtataggagaagtgagtggtttggtgaaggcatccgctagttgaagtgagctgaaaatggaaatgagccttattgagcagttgttaattttatccctgatgaagtgacagtctagttcgatatgcttcgttctttcatgaaatggtgggttgttagcaatatgtaaggttgagtcattatcacagtaaatgaaagcaggatgagattgtggtatgtgaaaatgatggaggagatattgtataaccatgtaatttcgcttgttgtggctgctaaggctcggtattcagcttcgaatgaacttttgtagatggttggttgcttctttgtgtgacggtagatgaggcaatctctcagaaatatgcaaaagccagttgtagaacatcttgtaacaggacacgacgcccaatcagaatcagagaacccacaaaggtgtaatgatgaaaactttgaatagagaagcccctatccagggcttcctttgatgtatcgaagtagatgattaatagcttgagatgtgtagtgtgtggacttgccatgaattgactgaaggagttcacggcaaaacactactataaaaatagtttttcctgaagtttttaaacagtcgtttatagtattcccgtcggtttttataactgtcgcctatacgaccgtcg

SEQ ID NO: 304416 - DNA, 3124 bp, Cannabis indica
tcacaaaattacctttctgcttaattttaacactgattggcttttgtccctagaatcaatcaacttaagacaaagtgggtaaacctctacaagataattcttgataaaagtaccatgagaaatcaatttcctcggtaacgctggtcctcctttgtacctgatgatttaaagcacaaaaaatacaaataagtggtgcacacaattcataacctattgctatttgatgcaactccaaaaatcatactcattttacaaaacactaaaaccccaaaagaccacaaaacaggtggtacccttattcaactaccttagattctaagaacaactttaggagactagctaaatatatatgtaataaaataagagcaaaagaaataaaataccaactcaatagtttttcccaaactagttgagaaactagaacatagtctcttccttcctccaacaatttatgaagctctagttcttcaccatcattctctttgttatttagaactatatcagaattatcaatcggcccaggtctatctacactccttaaagtaataacatccatattttgggattcagaagactgctcatcaaccaatgattcacccatcccttgctttgtatatctctgccagcttgaaaaccatctgtgcaaaatagatagaagtccaaatatcagataatgttatatgggaaaataaaacaaaacattaaattagcgaggccggcacggcacaaaaactagtaaatgtagatgccaatcatctaagcattcaacacttatcaattgtatataagaagcatagacctttattttaaataaattggtaaatctatggaaaggatatagaattaattttcctaatcagagttttaccattagttttttaaccaacagaatgtatttgctaaaattaaccaggtgaaagttagaaagcaaaataatctcactcaatttttgcctaagcaaatgatgatcacgcagtgtaaactatggtcacttgagggaacatgatgattgcttactataaatttatggtcaatgaactaatatgatgcaaatattattattcttttccagaattaatttactaacaacttctttaatataatcatttttaataataataataataacaattggtagcaagctaccattgttcaatctgaatatctgaagaaaagaacaattacattctgcaggatttacataacgtgttcgatcaaatacttgaaaatgataaattcttaaaaatatttgaaaaataactttgttgtggctattggctaaggaaccatattttacactgaccatccatttctaaatgtgagaacaactaggatattttgctaatttcatttcttcacattgttatatttggcaaaaaaaaacgtcaaatttgtcaaactaataattcgaaatactaaaatttgcaaaatgacttcacttaatttactctatgcaaccatgatgatcacgttttgtgaccataatagttgtttatggtcgcacagtgtgattcatagtcgtttttgcgaccatacaaggctattttgttaataaaattttatgtaaagttagtttgctaataaaaatgttcatagctatttttacaaattattcatagaagaatagaatatatattgcctccacttcacataaaagcaaaaaaaaaaaccgaatgaaattcctaacttgcacgaagcaaagaaagatactaagcttttacatttaaactaagctaagagagccacaatatattcgaaagcctaacctaaaagaaagaatatataacaaccagtaacttgaaaaacatcagatgttgggagcctaattatataattagattataaacaacataaattacgcaagttaaacatctaatggggcaatataaacaatactatgtatcaatcaatacgaacaattaatcaaaacaaacaaagtgatataatgtaaatcaagaaaattcaaagaaacccaaacattaaaaagaaaaatctacctattcgaaacaacgtagtacaaatttccatccttcaaattcttatcagattgattagtaagctcagcaataatccgattctcttcgtcgggaggaagaggcaagcaactcgctccattatcaatcatgaatcccgaatcaggaatcgtcatgattgagattcacaaaagataaataatctaaaagaaaataaagtacaaaaatcaaatcaaatcagtcaatcagatgcacaaacaaagatctcacatacaaaatagtcaaaaaaaaaaaaatcgtgaaattggcaaatgacgaaaacagacattgaagagaacatgaatcgtagaagaaagaggaattgtaatagtaacctggattgaagattgaagagatcaataagaaaagaaaaccctaggtgggaagaggaagaagaagaagagagaatgtgtaacagtcgttttccttaggagttggttctcttcttcttctgtgtttcggaactgtagcgacttaatcacgcacccatatttatataataactcatttttttaattaattaattaagagtaatttgtgttgtaaataagaaagataaatatatatgtaatttttttattagtatatttaaattaatttttaaataaaaataaatatttaataatttgtaataatggagatgagtgtcattatatattatttatttataaaaattaaatttaattatttatctaaattaaataaattactcattaattgatatttaattaggatttttgtctaatttcgttcgattttactaattcagtaattgtttatgtattaaattatattcgtaaattttaatatttactaaattgagtatctcaaattatgacatgtatccaatcgtattttctgaactctcatttatgttaattatttttaaattcaataatttcaatagtttaaaaaaaaattaactgtcttaaaatttaaatgacatgatttgatataggttaaaatttaagtagtgctaaaaatcttaattttagttaattaattataatgaaatgaaacgactctcatcaaaaaaaaactctttctcttttatttattatttatttttcaaatgataataataaatgtgttggtgctctattggacatctt

SEQ ID NO: 304417 - DNA, 1003 bp, Cannabis indica
tttgtccagattcaatgaatataaaatattcatttatcagaaaatcaattatttaattatttccataaatagaaaattcatttctataattaaaatattctaatagtttaaggatgacttgaaggttctatggaacaacattctttgctgtgatgaacgctttcctaacgagatcattttggaacaaagtattagatccacatggtttgctgttggtttggatgatcatgatcagtttccacattctgttcatctccaacctcgatcattattgtccctccaacacaaatatgctttagttaacagtgatcttgctaaacgttagtaattgtctatgttttttgctttctattttcagtggttggataaggagatcatatgataaaacttttacttcacagaaagttgcagcaaagtagaggcagagagctctacaagaagcccttgggaatacatagcaggaaaggtgctacgagttttaatttcttcttttcaagaatggaggaataaaatggagtctgaagatgtaaataatacaccaactgtaatagctatcttagggaaagttatttttcatcggtcagtctttttttttaatttcttctcactagcttgtgtgcttaaacaaaactaacatagttggcatgaataaaagagtgtgagaaatgtttgtttaggaggccttcagtcaaccaagaatttgcccaaaaaaacatgctttctgaagacgcattgagactggtagaaaaatcattttacacaaatattcctgataattcatatgtggaatacataatgaaggaaggtgcctcaaagagtggacttgaatttgaaaaggaaaaagaagtattccatgtatatgtaagtcattgttaaacagtagtttctgttagacaaattaacaattaacccaagatctatttgtatataacatagaacacaataataagatataataattaggtatgtgtacctgattgatccatagcaattatctctgatt

SEQ ID NO: 304418 - DNA, 2464 bp, Cannabis indica
ttattcaaaaaaaaaaaaaaacgcatttatatttgtatgtatatgaatatgtatatgcatatgggattgccagtgatatgaggactcatgttgatattaagaccaatgtactctaggcgcccgacactaactaacaaacatcacgtgggacaaatattaaaactacctaattaattaataatgtttttaagaaataaaactacctatacatattatatttttatccatttgttatatgttatgtttatattgtagttatgtaatagttcatacaatttaaatattctttaagagttagtctcacattattaatgtgtaaaagtaaattgtaatatataagataaatggactactccttctattaccaattatcttaaaatggaatctcattcatcttatttctaaattctaacaagtagagtttaacgattaaataatggtttgtcattgcaaaaactaagggtatgatataagagaataattcccaaaatatttcttcacatgatcgaaatttgtgagaacgtatgatcgagacaaaatttaattacacactatgcatcatatagtaataaaataaaagcggaacatagagaaaagttagtatagtcgcaacatatatagattatatgcaatgactcggtgtttctatagattatatgcaatgactcggtgtttctctcccgtgccctatgtaaagactgcatctttaccaacattaattagtctgaatgactaatgtgtgcaataactcgcccagaacccgcgagttttatgttgtcagtacatgaatgcctaatacacgacccgtttagtcacatgcattccgtggattaagaaccccaagaggttcaaatttttattagaacccttcatgcattttattagaacctcaagaggttcatacacgaatgccgacctgtttagtcacaggcgttctgtggattaagaacctcgagaggttcatgcgttttatcgaaccctgaaaagttcatacatgaatgctcgatacggaacccgtatagacgcaggtgtgttccacgaattaataagattcccgagatgttcgcgtattaataggaaccctgaggttcatgtgtttattcgaaccctgtaaggttcatacatgaataccaaatacgcgacccgtatattcacatgcattttgtggattaagaagcaccccgagaggttcatacataaatgcgaactccaagaagttcatgcatcaattcgaaactcgcaatacaccaatgagaaccccaagaggttcatgcaccgataaaaactccgtgatgtccgtgcatcaatgcgaatcctgagagattcacgcatccagaagaatcacgtgaggttcacattatcattatgcaacgataatttaggcttgcgaaatcgacccacgtggtacaatctcaatcagatagcttgtccctcgtatcaaaccacaaaaaagctcacgacaaaagagaaattacctttttgtctagcgtctcctatccttacattattctctctctcaaaatcgacgacacatgcaaaataatcaatttttatttgtatttacctcgagctagcatcagtgaatttttcctcttgataaactttaatgggtatgggtcaactcaattcattagcaataatgtgtataaataaagcacaaactctccatgcaaatagttacaaaattttacgggatcccgaatatataattttaaatgttttactttgaaagaaagtgtgtattattacaagttatttattaaataagtttaatatttattttaaattacttagtttatagaccttattaacagtttagtatattgtaatcacgatacgtgacattcttcttagtaggatgttacattacagttatatgttttaataaataatggtaagaatatagaatatggtatttctaaaaaataaatttgacattgtttgttaaagtattttttagacttgggtgggagccttgagtgtaggttcctgctgccccacccttaagccggtcttttcgaactgattccatattttataataaagggacaatatgcaattttttttttaatatatatacatataatatttatatgtatatttttggtaagatgagaagaaacatcaatgtaaatacacattgcaagctgcgcctgcgtttgatgttatatgtcaaaggaaattcaaactaaaaaaaatgtactaccccacaacaacaacaactcaacttaataatacaaatatatatgccttatatacatatttgatgtatacacatgtggtatctttatatattaaaagtgtctatctaacggcatttcttggtttaacattcttggtttaacagaatatacttaaaaataaaagaatattctgttaaatttaacgattaggtttgatctcccgttaaaaaataaattcaataattaaacccaaaaaattaaacaatcttttaaataaacaa

SEQ ID NO: 304419 - DNA, 1419 bp, Cannabis indica
gttgccaacgtcaacaacaaacatacaagagtaaggaactacttgtattggaaagacattttttttgaaaaaatagtgaatgtataatgagtaacaaaatttactagggaaaaataactgtactagctaagctcaaaattcatcagatatttgtatgataaattcgcagagaatatttcatatttcttttgcttccaaaaatttccattctctccacaataggctacaaaataatgacgtccagtaatccacctcaaacgtgatgatttaaactataaaacaaatgagctttgacacagcccgcaagaagaattgaaagtgacaagtaagcagaaaagcactgtgaagtatacataccatcctttctctctgtttcttttttgcggctttaagggaaaattcatcgagggggactccttgatgaacgtccttctcgatcttcttccgccaaacgaatctgcatagattaggcattacaaatcaatttacaaagccacacaattttgccaatagtttgaggttggaatcaccaaagaaaatagcaaagtaatgcaaaatccaatgatgaaaagtaagaagttttaggctaagaacacaacgcttatgattaaggttggaatcactaaaagcaaactcaaatcaaatgcccaaacaaaaaagttaattaggataggaacacagtgctcactgaagcagtaattaccaaagaaacacaaactcaatttcaataaccaaagcaataaaatttatttagaaactcactgctcgttgagattggaatcaccaaaagggttcgaatcattcgaataaacagaagccgtgtgtgatttcaactgcttcgccactttcattgccttgaaatgaataaacaaaccatcaataacaacctaaacaaaacccaatcattccatgaagtaaaaaacaaaacctagaaacccaattcccaaacctttttctgcgccttcttggccaagtactccgcaatttcttcgtccgtaattgccctggaagacttcttcttcctcttgcggccacggccatcgctctcctcactaccggaagattcgtcggaatccttcccgcgcgacgtgctcctgttgcggctccgacggctgcttttaccgcgactatcactgtgccggcgcttatattcgcgggtgtcagaatcgtcggagagagagttctcttcggaatcagagtcgtcagatcttctgctccgtcgtcgagacttggaagaaccttccttcctactactgcttcggccatgagaccccattcttctgagtttgttttgattgttgtagtcggctaagtttgagtttgttgtatattttttattttaacgttctttgggggtatttaagtaaataagttttaaaagtgttctataaaataaataatttaacttaaggcggtttt

SEQ ID NO: 304420 - DNA, 3150 bp, Cannabis indica
atagctaaaaaatgaataaaaaaaaaaaagataaaagacgctgaaaacctatttttctcaggaatagaaggggcaagtcgcgacatggaatttccatgcctagacatgacccctctttatttgggcagtgagttttctaatgcgttgactgatagtattttgaccataactctctcaatattgctagaaattggacgattcaagatgttttggaaagataaataagaaatctagaaatttttatgttttgactttttccaaaatctaatcagaacgtagtctaattcaggtttgaagtttttgcgttattcttgcacaattttctctattttttagatcatctttttgtgagatttgaccaatttatctatcccaagtgtcaaaactaaaaattcctaggtatggaaggaggaactaaaagaacatcccaagtttatcagtgatgctaaagcaaatttggttcagaaggctcaatttatttttgatttggagaaggctaaatttaatttggtctaaaaaggtcaatgaagatgacaagcatgatttcatgcattgtaatgtcactgtagaaaaacaaatgagaaaaagaattgtacaaattgtataatcgatttagttaggcccttttgatagggtgttaatagcttgtaaagatttggttggagcaatacaattttttgatttatcaaaaaaaatttaagggtattcatcaaattgtccacactacacaaactcctcagattgcaccacatcatacaaaaaatgtgatttaaaatcttttgtggtgcaattttagtttaatttttttttaaactgtgcggtatgatttgtggttttgaatttaatagtttcaattaaaatcgcatcgcattatatattataaaattactaagttttacaatatatttttttgttttgttttttaaatatatataatctaatatatattatataattttttagaaacaattcaatataataacttaaaggtattgttcctgatttctcttgttggagaactatagtctagcaatagaaagaatatttactggcgaattccgacatatatagggccaagcccttctaaattaatctatttcaatctttcacccttttactttagccatgaccaataccagcttcttctataggatcgaagagtgtcgttaacaagaactgcaaatatgatcactctgccatcatcaactgcatttgaaatttaatatatatgtaatgaggtttaaatttttctatatttttctttttataatgtgaaaattttataacattgattgttgatttttttttataatatttgattatgaaaatagtgtaaaatgcattgcaccaaactgcatttttgcaagtttttaaatattgtggtacattgtaatttaaaaattacaaaaactatatatttcgtttgaaaaatttaaaaatgtagtatttcaaaagagcgacatgttgcgttgcagttaggtagcgatactctttaaaaactattatattaaattatatgggaccaatacttagttggaccaataataatattgacacgtaagaaagtattagtcaccttttaacatttctcattttaaaaagtatgcgtagtgttacaaattgccaaaaccctaaaatatatatatgatattgttagtactcccgctattcctcacgtatgccacaattacactcaaggaattaatactcataaattatgtattccccacgtaattacttaccgtataacttttccatgcagtctgatcatattcatatccatagaatatctcataataacataaacatcaaatacggccttctttcttataattatcaatttcaactctcttaataaccgccaatggagtctgtagcctccaactcctcaccatcatccccaccacaaccaactactaaccaccactatcgccgccgccgaagccacaaccacaactaccaacccttctcggaccgtgtagtccgtgccttacaccacgacctccgcctcctccaccgatccgatgactactccaccttcttcgtcctcggagccaccgcaaatgtctacgccgtcaccttatccgccactccttactgcacctgccccgaccgcgccactccttgtaagcacatcctcttcgtcctcatccgcggcctcggcctctccctccacgacccatgtcttcgtcgtagaaccctccgtccttgtcacctcacccgcctcctctctgccccgatcttgccagaatgtctcgccggaatatccctccgccggagattccaccagctgttctacgaccgccgtggaagtagtagtagtaatgtaaataataataataatgctccggtgacagaattcgatgaagggacgtcgtgtccagtttgcttggaggagatggggagagaggagagggtggtggcttgcgagaggtgccggaatccgattcacgaggagtgtttgctgacgtggaagcggagcactgggaggaggtgggctagctgtgtgatatgtcgggcgaggtggcgggacagggctgccgccgccattaatgcagacaagtacttgaatttggcggcttatgttaacgacgagaacgacgacgtttccgcccatattggatgtgatgatacctgttctggccgttaacgagacgacgaatttgattttatattatgcttttctattttaattaattgattgattattagatttcttagtttaattatttgtaaaaacattatcccaagctgtgcaaattatttatattgtaaaaattaagataagttatcaaaaatataaaaagaaagaaaaattaatcatgaatgatcgaaacaattttggtttttattgggtttcacttcattaattatttgttactgttatttatgggctcagcgaatacgaaaagtgtgttattaattttttttagagaaaagtattttttttggtaaatgaaagaataaaaaagatagtaattatgaaatccttatgttttaatctttatccacttaattaactttctaaatattttttttttggtcaatactatctaagttcattttttttaaattttaaacttttattagtaaattagtaaacaattcacgctttgcgacggatatttaaaaaaaaaaattaaattatac

SEQ ID NO: 304421 - DNA, 2656 bp, Cannabis indica
aggattaaaggagaagaagtcgaggtttcgggtcggggtctgatccactgccttgtgtatctccgggggtatttgtaggccgatcccttgccaggattgtcgttggtggatcttcatgaggatcaacccccaccgttggattggtaggtgacattttccatgttgttctttctgatgtcagattgtactgactatactaacggtgctttggacgcgtgtcactccagggccctcctcatttgaattacccctgatcctggccatttgttcgttttacacgatacacaagtacatgcatcctcaatgtggcatgtgagacaacctctgacatcatacaaaggaaaggagcgagcggtgggcccttggcctggcgtgtgttgactaagccttcgcagatcaaaggtgcaccctggaccgatatatcttgatgggaggtccacaatcttcgcgggaacaaaaaggatcatgtttccaccggggagagagatgtggacgtctcgctcatgcttcgcatccgtgagggctagtccccaaagttagagtcttaatcctctctgataacggagtgagacccttaggtagcttaatgacttctcgttatttccttaatcattcccccgcagattaggcaggtgaaaatgcaaatagcatctacccccaagcttctgggacatgccatggtccgagagcttgcagcatcctcccctaagattcttccgcgcacgtggcatttatgacgagccctttaatgcgtgacgtcgctaaacatcaaattttagcgccattatttaggacacataatttctcccactttttgtcagtgttaaatgctaatttatggatttttgcgcacatgtcaggcgcgtgttcatgggaagcgcaaaatggtggctattggacttaggcaatcttctcatttgctcagtgttcttcacgatgcatgcaatgatgggagctattcgttgggaagcaaagcgctctttcagcttctcacacccaatcattgggtgtttcttggtgcaaactgaagcgtctgcttcatgtgtgaggcaccctttccctattgtcccataaatactcgcagcggctacttcatttttcactcttcttacccgctaagccatagccctttcaattttcttcttcccagtcaccttggaatgctgctgtcatcgggcattattctttttctaccaaggacagcacaccaaaacccttctgccttgttaactggtaagttctttgtttacttaatagtttctaagggaattataacggcgtgtttgcctctagggcaccgacttctggtggcatcgttcttgtgaatttcagggtgaaatagtgacccttctcattttattgtgtcgatttatggacaagttcaccatgtcttcttctttagagcaggctggcccctccaacgtcgcgggaggtagtttttctgccaaaaaaggcagaagtgcgtggtgaccgatttcggcattgggggatcgagggatcaccccggacttccttacgcccaacggaggttgggccaacctagagctcttccccttgcttcatcttgggcgctaaccgtggggttcgccctcccaggagggctgttccctttgacactctagaaacgcagacggagaaggaagcgaacaatgccttgaaagggcatctcgaggcagaaaaactccaggtttggcgacgggcgactgtgatgtctactgtccgtaaggcagagattgctaatgacatacacactgcattgagaggataacactcatattttccttctgagtcagttgagtgaattcttttcttttcgcgcttccaactgcctcgttgtaatattttgcattgaacaattcctgaaacttttcccaggtatcatgagtcagggacaccatgtcccaccacactagagtgtcttcttggaactagaatgtggtacaagccactctatcattgccgggtgacccccataaagtttagaattctagtgataactgttagccactgctcggctttcataacatcgggacctcccaggaagactggaggtgtctgcttgcggaacctttcatacagtggctccattcagttcactacagcgactggtcctgcctgcacagcaggggcaggagctacttgcatttctggagcagggattgcaggagcaccctactgtctcaggcgtcggatctcttcatcttgctcattaattttggcttgcatttctgcaaacccattttcccattcttgggcagcttgggcagcctgtggcgggttaacatcaccccgaccgcgtgccctgcctctagggcctctaccttggccacgaatatttggggggaatctgaactccctgaccaccactagatccaaccaagttaccttggctcctggtgtttcgcttggcatccatactattagaacagcttgcgtaaccaagagctagtatggtcagatcgtgatcaagtatacttattaattgccgcttattttaagaatttaaaacatgcgcctattcagctatcaggctactaacatgcttctaacaagcttttctaaaatcatattattaaaataaactactaaagcaatacaaccttatgaaccgtggaacgagctgatcgctgatgatgatgtacatgcgtgacgatct

SEQ ID NO: 304422 - DNA, 2916 bp, Cannabis indica
aaaatctttaaacgtaaaaatgttaatttttttacaaaaaatgtaccttatgtaattattcatttgttaaatggcaaaatgaacactgtatttttcaaaatagtacactctgaatttaatttttgtacaaaataaaatttaataataatctgaattaaaggtgttatgacaaaactataattaattaatctatatctgttcgtgttaggaattgtttttaagttggttatattaaaaaaaattatcaaaaatttaactcaatgtcctatttatttcatttttagaaatatagaatctgttttgtcatttaataaaacaacgagtctaattagtaacttttgcaaaacataaaatctaaaataatatttatcccaattagttacatcattataatagtaactgtacacttaactaaccaatgacggagacaaggggcgccaaggtggcctattattgtatagcatatgttattttatctaccaaaatagaccaaacttattcactttatttctaagctcatgaattttctaattctcatctcactaatactattacattaactcacttgcccaaacaaataatctcttcaagacttttccttttcccccaattctagttagagtcaagacttgttgaaaacaagaaaagtaattatgtatccttaggcttctaactcttcttgtgtcaatgaggacagaatgtgcattttgaatcataaaatttatcaagacaaagcttagaaataagattgaaaataaatttctaaatgaatgcttaactgtttgtattaagaaagatattgctacaaaatttagtacatattccattatagatgagttttcttctacgaaggaacgtgagactaaatttacttaaggtgtatttaaatgcaactgtgtaattaataggataataaatacatgagagtagttacactatattttaaaataaaatgagtgtttggatataaaataataattgtatatggattcttaattattttcatattggcaaataaattagcaattacacaatttaataatattaattatctaaaaaatagtgatattgtgtaattacataatgtaatcacactcaattatcacgtagggccatgagaattagagagtgtgattatatccaattacatgattattgtgtaattacctagatgaacaaacaccctaaatctcataaatactttgaattacactcaattctaattgcattgtgtctttccaaacgcattgttcaaaaaataaatttatttttttaagttacgaatttgtataattattaatcacactttttgttaacaaaattattattattattatgtttatattatatttatttaatgtaattattacaaattatatatagtacaattttaattttataaaaataaaattgccctcctagtatctgcaaatcttgacttcgtcactgtaactaactatatgagttgtaagtatttgcattagtaaccaactatttattgacataactaacaatctatctcttaacacccatcccagtcttagagtagaagaatattttactccagatcacatgaaagcatatgcttaactcccagcttgctctttgttaagaactttctctttaataaataaagatcaatctctacatgtttagttctagtatggaagagtggattgtcaaactatgtagactgtgctttagttatcacattaggttgtgggagtaaaagggagagacacttagattttaaatagaagagactgaattcaagtgatttcagcagctaaataagccataatctatacttataaatttgcttttgtacttgatctagaaatagtatgtattttttttttgagtgctaatagactaaattaagaccaagatacacacaaatcatgatattgatcgtcgggaaaaactatttttgtaatagtgctattaaaaaagacatcatatatcttaagttgatgaataatctagttctttgatacagcaaccagtgaagatcgaatagtagttggcttgaccacataattgaaggtttatttaaagtaaaactcatactttttgaagaaagcttttggcaaccaatctaatcttatattttttcactgtaccatctggattctttttgagtttgaacaccaacttacaccatataactttccttttagatggaagaaggactaaggactaggtgttattctgctgttgagcttggaattcaattttcatagcatcaaacctgtcacgtcgaacccaactcctctcgcaaacgtcactgccaaattgtgacagtcaaagtcttgtgctccgtaaggagaaagattgggtaaattgtgcatgttgagttttatgtcctaaataaaatctaaatttaatttaataatattttatttcaataaagttattaggaatcatattttaactttatcaatcatttggttcacatgtttatttacatgattatatgtttaatatatatataaattctatgtgataatcgatgatgtggcctgcttaaactattgtaagtggtatgtgtttttcaggacaattgtaaaaaaaagaattatatcgaatgaataggtttattacattggactaatcgatattgaagatagaatatatataataaacttactgtgatatctattctaagtcaatatcacttagggctcgtttggtacaccgtattgtaatgtattgtattgtattgtattgtgttggattgtgttgtattgtattgtattgtattattattatttaatacaatacagtgtttggtattgacttgtattaatagattgtgtaaagttataacatatttttaatacactcgatcccaacaccaactacgggtctgggtccgggtccgagtccaggtccggtctgggtccgggtccaggt

SEQ ID NO: 304423 - DNA, 972 bp, Cannabis indica
aaaaaaaagatattgtaaataataattatgaaaatgttatttttttaacctgtagctcttaagaagaatgagaccattgaaacttcataattactccaatatggatttatttccttcttgcatttttacagatgagaaattacacaaagttcagtgatttttcattctttagtttccctagcattacttttcatcttaaactctggctatctcctttttaaattacaacaattaacataaaataaagcattccacaacacatcgatctttatactcgtcctgaagactcatcaattccaccaccaattactgcatcgtcaggtatgtacttaccccagaaccagtgagctttccaaactctgttaatctcttctattggtacatttttcgtttcaggtaggaagagagccacaaaggtggtcattatcataacaaatgcagcaaagaagaagaagagtccaaatttcatgtggcaaagcatggcaaggaagccctgagcaatgacgaaagtgaagaacatgttgactgaaacattgatggcttgccctgctgatcgaatctccagtgggcagatttcacttggaaccaaccaacccaatggaccccacgaccatgcgaatgctgctacatatgcacagatcaaaaacaatacaacgttggcttcagtgcccgatattgtccctaccccattgacaccaaatttcagtcccagcatcactcccacagcaatctatacaaccagcacaaacattacatgtaagttagtagttgaaacttgtatgcactaaatttgtagctaccaacttttacaatctcgtttgtcactaacagaatgtgaatgatataatgtctagttttaaaagtggatttactcactaccctgaagatttcatatgagtctctaaatagagattgataaattattttctgattatccatttggcagatttgttatgtaatacttaaattctg

SEQ ID NO: 304424 - DNA, 4286 bp, Cannabis indica
taaaaaatcatttttttttgttttgcccaaaatttataaatatatatatatattgtatatatagatttgatggtggaataattggttaatggagtcagctcaaatggccttcttcccatcccattaagcaaattccatatatcattttgtttgttatatgcacattccaccaattaaggccctcctttcattcaatcatatatatatatatatataaccatatatatagccttttggagaagacagtttcatatacattatatatagaaatattttctcattcctttttaatgtaagggtttgacattggtatatgattgacctaattaaaggtacaatagtcactagctatatggctagatttttaaccaaaattattatgtgtgaaaatgtggccactcacctaataaacatcttctcatggaatattgaaagtgcaatctaggtatagtggtatatgtatagttgaagaaaagaaagagtcattattataaagattgacaaaaacatgttagattttttaacccaagattgatattatacatataatgctaccttgcctttgaccaaatatatgtatagtgtgcatgcatgtcttctcttcaaaatcatgccatttgtttagaattaatttttttatatacattaattgtcaaaaataaaataataataataataatacgatagtgcattaattctcacttcttattggtatcctagctatttatcataaaactattaaaattattatatttgtaatatttaagtatttaaattattattttttaggaaagtataataatttatatttttatgtacttttaataaccctttctcttaactgaatttctatattgttgtagaagtggctcaagattagctatcattggaaatggggttatagagatcacttgctctactaaaattgcttaaaccgattacctaacttggtgcaactcttctccttaacgaagaataatagctcacatctcattaaacatctactgccaattagtaaaaagattagcattaatcaaccccgctttatttttaggattttgcgaaggctttggcagtgttggagggactgtttagataacaccgtcctcatcaaactcgccttgtgatctaaatagttaattagggtttattctttttcaaacaaccctttaaccaataatccagcgagttaggcgccactccaactctcacacacttcttaccacaatctttaattattcacataaaaaatttctatccacataattaattagtacttacaatgtataatcatgcttttatttatcatcattattttctagacgctcatatgctgcgtattattgaaagaaataaatatttaatcacatatgcagataagtatttactatcaacacttactacaccatgagtcgagtttgtctttgacgataattgtacatgttcatccgttcttcaggaaatttaaaaaccttagcactctgataccaaattgtaacatgctactcaatggaatgccacatatcatgattacaataaattaatcccgttaattggggtcaataagccaaataatttaaaattaataattaaacgcttaatttaaattaataacgtgcaatagtacatatttcaaaccaaagtatttgagttacatatctaggatcctgttaaatttattttcaaaaaaaatactacaagtcatttcatacaggctcacctaagcggcaaaattagaatttctacataaatctctattggatccaagcctcgtggtctagcttggatggaacatgaaaagtttatcttcaaaaccctcgaatccatggttgaatcaacactgctttgttattgcatgcacattagagcacagccaaggcccaacacaacagaataataatacaatatgaataattataacaattacatttcttacattaagcctctgcgtatacaactgtgataccgcactgtttatcacattatttcatatataatgatgccactgcatctaatgtctatatagcatagatccgcgtgttacactcacccattttttttacacataaggccttaatagagtttatctcaattttatttactgagtctaacctagttatgtcttgatcacacaactcttattatatatgcataatttatatattatgctctcacaagggtttgtcctaaagatatttatcaaacctaatgcaattgtgtcttatatacataattcttgacatatatccacagagaatcctcaataatccataacaaaaagaaaagatccataacacacactcgaagtcactctcatcttattttgacttctcctcatgtgctgtagtatacagtttaaaattagctttgctgcaccaattaaataaatgaagagaattaaatatagtattttcaaaaccaaaaacaattaacgccagaacacaaggacaaatcacttactaatttttgacccaaacttcctttgcattatttttttgttaattcatgctcatatataacttttagggtattaaccctaactatccatataatataacttttatcatttattcacaagtcatgtcttaaccgcataacctttagcatttagggtaatgactcaattccacaatatatattcctaggataataacccttgatcacattaagcatatttagggtaataaccctagttcacaatttatatacttaggataataaacataattcatgaattctcaatagcaatcaaataacatataattgcgccactgcgctatacgctatgtactttgttcactgtcttacctgatttctaatgtatgaggagaaaccccaatccacaggtagttctgaccaagtatcggtattcttagtcacaagtcgtaagtttcacacaatagagttaatcctaaatcacatttcataattttacagggcttagaagatttgaaacatgagcagagccttgctgaaaaaattagcttggtatgtctgtacatggtaggatgtccattgggttgagaatttgattgtaaaatactgttgtagagatgaattctagattgtcaatcaaaagttaattgattctatcatttggcatggtattttaaatgtgtaagatatcatttggaggggcataagttctcattggcgaattaagatatatatttggtccaaaccttgtgtatcatggacaagactgacttatatacaacaagctttcattgatacctaaagctaggttgtaaacatgatcactactactttccataatccaatggctaaacatgtactcaacactcgcatcttgtccgtttcagaaagagacaaattttttagcaggccaataagagcgggagtttctctatcaaaagtgcttgttaagttgaccaacaataccaattttaggtaaaatcgaaggctttcaaaaatatttggcgcttaaggatatagcctatacacatacttctttggaaaatttgttctagctgactcccttccaaagatggattttttttcatactaaatatagacaaagagtgctgcttatgtcatcaggcggaggaatctatagagcggttatttttcaagtgtactttcgtgaagtttttatggttttcaagtagttggagtattcaaatcgaacttgaatttacacttgtaacaccctattagtttaggcgtgctatcatgattttttactaattgggcgatccgttgctaatcaacgagtttattgaaaaacatgattaattaaaacttttctcaattacccttaatattaaaagtaaataacttatatataaccgggatctcgtatttaaaatatttacaattgagttacaaaatatttgatacaaaagttgtcatctagcgattatataaaatacaacatgatgtcccaaagatagtacgctccatgtttaaccgccccaacatgtaaatttttcatctactcgcactcactgctgttcaaccatagctttgcccttacctacacatggaaatagtaagtaattcgacaaactcagtaagaaacgtataatcataatcatacacataaacataaatataactcgagttataattaggcacctataaacccaatcatgaccctatcaccacatcctatgcagtaccaagtctagaacgttcatacgacaatattattgaccataatatcagctgttatatccaaaactcggctaccatttcaacggaaaacacgtgtcagattggaaagagtagggatcaatgcatgaaacggtaattatatttgaaaa

SEQ ID NO: 304425 - DNA, 2745 bp, Cannabis indica
aattaaaataaaaaactaaattattaaataaaactaacactatgtggcttggcacgtaacaatcacctagtatatatatatatatgagaaaattcttttgtcccttagtttgcatagcttagtcacataatcacacattcatacctaatcttcgtttggtgtggtggctgagtttggagcactacacacattcatatcatctcatctttatcctattcctccttaattgactaacttattaggctgtgtttggctcatatatagaaacaatcataaaattatagatcactattgtactttcggcttatactatatatgtattactatactttcatttccaatgttattttttttttaatatatttgttttcattcttttgtatcttttgataatactagcaatcaaatttataattgcaccatatatttaaagatacatggaatggaataaaaatctatacatttctagttaagttacacgtcttttcctttctaatcactcaaaattaatttcactaattcactatctcatatatgtcttttttttttggtaagatctcatataagtttattcaatattcacacatgagatgtaaatattatactataatatttccacaaaattcaaattgtgatatatttacacagtttttagcactatatgtagtatgtaccaatgtaaaattataaaagttgatgcaacacttaatttttattaatattttattaaaagtaaactaataatttctctttatatttattgctgatagcaaaagataatgataaattaagtaaaaaaaattatcatttaatgatgatagctaattaaagataacataaaagtaaatgaaaaattatagtatttagaatgaaacaaaatatgtatgatgttatattgtttgatacaatttttaggggtacctatatatatatatatattttatatatattttagagtgtcattaatatagtgtattgtcatttttgacacttttgctacaatggttttctaataataattaaaatgtgtattaaatttaacacaaaatataacttcaactatttttttttacataatatatattttacaaaatttgccactaaatactgcattttacaatttttaacttttatttatttatttaataatttatatatatatttttaataaaaattagtacctttaatcaccttcaattggcacaaaatacattggaagatatgtgcaattagaaaagaataaattacactcacatgttagccccagtttaaatggaatgtgatttgtattaaaaggttatatcatgttattgtgtttaatgcttaggtatatttttctgttaaaaattttacatagcaatttaagtacaacaaaataactatataaaaaattttgccgctaatttttttacataaagaacataattaaatattgttaacacagtttcttatcaacagatttaggaagattgtataaagtaaaaagattacggtatgaactgatttggctaaataaaattgtaataaataaacaaagacactaagaatttttagtagtccatcacccatgtcgcgatggtaatgaggttatgtctactttattgttattattcgattccagcatgccagaattatgttttcaatagtgtgtggataatagtacaaaaagagatttctagacaaaatctatattgaaacttatgaataaaaggctcatgggagaccaatactataaacttgataataataatggtaataatgttcttgagaataatacaccaatgagagcaagaattgagaatgatctcttattcttgctaactatgtatgtcaatgatgatgggtgtcgtactaagatgaataactcaaggaaaagatgaagagagaaggtaccaagggatgatgtgttctaagtagtcgtcgtccccctcaaaccctagtttatcattgtctttatataggcttagggtttgttagtgatccccaacaagtcggggtatctcactttaaatcccatatttttctctaaaataatgaataaaaagatgaataaagatctgtaaaatatctcttatattcttaggcaaatatcctacagtcattgggattgtcatcaaaatcggttatttctttgtcttgaatttgcttatgtgacattgtgctttgggaatggcaagattagagagagatgaccatgggatggcatactaggataaggtatgtagagagtcacaagtgttgtgtcacaactctccaaacatcccattgtggctcacacttagtaaaacaaattaaatcttaaagtaaagtgtaacttacaatctggttttaagcccaataacttcagaattgtgctatgaccatgagacacacttaaatttgtcttgaaaatatctttctgttgatggtaagaactcatcaatgaaataacaaaagacttaaaaatgatataaaagatcttgatagaaaaatacttgaaataaaaatctcactacctttgatctctagaaatattattgtattatttacctaataaagagtccccattacaatgagtttaatgaccctatttatagtgagcccttgacactttacaacttcaccagatctcaaaaccatagaatgttaagtcattttcaccacctatctcaggtggcgtgatgtgtctgacatcctaagttacactaaaattgcctcttttattcgtacttcggatgaaatgaactttatctccattatccatac

SEQ ID NO: 304426 - DNA, 2501 bp, Cannabis indica
gctgcaacttaaattgcaacaaaaaatcgtataaaaacccacataaaaatcaccggagaaccactttaagaacccaagctgtaaatttgaagaaaaaaaataattccccttttttctatacgtaccaaaaagtgtgaggtcaccatcttctaggactggaacctgaccgaagggctatacatttaaagcaagaagagaaaatgtgagtgaattaatactacataacaataaatatagtgaaggaaaatgatgaacattgattaataaatggtggtaattattaattaagaaaattatacgttcttagcaaggaagggaggttgcttatttccttgggcgaaaaggtcaactgggataagctcgaaatctagagctttttcatggagacatatcattactcgagtggtgcatgatgacatggggagaccatgcagcttcagcgccattttctctttcaaagatgaaaatactagctatatatagagagaaagagagagctgtatatatgttgatattacacatataacagaaggaccttatatataagatttgtttatagtaattaggacttaggttgtgggaacttattctcaagcatttgtctaataataatttttttttatcaataacaacttgaattaatttaaagtaattaaaagctcagtatccaataaataaataagtccgtgaattgaatggtcatacttacatatgattcttctttgttcaaatttatcttcttttttttcttctctttcatctcccaggccacgtgaattcagaaattacagctaaatttatctacttgtttttacttaatttttcacaccattgatttaagtctagtctttatgctaaaaattgctaaaatggcacaattaatagcatcttttaatgtttctcaactctcaagcccctgaaataataataataacaaagattaattgatggcatagatgagcgtaattacctaccacatgggcaatgaagcccaaattgtttagtaaagtacaaataacctgatatgatccagtcaaaccacaattttccagtgcactgatttcaaagtgtttgagaatcaccttgagatttggtctatggttaatttaccatggacacagaattttatgtaagaaaagactgtcaatcttactagagtaaatttgtaattagaatctacattaattttcaacaaaaccaaaaagactattaatatttacaaccactctaatatttgacggtcaacgacattttctaataagttgtaattacagtctaacaaatagtgtgattagagaaatgctaaagggtaccattggtgcctagcaccctcctacgtgtcaatatcgctattggtgcaattaagtatcgggtcacatatagtttaatataataatttttatagagtatcgctagccaattgcaagtcgacacatttagaaggtgctaggcaccactggtgcccaatagcattgctcgtgtgattaattgggtttcgagtcctttttttagaaaaaaattaaaggcatttaatatgaatcaattagaaagtacttttgttttatttattttttattatttcactgattttcttaatttttaataattaaaacgaagcaattaccaagaggactcagccttactattttctgattagcatagggttgtgtacatacagatcatcatctgccgagtattctgaccatataaattgccaatttgtgcatccaacgatgaagacaaaagtagcttgtgttttataagtatttcgttatgtatataatgatgatagaagttgtaagtccaatatatccgatcctattcaggatttcgagaagaaaaataatcacttatttagatatgaagaatatgtaaatatgagtatgagcacaaaatgtagatatttcagtattcacacttaacaagtataaaaataaatggagaagaaaaatagtatgattattgctttcgtagtgttattacagagtgaaatcgataacaaattactatattctatttgtatacaagtaaataaaaacttgggaataatatggttccagaaattttttctactatgtaccaaatttattatctatgttctgtaaaacaaatacacaaaactgccacaaatgtaatggctccaaaaaaatttcttaaaaaaaaataagaataaaaaatcatagaaaccctgtatatatatatgtataactaatagggaaataatgttagtcaatactactacgaaaggttatcttctgggtatagaaagttgtgatattccagctgagtcatctctcctcccttatctgggtcaaacatacatcggtagaagctgaataaaaaaatttaatttgcatattgttagtcaaaataatcccataatgcatgtgagtctgcgactcggtgactactgactaggtaaaaaaatgaaagagaaagaaaaaataaaattttagatggctagatgcccacctaattattaccaaaatctcctagtaaaa

SEQ ID NO: 304427 - DNA, 3378 bp, Cannabis indica
acctggagtgttcggtctcgggacatctgggagttgtattttgaaagtcgttgtacgacctagaacttgtgtattttgaaatgtatagtttgaaaagtaaattttacaaagtttgaaaacgggatcccggaatttgtaaatattatattatattacaaagtttaatatttaaagcaaaagttttaatttgacacgtttttcgagaaatttctttgattagcaaagattgcacaataattaaaaaagcactgtagcgtgccttaacattaaggcgttacagtctctttgtcatagtttcttgtcacacggtccctcatgatggactcttgccatgtcatctttagtgtcaatggtcatctttatcggcgcgtcattgcttcacgtaagtgggagttgcatgttgttgagcatgtggttgtatgggcgacttggtctatttttccatgactttaggaatacacatgggctccaccaaatacaataatgacacttttttcctttttttctaagaaaatataaataaccatattgtcatggtttccttcttgggtcctaaccttcattttgtttttgttgaactttttcaggaacaaaaagtgagttgcgggacccaaggctatgttgttgctgatcacctcgcgaatatagaggaatccgctaccaaccaaccttttactaggacaaggtggcccactcgacagactagggccaagcctgcgatggtgtactttgaggcgagccacatcacttcttcattcgaaagtatatcacaaatatgcgattatcttagcgctcatgggcttagctttggcagagaggggctatgtagagccccgactcccaccgagcgaaattgttttcctccccatgagagcatattcgcgtggggcccctcttttcttatggcgggggtgcgctccctctcgcctcttactattgggacgtccttggagccttgggattggctcctttccatctatcttccaacagttatcccattctggcgggacttaaatccctgtaccacatgctagagcttggagattcgacacccgcggaggtgttgtatatgtatcagtcgaaggtcagtcctgctaggagagggaaacacagcgacgactgttactatctgagttgtgtgacctctccaatgatttttgagggtctccacaagaaggcatatgacaaaaagaatgagttcttttgggtgtggggcccatctgacaggagtcaccatcacttcaatcgcatatgtgatacacattgcactttggcttcattcaatgattgttgtttactgtatttcttttgtaagtgctgacttgtatttttatctctctcttttttttagagaccatctctatttcatcatctgactggttgaaagagagggtgagtcttctgcaaggtgttgacattcgcaagcgaaatctttgcttccttctccacgacaaccacctcagggcatgtggtttattaaaagagtcgagaatgactaaagatgattcctttaaaaaagtagccaattgggaagatttacccgacctgactcgcccttctaggaaacgacgagctaagttggtgtcggcccttgatactcctgtccaagacttgtgcccttagcataatgggtgcgagactagtaacccgggaggtaaagtgtgcgacttgtaccttaggctttcaagtagagctgggtggtcccccacacttctttcttcagaccttactatttacacccatgataagtataaatattcattgcttctttatatggaagtagatgggaaagttcatagatgggaccattggttgatgagtggggagctgctttatgcgagcagtcccacctttaatgtattgtacgcgtcagggttggatcaatatggctccaaccttatgtctaaaaaagatagtactttagtgctccccatggagagagcgcacatagctttaggacaaggtctttccttcattgctttgtttgactttcccgacttgacttagatacatgcttgtggttacaccttacatttatgttattctccataatcatatcttgtagtacatttgtcttttaacaatgactgatgtgtaaattttcttttgacttttcggaatcaagttaagattagtataaagatatgcatgtatacatagttagtgtacatgttagaatatcagctagagtactgagaatatcggccaaagtaccgagtatatcagctagagtaccgagaatattgactaaattaccaagtatatcggccgaagtactgagaacatcggttagagtaccgagaaaggatcatggttaggtgaacggacacctaattattatctggttatttatttatatttatgcttcttactgagtctatcgactcacaattattacatccatgtgcaggtaggagccagaactgaatcgaaatgagtctacagctgaatgaatattgtacatatcaagatggttagacttggagtgtttaggtcttcgggatagtttaggctcatattttgatagtcgttaggggataacttttgtagtaaatgtattttgaaaccagctgcaaacttttaacgggatcctagaattatgtagttatatgtatttatttaagtttaagtttatttaagaaagttttaattattcacgtttttcaaataaatcatttgattagcaaaaaagtgcacagtagttaagaaaacatcgtgacatgcttaaattagtagggtgttacacttgctactagggaaaaggtttcctcataataaattccttcctcggtattataaccttgggccgctaatctagcatttgttatgcacaataaccccatgctcatccaccttgtttctatatacctattttgttccaatcactgattgatgtgacagtcttagaactaactcccaaacattatttcttataaattaatttattttttcttgcataattagaagcttaaattcatcaaatttggcctctttaaaattctttggttcaattttagaaataaaagcaataaaattatacaagtttctaagggagtttctagtagtgacaccttgtgaaggatctgttgggttttgtgccctaaataaaatccatttcaatataatcagatttactaattaataaagattaaaaatcgcttttatgttgcttggttcacatgatttatatcatgattatgtttaatgtataaattctattaagtccagaacatatatatatatatgttcatgattatagtgtcgtcagtacattgaaatataatcatgctgatatgttcaaaagtttaattctcatgatttgtcagttcattggatttagactggcatgataattagcgataatgtatacttacacct

SEQ ID NO: 304428 - DNA, 1781 bp, Cannabis indica
gggcctccttgttgcatatggtaatggccatagactcacggggttttatggaaatcttaaaggatgtgttataacactccctcacctccttctgctctccttttacggttgaaactcctcccatagttgggaacttcaggctaggtggtaggtggacacgacggccttcaagcggtagagcaacggtgtcccaagcagcgcattgaaagttgttgggcagtccactaaaatgaatgtggtcatcaccgtcacttgtcgaggtcgctctcccatggtgaggggaagctcaatcattcccaggggatggactaaattccaagtgaaaccacatatgggcgtcatgcaaggcttcatatccttcatacttaaacccatttattctagggcacttcggtagagaatgtcaaatgaactcctgctatctgcgagcactatgtggactttggaatttgccaactgcactgccaatacaagcgggtcattgtgaggaaaatggatccctcgtgcatcttcctcagtgaacataataaggtaactgtcctctttggagttctttagcagcctttgttctaggctcatcaccataggtggttgtcttgcttccctagcatatctgtccctccccttgtgggtgtctccttctatcccttgtcccccaaagatggttataatgtctcttaatacctttagagcctcgcgggaggttcctctcctttgatcttctttgcttctctccttggggcgcctcttttccctttgattgcccccaaggtccccccctttgtattaaatccttaatttccattttgaggtgagaactctcttctgtggtgtgcctaatatctctgtagaattcgaaaaacttattggggtctctctctgacctatcatttttcatcgggggcagtttcttgaatggaactcagtgttaatttgttaggaagatgtgttccctcggacgcggccaaagctatcctccgttgaagatcttccatctcctatctaactcttttctccttgtagttagcttctcccgtaggtccgtggtggtagtctttgctttcttttcatttcaaagtgagtccactattagtgtgtgcttctcggtcgtggtcttttgatggagcttttctctcaagtgtccttggactaccttggactcgacctttttaggtcgttataagggttctggatttttttctggtgaagctctttgcggggaggattcaggggtgttattcgttgaataccttgatactcccccatcctccagcctactcgctctcctttccctgtttctaccccctcttcgcccgacatgggtgcctcagaatggcctctcaggagctcctctaattccagttgcatgtttgtgaccatttcttctagccgcaagttacttatcttaagctcgttcatatcctcattgtgtagtcgggctcgtgagctagagctcactaagtaggctcgattttccttcccttgtcgatggtgataaaaagctttcaaccttcgcactctgttgtcttcctctggggtgatggaggcagtcgcctcatctagtgggttgtttattgggttgtcctcaggctgcccattttcctcttttactaagggtccttggccactctgaggcatctgatcacctgcacatcctttctctgtggttgatgttggtagagaaggtcgtgaaacgatcaactgacggctatcaagtcgcacttccacatcctaatggcaacgagaactgttggaataattttaccaagatctagatttac

SEQ ID NO: 304429 - DNA, 1414 bp, Cannabis indica
gttaaagtgtattttgggcttggttgggaggccctgagtgtgggcacctgctgccccacctttgagctggccctggtctcatgcctgataatgagggacacgttcaggacactgacttatcaaccccatctagggtgagaggcataccatgatggtccgtgaagagtttcaagagaatgaaacactgcgtgaacaattggaggaaaccatccgattcaacaaagagttgcaagagaggcacggagcccaacaagcctctctctaaaagtgtgacgtccattatgccccaaatacaagacgctttaactcaaaaagaaataaaaaacttctcccgggtaatcaggccacatatgacaccacaaggaatcaaggacccatttcacataatgttcttcctctgtgtgcatcccaaagaagtattgaaaactttttttggagaaaataatgtgtctccaccttggagtaaaaccctcattataggtgacatgggagtttgtgccaaaaatactccccctcctcaaaactatgcaaaacatgtattggaagaggactaaacttatgtcacacgtggtggtcataacctatcttcgcgaccacctcatgttccaagggacataggggtcgatgtcgaggaaataagggataatcgtcatcgataaaggtgacagcctagtcaaaagacaagttaccattcaaggtcacaagataccaccacatatcactttgcatcagacggttgtatttagacagatgaacaatggggtctgttcttccatcatataatcccatttatggcatcttaaaattttacgatagtggagcgtcgatgatctgcttgacacacgattctggatctttgtcttttgagcagaaatagctccactctgtttctgaaccaattttgtcaaagtggccatttatgctttcaatctcttggtatcattatccagaagctcacattcataaaatctatcgttgatgtagttccgaagatcattcccacgaggtcttgctttttctcttttggctttctcatgtttggcatcaagatgcctccggaggtcaactgtagaccaactctgctcaggttaaacttcttctatcccatcatcttgattaacgaaatcactagggaagtttctccttcccttaatagtaggccttcatacctaagcactcgccctatcgttatgctcaacttggccttgcaaagcagagtggcatccaagcccgacagtatcggtggccttctttttctacaagggctaattggttgtgctcacattgtttttaggaggtaacaggaaagtttcaggttgaggctcgcttgcttttgtcttccccttgtcctttacaagagttgaggttccaacatcagtagggtttgctcttttttccctattaataggctcct

SEQ ID NO: 304430 - DNA, 687 bp, Cannabis indica
ataatatataagatcactacatcacatggttgagtaggataatattctttatacataactatatacccaccattgttgattttcttttaactttcacgtgcatgaccctaccattaattgtacgtatatatcatgaatgaatcttttccactatatatataagagctagctctcaacatttgatgatatagccaaacacaactaaatcataataatcgtcccccctttgtgttatatagaaattataatacataatcatgaggaagaatacacattattcttgtgcattgatctttttaataagctttgttgttattttgagtactccttattgtgtttttggtcaactaaaacctaatttctacaaaaagagttgccctaatgccgagcaaattgtaaaacaagttgtcaaagaagcatttgcgaaagatcctaccattaccgctggcttacttcgtatgcatttccacgattgttttgttagagtaagatcattctcgctcactcactcgctcatgatatctatattttccttttttttttacgagattatgaacatagctcactacaaaaaattttacttttagtcacaacaaaacttgtgactaaaaataaaaaagttgtgactaaaaggtctgtggctaaaagtattagttacaaaaattacaatttgttgtgactaaatgt

SEQ ID NO: 304431 - DNA, 1729 bp, Cannabis indica
aatttcaaaccgttattttttttacggtgtggtgcggtgcggacaatttgagcagtttgggcggtttgatgaacacccctaatttttgacattggagagaggtgatttgaatttgaatttgattttctttaataaaaaaaaattgaagaaaaatgtaatataacaattatcaaattaattaaaagatgtgaaaactaatattatactttacaatgttttccaaaaagtaaagtttgaccaataaagtatttgcttaaaagaatataccacaactcttttataaaaggagattaaaaaagtagtgggtattaaattattgaaaaatattataaaagtactcatgatgtgttgagtatttttgtgagatttaatattgttattggtgtaacttaatattgagttcacttattttattttaataaatattataaaaaattactaaccaattataagacaatattttatcattgtgctacgcactataatatctcatatcaatactataaattatgaaacttctaaaacacttaagaggccttatgtatcttatatgacaagtaaactaagtatactatgagttagaatagaaagccccatgtttatgtaaaactatacattaaaattccaactttacttttatttaaaattattccataattctaaaaaaagaattattccataattttatctccgttgttttccaaggtggggccatcaagcctctccaatcatgtattatttatactttgtctccctcaacttcccttttagttcctttgatttcttttctacaattgttttttaatatatatatatatatatatgtgccacaacttttcacttaattctcactttaattagaaaattaaactttttttaatgctttattaagcataataagaatgttcttccatatctattatattaatacttatattctaatgcttttaacaaacaatcaaagcataatataaaattaactttttcccccataattaatttattattgctatttaaaatcctttttccacaccacgtggaaccacatatatataaataaataaatatatatataaatatatataataaggtaagacaagtacatcaagatatgctatatagttttttccaagttttttattatagctattgttaatttatttatactttcatattaagcataacctttatacaatgatgttttgcgacttgcgttagctattataatattcacacgattaattaaataatatttcttatatgttttaatattaatacaccaattatatatagcttactttttgtatagtgatgaaaaactaaccatggattctataaagctagcaattgtttatatttttcaaagagatatatattcgaatatatattgtaatatcataaaatattcgagcttgtttgtggctgttaatggttgataaaatattcgagcttggttatatttttttttttatatatatatatatatttttaattaagtaattaaattaaatataaaaattaaaatttttgttttattatttattattgcatcaaacttaaaaagtttaatatttttaaaattaatatttataattaaatttttaataactatcaataaataatacatattaagaagtgttttatatctttatgcctatctaacgacatttcttggtttaacattcttggtttaacagaatatacttaaaaataaaagaatattctgtta

SEQ ID NO: 304432 - DNA, 1839 bp, Cannabis indica
ttttcatcacataaaaaaaaaaaaaaaactcaagtatattctagcctggtgtatttggacccgcctacttacctttggctcctcacttgtgtgtatggtcctttaagaagaacttttggttagagattatgaagatgggtgacaaatttggtggcccatggttgataaggcgacacaaattttgtgcttaatgattttgaaagagaaggatctaaggggagagatcagttcatcccctttatttatgatttggtgaactcgtggggtcttattaatttaccaattcaaggggataagttaacttgggataatcatcattcgagagaggttgcgtaaagtcagctttagacaaggggttactcatagcaaaaagagtcttttgatttctttatctctggctctatccacaagggggttgatgctactaatttagtgctcattcccaagatccagagcccgaaaagaactcatcattataggcctatatctatttgcaatgtgtcttataaggtcatctctaaaatcattgcgaacagaattaaccctattcttccaaggctcatttttcttacctaagctgtgtttgtgcccaacaggaacatccaagacaacaatgttatcgttcaagagatcatccattctttcaacaggataacatgcaaagagagcttctttgtcattacaattgatatagtgaaagcatatgataagattagttggcaggttattgagcatgtgcttttatgttatggggcccctgagatctttcataactggatctcccaatgtattagtactactctgaacgtttgccttaacggatgtcaggtagggatgattactccttcttgtggtattcgccagggggatcctctctctccctacctgtttatttgggtagcacaaatgttgtcgagacttttagaggacgccatgcgtattggtgatattaggggtattagcctcagtcgaggcggtccaaccctttcccacatcttctttgcagatgacttaatcttggttaagagggccacttgggggaagctactgacaatgccttgagagatgtttctcctggtccgaacaacaagtcaataaactcaaaacttcgtttttctttagtaaaaatacttatgaaggaatgaaataagggatcatggaagttttggggattagagtaccggaaggcaatgttaaatatttggggctctccttattcagatccaaatagaaggatgctgacttcatctttattttggataacctcacctcaaaattgtaagggtggaaagcaaaatcactttcgaaagctgggcgtgtaactctcatcaaatatgtgggtcattctatgcctatatatgccatgccaactactaagctttcgaattgtgttgttcccaagattgatggcttggtttgagatttctggtggagctttgagaaagggaaccatgggatccatgtgaaagcttgggataagctttgccttcccaaatcccgtggcagcctcgggtttcgtaaaactatggagatgaatcaggccactctggctaagcggggttggaacttactaagcggcagccagtctttctgctgtaggattttaaaagtcaagtatcttaatgggaaagatctttttaactgtaaagcaaaagactcggactcttggttctagaaaagtgtggtgaaagcaaatgatatcttaagaaaaagtgcttgcaaagtggttactaatggaagagatactagtatttgggaagattcgtgggtaggggtgttcattggatcacatccaatgtttttaggcatatccagattcgatccaatcatatattggat

SEQ ID NO: 304433 - DNA, 4926 bp, Cannabis indica
aaactttgcttaagccaccatcttgataccctcccaggatagtaatgaccttcttcctcgggtgcccagacaaagacagcaatcacagcacctgctctaacaccagctgctaaagctggattatcttctacccttagatctctcctgaaccatactatgctacatccacctcctgacatctccttaatccaccactaaccgccctctgagcttgcaaattgaaaatctgtcttcttttttcttttcttttcttttttctctctttctctatctttctcctctctcaactatacaccatatcccactttctcttttctctctctttctctctctttgcgacacaccaggggactgtgattttatctgaacctatacctgtctgtacagttttctggtcatatgaagataaaagatgagatttttaagtcattaagggagaaaagttgaagctgattatgttcccaacgtttttttaggggtgaaattcatcccccaatgtattttaagttttgagggttaatcttctcttagctagtggcaacaagatgggccctttgagaaggagagagagaaatagatgagctagctagaagaagagtgagtgacgaggaatggttcatgtagtaagggatacaacaaatacatggcctaaataaactatagccacaacttttatttccaaagatttttcattattttattattttattttttttccttatctcaaagcgaaaaattataacactaaaaattgtaaatcccacttatctctctcactctctaggcccttccttaatcaactcagcttgatagagtggaatatttataaagatgacaaatttctttaaattcatcattatctttatcacttttgaggttaaagttaaaagtagttcattttttgttactaaaaaagtgttttataatttataatatctaaatacatttttttgtacgtatatagataactgctgtgtatattcttacataagttaacaaatttagaataaaaaaataagagaaaaataagataagtatgtgatgtgcatgtgcaccaccgtttagtaattaatttattattgttatgagtattggattaaggatgaggttgggtagaaacgaatctgattctaattctgattctcttggtatttggtattatggctagtagtagtgtcatattattgggactttggtattggttttaaacggcatgaatgaggaagaagaagttagtaagttgagttagatatctcagttgttaactttagaattgggattgcaaattaagctgaggtgaggggacaagcagcatggggaagataggaacgatgactaaatggtttttggcattttgctcaggtgggcctttctttcttacaaatttttctcaacccctcctccaattctcttccaaaatcaaatctcagattccatttttgggttcactgttcaatgtgatttatgatgtggctctctctctctctctctcttctagttctacttttgttttgaaaagataaaaaggtggtatgtaaaaatattacctgctgtgctgcctaaacaatatgaaacacctcctctctctctttctctcttcctccataccccaactcccaaggccacaataaagatttgcgtaatttagatgctgacatcagcttaaccttttttttacccccatttgtcaagatgaaagaaacaatgctttccactttccactttccactttcaccccccaagttatatttttggacctttttttacgttcatatgatgtagacatagaaaagaaattaacaaggtacgagtagtagggtgtttttattaccaaaaataggagtaacaacagatggacacacataaaggcgagcagggacaacagtccttaaaaaaatattagaatacgtacattttaattagttataacatatatttataataaaaaaatttatcttttagacataatatttactttgcataatagtcaagttagattacacatatcttagagattaatggcgcgtttactaaactgtaattggaatcagaataatcaataagagaaatatatcggtttaaaatagaaaataatcggaaacaatattttattatgatgtttactaaactgtccggaaagaaaccagaaccatattattttgtttacataactaagaaaggtaatcggaaatgttttaatttaacaaaattgtcattattagaacatgcaattattttctgtttatagatttttaaggggtatatttgtcttttttatttttaattaataaaattaaaattaaaataaattaagtaaggaaagggaaagacattccctataaaaataggaggaaaatctttccctttattttctccctaatttgtgtggatcccattagttttcctctttccaaaatttagtaaacagaatcaataccatactattcattaccattcagtatattgcattttttttttttcgtgttcgatactataatctccttatttttaatatgatagtgtatattatacatatcatatgaaatttaaaaaaaatcataattaataaattatttaaatattatttttgttaggttaaattattataatttttttaaatctgcatgatgttttaaataaggattactatcattttagacactatattttataaattttacaaatcaaattcttcttttaatgataaattagacactgtattttcttaaatggtacaaaatagtatcataaactcaatttttgatagtccaatttatcatttaacaaaatagagtgtccaattaataatttttataaaacacaaagtccaaaataatatttatcccttaaataacaatgtacactatcgtataaaaaagagaatttttcataaatatgaagaaaaaaaaattagagtttatttttatatggtataaataaataaataatgctaaaaaaatatgaaaataaaaaataaccaaagtttaaaatatagaaaaccaaacaaatgaccataaataaagttgataaaatttttaataacaaaattgccgaaaaagtcatcggagaagacgcagtcaccgaaaaagttaccaaaaaagttatcgtcgttgaaaaagtcactaaaaaagtcatcgtcaccagaaaagtcactaaaaaagtcattgaataagttaccagaattgtcatcatcatcagaaaagtcacaagaattagatatcttagatataaattaaaatagaatttattctataacataatgaataaaaataaataacagagaataactcaaactgattataattaaaatagaattggttctataacataatgcataaaaacaaataatataggataactcaaaccggttaaattaaaatacaacctgttctataacaaaatgaataaacaaataactcataaattaattataattagaaaataaaagagaaatcagttcctaaaacactaaaatataaattaaaaatagaactatttccacaacaaagtgagtaaaaaacgaataacacacaatacctcaaaaatcgattataataacaaaaaaaaaaaaaaccccgcggcataaattaaacagaaacggttctataacaaaataagtaaaataaataatacataataactgaaaaatataagagaaagaaattagttatatttatcaactagttaaaagttagagacaaagaaactagttccgtaaagcaaccaagataaaaacttacacacaaaaactagttaaataaaaaaataaacggttctttgaatcaactaaatcaaaaatcgattcctaaataactaaattaaaaaccaaatgagacataaatcaaaattaaacaagttccacaatcaaatgactaaaaataaataacacgcaatagctcagaaaccggttatagttacaaaatatatataaatgatataaatcatatcacatcataaaaactagtgcacttcttaaaaatctcttggaaacaagacttttgtcgtttaactaaatcaataaccagaatgagaaataatacaaataaaatacaatacggtctttgtaacttactagcaaacctatagtttgggtcgatcttcaaatatattggctgaaaaaaaaaacaacataaaaaatattaggaactagataaaattaatttatagaaaaaaaaacataaacaaacaagagaaaaataaaaacacagaaacatacaataaaatagaaccgattctataacaaaacgactgaaaacaaataacacaaaataacttagaaacctgttatacaaaaaaatagagaatcagttccaaaaatactaatacataaattaaaacagaactggttccacatcaaaattagtaaaagtaaataacaaacaataactaaaaaaacaagttctaattaataaataagagggattcagttctaacaacactgagacataaattaaatagaattgattctacaacaaaatgagtgaaaacatacaatacactttaactcaaaaactgattataattaaatatatatatatatatatttacattatgttggtcgaactatgcacacagaattgaaaaagacacatttattataattttgtcactctaataacactttaagaattattaatcaattacacaataagagggaaggaatattagctcgaaagagctagaatagagaatgaaagaaagagggagaaagagtcaaaatagaattgtattcagtggatcaaaatcagttacaaaatgattatgaacaactacttatagtagttgttattacaagctaaaccaacacataaacactaaggacagctaacaaccaaataactaacttcataactaaccaactaattaccaagctatcttaatgttggaatttattttaccaggattttagattccactaacaactat

SEQ ID NO: 304434 - DNA, 1203 bp, Cannabis indica
agttcgggcttgaaggtgtttcaagaagtcagattcataaagtggattacaaaggattgcggcaatactttagagggagtctaaacttgtttaagtcaattgtctttgtaattttgatactttattaattgatttcattctctgggcgtggccccgtggactaggagtgttcgggagaacactgataccacgtacaaatctcttgtgtcaagttatttatttttctgcaaatattttatattctgcctgttcagttttgctgtagcagaattactttctgctgctgcaaacgcttacagtttttatattttcgtatatacaactgacatttgcaaaaacacggtttttcagagagtatgaggttcccttaagacagatcataatccacttgataaaccgagaggggaactgaagacttgcaataagcctttcaagaacctcttaatcaactgtgtcataagctttactcaagtcaatctttaaagcacatctctaagaggtatcctttctattttagttcttaatcatgtcttgaaaaatcaaaatattgtgagcaagggacctattatgcacaaaggctccctaattttgattaattagaagggcaaaacctcagcaagcctaccataaatcatctttgaaatgtatttgtacagggtgttacaacatgttatgggtctaaaatcaacagtctgagaaggagaatcaatcttaggcaccaatgctagagtactttcatttagattattaggtatcaaacttgtttcaaagaagtccaaaactgcttctgagacttctttgccaatgtccttccacatagttttgaagaacttcgaactataactatctagaccaagacttttggtactcgaaatgctaaaaagagcattcttgacatcctttgctttgaattttctaataagtttcagctgtttatcaaggtcaaggcaaggccccaatttaatgcattggatgttaattggcttcgtggtgaaactagcacttcccataaagcttctaaaatggtcaatgaaatgcttcacaactttatcatactcctctacaagatgctcctgatcatcaatgtaagacacagttctattctattctttttttttattaatgcaagcatgaaagtaagcattaacggtgtacgttgatcagtttggttgggttatagcatatttttattaactcaatata

SEQ ID NO: 304435 - DNA, 2314 bp, Cannabis indica
atttttggacggaggtgtgcagagcaaaacagaaccagggtttaggtagtttagccgccaaaaattcagtttttgtggttaagtgttacaaactgtaaagtttaggtagtttagccgccaatatcccaaacctttaaataaatttttgtttatagagattaaagagaagaaatataaacaagacacgaattatacgtagggttccatctcaaaaccaattggcaaccccatgttcttatatatgactcaattctctaccatttattctatgtgggacaatgtccacaatattcccccttaagatgatggctactttttgctcatcaatcttgaaccatatcagagtggacatggtcactatctgtataggtgcggatcggataggatcacttgcctgcaagggatatggctctgataccatgttgagaattatgaggttctatctcaaaatcaattggcaatgagtagagtagcccatgctcttatatatggctcaattctctatcatttattctatgtgagacaatgtccacaacataagagttactgcaatataagagataaatttttgtcacaacaataaaggttcttttgatttttaatatcgtttttgcttaagaataattgaaaattgaatcattctataaagataacttctgtttatagaaatttatgtaaagtggaccgttttaccagtttccaaaatttttatttcttttcctcctaattaattaattctttattatttttagcttctctttcgtatttggacacctcctccatggactatgaacacaaaaaaatcaaaaaaaaaaaaaaaaaaagaaaatagtgaaaaaaaagtaatcagacttatgatcaacgaaaccctgatactatattagttagataatgcagaaagaaatgaataaaaacatttctcagcgatagtaacgaatgaattacacaataagatatttatacaaattgtaactaaaaagagttacaatttgttacaataaatagctaaccacacctactactaactctaacagaaaaataacaacctaactaactttttaatttcagtcttaataactatgtgtgggattaaaattgagctcatatgtattagttaatcactttattttttttttttagttaagttgttacttaagctcgttcttgagtcatgttggccatcttaaatacttgtactctcaattacaaactgtgagagttgaaaattagcgagagggagatcaggttagaaagagagaaaaactattacctatagtttatatatattggtagtgatcctcaataaataagaatcacttattctcattttctcccatcaagaattaagagagtaaactatagaaactcttagttttgttttcttaaaaagttattacacctaaaaaaatcatttctaccaaatgaattaagataatctctatcaataaattacatctatgtgtgagtttttattctcttcgaagtattatcaaggaattttttataatattaagattctttatttatacatttgtatcaggtagcatatgcgtatagatttgaattgaatgtttacatagtatacgaatattatataaagtttgaacaagtagaaaattgctcaatttagagatgagtaagtaaaaacatcaaaatttatgagtagagtttttcttttttgaacaatatgggtattattattattattattattgtcgaccaaaacaaacaaaacgtaatcattaaatataataataataataaaaattaaaaaaaaaaagaagaaagtttcaacacacaatagcaagaaaatcatgtatcataaatatgggacaccaaatctgaaagattaagtcggttgcataaatacataacaaagataaaattactatttttatatataatatatctaattccccaatcacaaagcaatttccaatacaccacacacctatcaatttaatctatcaaaatcaaagccccacaactgttgatgaacacattacatttacactacaagctgcttttaaatataactatttatttttgtttttgagtggaataaatataactatattgagtgagaaatgttggtgtcaactatcaatgaatatcaaatctcatatatatttcaatctttataattttcaattaaaatatataagcataatttccaacgaagaaaaaatatgtaagtctccctgttaaattaattatcaattgttataaaataatataatataatataaagtagatgagaagaaagaagaaaaagatgaagagagaaagagaaagtgaatgagaatttctgagt

SEQ ID NO: 304436 - DNA, 851 bp, Cannabis indica
aaactaccagagcaaccactagagcaatttaatgtaaatttgaaaaaaaaaagttaaaaaattgtatatgaaataattttcctgtaatataatatacaaaaattgtaaaaattagacaatacggcgtgaagacttaattttcttgatggtatgcttttttttgggaagaaactgatgttcattaagaaaagagaaaattggggatcacagcgatgaggagtgttccatttgtaatcgaagggaggaatctgctctattatagtgagaacaaaaacatgctctactataaactccgccctactatataaacacttcgtttcatcgcataaacgatacaaattttgttggtctttatacttgataaaaaggaaaaagcagaagagaaaaaacaaacaatgtaaacatattctcttgtttttttaacaatgaaatttaaggtgttattgatgtgtgatctaagaaattatgtttctaaaaaagtgattttgaaacaaaaaatttgaattttaaatgtacttgtcaaaaaaattaataaatccaaattacaaagtaagtttataatataaaacactataatatatataactaggtaactaagctgcgcttcgcgcggtattgtttaacttttataatctttattaacatatgtattatacttatattgagcagggtcatctcaaacattgtggaagctctgtttttatatataattccaaaaaaatccaaaaaaaattattttaaagtgtaaaaatgaaaaaacccctaaaaaggagaattaccccatatattatttttttaacttttttttcaaatttacggtttggatttctaaagtggttgcaacgctagtt

SEQ ID NO: 304437 - DNA, 819 bp, Cannabis indica
gtgtggtttatgcattgtcatttagatatacacacgagctgggggctaagaatggcatggattgtgttggacggacccaaccctaatcaaaagttaccaccgccaccttctgatcttccaaaatgttgactttaactttgaccaaataatggtccggaccattttcatcttgagttttcttttttcgtttttatttatttattatttgtgtacacatgatgattggttggttgagaaaataattcaaaattatcatcaaatattctatatgctttgtaaattcacgcatcatattcattcaatttgatcttgttcggtcattctaaataaaaaataaattcaagtagtcagtgtggtacaaaatgaagtaaatgaatgttacacattaaattataggctaagggataccttaaggtataaaatattacagacatactgctattgagataatttaatatggagtgttatacaatttaataaataatatataaaaaagcactaaccaatcacaatataccatatcatgttatttgacactttaaaatatataatcactgactaataaaatctgataaccaatgtcgtgtaatttttttaagggatattggtggctaaactacctgaactttatggtttgtaacagttaaccacaaaaattgaaattttggcggcaaaactacctaaactcccattccgttttgctctgtacacttccgtccaaaaatcacagttaagtaccacggtggactgtgcacgtgtacacttttgtacacgtggcaaatttttagtggtccgcgtaatattagttttaaaaaataa

SEQ ID NO: 304438 - DNA, 2491 bp, Cannabis indica
aacaagaaaaaaaattaaatgatttttttattgaattttttttaatgcattttagattatattccattctattcctattcttattcccattcccattcttattcctatatttttattcttctcaaccaaacgcctcctaagtgttaatggcatacctagtccaatgtatccctacctatatacatgtttatttatactatttcagaatctctcttttcttttaatactatatagtttggactctattttaaataattgtaaataaaactctatgtgaattgagatataaaaaaaaatagtacctttagctaatagtttagactcttccttctcttccttctctttttcttacgtactttttccactcacaaaatagtatcatttttttttggcaatttacaaaagtgtgttaattgtagataaacttatttgtaattatttgaaactgagtatccaaaactgatttttttttttataataaaaataaataaataataactgaaggatccttgtataatgtatcatataaatatcatttgtattgtaggataaaaaatgtagatatataagcttaccttttattacctaacattgatgtaaagtcatgtccttatatttccaagttggatgatgatgaaattccttaactatctataaggatcaataccacaacacaattttctcccccacaaaacccgaattctatcttttgaaaaagctttctgaagaatctcattccgctttcaaatcagataaatgcattgtcctcttccggcctggtttaataatagacctactcaaagtaataaaacattccctttacagtggctagtgtgtggtttttttttttttttttaacagttggctttataagttatgattaagtgatgatatatatgtgcatctaaaagcactaaaacattacgccactgacatagtgttttttctttttttttacagcaatggtctcaatgtagataaatgtgattagttaaaaaatctgtcacttcactatgtgtaattttttgtgtgcatattttgggtgcctacatctttacactcaaattttattatgccttaaggatgacacaagaaatgtcctcagattctattatatatgtatagggttctgtgcagcagaatattatttagccacttgaaatcaacacattcatatacatgtattcttaacgaccgttgctcctctttcattctttgtcaatgtaaaacatggctaatataatgtgaaattatttattgatacattttgataaaatagacaaaaataattataaaattatttttttaactcaataaaaaagactaatgtgaccctaattttttctcttccatggcgaagtagaaaaaagtagtttgaaagccaatcacgagatctactggccaaaattcatcggaaaggaagtgcgataagactgcttcaagtgttggagggattgagaattcttctggtctaaatttggtggcagatgttattcgatctagagagattgtggagaaggagaggcaggagtcgccaagaactggagcgatccaaagttggcctaaggaatctaaacaggtgatcttgttatgataaagaatgataacaagctattgcccataatcaatggaagaaatttaccgagggtaagtctttctaccgtgattctaaattttctttcaaagaacatattgttagagaggtgaaaatacaaacatcaaactggagctctgctgtaatctatatggttcttggttccaaccctctgactacggtatttgagggttttatcaaacgaatttggagacatcttagtattgctcaaatagttagaatggttatggatctaattgtaatatctcgaaaacctaattatgaataattagagtttatgattatattatgggttaattaggtaacaatgagtaggactgtgatcttgctaacctaatttagcataaaaaataaattttgctataaatggataaataagcgtaatttatcaattatagagatttttggaatatgtggatataatgtaagttatttgtgaaataaaaatatttttcaggttcagcaaccttagagaccggattggaggccaaaaatatcacaatagttttagttagtaatattgataggattattgagataagttgattttaaaaatatcaggatattttaaagaacttggagttgactaaataccttccggttaaagatttcttagtgattaaaacatagtgaaataattattattaataaagtttttatttatatattaatattattattaatatataataatattattgtcacttttggtgatggaaacaagggccaaattattgggaaaggagacttggtgatgagtagagttccacctcttactcaagtactgtatgtgaaagggctcaaggcaaacctgataagcatcagtcaactttgtgatgcaaattacactgtaagtttttctaaaactcattgttt

SEQ ID NO: 304439 - DNA, 979 bp, Cannabis indica
ttttactgtttcagtgattgtttatgtactaaatcatacttcccagactttgatatctaccaaatcatgcccctcaaatttttatatatactaaatcatgccccctaaactttcatctatgttagaatttttttactaaaattagaaaaaagtcactaaatctaactatcttaatagtacagggaaatttttaacgccaaaaaagttcagagggcatgatttagtacatatcaaaattcagggaaaaaattactaattagccttataaatatatcaaaagtacctctatgtagtgattataaacaaatgtctactttttttttttgaaatatttttttttaacatctttatatataaatatataaaactaaaaaaataagttctagaatagttattcgattacgccgctatagtcgatggatacgattctccgtacaattaattaaattatatgttcaaactttaaagtaaactcttttttttctttttgagtctaatgttcaaactataccttgtttaattggaagaaggtagaatgttcaaactatactcttttttttgagttgttcaaactgtcatattaattaagaaagaattattaattttgaagacatgcatcgcaattggtcatggatacataagaaaatctgctaatagtaattaatagtaattatccaataaattaaactgaattttttgattgaagatgacaattagggagaataatattaataagatggtttatttatatttagttactattttcactcgatttaaaaataataatagatagtaaaaatattttaaagataaatccttctacggtgaaaaatgcgtaaaacagagtatgcgacagtactactaaaccaaattttgcaaactctttattcaagtagtatagtcaaaaatatttgaaaagtttggggaacattcttatattagaaaaatctctcccaacaattaattataaaaaaaaaaa

SEQ ID NO: 304440 - DNA, 1022 bp, Cannabis indica
tctctcccaacaattaattataaaaaaaaacattcctgtaatattagaatgtcattaattaactactacattaatatttaatatcattttgtttctcgaaaacaattccaattttattttattttcaataaaacaattaaaaagttcattttcgaaaaaatcaagacaaggatattgtaattgtaatactataagaaaaagaaaggggcaatgttgtcttcaagagattaaaagactcaaaattactatctttgaaaaaaaaataaaggaaaaaacctcactcgttgacccccttagaattccaatggcggcccctacgccgttggccttggttaactctctctctctcctacctttctctctcttcgtggtattaaaaagccgagacacttagaagaagtaacaaacataaacaaagcagataagaagaaaagagaaaaaaaaaaaaaaccaaaaacaaaacaaaggctgctctgccgaagaagtagctaaatatagagaagtagccaccaacactctttattataagtatgtatacatatatgtgtatgtgtatatgttcttcttctgggttttgaagatcacagagaagaagagccaaaatttgctatcaatctagctcttgtttccgcactagttttggttctttgatttctcctcttttctgaagtttttcattcttgtttttgaaaaagaaaaaaaaatgggaccagaagtgttgatctcttgggtgaagcttctgtccgtattcttcatagtgagtgtttttgggctgaacatggtagtgttgctttggtggagaccaaggagaatcgaagaccatttctcaaagcaagggatcagaggacccccatatcgtttcttcattgggaatgttaaagagttagtgtctatgatgcttacggcctcctctcagcccatgcctaatttctcccacaacatactcccaagagtcctttctttctaccatcactggaagaaaatctatggtacatcttcactaccctcttcctctccctctc

SEQ ID NO: 304441 - DNA, 740 bp, Cannabis indica
ggtaatatataaaagatttggacatccacataattattaatatttataacaaacgcgggtatattacctagtttaattatattcaacaagtaaactactactagttaacctaatgcttttggccgtatttattaaaagtctttatcttcgactggggtgcatgtattagactttttatatcagcttaaattgaaaccattcatatttcggagttgagaactttttagaatatttttctttggctaaatagacagatcagaaagccatttggaatattttatgttggacatatattcaatgaagaactggtcaattattccatttacagtattatatacaaatataaatatatatatttatttatcttactacatattttttgcgatactagttagaaaaggagctagtattcttatttgacacaatttaatgtgtcacacccaatacaagatgtgtctcctattattagttagcatttttaatattgtttgtcaaattaaaataagtaaatacactactaataataatatagtagttttttttggtgcttcacaactttttagaagactctcagttgttgtttctgaaccctattttttaaaatactatattaaattctaattttttttatttgacatcaaaattttgcccatactatacaacattctctattttctttttttttttttaaatcattattttaatattaaattttttcaattaaaataataaaaataaat

SEQ ID NO: 304442 - DNA, 3085 bp, Cannabis indica
atgtaatatgctttcaactttaaataaaaataaggggcatgtaatttcaacttactgcagctactcgagtaagcctcccttgatcctcaactccctcaggagtaccctccaatccaagaatacgagtacaagcacttacgaaatgacgtgcatagtcatatgtatgaaaactggaaaattgaagattaatacataaataacatgctcagaattttatagaatccaaacacttaaaatgaagaaagcaacaaacagacaaatagaaaaacatcatataatacgtgaagcatgtttgcacatgctatgcaagctacctatttattccactccagctgactataaaagactggttcttgaaaacaattaaacaaaaatcacataacattattcagtaagtgctgctggtttcacaacgtacccaactaaatctgcagcaagaactgagcgcaacagctctgatcgagatggcaaggtcctgtgaatttcagatgaaggaaaaggggtatgtagaaaccaacccactttcattgaagggttgtattctttcaagcatttaggtagaaacatgagatggtaatcatggcaccaaacaacatcaccctcttcataatgctggtttaccacatcagcaaacatttgatttgccttcttatatgcagcaaactgagactggaaactcctggtggtagcaagccgatcttcttgtggaagtccaaggtaatgaaaaagtggccataaaatgttattacagtagccattataatattgatgaacaatctcttcatcaagaaatactggaatacatctctgtaaagaagaaatagataaacataagcaatcaacccagaatttgaggacagtagcattaaacagtcctgtgggatagttgtcatttactgttggcggttgacaattattttcctaactgtctatgtgtcataagagttagttagctttccttactattgtaactaactaatgccgtgtatataacgcattagataatcctagtttagctagcctattctttaatagacacttgtgtatatatgtaaatacaatctcagttcattaataagattcaatacacttttacaagttaattgttgttactctgttttcttggttggttactggtgttagagttctgtccaagaacttaggttgcatgaagcaagaaatcgaagctgcattcctaacaagtccaaatgattcaatgtcaagagtagaaagctaaccttttccgctagagacttagtaagagcattctgtccaactgtatctggcacatttacaccagcccaaccgatccaccttgcctcaaactccttcacacctataacacagccaaaacaaatgtacaaaactaagaaataaaatagcaggggaaagaaaacaagtaacagagagaaacacacaaagtaaattgtgaaaaatttgaaatatataaatagaccaaacaatccataaaatgaagattaaagattgcatacccagaagagcactgactaaacccccagcactaatctctaaatgccatacatcttcacctttcctcacagcagagaccggtaacctgttagcaaccaccaataaccgctgtctagctggctttctgtctggctttccacaccgttcataattattagccgttgcagtagtatccccttcagggtactgtccaagagtggcaactttcgaatgatcatcttctgttatacagacatcattttcaatatactgagcccccttaatgttattctcagtagttacatcgtttgattgagaactcctgctgtttttcaattgcctttctctcaataggcgttcatgtcgaccagatgagtaggttgaattaatctcgtacttgttccctggcataagctctctatgaaactgaaccttgtataccaaaatttagaagcacaaatgcttcttaacagtacaactgcgtctcctacattattaacaatcataacaatcaagaaagaaggaaacataaatacttatagaattaccctagtaaaagtttttaagcaataagataggcaaaagggtaagtgaaaaacacagttacgtcattcaattttgagtccataaatctgaagggaaatcaatccaatttcataaaaaaagatattagaaaaagcatgttattaaattgtgaagaaaaggacccactactactcagaagaaaaaaaaaattgaatgaattgaaaggtacatctaacaagtccccaccataggtacatatatcacatcacacaatcgaaacaacaaacacattgcatgggtgccaaaatatattggaactgcaattctttgatattgagaaagtacttattgtcatgtatcttcagaaacttgagaaacaaatatatataagaagaaaagtttcaaaaacccaattcaactaacactcaaaatgtaatttaccaatttcttgatacaagtgccagagttcaaacataagatgcgatgagggttctcaccactaaatatgtattataaactagataagaaagaagaaaacctccagattctgaatggcagagaattaacgaagttagagaaaaaaaaataagctatcaatcgaatccccgtgtaagctttatatatagacagcttagaatccatgcagaggtaacaccaaatattgggtttataaacataaaaggaaaaagaaatgttttaataaaaaggaaacaaatgcaaaacttgcaattgcccaaattccaaaattcaaaagaggagcaaggtgatgaaaaaaaataaaaaaagaaagaaaatctcaataaataggcaataataataataataagagaaaataaaaataaaaaacaataaagtatgattaaggaaagttcctaagatcccgtgactgggttccaactcttctaaaggtttaaaaagagagtttccgttgtttcactcactccattcagtttgactaaactgttatttatcccaagagagttttaagttgtacagttagagcttttaagttatacagaacttatatttaagaatactttattcaagaataatctctaatttattataaaaaaatcaagttctaatttaa

SEQ ID NO: 304443 - DNA, 4690 bp, Cannabis indica
aaaaaaaaaacagactgagacattaaattaaagtaaaatgtaactaaccttccagtttaccaaaacagcattaggaacaattatgagatgtggcccataattccctttgaactccattaagtaagcaattaatgccattaccttcaaagggaaatgtcaaattatatagttgaaaaatgaaaatgtgaactgaagcgccaaaaccaatatgacacaagcagtttcttgtcacaacttataataataatatgtaaatactcaagaagaagaaaggctcaaaacctgtacagtcttcccgagacccatttcatctgctaagattccgtttaacttgttgttatataatgaaagcatccattgcaacccaacctgcacagacaagtttaaaagaaaacactggctcactacaaaacaaaatcaaaataaataaataaaacttgctacaagaaatattgaacacatagcaaaatcccatttattaattgtagcaacctacaagctgatagtctcttaatgttcctttgcgcagcatagagggttgccttatgactctttcattcacagcatgtgcaagactataatacctggtaaccaacataagaaacagaaaattatttacaaaaatagcaaaggtacgcactatagaaaaaggtatataaaataatcactggtgatgcaaatagtcacttgtgatgcaccctaaacttgaaaaaaaccacacataccaaagcatataaacatttatgtctcagtagaaacttaaatatgattaaaaaaaggctcatctatgatctgcagccggtatgaacctcaatactgtcaagctgaatactatattggcattcaatgttattaaggatattttcaaaacaattgaccatcttacttaaccacttgaggctagctcaagtggccatagagggtattgggggtgtgtgagtgtgtggggtggggggtgtctatcaaatcccaggtatgtttactcaaacaatgtatatataaaaagacgcttctttcaaaaaaaacaaaaacaaaaaaaccatctcacttgctaacggaggagctatccttaggtgcattcatttccataaaacgatttcttatcaatacttcctccccagcacatgctgctgctgctctaacttcttcttccgagagaccctattattgtcaacaacataaaatatattaacaataaaaaaagagcccatggcaagggaatagcaaaagaaaaggaatattgatgcaaagacaagccaaacagacgcataacaagggaaatggtaaaaaaaagactgcccaaagtaaggaggacaaataaaaagaaacaaagaaaagcatgcctgatgtcgtgcagcagctgcagcagcattagccgcctcctccacttcttgttgattcttggcagctgttattttacttcccagtttatgaaggtaatcttctgtctgagtcaaaaatgatgaaagaactgcatatctctctgcagcatcaccgtcaatgctggtctgttgctcaagcaacatctccctatacctttcaacatcattattcttcaatgcttccatccttttgtttcgatcatcatccttcctttttgagaactccctcaacatcttttcatgatatttggcaacccccctgttccgagcagtccgtgcatcacgaatagcccagtgagcctcaagaagtttcttacgccaaagaaagatggatttaagttgtttatctctaagggctttttgagaggcttgtacttgtctagcaagctccatgcgttgacgctcacaaagtctgacaaacttccgataaggcctatcaggcatagccattatctcttgctgctgctgatcgatttcgtctctcaaacgtgcctgtatatctaaaagtcgaagcttcttctcttcaatttgcaaccgcagaacaaggtctggtctaatccttttcctctccaaattaacagcaagtaaaccaccaattttctttatattttctgttctcttcttgttaagcacttccacaccttcctcaaaaagaagatctttcacatcatatgcaagtgttagattgttattattgttgctattcattgtacctggacccaacgagtcatgtttcctagtgaaaaaagggaaatcaaatagtggtccatggtactttctagcagaaccaacatcttttggttggggagcagtgcttgcttgtgtgggctttttagcttgcattgcatcagatacaggaacatgagctgcaaccgcctttcctctatccactgaatcacttctaacaagagcttttgaggtaccacgttcaacttcgtggtctgacttagcagagaagacagtgggttgctgctcttcttttcccgaagaaaccacaggtacgggaggttccttaaccatagctgacgtaccttgtgcatgaactgctgctgcatttgatttctcatctcttgtgaaaggttcctcctttaaaacagtctgcccattcatagctgcagctgcctgcgtatccttttcaccggactccatatgtcttacacggtctgctacaaccttcccagcagatttatcctgcacgcttactcctaccgcattattttgctgctgtggctgctgctgcaagtcaagtggaggtggagcaatagctctaagaagctcttgggggagtgtaccttctcctttctgtaaaataataaatatattaaaaaataaatgcaagacagcagcaggtatacatgaacattaaataactggcagaaaggacgtgcaacaagaagggtgcaaaagaaagatttggaaaccttcaatcgccgaaatgccagtatttgtgctttgagaacgtgcagttgctgtttggtgaacccagaaggaccaggtcgttgttgtgacgcgtgagtagatggtccaccttgtgcttgcactggagttccagaagctctctcattcatagaaacagaagcttgaggagaggatcgattcactggcctactatattgcatttgcatactttctgggctacttaatggatttttagcatgaagggattgatcaacaccttggttaatgtttccttgtgattgcataggaattccattaccagttacagcaggctgtctaaatgccacttgattctctctaccatgaacaggaaactgctgcattggaatgttgttactattattaacactaccagcatttgaagaagagccaaaaggtccagatgatactgcctgctttgcttttgctgagccagactgcccagaagcatcactggatgaattagcatgaggagaattctcactagcaacttgcggagaagtaacctgctgctttgacactggaacaggtgatgattgtgctcccatattgctttcatttgctttctgctgtccagccaacctagactgcacaagtggaatgagctgtgcaaccaaattgacatttccaggcactgaaagatcaatgttatgttcaacagcccatgcctgcactgcttgcagctgagcagccattgctagctggttgtttgccatgttttgtacattttgctgagactgcggcccctgcatgggcctaacgacatttccatgcattaattggcccatactggcaggtttcgacaatggcttaggttcactcctctggtcagaggctggtggctgtccttgctccatctgtttttctccacgaccaaaatgctcggacttggatgaagatgcttgtgcctgattaccagcctgaatagacataagttcttgcattttcatatttccaattcgtgtgtcctgatcctttccagatggagggcctaacattcccattttagcttgctgttgtgactgcattgccaaagcagatttctgttgcgctgcctgaaaagcatactgaagataagcttgatggacgggattcattacttgttggtcgggcccttggctcctattgtgaccttcttgggaagaaccctgttgctgagccaattcgaagaatttcctcgactgttgagacagcggcattgcaccatgaggtgaaaaattgcctactcccaaagctccttggagattgccagcttggtatgctagcagggattcattgccctcaggttttcttagtagctgttgttgtaatggctgcaaaaataacaaatgatataagaatgtagtcgcaagattataccatattaatgtccacggcttgaaaataattatagaaaaagttgaaacctaaccacaactttattcaacttgaaaatattaagtgtaacaaatcgccatagtcatttgcatacccgatcctaattaaatatatatggtaatttttttaagcaaatcaaacaaacaagaaacctgaaatcatatactaatataaatatgtaaagccttattctgatttctaccagaaagaacctaccaaaagagcaaaacaaaatttgtaacaaaccatcattgaagttgagattaataaatatattacttctaaatcacatttccaaaatttataccatcatttcacatgtcatgtcaggtgacataaaaaactccaaaaaaataaatatttgaggtattaaaaaattgtaagaaaataataataaaaacgtaaaatgtcaataaacaacacaaaacacagaactggaaaagagagagagagagagagagagagagagagagagagagagagagagagagacg

SEQ ID NO: 304444 - DNA, 6440 bp, Cannabis indica
tcataacatctctaaatcagattttataactttagaaaatccagggtccattttgtcatttaacaaaatagagggtccaataggtaacttttgcaaaacacagggtccgaaatgatatttagcctaaattaattataatatgtaatatgtaatttaaattttaataaagtgatattataatttttaaaaaataagtaattttcaatttaaataataaatgaaataaaattaaaaattaatatcaatatgtaatatgtaatttaaagtcatttaaaatagcataagatattataaatgagcataagatattgtaaagtaggataagatattgtaaaacaacctaaaataaattttttatcttaacttgatctttttggttataaaacaaagataagataaaataattgtatttgtattattacatgcatagtgatattttacaaaatttacaactattttacaaaatatttagtaaataaagacatcgtctaccgactaccaaaatacaacctgctaccatgaagatcgaacactccaggttgcaacctcaaaggtcttttttcgtctccctgatcacgctaggagaggccttgttcattcctttagaacagcggaggagatcttctttgtgagtgtcaatgaagtgttgtagcactcacaggaagccctttcgtcatcgaggaggcgaccaaagtcagttgctattgaaaacttgacaaataggtggtagatggatgagatggttgaaggtcatgcagggttggccttccaatcatcacattgtacggagacttggtgtcgaccactatgaaagtttccataatttgtatttcggcttaggacagtgtcgaaaactagtggtaatttgatcttgcaatagggagcaattccatccccactaaaaccatacatgagttagttccacaattctaggtctttaaaagacaaatgcattctctttagagttttcttgaaaaggatgtttgatgactcttcatcatcgatcatcactctagccaccatcatgttggctagttgaacctcaacaatgagaacatcattgtgagggtagcaaacgtggtccgagtcaaattcctcgaatgtgattggaccacacttgaagcatagagatttgagaggtctctccacaacctttaacatttccaatctcagctcacgcagtagagatttgccatacctctctagtgcttaccttgagttaccgacaagatgtggacctccaactaccacgtcgagccatcccgccactgttgtaggctaaagaggagaagttcctcttgaaggcgcctcagcgctcacatatcgctggacgccgcatgcttttgacatatcaaaaattctatctcatcccgcaactaattacactaattaatgtcatgactgtaattattgtggtagtgacaaaacttttttatgtcttttttccctgaccttttgaagggaagaggctttctgtatggcactgttgactgagttaacacaaagatttcttctcttagggccaatagaatagaataggtggtgaatctaggctcgtactccttgttagacccgtctctagttctagttttctttccactagagaagttagcttgtttaccaccattattcaatctcttacccccattctttcctctttcccacttccccctacgcctcagtgttaggggtaggtgagtcttgcaatttcttcttcttattttttgactttttagcccgaaaaacaacttcttctagtttgataaagtcgtctatcctatcaaggaaattgttcatggtgtagactgccttgagatgaaggtctaaccatataggactcatctccttaagctcggctttgagtaccataacctttgcatatttgctaagtatttttatcttagcggttgcctctaagaactattgaatgtattcattgagggattcatcttcttgtttctttatgtctactagatcattaggttcaatctggcattgtcggatggagccaactgactgccaaaggtatccacaagctctttccatgaatctatagatccaagagcaagcttgagataccatcattgagctaagcctgtcagcgtggtagggaagatttttcaccagacaatatctctcaccctttgaatatcagtctacacttcaaagtagtagatatgagtgaacatgtcttctttcccagtgcattgatgtcaagtgggattcttgaattttagaggaatctccaaagctttaattcgatttcggagtggtgagtgtcgttcttggcttagcacaaactttgatagctttagattagtgattcccttcaccaaagcgattagggaatcaaatttggccctattaatgccacgagtggtggcctacgtaccagttggacctttagctatcaaattaatggggtcaccgctagaagctcccacttccactaattgtctcttgttcaaggtatcacacaagtcttttttctttccatgtcgatcaaaaatatttttcgatttgggcttggctataccatcctaaacacgaggttgtgaatgcaatgtcggtgacttctctcgtatgatggcggaatcatccttggaatagtttttgtgagagtgatcatccaaagaactataacgactattcccctcaaaagagtcttctttagggtgacaagtgcagagagagttgaactgattttctcaggttcaactcttccccatgcacttgaagaaagtactcatattgttggccattaggactgggagcaaagtaccttcataaaacaccattttatcacagaaatacttccaagtgtggagtggtttgttgattctgaccctccgaatctcattaccccagtttcatggtagagccttcaggtccctcacctaaggttgactgtaggtccttacctgttgtaaggttgtggggcctagagtcattggacctatgaggagaataccatggagtgagatcagttacccacattgtttagatttctccaagcagaattgtggttggtcctatcagcgctaggtggtgggcctatgggtccattttcttgagtctggcacctttcaaacgcttactcgtagattgtttctctaacaggtaactgctccacatcaggtggaggacccattggtctatgctctggagaaaaagtccttttagatgctcgctcgtagtggcatggctatcgggaatgttagaagtacctcacgcattaaggctttccccttgagcgcttgttcctacgtggaaagttagcggacgttggttgtctccagctctactgtgagtggctctaggaggatccattccgttgttggagcgatagacttctcgaattttttgaacaagattagctcttgtgtgctctttttcataatgttaagcttcaaagttctctaagttttgaactattcacattgcttattgagagattctcgcagctgttgttgcaagttagcaactgattgactaagttgttcaactcaaggattgacttatataaaatatgatatatgtatttaataagcgatgagcacaagatttatattagttaactccccgtgtcgcgacggtaatggaattacgtctacttcgtgtttttatttcttaggataattacaagagaattggctaaggtaagagctcagatttctagagagagagatgctcttaccttacagggacttttttgaatgtaaaaaattagctaatggagctctccttttatatgcaaggaggtccattaaaataataatacaataataccaaaatatataaaaaaaaattatgatggactaattttgaatgttgatcatgatctaatggctaaaattaaatttagataaaaattatcaatttttatagcttgaatcatgtccactgaattgtttttgggtaatctacaaaaaaaattgtacttgacatgaggatgaaacttcaacttcaaatttttgaaattgtaatgtgagtgtggacatctctagaaagagcttcaaatgtgcttttaaaagcaactgaatttgcgtcaatcagatcaatattgagtaatttatggtcgttttactgaagacagtttagcaataagcacctaagttgaatcccagagcctaggttcacatccagcggctaggtttacattctaacatcaacctgtatagtgtatgagtgggaaacgtgtcagacatgtattttttgatgccttaatgatattttgagattacctagtcaattttttggttttggtgaagttgttcatcagttctcgagatgtcacttttttgtaaaattgggtagacttaaaacttccttattggtggctaatttgtcgatattccacatttccaaaaaggtgaattatcaaagtgtaaatttaacttgtcataagttgtagctcttgtttattaagaaaaactagtcagatgctgaagacagaataagaatcgaataagcataacccagcgcactaggctatatgtcaacctgggcattgggtgctcctcggggagctttttgaggcttgttttgataattctatggccttcaagattgtgaaagagtcctcctaccccgattttgaccaaaataagaaaaatgcccagagcagaatttgtctttgaggagcaaaaacatgtgaaccaacttgggcgtagggcctagcacccatgtcaacttgggcattggggccctgttttggcccctagatgatctcattagctcctcgagaacacttgcatctttgttatttctaaaaattaaaaagaagctcgaaaaactttttgaagaaaatacttaaaagtggctcaggttgacaaaacgtcaacctgggtgcttggaccaggcaccaagtaaacctaggcactggtacctagttttgaccaatagatgcttccatttgattcttggaaacactcgtatcataatttttggtgaaaatggagaacattcgagaaatacttctcaagaaaaatgtttgaaaatggcccagattgacgatatgtcaacctaaggtgctagggcctagcatcaggtcaactagggcgatagatctcagttttgacttgcatatgactccatttatatctcgaaagcaccaatatcttacttgtttatgaaaatggaaaatattccctcaaaattgatgttggaaatggccgaggttaacggcatgtcaacctgagcactgggacctagcaccaggtctacttgggctttgggttccatttttggccccctgatcgatctgtttctttctcgaaagcacttgtttcctcgatttggaacgaagaaatatttgggatacatttttagtattgaggttggaaatgccccatgttgacaaaaggtcaacctgggcgctgagtgcatcgccatgtggcctaggcatcaggtttgtgggtgctccaaacggaaagtgttttgattttgatttttttttcctttatcatgtttgtaacaggtcttattcatgtctaagtacaaagtgtaagccattttcactaagacgaactagaaaattaaaaccctaacaaggatgtcaaccttggcgttaggcacctgggttgactttcgagaggtcgtattgacccttttcagttctcaagcttcgtacttggtttcttcgtgacttcttggttcagaatactgaaggatggtgagttagaaacaacttgagggtattcaaacacccattctggagttcctgaagtgagtcttggcgcaggactagggacccctatgacttaggactactcaactctataaatatttttttttcttgccacatgtcaaatattgatgtccacattagcaggactagtttatgagtaaacaatatatatgttttactgtacattggatgctcaagattgttacgtcaaagaagattatatattttaaccctcttaatatggccaccaatgtcccaaagatgttgatgatatgttaaattcaatcactttttataagaaaaaatttagctaagttatgttaattaatcaaactaataaataatttgcaaaacatggcatatgagaatattaaggagacgaatgaattacttggatcatattcagaaatggcggaagcactttgctaaaatcaattgaaaaatcaagaatatagtttttatgtcttgaaatacatcaatgacatcataaaatcttcaaatgctcaaagattcataaatagcaaaaaagtaagtttctattatcttacttgttatattaacaaaatatctaatacatatatactaataaatatttatatgttctttttacatattagaatagttatataagaatatttttattcatgtttaaataactcttaaacacttatagtaatttaacatttagtataatatatttactttagagtaatataaatgtatatatttttattctagcttgtcaatttaa

SEQ ID NO: 304445 - DNA, 2027 bp, Cannabis indica
acaattttttacgtcatagtacatgtacgttatatattaaatatactaaaaaatttaaaaatactaaagaaaaaattacacaataaaactaaagttacaatagtgtattgcaagacgtgactataaaataatatgtgcacatattattttttactaactaatacacatttatctaaatataagtccactttatatatatatatatatatatatattttttttcaaaaattcacaattaattttgcataaatcatagaatatgatttaataattaactaaaattttgatgatgagttcatgtttattttgtgtaattttaattgaataaccatattttggttatagggagattgtggggatgtattgtactgaagtgagagagcttggatttagaatacaagaactaatttcagagagcttgggattagagaaggattatataaagaaagtattgggtgagcaaggtcagcatatggctgtgaattactacccaccatgccctgaacccgagctcacttatggtttgcccggacacaccgacccgaatgccctaaccattcttcttcaagatcttcaagtggctggtcttcaggttctcaaggatggtaaatgggttgctgttaatcctcatcctaatgcttttgttattaacattggtgaccagttacaggtaacttaattcattcttactttctatgtccaatttcgatacactttcaaaatgtcgaatttgattcattccaaccacactctaaaagatattttatacataacaatgtctattctatatattattagtgggatactgaagactacactaattcttttttaaataattaaaattttttatatttattatttgtgtttatttataatttaataaaataatatagttttagtgttaaaattctagtgtttttgtgttggtttaataaatactaaatttaacatttattattggagttgccctaagtattttattatattttgtaggctctgagtaatgggatttacaagagtgtgtggcaccgtgctattgtcaattccgacatgcctaggttgtcagttgcgtcgttcctctgcccattcgatgatgccctgattagcccagctaacgggctcaccggcgatgacggttcgggtgccgtttacagggaatatacttatgcggagtattacaagaagttttggagcaggaacttggatcaagagcactgtttggaacttttcaagaatcattaactcacgagtattgttatgtgacaccttataatgcccaacacctcgtgatggggtattaggtgattggcgtaattaaatacgtgaagactcgataagaaattacaccaatcactgtataccacattatgtggtgttgggtaccataaggtgtcgcgaaacaatattctttaactatataatatgcagttctagctagagtagtaatttggatattctaagaacttttgtttggtaaaatgtgcctttaactatataatattatgtagcatagttgaaggttgcagtactactattactaccaccattactttttgaccaagtatggttttggtagtatatatagttatattttctgttggcatataaataattaaggtgttttgggggaaatagtatatgctaattttctagtcaagtatgttgggactgttttagttagtttattatgatcttatatatgtacgttttatgtactggtctggtgcctatattttatgtaacccatcttttgtattatggtaattttcaataatttgcattgttctaaatatttatgaaaatatagcttattggtcatttggctaaccagataaataaaggtcagtattgaagctttcacaactactaataattgtttttagattacgaactaaaccacatcgtttacaaatacgagaagtataagtatgatttatggtttaaagatacaatagtcgtaagtttttttttggtaatgaaaactttatggggtaagttgaaaaatacccttttattaatcaattaat

SEQ ID NO: 304446 - DNA, 1422 bp, Cannabis indica
tttttatttttttgaaatggaatttgaaatagatatatactgtaataaatttgacacaactaaatataaataaaatagtaaaatatatatcgaatttatcatagtaaattaaacaactatttacattttaattactaatatttgtctaattattgattattaattaatcattaaattttgtaattgttaaatattaatcattgtttgataagatcttgactagcgactcaccttaattgcattctcatataataataattataaatttaatggggtgtatttagattgtgagtgttgttataatttgatggggtggaaatataagcccctaatataaatatgtacaaatttttcgtgtatagcatcattcattaggatacgaatttaggacaactttatagttataaagtatataaatagagtggagtcattttattttaccaaattggtttaatctaaataatatcattttaagagtcctttgattcattactatacatatattgtataggtgttttttcttggttgtgccctaataccagtacttccataacaataattgacaggttgggcttagtggcatattgatggtgaaaggcactgaatatgagaacacaaatcaaattcctaatgaagataatatctatggtacccttttgtctgaaaatgtaattggtgtcattcatgatcattacatcacattttatcttgatatggacgtggacggctcagacaattcctttgccaaagtccatattgaaagagttaaaaactcacaaggagattcatcaacaccaagaagaagttacttgaaagcaacaaaaaaagtggcaaaaactgaaaaagaggcacaaattaagctaaaattgtatgatccctccgagttccacgtgttcaacccaacaaagaaaactcgggtcgggaacccggttgggtacaaggtggtacccggaggcaccgcggctagccttcttgacctggacgaccctccacaaaagagaggtgcttttacaaataaccaaatttgggttaccccttataacaggagtgagctgtgggctggcggcttatttgtttaccaaagtcatggtgaagatacccttgctgtgtggtctaacaggtaataattcaaaacacatcttcccttatggtcttgtgtcacatttccaattaattgaaagtatatagttactaattgagtagtattaggcatacatattctcttacaaacaatcaaacactatatatatacatacatgctagaagctacttagtgaaatttcatgggttatatataatcatatctcttacttttattgattatatttaaataattattagaaaaaaaaaatgctacttaaacaatcacatagtgtaatatatatagggatatgattttgtcccgttattgtactttcacgg

SEQ ID NO: 304447 - DNA, 1029 bp, Cannabis indica
tttttttttggcatttttacaagattttacatagaaatttctattgcaattagcgctacaacttaaattgcaacaaaaaatcgtatagaaagtggaaactcctattgcaactagtactgtaaccactttagaaaaatttgaaaaaaaaaatgttaaaaaaaccgtatatggagtaatttctctaaaataatacggtgaatggataaaatatatgaaaataaataaaagttggaggattattttttaattattcgtgaaagagtttttggtgaccaaatttttctaactataattttatttgcacttaatctattaaattttagtgataagatttttcaaattaaaaaacggttaatattgatatgtatactctcatagcgacccatttgtattagtacaattaatattattatttaacaattataaaaaaaatcttaaaattcatttaaaattacaaaaataattttccattattagaaataaaaaattacttttggatttcaatttcagtgacacaaaattggagaagggtcctaaccgagcaagaagccattaaagtcgatgttagggttttgatcttggagaagtaagcgtaagtgaagttatagttaggagtgtttagccgctaaaactttttcataaaatatctttaaactatttccaagtccaatctctttattctcatacaattcctctcaagtagggatgacaattgtacccgtagattcgggtacccggggatacctgctcctaataggacgggtatgggggttgactttcgaggggaggagcgggtatgggtttaaagattcatacccgagttggaaacgggacgagggcaggggaatagatacccgccctgatatgatatatgtatatattaaagttttaaaatcataattactacaattaaaataacttcatgctttaggctttttattgattatactctttttttttactatacatactattctacttaagtttattgttttactaagtttttatgatttttttttaattctcttt

SEQ ID NO: 304448 - DNA, 4076 bp, Cannabis indica
ttgtgtttgtctacattagtggagagaaatataataaacgtatgagactgtgtcaatttagagattttgtgcttaattcatatttgcataaattgatctaaattgcaagcaataatttgaggaaagacatttgacacacacacacacttggagtaatcaaaataggaatgaaacttgttcttgaatttttcacaatcattggacaatcgttttattattctctaggctatattcactaatcaatcctcaatttttctgtgataccatcagaccggtatcgggcctgcatcgggcccgacaaaataaaaccccaaacccagattcttcccaaatcacattcgacgagaaaaaaaaagattcgaagagggttcagtctgtggggtggtgggtttggatcgtggggtggtgagttcggtctgtggggtagtgggttcatcagtcagtggggtggtgggttcatcggtggtcgagtgggaatggttcgttggcggtgggaattcgaaaggggaaagatagagaaaaaggggaggaagagagagagtcaatttagaatgaggggaaaaaattgggttttagtaaaaattatcccattttataaattttgtatatttttaaattataagaccaattttagtccctattatgcatataatttcaaattttcctttaataattctagcttattttctttctcaaagtttgtgtttgttaatttgtatatattctgatcactttattttacttttgtttaaactaatttgtcagtaattagttttataaattaatttccaatattcaatccctgtggagatgatattcgatttatcactttattacttgttaatgattgtgtgcacttgcgtatataattttttacaacagcaaacaaagaaaacaaataaaaatactctgataccatgttgagaatgaaagtgaagaaaagaaaacaaattggaatgaatttcattgattaatgattttgagcaaaagtgttctatatatacaagttgaacaagttaattcaaagaaagtacgtaactaactacagttgcacaaacagaacttgtaacaaattataaagcatagttaattgtacaaaaagatgtaatgttcaattgcacaaaaatatacgtattaattaaattgatatatttatgaatttgataaaaaaaaaatatatatggttttataattatgtaacatttgacatacatatttttgtgcatttaaaacaatgacttgcattgtgtaatataactacactattttcttatttctatatacggcaatagactatatgagtatatggatattaaaaaaaattacattaaattttaaattttttgcccctaactttaatatgttcaaaattatactccagaatatttcagactgttaaaattttttctcaaactattgtgattgctagatcaaggtcccactttatgtcgtatcccacatggacatgcctacatactaatattgttgtagtgtatatcaacgcactaatacatcgaataaagtttttgttcaaaattttggattttgccataagcactttatctcgttaacttttgcagggcatttggtcaaatgcgccaacaaatgtggcatttaatatagtgaaactatatataattatgactacctaacaaccttatctaacccacacccacccccccccccccggccgtagaaaattgagctggatagagataccaaactaagtttgtctcttagaatctacgtgtaggtaaggccttagtaaggatgtcagatacttgattgttctagagtgtaaaactagatttgcagacttgagcacagtgaaatgattgtcacaccagataataaggattggaaggtttgataaaccaattaagacaataaagattgaagccaaataagtttagtaatggcatttgcaagacttcgatacttagcttcagtactgaatcgagatactgttcttttctttttggagcaccaagaaagcatgtttgagcctagatagaagcaaaaaatagaagtagatctgtgatcatcaagatcgaaggccctatcagcataacaaaaccctgttgaaactagttttaatagggttttaagtgtaatccgtagtccaaaatttctttaagataccttagtatctttttgaccacttttagatgacactcaagcggtttgtccatgaacaaagataccttattgacaacataggctatctctaatctagtgatgataacatattgcaatgccctaactatgccttgatattgatgtagattagcaactgaatcactattgaaggttgataatttttctccaacaatcataggagttggaagagagttcccaaaatatattttggcaccacatagtaggtccattatgtatttcttttgacacaagtgtaagccattatcaagttgctggacttgaattccaaggaaatagtgtatgttgataaggtcttttaataaaaaagatgcattaagatctatgattagagttgaaacaacagctttggaactttctgtaatgacaatatcatccacataaacaagtacatatatatatgtggtgtgagagtctgttatccttatgaaaaaggattgatcatctcgagcataaataaatttgaatgtcatgagagcgtatctaggcttatcaaaccaaagctgagagagcttgcctcaagcaatataatgctttttgtaacttgcaaactaaatgaggagagctttgatcaataaaactaggaggttgagttatgaatacctcttcagtttgctctccgttcaagaaagtattgttgacatctaattagcttacttgtcaaccattagataaggcaatagttaggatgacttgaatagtttttggtttgattataggactaaaagtctctatagaatcataatcatattaatgcaaaaatcctttggaaataagccttcctttgtattgagtaataatgtcatcttgattttccttctccctgtagacccatctgtaacttatggcattcctacgaggaggtagaggaacaaggattcaagttttattattattaagaatagtaatttgaacttgcgtgacttcattacacttgggatcctttagagctactgctatagtcagaggcacctttaaaactatgagaactttaggctatagattccaactttggctcttgcaaccataagatgactattggcagaagcttaaggaatagcttgggctttaggataatttataacttgagtaaaagcatatgcatatggatctaatggcaaagtagagaggtggatgcagaagcttcaatagatggtgaaatggggtgatttgttaatgtggaaccagatatggatgataaggtttcaacaaccaaagctgacatgttgaactgttctttatgattgcaggttggaatagtagcagaaggaccaacaaaaacagtatcatttgtgacattagtagaattagatagagttgcaaaaggaaaattgaattcgttgaaagcaaaatctcttgaaatgtaaattctgctagaagaagaaagacatttgtaatccttatattaaaattgtagcctaggaaagtacacttttcaaacctaaactcaactttatgtttgtcataaggcttgttattaggaaaactagcacatccaaagacttttaaagtagcatagtcaggatatttgaggaaccagtttctgtaagggagtgtcattttgaataacttgtgttggaagtgtgtttatgacataacaggttgttctaatagcctcatcctaatgagataggggcatggaagcctaggcaagaagggtaaggtcaattttaattaagtgtctgtgtttctttcagcaattccattttgtttgtgagtggtgggacaagacaacctatgattaataccatgcttaatcaaataaggttctgaggctttgtactctcccacaatcagatgttgggctttgtgccctaaataaaactctatttcaatgtaatctttatcatttaattatcaataaagagacagaagtattttcatcacttatttagtgt

SEQ ID NO: 304449 - DNA, 2533 bp, Cannabis indica
agagaattgtcactttgtgcaacaaaactggctaacgattatccaaatccgctcattattattttctttgttgtccttccaaccttcccaagttccacaaaaatacacccaataaaccaaacatcatctaataattataagctcaaaattatacatgtaacacttctctcaaaaccctcattttcttgccaaccaaacactctatatctctttcttctctctctagcctccatggctagtgcggctagtgctactactactaatactaccgatcttcaccatcaataccagagagaaatatctttcaatacttacaataccaggcagtacttcacagatgaagagactagcgacgaaggagacgatgtaggagagagagaaaaaatactagaagaagatgaggaactaatagatggtgaggacagcgatgaaaataagtacgacaaagaatccaagaggcgcggaggcggaggaggagggcggtggtggttgggtgaaggggcggcgcgtgtgttggacccgagggcgaagtgggtccaggaatggaacagggtgttcttgttggtgtgcgccactgggctttttgtggacccgctcttcttctacgccctatcagtaagcgacacgtgtatgtgtctcttcgtcgatgggtggttcgccgtaacggtaacggtcctcaggtgcatgacggacgccttacacgtgtggaacatgtggctacagctgaagatggcgaaacggtcgttttccgtggttagcgccgtggatgggaccggtgccgctggctccgccgctagcgggatgagtgatgccgcctcgtctaggtctgtggctttaaggtacttgaaagccaagagaggctttctgtttgacctctttgtcattcttcctttgcctcaggtaaacatttaaaattattttcctttatttttgttatgctcttattgtgattttctaaaatatatcgtaatcatcgccattgtttatacacacacatgtataatgttcggaaaatgatatttttgagaagggtgacagatgctgcacacccccacagtattttttccgtgagatcatgatgatcgtatatttactataagaatgaaacacacattgcatacagaatgctgacacaacatgtatcatgtgatataaagccaaatatatttatatataattattattttatttcagagggtaaaacggagaatgtataaatttaggtagggttttgttggaggtaataaaatggaagagaatgattatttattttgttacatatgaaattattgaaatatcatttcaaaaaataattttttcactattttggtaaattaactattccattttgaaatagaaagaaacactaatttaagaaaatatttaatagtatttttattaattttttttataaattttaaattttattttatttcatttttattcttatttttatttttaaattttaaattttattttattttattattatttttattcttcgttacccaaaccaaacgccacctagtgtctaaaacatagggcgtgtgtccgtgatacatgatacctccttaagtttatgaagacaccagtagttttaccaaaaaaaataaaattacgaaaggagaaaaaataaaaatgaaattattaatacatttgtgaaaagtaatttaattttttctaataaataaagtagttaattatacatggacaatgtctattaaaaaaataaaactatacatggaaaatgtcaataatgccatcacacataaatctattaccgcttgagttgagagtttttttttttaagataaagatgcctttatattaaaacaaaaaatacaaaggacattagaagtagaggcatttttctaaacatgtacatttagtattgacggaaagagcgaacttagccattaaatggacagtagtattagcaggtttataaacataagaaatctgtgctatagggaaattgagacctatagctgttgggtatatgttaagtggtgaggaatggacaagaatttaatttcattatatgaaattaagaagaaaaaaaaaacgtaattaatctaccaatgttcatagctcacctttttctttttcatttttatatgtcaattttctaaatttattctcttctaataactgaaatttcaaaaaaaaaattattattttttgatgtgggtccaactactttcatgtgtgattttgttttatttatttatttgaaaaatgacttttaacgtgtgaaatcataatagcattaaactaaatccactttatatgtgggcgcgggtcctcgttcctaattaatagagagaggaattttcgatttaaataggaaatggagaactatatctctaaactaagtatatttacaaaatttatttaatgtacatggtatataatagtaatattatgattttttttaaaagttttataaatttctctaggtgttttgtgtatattttaggatgtaatttattgtgtaattattattcaattttttttttatttaaaaaacatt

SEQ ID NO: 304450 - DNA, 2036 bp, Cannabis indica
gatatttatattcttcttggtaaaaatatcaaacgctagcctcctttgtttgaataacagtgttactgagttgtgaagaactataatgacttcataagtatttgatttttttctcagactgttgctggtgcagcacagcagacaagcaatgtaattgaaggggtcaggccaattgcttcatcaacttttgaaacaatgtcttcttcagaccctcttacaattgtaggatctgccggagcattgttccttacctaccttctccttcctccagtctggtctgtcatttcatttaacttccgcggttacaaaggttgattttaactcacgtattatctattttctaacatacaacattgtgttcatatgcatccataattatatggctaaaagggctaaggttttgctacacttcaggtcaacttactccagctcaaacccttgatcttatatcgacgaagaattacattatgattgatattcgaacagagaaggagaaggacaaggctggcattcctcgccttccatctagtgctaaaaacaaaatgattgccattccgtgagcattttcactttggaatttacttagcaatatctatttcctcaaaataaatcttttgattttttttaatcatggttcttcaatgttggttctatttgtattcactcagtttggaagaggtgcctaacaagctacaaggcctcgttagaaatgtaaagaaactacaggctgaaatagcagctctgaagatttcttatctgaagagaatcaacaaaggctccagcattgtcatattggattcgtgagtacttcctttgcttattttcatagcagcatttgtttttgctaagtttgcctaaacttttatttttgcttatagctaagtataaaataaatataagatttgatgaatattttttaaataaaaaatgctttctaaaatgtttgtatattattaaaaaaattgttttgtgagtaaactaagaatgtaaattattttaattttaaaaatagtttttcaaaaatcttttcgggattttctagttctaaaagtaaaaaaaagatcttatagaagctaagtcaaacaatcttgtatatttttcttcaccatttggctcgctataggtattcggattcggctaagatagtggctaaaactttaactagtcttggcttcaagaactgctggactgtggctgatggcttctccggaggcagaggatggctgcagagtcgtctaggggtagattcatacaacttctcgttcgcagaggtcatttcaccatctcggatcattccctcatcagtaagacgttttggtacaaccagcaacacatctcagtctgctcaaaaattgcttccagaatgattcatgtcctaatttaagtataaacaagaaagacaaggggaaagaagaacatcgttcttattggaaaatgccgtgaatgtgaacaaattgtttagatccaagtcttgtctaatcatttttgtaaatctttttttttttcttttttgtatctggtctcacttttgttgtataatacagagcactcagtacagatttcgtcttttacttttttcctcataatgtggctcaaatgatttgagggcttaaaaaggagaaaaccttgccaagagaggtaaacatccttctataagaaaagagaggtaaattgcaaagccagtgcttgggattgagagggtaggataagataattgataatccattctgaaagcgaaacaacaaaagagaaggcaatctttcttgatggtttgtgttcactactatgccttttgattaatttaaaatattcccccaaatgtcctaaattttgaataattgcaaagtgaacgaataaaaatgattaataccgaagtgctgtttcggccggtgttggctttgtattgtgattgtgcttaataaagtcattcttttcatgtattagcaattttttttccgaactttgacatgtgatgaattatggctcctaaactttttttggcgttaaaaattcctcctaaactattaagattgtta

SEQ ID NO: 304451 - DNA, 3760 bp, Cannabis indica
tttactaagtctttagtttttttttttttttatatattaaacaagtccccaatgactatgtcgttggggataaaaaaaggggagaaatttgccacccaatgcaacagatatttttcaaaaacaataaatacattctcaacgacaatgtcgttattgaagcctttttcaataacgaaattatcgttattgaaaaaatgtcgttattgattaactattttttttttttaaaaaaaattgaataactttcccaacgacaagtaagtgtcgttattgatactctcatttttaatgaggactttttggcgttagtaatagtggcgttggtattaaccatattaagggattgaacttagctacgggagcataagtttggtcatagggaataccttgtttttggttaaagcctttagcaacaaggcaagccttgaatctctcaacttcaccttgttgattgtatttgactttataaacccatttgcatccaatgtctttatggctaggggtaactttgttacagtcaatgtatgattttattccaaggcttgggtttcattatccttggcctcgagcaaatgtttgaattgggaggtttttgaataaaagtgtggttcaagatgggactaagcagcaagaacaacagccctgaaatggggatttaatttggcattggagatggattcttccatgggatatgcagctgaggtagtgtgacatacatagtccttgaggtgagggggtttagtgatggttgtaccagtttttgagatgatttttgggggagagctgttgtcaacatgtaggggatcaggaatgttggttgattctgttgaagaatctatttttgtgtgatcctcagggagtttgatttgcatgatgtgcatcaattggttgtgtagtagctcaggtaaggggttggaatactggtgtgatatgttgaaataactggtgtatgtcagtcgtggaattttgagaaataagaggaaaatattctcatgaaaataacatctcgagatggaatatttgttttgtttcaatatcgaggagagtgtaggctttcatgccgtgggggtaaccaatggatatggaagcccaacttctgggtgagattttatgccttatggatgagagggtggaggcataagtaaggcagccaaaacaccttagatgttcataatttcgtggtttattgtaaagttgatcaaaggatgtgcttccttgaaatagggcagatggagtcctattcattagataggctgcagtttgtatgaggtaaggccaatagacaaggggtagattggattggaaacacaatgctcttgcaatgttcaaaatgtgttgatgtttcttttctaccacggagttttgttgtggtctttctacgcacgaatggtaatgtataatacctttggatgcataaaaagactgcatattgaactctctttagaattatcggatctaatggccttagtgggttttgaatgttgaatgcaggacatgttgtaaaatgtaggaatgatattgtgtacatctacttcagtttttagcatgaaagtccatgtgaatcgtgacttatcatcgacaatggtgaggaagtatttgtatccttcaacacagatgatgttgaagggtccttatatgttcatatgtattaagtcaaatatttgtccagtaaaattgttatttgatgcaaaaggaagcttttttgtttggtaagatgacaaacgtgacaatgttggtgctgatattaaaagaaccagaatgtaaggttttattgaatgtattagaaatgtacatagatggctggccaaggcgtttatgccattggtctacattattttgaaatggaaagagacaagtagaactagctataggccggggctctttcggaagaacataaagcttgccaagtttcttagctgtaccaatcaccacatttggaaaaggagcctgtaaaacacatgaattatgatgaaatattaacttgttagtggtattgtcaaggaaagtcgtgacagaaaaaaggttaatgttaaaaattggaacaaagagcacattgttgagtgtaatgtgcttgtttatattgacaatacctatgcctttaacaaggatattattgccattagggagaataataatttgtggaaaagaaccattatagaagtatgaaaagaaacatttgttggagcacatatggtgagtggctccactgtcaataacccaagtaggagtttggaaagaaaatgagttaccagccatatttgatgcagcaggagcattgttggagtcatcacgggggtgtgcttgactcaattgttggctaagaagagagatgagttcttagcattgagtggataaatcaacactggaattggcagcaacatgctcagaattgaaactggcagtggcattgttggcaacagatttgccctttacagacttcttcttgtctccatagcctggtgggaagccatgtaagaagtaacacttatcaacatagtggtcaggtttgccacagttggtacaagatgacctaggtttctttaatcgtgggggatttgtagatgtgtaaggtttagcagaggcaacaaggtagggtaaatctcatgaaccaagggttctttgcctttcttcttgaactatcattgaaaatactccagagaggttggggataggttcattgagaataatctgggccctaacagatgcataagattcattcagcctgattaaaaattgcagaacctagttctgattgtagtattctaggaacaatttcattgctcgacaagtgcatgttatgttaggttaaaattttgttaactcatcccaaatagatttgagttttgtgaagtaagaggtgacagactgatcactttgctgcaatcgagtcaattgagtctgtagctgaaagattcagggcccattgccctcattgaatctttcttgaaggtcatgccacatatctatggcaagatcaaaaaccataatactctgtgctatttcagaggatacagagttgatgagccaagacataaccacgttcttacaatgaatccatgagttaagaagaggaagtagcaggctgaggaagagacccatcaatgaacacagatttgttctttgctgtgagtgccattgttatgcctcgtttctaagattgataattggcatcattgagcacggtggaaaccagaatgagaccaggatgattagctgaactgagaaagaatggactggttacatcctcatgtgctagtcgatcgagcatcgaagatcgtcgaggaaggacaggttgaggattctcatgaacagggtggtcaggggatgattgagctggtgggatgttgtcttcttcggtttgcgattgggatcttgaatttggaatttgtcgaggtgctatagaagtgtgggcaataagtgcagaagtggaatcgggattggatttagattgattatgctcggtggtggataggggaacgccatcttgtgagcgtgtggagggccttgctattgaagaagtggccaagatttcaaatgataccatatgagaaagaatagaggaattgagagagaaatagaattgctcggtattattatgtttaaagattatacaatcaggaatctatacagaagctcagttagttggaagtaactaacagaggtaaagatctgtactgaattagttaagaccagtacaagctaattagctgaaaatacagaaataaactgagatggacaacttataatatagagtaaatat

SEQ ID NO: 304452 - DNA, 2348 bp, Cannabis indica
tttttaaaacataatatatataatctgataagatttcgtttatatataataataatattaatataatattataataataataatataataattataataacaataacagtaataatcgaaatgttaataaaattttattattaatagttatggtattatttcttagctagtaagaaatctctacttctagggtattttgtcaacttcgagtatcccaaaatatttggtatatctaaaattaacttatctcaataatcccatcaatatttctaacttatcctattgtgatacttttggcctccaatcgggtctttggggtttccaaacctaaaaatatttttttctcacaaataacttacattatatccacatatttcaaataaatctctgtaattattaaattacacttatttatccacttatcaaaaaaatttagaatttatgccaattaggtcgtaggatcatagtcctactcattagtaccttattaatccataatatataatatatatcataattattaataattatatttttgggatatttaatagcttcattatgtggatagatatttagagtaggttaagaacaagagattgacttcatagatttggggtcattgacagccctacatgtttgttatgtaatcaagtaaatgaaactaacaatcacatcatgtttgaatgtggcttgcccgctcattaattggatgagataaagtcatggttgcaatggggagcattgtctacttctcttcctagattatttaggttcataggaatgtctaaaggtagcaggtttaggatttttttttttggctactgcattggcgagtcttttgtaacatatttggaggacttgaaatgataaactttggaatcaaaaaagagaagatgatgctagcgtagtgtgcaaagttaaagaatttgttaaacagagaattttccttgtttggcctaaaaaggtcaatataagtgacaaaaatttgttcaattccttgtaattttaaaaaaatatacttgtatagaattcagtttttaggcctttcctttttggtaaaggtacttataggttgtacaaagtatagtttggagaaattaaaaatcataattgattcattaaagaaaaaataagtcagcattccctgatatctctatagttgaaaatggagagaagctctacatgggcatatcggcaacctccgagataaaaggggaagaaactatgttcttgaagatgcatctagaaataattttaagctacaaaatgtatagtatgtgcttgatattcataagaatcaaatatctggaactttgctgagtgtacatgggttcaagatgatgtttgaatttaaaaaaattgtactcactaaagttggtgtttctatttggaagggttatgtaaaagagggcatatgaaagatgagtgtaatggttgttaagacaagtgctattactgataataataaagttagtacttcttctgtttaccttcttgagacttctaatttatggcatggtatactaggtcatgttaattataattcttttcgtagattaattaacttattaaatcatacacccacatttactattgattcgaaacgtaagtgcgaaacttgcgtagaaaattaacctggtcatcgttcaaagtagttgaaagagatattgaaccccttgatttaattcatagtgacttttgtgatttaaaatttattcaaacaagaggtggtaacaaataatttatttgtttcatttatgatagtacagagtattgttatgtgtacttgctaaaaagcaaagatgaggctatagagaaatttactctctataagcaagagattgaaagtcaaattataaaaaaattaaggtaataagaagtgatcgtgatggtgaatatgtggaaccatttagtgattttgtgcacaaaatagaatcattcacgaggtaactgtaacgcccatatttgaaatatactaaatttgaaaactaactttaatatattataattacttaactataaagaccgggatcccgagttataaaacatattaaaaaaactatatttgttattacaaaaccccttgaagatttttcttttaaacaaatgacaggaaacacaaaatacaactcaaaatattggaagaccgaaaccctccaggttgcactgctgcgatatgtacaatcattgccgagctccatctcactgttcctccagcttagcttttcctttacctacacagggtacaaactgatgagtcaacaaactcagtaagatatgcaatacatatatacaagtaatgcaagaccggctttatgcttaagccgcccagagctcaacaaccgagc

SEQ ID NO: 304453 - DNA, 1009 bp, Cannabis indica
aattatattatattaataaaataatataataataaataatatatttttatagtgttatggttagtaaaaaattaaatgttaaaatagtacaattttattcttgatttaactctaaatatatattttactattacagttttcctataaatcatatagaaaagaaatgttagcactatctacaaaaaatgctcactatcacatcacttcatctacacaagaaacaataaagtatttggttctacacttcatatatcccattcattaatcatagctatacattgaatacatggcatatatatatatactttcagcggatgtattcgatacattaagggggtcaggatacgttaacaatttttaatcctaattacccttagatcaaataacttctttcatctaatctaacggttgtcgtaaatcacgaattatattccgtaaaagtatattacgggacaaaaccgtgtccctatatatggaaatataattgcgtcggtgacatgtaagtatgaaacatcagcctcagttttgggtagtggtagaggcaagctgacattgggcggtgtcataggccataggccataggccatctatactcctctatactatagtgtgtagtctagtttatggtttttggtgtagatagatctatctaataagagaagaaagagaaagagaatgtggagctaattccaatgagagtcacatacatctgcacaaacttgagtcagtctgaaaaggattgcaacgcacaatcattatgaccccttttgtcactatcacaacaacaaccttatttaccttaaccataaccaaacacttgcctaattttgaacttaatttgaatcactccattcataatataataaatgaaggtgtaaccaaatactttttctagggtaagggaagtgtactaaatattttaagggatgaatatcctttttaattgtaaacatttatgactttgagaaaaattcactttaaatctctctctctctctctctctctacta

SEQ ID NO: 304454 - DNA, 1290 bp, Cannabis indica
ctttcttcccaacctttgattcgaggctgcctgctgttgttgtttctgacttcattaatgaggaacgacaatggaatgttcctttgcttaacagttgtttctcttcgctagatgtggaaaaaatattggtaatctctatcagttatttccccagcaataatactttgatttcacatcacaacaacatagggattacacaatacaatcagattaccaccttgttgttgctcttgatgatattgctcatttctcgacatcttcgtcaacaacaaattggtggaactatttttggtctttgaatcttccacaaaaaaaagttaagatttttgcatggagagttctttataatgtagcacatgtggccacatcattagtgagaagaaagatcattacaaactcaaattgctccatctatcatcgggcttaagagaccataggacatactttatttggctgcaaatatgcgcgagcagtttggcgctcttcgaaactggttttgattggaataaattgtcaacaatgcacaagggtgattacttagcttatatgtcaactatttacactaaactagaaatggatcaaatcatttgcactctatggcgtatctggactgaacgaaatcgtgttgttcatggtcacattgtccaaccagtcaagatgttagcctccttcgcaaccaactacttgcagaactatatctctgctcaaactaagttcagactagctgctactcgccctcctcaacaacaatatacttctagcagtgctcaacaacagcctcatcgctccactgaaccaattccatggcagcctccatcgatgaacgccataaaacttaatgtggatgctgcattggagtcggtggctcgtgattctcttcgccaagttgtcgctgccttatcaaagccaattattaaaaatttcgcatcgcgtgaaaatagaggccaaaactttatttcatagtctaaattggattctataagtggatgtgtcgattacacattgaaacagatgcactattagatatctcttgtcttttatcatctctccttagtgtgtctatttctcatgtaaagcataatgtcaatatggctgctcatgggttgcttagatatactttacagttagatgaagcttatttttaattgaaaaatatccctccaccaatttactgagttattgtaagtcatttatccttttatttatgataacacactatttattattgggaaaaaaacaggaatattctaaaaagggaaaaatattacaacaatactgtgggccggccca

SEQ ID NO: 304455 - DNA, 1331 bp, Cannabis indica
attattgttttattttttataatttttaaattattttttataatatttaaataattaatattatatgaactaccaaaaacgtgcctcgtgtacacgtgggtaatccaccatgacacttaattgaaatttttgaacgaaaatataaaaagcaaaacagaatgtgagtttggtaagttttaccgtcaaaaaattaatttatgtaattaattagtgttaaaaaaataatgttaaaataattttaccgttaatatcctattctaaaataataacaccatttggcatcgataagtcgtaacacaaaagcatattccattacaattttatcaagatccattgatcagttaaagatacaaaaaaaaaataaataaataacaaaactctaaaatgtgaatattgtagtccacaaaagattcataaatgtgacttacaccacctttcttcttttttttttaaaaaaaaaaggtgtttacaaagctagatccaattcaactttaaataaagagaaatactaacaatattctcattgtctctctctcttttatctacactgttcatactattacaatttgatagaaaagtgttaaaaaggtaaaaagaagaatattgttaagaacctcttttaaacaaaaatagcacaattaaaatcaaaaacaaatttagtaaactggggtgaccacaacattgtccaagacaggaccacacatgtgtccataatcatgaagcttggtatgatagtaagcactataaaatgttattcttgttctattagaaattgctttgaacttaatgcttgcagttttaaattgaccttttccttgtgacacaaaagggaccttaagtgtctcatgagctgcaaaagcctcaaccatcatagatccatgacaaccattctttgcatctccaattgtgaagctaagtttgtacatcttgttggtgacggttcggatgatttgggcaatggcactttctctccccgcgaccaactcaatcgcagcgagccctgatgggacagagaagtgttttgcgtcgatgaatttgactggcttgagtgactcaatgatccatccgggaagtggtgaaattaggtcttggattttgggtgagagtaagattcctgttgagaagttcttgaatacatgtggtccattttcaaagcctccatttttcaccaagttacctataccaatacattaatatcatcacatgagcacacaacatggcctatgctaataaattttggatccaaatctaacttaagtacatcaattttaaaattaaaatccaaaattttctctcaaataaatcaacacactaaggcgtttggttgggag

SEQ ID NO: 304456 - DNA, 2489 bp, Cannabis indica
ttttttttaaaaaaatataaccattttgtgggatttttttactattttattgtataattatttaattaaaagaaaaatatttactttttttaaagtgatttttttagcggggttacaaccccacaccataacaagtgcatttgttactggtagcaccacttagatgtagcgtcttacgattatttattgatatttcatacaaattattacactaaattataatggacttgatacttaattgactaataacaatatgataaattaaagggtgctagacaccactagtatttttttagtatttctctgttgaattttgtgaagccattgagggtcttaatcaagttcgtgtttaggacacgattttgataacgataattatctagagtaatgctaaaggcacaaataagtattcttattagtcattattggtgcttaacacaactataagtgtgttttgtaaatctgacgtcttgtaaataattagcgatcttctataatagttattaaattaaattatttggattccaatactaattaaagtaacaaatgttagatggagaagtttattccatttgaaagggtttattatatatctaacagcatatgctaaatgatgttataatcatgttatgagttgtaacattaaaattgtaacttgcattagaaggatatgtaagttacaataaaagtttaatattaaaaaaaagagacatgctaaaagacattagtgatgccaagcatcctcctacatgtcaatgttgttattggtctaatttagtatcgggtctcatatagttaaatataataacttttagggaatatcgctagccaatcgcaaggcgacacattttaagggtgctaggcaccactagtgcccaatagcaatgctcaaaatacgtctcgccataaaatatttacaagaataataaattgtggcataactcccaatacttttactagtaattaatcttcaaattttaatttttgacggtaaaactttcataacccgctttttgttagcatttagtcctttctatctattttttgcagtaaattgccaaggtggattgtcctcgtggacacagtgtacacattacacaatctcattggtcaacatattatttttaaaaataaactaatttaaaattaaaaataaatcataaaaaagacattttttagaagaaaaaaaatactcctcagcctcattaaaaaaaattaaaaaacaaataataatattataaattcaaaaaaatcattacacattttaaaaaataattaaaataattttgaaaaaaaccctaatagccttcacctgctcaactccctactccacgatacttaattctcatctatttgccttcacctgcgcaaccccctgctcgacacatttaggtcacattcggccaccaacggtccaaacagaccatagaatcgacatcccttgtcttgaaactcaaaaccctgtgcctccttctatataggggtgaacattcaaacgcaaaatcgacaccgattagtaaaccgattgttaaaaaattaaaaaaaatggcaccacatcataaccgaaaccatttgtaaaaaaccgaccacaccgttataaatggcggtcggttacaattttaccaatagactggcaattataaccgtaaccgaccatttaatttaatataccaatctaatatttatatatataatatattatatattaatactaaacttttttttatttatatatatataatcgttattaaacaaaaagttttgtctgaattatttacaatttcaaaaagtttttttttaaaaaataaatattaaattattaataaaataaataaaaggtcatcgatttgacctatcaatcacagtcactcctctctactcacctctcaggccttactcacaaccactcacaatcaataaatcaatttcaatatcaatctttctctctctcagtctctcgtaccactaccactcacactcaacaatacatttatctttttttttctctctctctctcatataattactgggaacgaaaatcataagaaaaaaagagtttgagctaaactttttctcatagtaaactcccaaattagtatgtctcgatctattgtatttttttcctctattcttttttttctgtaaaatttttctcaaaccattaaaaaccgcttataaccgcggtcggttacagtcgattttttttatgttaacggtcagttacggttttgtgaataattacactataaccgcctggtcaatttggcagcaggtaaaaatcgatcgtaaccgaccgaatttcacccctacttctctatatgattgaaacatcgggtaggttgattgggttttggattgaaaaaattgtaccaggacccgacccgttcacttgttgcaggttggcgagttttaggttcacgagttggcgtgtaacgtccccacttcaagcctccattgggcctttacacccacggaatgaatggctctta

SEQ ID NO: 304457 - DNA, 4246 bp, Cannabis indica
atattattaagttggttgccgaaaaactcagtcaacaattactattttattaaataattaaaaataatattttattttactaattaaactcaccaaaaaaaaatcaaaattattttattttattttgaccaaattaacattgctaaaaaatgtaattatttttaattataaattttcaaatggcatatttatttttttatttttaactcacaaaaataaaatatattaacaaaaaaaaaataatgacattctttgaaaaaaagacaaatcttttcttttattctcttcataattaatgaaacatgccataaaactaacaacacgtacttatctagcaattgattcatttaaaacaaaaacaaaaacaaaaaattaaaaataataaaaaaaagaacatttctattaagcataagtggtgcctagcatcatttagacatgttgacttgcggttggttacaaattaatatattaaactatatgaaactgaatacttaattagaccaatgacaatattgacatgtaggagagtgctaggcatcactaatactctttaacatttctctaaaaaaaaaatcaataaataccaaaataaccaatgccaaaaatctatagaagagatattataagtaaaagcaagtgttgtggtcctgctatagataattgacacttataaaacgtgttttgaagatttcttgaggacagtgttaagagcatattactctattaatgttttaaaaagtgtactaaatttaacaaatattaaaaattgtgctaaatttagtttataataaatgaggaacttacactcaatgtgagattttaaaagttgtttacttaaatatagtatttttaggtttgactaatttatatgacattttttttaagtattttaatggtatttgtgtcttttttaattttgaaaataaggcgttaaatagataaagaaaattagatctcgcggtcattacaaaggatagaaacaggtatgcaggatgactccataacatctgcaaagttctgggcgaaggcccatctagccacattatgggcagcaaaattacaaacacgtgatataaaagaaaagttgcaagaaagaaaataattagagagttgattacataaagatacataataatcaatattccaaatatagtgcaatcccttcagcactttgataaccacatctgaatcactctctactaagacatagtcatgattcttgagtctcgtcgtgtccaaagcaagatgacacgccgtcgcctcaccaatcaaagggtcactgaagttaagaaaggacgtagcagcccacacaaccgctcctgagagatctctggcgagggccacaatgcacatggagtctccaccaactttaacatcacagttgattttgatccagtcctccggcgcaggcgtccaataggcgtagccacaagaagaactggggggaacaggtaggaggcataatctgtataacaatgggagatagagttaattacattcacaatattacactgagtcgagttatgtaccttatcattacgagtttttctaaatcatgtccacggcgattgaagcataagaaacagcaatagaggaaaaaggtggtcaatcgactccgcctcctctccacacaatgggcaagtctcgtcatcaatatggattctcctagccagggtattttggaccggcagagcattcgagaggatacttcaccaaaggattttgtgcctctcaagaactttagaattctaaagtttgttccataaggtcggtgccaccacacacttggctcgcctattcttaaagtcaaccttgcttattattattgtgaaaaataataaacaacacaatatgataactaggcatgcatgcatccaactttttattcaagattaattgggaacaaagcttagccaaccaatggattggcttaagcagaatcatacaaatctcgcaaggagatgactacacaaacaacaaatcaaccacacatataattaactaggagagtacaaaactcaagacatataccagacaaacaaagaaacagactgcgaaaatgacctaaaagtcaaagttacagaagacatagagtgtgagcgataaacaccattattaccaccaagccaccccaacactccgaggaagaaaggtgtcagcccataatttttcgaacatagaccgaagggtaataataattagttatcatcatcttgtccaacttcaggtaaagatagtagtggtgttgttgttggtttttctatcttttcttcgacgatattaaacacgaggttgaacatattgattcctgtatacatcccatcatgcatggtctcagtcctaatgtgcccatttgaaagaacatcatgttgaacataagagaacggaacatcacactttgcctgatttgttataaggctgactgttgatctagtccaaggaggcacagtaattgtatggatattctggattgactcttccttagtttcggtttcgccccatgtataaccgtacgcaaattcagtggacatttcgacttcccattggcttactactggaagacctattttgtatgttactctggctccaagactgaaggaaaagttgttactgaaggtactagaacgtgacgacgtgtgagtaaatgagcttgataaagtggtctcacggtcagtgttgttgtgggaagttgcgctacttgccaaatcgatgactttgtcgtcgtagattctactatcctttaagcgataagtaatgtttctgatctctctcgagatgaccctcgtctcccgtacttccatccttgcatcgtcggtgatgttgggggcgacggcgttgagacaatctgtcttgcggtctgcggtaagagccttacagattctgtagttccccaagtttcgtaatgcaactgtgctgttaccagttttgactggccagaacaacgtgtctatattgttttgtaagccagtcaagttattctgttcatcagaatcagcctaaatccagtttgggctgcgtctccaaaattttttgttggagagagattttatacgaacataaccatcatccacagtagagatctcaaactcagtcgtgtcatccccgttatccttgtccacaaactgcaggtaaggatgtcgttggatctgacgcagggcgagatatttctcgtcctcagcgagcttaaaagacacctctttagggaaaatgacaagcgaatcccagtccaccactaagaaattcttcaccccataacctccgattccaatatgtcttccgaccaaaccattcgcgtaaggctcccccgcccacgtgtccggttcaaaggaacgctgtcttggggacataaatataaaattcttaccaccaaacctattatcaagcttgaacatggtacatgaagaagaggaggtgtcttcttcgggttggtcagctgtcgccacaacgcgcaacctattctcaacattattactaggttcggtgtctactatgaggaagtatttgttgttgtaagagctgcgaatgtgaacaaagtttgaatctgatttggctatctccaattcaaactttacaaaagggcttgtaatgtctgttccatcacatttcaagaacccatcaatcaccccaactctatcactctcctccttgcttaatattctcacgtatcgctcactgttggtatgcttcagtactacaaatcttggcaacaaagctggcatttttatataaatatatttatgatcttctattaaatgttgtgattgtagtagaagtagtaagttaagttgttgttagtagtgttagctatttataataattaagaaaaatctatggaaatattttgccatcacatgcaactaatttttcacgtgcatatatatatatatttataattataccgaccctccaaacaagcaaacaaacaaattaccaaagcaatcaaaaaccattttctttttttctttctttctttttgtcatttttctcgatcatgcattatcatattcatttctctctcttatctatatggtaattaattattatggcttcacacatgcaaaacgcgtttgttttctcaattatttgctacgtacgtacgtatataaggaatcttgtggtggtccatttttataagcctttttacactatactgaaatttcacttttttaatttttttattttttcattttgggctgaattttttttcaaaatattgtattttattatcaaaaatactgtgtaagtt

SEQ ID NO: 304458 - DNA, 2408 bp, Cannabis indica
gcctttgagtgagactttcctaatctcttttccttgagctatgatatgcaccgttgttgtatcaattggtatttggaatctagggatgtcacccttgaatataaatttcccctattcctcaagccttgaatttggaatctagtcgtgcctgaaccttctttgtttatcttctttgaaaatatcattgttaaaactatgcacattttactctattgtctttcccaccaagtagatgaccttgagtttaaattttactatctttccttcagtaatctaatatttgtttgatgctattgttatctcttggtgtttaagataccttcataagcttttacctctaataattttatgatgtctctttttaacttcttattgtggattctattcattacactacactcctttttatatgatggcatcatcctctccagactcatttctataaaaaaacttctctctaaagtcttcacgtacaatattcatacttcttgccatctattttatgagagtgtaaattatagaatatccaacaagatagtacttgctccttaaagatccattctttcatccttcttaataagttagtttcgtaaaatatcctatcccactctagaataatgtcaactattctaagtcattccttacttccaatttgttgtgcttcatttcataaatatgtgcggagattgattcttcaatcgttcgtagacaggtgaaagtttatgcgtcagtatttggttggaaactggtacatttcatcatgtgcttcaagttgcactactagtgctgacaatctattgtgttgagcatgagaaaactctttaaccaatcgtcttagttgtgcttgtcatcctgctaatgcccctatcagatcgttagccttaaatgctattgggttttactaaacatcaaccatctatggattagcggaacaatacatccttatgccccacctttattagtcgttcctctcacattgattctaactgatcttttagttgtaattgcgagttctagtttaagcctaaacttgagaaacgattgatttaatagaatcaaatgagtttcattctaagtagagaaaattacatgtacatatctaaacttatcattgtcaaacataactattaatgttctatttatcaaacaaagtgtgatgaactcctaatataatttattctaaattttcaagaaaggaacacggttcttcctagttttgattaaagacaataaataaatctaaaacctatccatcttctttgtaaaaagtgtaataaatcataagggtgaggatactcttgatgtctctaaccaccacttcaaatgaggctctaattctaagaaatatatttaacaaaaatctgtgtatcacatataaaactattaatggtaataccaagccaattaaaactaacacttacattatagtgagagtgatcttttcattcttctgtatgtatggtgtgagtatctttcaggctaatggactatcggctctgataccaactgtaacaccgtaatattttatcttattttacaaaaatactaatttagatgcattaattgacaagattcaaaactgtttcaaaatacgcaatgagttttataataaatatgaaaaagggcgaatgatcattaatattaaaaacaaaataagtagttgagtgcggtttcaaaataaatttacacatcccattaagctcatattactttactatataaaaacaaaaccaaggctccaccggcattttggactgtttgctcgtccatagcccctcgcagtatacatataagaactaacccagctcatcaaacttacattcaatcttccatgtctttaactgataacaataagaaataattctatacattaaaaattatattacatgtgtccatgctaatccaaaatcataacatcatacgtagagatcataagtcttatataatactcatagaataaacataatgctatgaaataatcatatcacaattatatcataccatttatcatatcatcatcatatacatcactcagatttatattggccctacaataacctgggcacatttagccctacccttgctatagaataaggtatctctacattcaacagcagtatcgcccgattataccttagcataacaatgtcatacacgaattagataaatgcaggatagagtatctctcaattaaatgatcttatcccgtatcgtaccccctaatggcccctcattagtacatgaggcattagcatacaaacatagaacaaacaacatacaacatataacgtacactatatataaattataccaaccataatatacattgaaaagttcaaaactagaggatagtatcttcttgaatgttttagaaaatttaattctctttccaatgacactaaaatctt

SEQ ID NO: 304459 - DNA, 3142 bp, Cannabis indica
aaaaaaaaaaaaaacaagaacacagagtgttcgttacttcgtcatcttcttctttcttctttttcctagagagagaaacggactgactgaggaaaatactttagagagagatcaccatgggcaaaaggagcatgaagctccttaagatccttgtccttctctttgctttgaactctctctccctatgcctctacttcttatctcactcaaaacccttcttctccagtctccacacccataatccaaatcatcattctttgactcttaacggcctacccttgactgaaaatcaacagcttcttcaaacccatccacggttctccaagccatggcctattcttccgtcttacctcccatggtcgcagaccccagacgtagcaactcgctcctgtgaggcatattttggaaatgggttcactcgccgcgtcgatctgctccggcaagaggccaccggttccggatggtttaggtgcttgttcagtgagactctcagaagctctgtttgcgaagggggggcgcttaggatggtgccggagaaggtgaagatggctacaggaggagagacgttggaggaggttattggacggtcggaggaggatgaattgccagaatttgaaattggggcttttgagctcgatgggggtcgaagatattccggcgagaaaaaggagcttgcgagtgttgaggttttggagaagtacgtgccagaaggagaggtcttgaggcacaccatgcgtaatttgattgagtctatcaggatcgttccggctaaggagtttgaatgcaatgaggttggttcaagttttctgatattttgtttctggcagttggattttttcacgtatatatgtatgtttatatacgtttactggatcctgggttgtagttaaatttgatattaaggtgagaaaactctccaaattcaaagctttaactgtgaaatcttgagtagaattgagtgatctggcttgagaagccggtaaattgagtgaagacctattaatgctggatggaaataagataattaagtattaatgtttctgattaatggggattacattttttggtaataatggaatcttagcatattttaagatataggacttttatatcatatattgaagtccttgaagaataataatgagcataaatgtatgctcttattgatttgattccttaattcttgtttatggatttaaggttctgatatggacggttctacttgcagtggattgaggagccaacacttctgcttacacgctttgagtatgctaatctttttcacactgtcaccgattggtatagtgcatatgtgtcctcaagggtaaccggcttgccaaatcgaccacatttagtgtttgttgatggacactgcacggtatgtgtgcaacattctaagttttctcagtgttatgaattggaatattggtgtatgacttttttttggttttgcattaatcttgatttgatcctgttctcgttcaccaatcattttctgctgagaagccagctaaattcataattgtaaattgactgcaatgatgtgaagacatggttagcaaaaatttaaaggagaagtagagtcgatgcttacgacagctgatattttggttgtttccatacaattatctcgcttcactattatatatctttcatcagtagtagtaatgcttggcttcatgtaattttcaaatcggagtttacttttatccttcaatcatgtttgtggacatatttcaggcacccttggaagaaacatggaccgcattgttctctagcctcagatatgccaaaaactttactggcgctgtttgtttccgtcatgctgttctttcacccttgggttacgaaactgctctattcaggggactgaatgaagaaatagattgccatggtacatcagcacaagatctgtggcaaaacccggataacagtaagactgctcgattatctgagtttggagaaatgatcagagctgctttccggtttccagtgaatagacatcgtgctgacggatcagcttcaggttataacatcctctttgttcgacgggaagattatttagctcatcctcgccatggtggtaaagttgagtcgaggctcagtaacgaagaagaagtgtttgcttctttaaggagctggatttccactcgtagggattgcagaataaaccttgtgaatgggttgtttgctcacatgtccatgaaggagcaagtccgggctattcaggatgctcatgttattattggtgctcatggtgctgggcttacacacatagtttctgcactaccaaaaacagtggttctggagattattagcagccaatttagacggccacattttcagttgattgcacaatggaaagggttgaaatatcacgccattaaccttgagggatcttatgctaatccacaggttgttatggagaagcttagcgacataatgagaaaccttggatgctgataagagttcgttgtgcacctatcattgagcatagttcttaaactcttgagatgtctcttaccacaaaatcggtcatttccaagacttggatttttgctcttgctcggatgtttgctcgatagtgatggaatttgttcttggaaacattagcaactcaaatagagaccaaagagaggcggcctagtttgttgattgtatgggcatttggcaattggcagagaactagacctagaatggtatgattcatgaactagagatgaattgttcagagatttgtgtgttctatctaattgtcaaatgcccacaaacgattgttcagttataaaagtataggttgatgacaatgacatgataggaatgatattctttgttctaaacacaatatttttgtggactagtagataatgaaacactgattaatcattaatgattttcttattttggatagagtgctaccattgttatcagtctttccatgtttttgaaacacttaacttttaattgggaaatttgaattaatatgtttacattagggctgaacatttatacccgcaaatccgaaaacccgaccacccgccccgacccgctaccgaaaaaagctgaaaattttgaaacccgtgtggtcgggtcgggtctaacccgaaaatacacagtaagggtgtcgggttcgggttttaaa

SEQ ID NO: 304460 - DNA, 4025 bp, Cannabis indica
aattactaattagcctattttttattagttcacaaagaattttgatttttctcagggactaaatgttaaaaaatcaaaacgttgaaggattcttagtgcaacaaaccctaaaaagaaaaattgaatttcatgtcgaaattggtttaattggagttgtaggggaaatattcattgctccactcccaacctcacaaacagctccagattttacagttcttgagtcactcttcacctgtgtttcaggtatggttttctcttttccgtcgttttcaacaaataatcagaaaatttttgtgttcttcctttagctgaacatattttaacaattaacttgtttcggtaaacattttatattgttcaatttcttatagcatacaaagttttgggcaagaatgaattaagaatcggagaacattattttggagaaaaataatattagagctttaagattaagagaaattccatcattgggttttaaagattattaagcttttgtatgaaagaagggcgtccatgcaatctatataggcaaatgggtatttgattttctacatgaaaattggaaaattgacaatttttattgtcatcttggtcgtggctgttttatttttccagcatccattattgggttgtagtgtgctatatgtatgacgaatttttttaagcttccatgcattcttgttttccctttccagtaattctgtggttttgtttattgtgatatgtattcttcttagctttactatcaactatataccatgaagaggccaatcccgtggagtgaccatgttgatattgatgttgatgttatatcatcagatgagtcttctccttcagactcagatgtaaatgtcagtaactttcaagctccagctcccaaagaaatgacatctgaaggtgagatcatggacttttaatgatataacttcaaaaatgcacttatatgtgaaacttctatagcatcaaatatgcttttttatgtttctgtacatctctggtttttcatgtctcatgttcaacacatttacttttttttacttgtgccttgagttttttgttaggaatatctctgttattgtagaatcttttttttgaataggcaagtctactgaaggaaaatatcaaaagctatgaatgttattttttgaattttgccggttctttagcttaaaatgaatgtttcttccttttctatcggtaaacattctatttgcagaagattcagtgatcaaaagggctgagatgtatcaggaatacatgaaacaaatcccaattccaactaaacgaggctctgttattccatttatcacatggatgggattaggaaaatccatcaagcagctatatagacagcctttacattacctcaccaatgttcaactaaagcaatgggatcgattgagggttgacaatgaggatgaagacaagcccttagataccattattcatccttgtaaagctgaagccactgtttggctccttgaggaagttcatcggcgaacagtgtctcattatcatgtagctaagctctggcaatcagatccattgcaccatgcatttgttgattccattttcccccagttgtgaaaaatatcatgtctttagttgtaactggccttttgcccttggtttgcagattttggtcttaaaactgattgatgaattttgggatgaaataaaagccagtagtgttattttcttttctggagtattcatttcacttgaagcactgtattttaatcattgtccattattgagccaaaagaaaggggcatttaatagtggcaaagatggaacgaaatgctctcatgttaatgttcatcaagcataaacaacttccatcaatttgacatggttcttgaaaaatggatggaataaccaaagaagggagagccagaaaatgatccaaaatgtaactgtcagtattcagataggttttgatttatgctatatcagagccaacaatggaatttagtattgagccagttacaaagtaaagatatcttttcttttcggaggataaaaacatgtattaccaataatcattacaagagctatgtccgtccctgaaaaagtgaaatctgtggttcattaaccgcacgaattggcattccttgacctgtggtgataataggaccataggccacagcaagtttctcagtctgtttagatgacatcagccaaatcaggttcatggccagcatctctaactctaaggcttcagtttatatcttccagcataagtgaaatttaactcttctctgggtgactcatcagtagaggtgaactcatgaatagtttcattaacttctattggcttgtaccgggcactttggtgatctctttctccttccaatgcagccttacttttgttattattagagttaattacacattgttaatgtgtagaataaattaccatatataagataaattgactattcctctcattgctaattgattttgaaatggaacttcattatcttatctcaaattctaacaactaagactttctttaagctgcatataggttgccattttgatacttgtatgtgttcaagaaagacccccaaattacatcattaggttccattggcatgctcagctctactagtagatcatggaaattaactactcaatttcaatttctttttgcaaaattcattttgatcgaattaattttcttcaataatgtcaattaaatcagttaacattactaaattgcatatactagttttttaatctggccgaacagaatatcgtggaaacaaatatacttttttgttctaaaccaaagaattatttccgtcgatatatataatattgagatagccataagctacgataacaagtgatcacacaaaagaagagaggagagcattttgatctaaagcaaacgacaaataatcttcaaggacaatagatcaagaaaccacaaaacatactaaacaaccttgttacttccgtacgtctttattcttattctctttggttattattattatttatttacaaaacaagacaaaaagaactaaacagctgggtgccccatacatatgtattatgtgcacttatatatatttatattattgattggtaattaagtgttgtatttagaagagtttccagcagaaagaagtttggatatggcccttattgtatttggtgtagtcctacaacagcctccgaatatggaagccccagcctcttgccactttcccacatacgacacaaaatcttcatctaccaatccattcgatctctgcattaataaattaataattacatatccttaaaaaaacattattattattattattatttattattaagacgatctagtactgaaactcactatccattgcttgctttcagcgtcgtatgtctcgccactgttgggatatatcactattggtttactagatacctgtaataataatgtccattaagaagggccaccattattaattaaacataataatagtaatattgaaaacaggagatgatacaataataatggtacctttcgaatagatgaaatgagagtagtgatgaatctaggtggagtgcagttaatcccaatggccacaatttttttgcaacaatccgctatggctgcgcattccatgatggaatccccactcgctgcattgattccatctgtcgaactgaatgagatccaacctggaatatctatttcttcttcctcaataagttctgcataagcctatatatatgcacatatatacaaatttgattaaaaacaattgaattatatataataattactataagctgtaaataataacctgagcttctatcttattgggagttgtttcaaatgcaataagatcagccccagagttagccagaacttgagcccttctcctatgaaaatctttcaacttttccacacttacttcatcaccatatttcccactacaatacaatcataataaacaaattatgtgttaagagtttatactagggtagttttctttaattatatatcatacccctacacc

SEQ ID NO: 304461 - DNA, 2988 bp, Cannabis indica
cacacctactcaaaatattgggaagcaagttgcttaaagactttgacaatttcattgttgataagagaaaaggttgtcaattgaatgaattgaaagaccttaacataggaggtgatcttgacatcagcaacttagaaaatgtgatcatgactccaattgaagctagatttgctaatcatcagccaaagaaaccttaaggattgcgtttgcttggaacaacaatgaaaacatatctgaagagaatgcaaaagacgaacaaagctcttgctcctcccaccaatttgaaatggttagaaattgacacttacaagggtgtccatttcccatcttggttctgtaatgacattcttggaagtgttgttcgcatcactttaactgattgccataactgcctagaacttccccgttttggcaaactaacatctcttcaacaacttacaatttctcattttggaaagattcaagacttgcctactgatttcctctttggccttaatgcgctacatcatttagaaatcagtagttgtcgcgaactcaagtgcctaccagagggaatgtttcgagattgtccattgcagagtattatcatatatgattgtaaaaagttaagatcactatctgaaagttttaagaatcttactatgcttaactctctacaacttcataattgtccagcgattgaagaaggctttccaagtggtcttaaccatctcatatctctccaacttctaattataagagggagctatgatgctcctcaaagcttggctattctgccagaggggttgcagcacctctcctcacttgaatatttggaattatcttttcttagggagcttgcattgttgcctgattggcttggaaatcttactacccttaaagagttcaagatcaaaggttgtccggatttggaatgtattcctatgagcatgcaaaggctgacaaacctaaagaaattgtttattgtgaagtgcccaaaactggagcagaaatgtgagaaggaagtaggggaggattggtacaagatatcccatattccagatgtgagagtagtgagataattgaagaaggtgttgattaggtatgtaattgaaagttgtaacgaagtcatgagatgccaatatgatgaatgtttgtgtaaataagacttgttaattgccttatattattagatacaaaaacatgcttcaatgagtactctattgctctaactaatgttgcattttcatacattattatatacaatcatattttctttgaggataaatctggtttttgatttcagttttggaacttaatgctttccccaaaggtcaagaatttgttgtggccagctcgtttaggttgcctttcaaatcgaattggagtgactttgggtcgtgctggtgagatcatatggtgatctggttgttgaagctgggatgatatgttgacaaatgtggtagctgagaatttgtgctcattcatttctcattctttatagttggtgtgtttttgagaagagagaaggagagagagagtaaatgaatgaagagtattttcattactgaattgctcaaatatatacaagacaagatcaaatgaagtaaaagctatgctgcaacataacagaatacaatacagttgacaaagccaactaactaacaggtgttttgttggaatagaaataaaaattcagcaataaaattagaacaaattaatatatgtaagtgtgattgtatgaattgttgttgggtttctatcaatccaattgtaatgacacttgtattctattgttttgtatggttggtttagattaggggttactcaatagtcctctcataacatattcaatagaattattttccggacaatctgtaaactttcatagtttacattgttaaaaataaaattcaaacaattactaaaaaccaaaacgccaaagagtgtgtaccctcatggtttttttgccacaaacatccttaacagctacgggatcttccaaattgggtcttcacaactctgcaatggtgaatttgatttaccgaattccgaaggattttcaaggcatgaagttggaaatgaaatgttcccatgtttgtcttctttgcatgtgtttaaatggatggttggttgtggtttgaattcccatccccaaaagattgttcattacagagaatattatcatataaactattgtataattaatgttaattaagatcactctctcaaagttttcagaatcttactatgattaactatctacaactcagttattgtcatgcaatggttgctctgctcctcacttgaatatttgattggagctttcattggagagaattgacacaatacatatcccatattccacatgtgagagtactgagatcagtttggtgaatctagaatgaagctattgccaatttttttaatttggttattttcttgaataagttatttgatgtgggttttctcttgactcccacattgctaattacactctcttgtttgggttttgagtattatataaattctcttatatgtaaattttaagtttcatattttcatagtaaatataatataatattatgtagcaattttgagagaaaaaatgtagacatagagaaagctcatcatgtttcttgaacctcagtattaactcgctaattttttgagataaatgagtttgaatttaccaaccatctttccacaaaatttctgaaaaatattttaattattgaaaaaaaatcaacatatatagttaaagaattttgaaaatctaagtcaaacctagaacttctttggtgttagaggatattttcaggtagctgggcttcaaggtttggtctagaagttcaacagctgtttttcttggttttttggttgtggcctgtcgagagaattagagtattgtgcttagtgttagactatatatatagtgtatataatatagcatatacaatgatatgaaaatgcgaaaaatataatgaaatcatatcaataatatatgca

SEQ ID NO: 304462 - DNA, 1540 bp, Cannabis indica
ctaaaaggaatcagtattaggaaagggtcttggttattctttgctaatgaattgaatgtgaaaaagttttttgagttctgtacagcccttggaattgtttgtggctgttaccttgtagaaatggcatagtcattgatccatgtgcctgttcaaacattcttgtttgccttctttggcaagagaatatattttccttgatttattttcttttgtaattgaagaataattctgttgtgattttgttacaggatgatgaatttgtagtcttattagagaaaggaattgtccctcgcactcatgatgttcgtggatctaactattgtttaatgaacgtctttcctgaccgaattcctggtcgagctataataatttctgttgtatgtccaatctctaaatacttaattgattattaccatgtgctgcagcaaattcttatgtgtggcatcataagtggctaaactcttaaatgttggtgtagattgacaatcttcttaagggagcttcaggtcaagctatgcaaaatcttaatctgatgttgggacttccagaaagcacggggcttctttccccggctttatttccttagcattttcctctttttatgtgtcggaagaaagagtaagcattctacatacgaactaaaatctccttatttcctatgtgaataccattttaatatttatagaaatgacacattgattacttacagtaacaccctatgtagtctagaaaagataaaaagcgaagaaatagttcacatttagtataagttgaacggtcaaaagtaaaagaaattgtcagatttacctaatttaagatcggtgaaatgtatcagttcatgggatcttgttgttgtagttttgacataattcagataacatgttaacgtcgtctttttttaggctcaatcatttgtattagcttctcctttaccttcattttttttaacccagaaagccaaatgagaaaagaaaatgttctcattttatcttcagcaagtgtttcatttaacattgtttttgctctgatattttcctgattatcacagggaataaaagatgcggaaaccctaccaagtccattaattaagtttaattttcagctagaaatcaatatttccagcacctatcactacttggctacattttattttattttatttgtattttgataatattagaaagtataatttgttgaaattgattatgggatgttatgtttgctgacatgttgtcctgagattttacgatttgaattttggtttttacgagtaaataaatataggctaatatactgatgcatacgccatgcaacccagaaatcaatatatattagaaacggctgagagtttaattacaataaaacattattgaagtaatcaattcattcagtgaagtttctgaatatcttaaatctacagagcatagagataaaatataactgttgaatcgttttttttttacaatctatgttattttattcctttattaataaaactagtaaagagaataaaaagaaaagaaagaattagtcaggcaaa

SEQ ID NO: 304463 - DNA, 1835 bp, Cannabis indica
agggcataaaacccaacagacgatccaatggcaaaatggagaggttggtttgcattgagatctgccatgattgtagcaaaatcttgagagacaggaaccatgtatccggttgtctcaatagtagccattgtgctagcaataacaggggggatcgtaataggagtggatgttgcaattgttcaggaagagacatgacattattgatgtgagtatttggatcagagatgatcgggtatggcaaagagggggatggctaatgagaagggttgtcaagatccacaacatttccattatttggccaagccgagaaggatggaggggaactagatccaatatggccacaggtaaaagagctattatgggggtgtatgtgccatgtaacatcccaacggtgtggttcttggctgatgaaaatgttgaatcccaaaatcagatgttggttcattataaggttgttcggagatgatttggtgtgtacgagcacgaggattttgagggggagccagggatatgggattggtaacatgagggcgaagacgagttcgagtactagcaatataaaaggggtttgaggttatgcgaatttttgctcctaaggtgtgatcatattgaagcaagggtggggcagaggaagagtcacacttagccaaaaaatcagggcaatgattcacaatgtgactaagggacccacagaaatgacaaaagtcagggagattttcaaaacgcaattccaaccaaacaggggcagccatgccttggaaagggaaccggttccatggcgaagaggttgagtgacatcaatttcaatacggaccccaagtttccttgagagaggcagtgtcaacctcaatgaaacgtcccaaaacttccccaagtttcctagcaagagctctagaacgtttaagaaaggggatactcgaaacttggatcccgaagggagttgaagtgagcatatcggctgtgataacagaaccagcttcgagaggtgacattacaataagcttatagtcaaagtgccatggctgtataatgagaacacgcctacggtcaccgaaacactcgaattcgaccgtgaaaaaattcggttctttttcaaggatattgatagaaaaacgctcaggccacatttcacttagatgcttttttaaagcctagggatttaaatgacgagtggtcagaagcttgacagcgagaaaagcagaaggctcttctcgattttcatattcaggcaactcagagggttcagagaaagagtggatttttgtttcaattttagtaaggttgagatttgtagaaagtgtattggtcaggtcttccatgctagcaattgatagtgaccaagcaaagtgggatactgaaaggggatcaggaggatatgctatttgaggatgatgttcgtgtaaaattagtacctgatgtaaagccacactttgccttttatagtagggacaagcattgatcagtatctccaagagggaactcccagaagggaataaattcctcatgtcagacagggtaatgatataaaagaaaatagcagtggctcctaattcgaatctaggggttcaagggcgagtatagaggtcacctaaaggggtaggactaatgatttcccaaggaggcgcagaggggggtggatttcctaatttagtatcaactaaggcaaagtggaggagtaaatagggatgtttaatgtagagggataaatgcagaaatgatgataaacccaagtggtaatgaacagatgggacacaaagtgagaagtaatggttgaggtgagagttacctgttttagggaagaaagatgcaatgaaagctttgttgggttttatgcc

SEQ ID NO: 304464 - DNA, 1849 bp, Cannabis indica
tatataattatatataatataatttacataaataatataaagttcaaataaattatatttgtctcgtggtagttgatttgaattttagatttaaattatatttttcgcattattacaaattaattaaaatataaaattaattttgaaaaaaaaaagtgatcaactcattggactgatttattttttttttctttttccttttttagggagatcgcatttaaattttttataatccgcttttaatatttggttgaataaaatatagaaattgtattgggatcatttacaaagctatgttattttttttataaacttcaattaaatttaaattttacttcaattaattaaattacttaaaattttattttttaaatttccacttatatagaaataataatataactttcttttcttaacaatttataaacattttatttttgttggtaagaaaacatatttaaaacttcttattgttaataagcattttaattttattaaaaaaaaagcattttaactatctcgataacactctagctaaaagattaacatacttaaaacctccattacactagtgaagacatgaagagaggcatcaagaaggagatgttggggattgatggaactattggtaatattaactatttgggtcttgcactctttagatctcgaaagaaggatgcatattttaactttatcttgggcagccttgtctccaactctaagagtagaaagtaaaaactattatgttcaaattagttgggcttgctctcctagtgtacatgatacaaacgactaaactctccaagatactcacttctaaagttaatggcatggtaagggacttttggtgaagttatgagaagggaaattatggtcactacttaaaagcgtgagatactttgtgcctccccaaatcttacggaggcttagggttctagaaaataatggagataaataaggctttcttagcttaatggggttggtatctaatcattgatcacaaatctttatgttgcagggtcttaagggccaaacatccgaaagacaagcaattcatgaagtgtgcttataaaaattatgattcttaatttttgaagaatattgtgaaagccagggaaatttataaaaaaggggtctgttaaattgtgaatgatgagaaggatacacaaatctagaaagatttgtggatacaacatggcaaagaattatgtcctaattatgtagcgaaccaaattattgggtttgaaaaggtcttcgaattgcttttagaaaatgtggattgtaacctggtcaagcttcaattcctatttgactctgatacagtacacaatgttttgaagggagtaagcttattggccagggaaagaacaggtgaatttggacaagaaatcaaatagaattttttctaacaaatctacttaactagttcaagctttagatcatgccccctcatacaatggtgccttccctttggaataaattggagaatagcaaagtgttggagtttcataagattttgtggtggagcgttctctccaaggctcttccaattcatgcacttcttgctacgagaatacatattaaagatacctcctgccttatttgtggtgagggagagaaaattatggaacatctttttctcaattgcaacttagccttccacttgaggagatcttctccataggggatcatgctcgttcttgagttaggtgctcaggtttaggattcgataaaattcttatgggacttgaagtcgaagaatgtcaatgtagatgagttttttctccatgctttgataactctagaaattagatttatttttcacatttttttaactaaatttagctta

SEQ ID NO: 304465 - DNA, 2936 bp, Cannabis indica
acactttttatcgatcaccctttgagaatcattcttatccacttcaatccatgagtatgtgaaagacaagtatgtgaaaaatgttcatttttacttttacttttgtttctaagaatcgtaataagactctttttttctttttgaattataatagatttttctctttattctttctactccttcaatggtgcaacaaatgaacaaccagaaataaactcttaaatttacaacaattaattacatgtaccttgaagatgaaataaactacttcattatgggtcataattacaagtattaagatattataaaataaacaacataaaataacgaccaaaccgggttgtaggtatacatgcttcaatttataatttaaagatataagaagaaggaatagtatcactaagagggttattttattttagttataatggtattcaagattaataatcaaccagaactgttccatagcaaagtaccatagatgatgaccaggtctaagaaaattctcttaatagtaagactattcccctacattacatacaacaaagccttaaattttttagtgtgttactcgtatgttttcactacccttcaattgaacttgtgccttcttcttccttgattgctttattttttatttcaattcttcttctgtggctgcaatgtcctcctcttccttagcctcctgaagagcttgaatcaagttacaaagacatctcttgggatcatcagtaggcgatttcggcatgagattctcagcaacatcagctggtgtaatcttagtttccttaatcaaactctgaattgtatcaaacatttgatggttttcaagtttcaaatagttcttagcaagaactttgaacccttcaaagctacaataagaaagctcaatatgcttgtccattctacccctccttatcaaagcagggtccaacttctctacataattagtagtaaaaacaaccaacctctcacccccacaagctgaccaaagtccatcaatgaaattcaaaagaccagaaagagtaactttactactattaccattgccaccattgttattattattattattattattattattcccttcttgatccttattataagcttctttcctttccttacctctctcataatcttcccctgaaatttgctcgcctttcttctttctctgaccagtaagatcaagagaacaatcaatatcctcaatcactataatagacttaccagtagtctcaatcaaaagcttcctaagctcagtgttatccttaacagcagtcaactcaagatcataaacatcataactcaacaaattggccatgcaagcaatcatagttgatttccctgttccaggaggaccataaagcaaataccctcttttccaagctttcccaatcctagcatagaaatctttgctttgactaaaagtcaacagatcattaataatctctttcttcttccttggctccaatgccatggtctcaaaagttgcagggtgctcaaacacaatatgactccacatagtttgcttaaaacttgaccatttataaccaggactgttagtataaagcttcctctgtctgttcttgactctaatctctttaccttctctaatcacatgatccaaataagaatcagtaattaaatctctgtaccttttgtgaaaactcaccttgtaaaaacgcttctcctgttcggggcaataagacattgacattcctgtccttattggagaaaccgttttgctcaaaacccaccaaactttggcccctttgaactcgtccgtgactcgctcgaactcgtccatactcagtacgaggttagtgctgtcttttcccatctcggccttgagtcgcttggcgcttttagatgtgttggagctcaagtaagcttctatggcggaataagcctcgctccgcttgagccggtcgccggtgaattcgtggaaggagatagtgatgtaagggtagaagtggccggtgactcggtgagtgcatttctcgagaaatcgtcggatttcataagggcagtactggcgaacgattgcccagatgaacatgaagctggctatgctcgaacccatcgtcgtccacatctcccccattgttggaggcatcatcatttttctctgagtttcagaaggtttattattattagtatctggggagttttggtcttatattatttttgctttactttctcgttattaataagctgaaagcaaagcttttttcatggcggttttttaaagttggggaaaatgaaagaggatatgttagtgtttataagctaatcaaattatagagttaacaccaaaccaaaagtagtttcccaatattaacaatatttatttaatagttatattattaataatggaatctgcaatattattcaatttttgtagtattcaatctaaaagatctttatatacatactgcaaaatcagagtctctgaattatattcttgctcgtcaattttcagtaacttcacaaagaaaaagattttatatttttagttattacgtggaaaattatatataaataaaggaatatataaatatttatattcgtacgtaactggtaactgtttttgatatgttaacatgtaatatacacacaatagtaagtagagaaaatatttactggcttccaatatcatcataaaatctgtcagttctgcatctctctctttattggaaatgtacgtttaatatcccatgcaatgtataaaatccctcaatcattcaagtaatattgattggtactggtcttgtaacacgcggtgcgcgtataatcgaagcatttttaactattttcaccataagttgccaacccgaaattgttgaaattctaagtgtcaaagaggcacttagttagataaaaaagaataacaagtcaaatgtcattgttgagacggattgcattttagttgt

SEQ ID NO: 304466 - DNA, 1315 bp, Cannabis indica
cagtatactgtgttaagttttactggtgttctactagtgttttttagttgttctagtgttgttttggattgttctgctttgtgttttactggtgttttataaaaacacagtatttttgaaaaaaatttcctgtgacagtatttttgtaaaaattcactcaaattccagtatttttgtaagtttcctataaactattttcatgctccaaaaaaggaccaaaatatggccccaacatccacggaaaaaattaataaataaatttaattctaattttcaatatatttatccaatatagtataaataattagttgatttggcttagttttactgtcaaaatattgtgttttcttattgtgcttttgagcttgtcgtgctaatttatattattgtgtattttttggctcaaacttatattttttgtaccgtattgtgctcgtgtctctcaaacttatactggacttgtattgcgtcaaaaagtcatacccgcatttgcaatagtagatgcttcacattattattaaaaattttgtttttgtttttgttttgttttttgtttttgtttttgtttttgttttttttttttctacttatatacaattataaatgtaataattatattgtgttccattttattttaatgtaagcatgaaaattcaactttccacgtcaagttataggttaaaaaccatatagattggcgcccctaattaattgtattacttgatttatttgtttcttttatttatatacaaaccaacaatataaaggtgtcaactttaaactttaaaggaatacttttcttgtaaagtaagtgtctatacatacatatatatagcattgttgtaagttttgtgaccacaacaaaattttgaactacgtacgccttactcaaatttttcttttttctttggttcaaacctaacttttcgaggcaattaatataatgttttgtttcttttctttttctaaacttttgtacagattctctattatttgtgctaccgacagacagctatattatatactatagatatatatatatgtatacagtaccaataaaatagtgattggctttaatacatacacctataaatatacagagtactaatatatatataatattaaaattggccttattaaagtaaatcgaatgagaaacactttaagagaaaaatgagtagagatattagtataatttgggtatagtcacaccattaaatatttgggaattattttatatattaattttttaacttttttttttttttaatttacggtttagatttctatagaagttacagcgctagttgcaata

SEQ ID NO: 304467 - DNA, 1367 bp, Cannabis indica
tacatatttatatacaaagctaggagactaggaaataggaaactaccaacaaaataggaaactactaaatacaagttaccctaattcttttacacctaatatacagctaatactctaacatgtataatcacacctaagtttagatgacaatgtgagatgatattgaatgagaaacaaggtgatgatgattttataatttgtaggcactattatggtttatggaggatatgggggaataatgataaagtatggatggctctatatatagagcttatatggaatagggtatgagatgtagagtaatatgtagagtgatggtagtatatgttgagaacttggttgactgaactaaggaatgaatcaagaaaagtggtatttatagactctagtgaataactacacacatatttattgtaaccacacttaacctaagacaattttttaataatcaattaagtgtttaaaggaaacatttaaaatgacacgtggatattcttaagggtcactgatgctattttggtgaatgacgagttcaacctattgtttttcttaagaaaggaatgctcatgggtatacacctcaccaaaattattatagactaagtggtcatattatcaaaagatgctaactaatttcacttatttctcttacctagcacacacatgcaaattactctaaatgaagctaacaaatttatatttcgtataatcctattgattctcttagaagagaaaaactctctctagggttttttctcttttctttctgagctagggtttcttctcattcgccttcctctttctcggctaaggacccagccgccggcctgccgtgcgtctggtgttctctaaccgagagggagttagatggcgtttcttatggtcatggatctctactcttcgaaagggtggaagctggttaggggcagactttcttggggacgcctttggtgggagatcaatgagtttggggttctgcggtcgacaatggacgctgcagtaaaggggtgtcagttggacgctccgaaggttgtagcggtggggcttcgatggggagcatcgtccttgctcgaccgatgctactagttttggggcttcgtggtctacaatggcgattgttcgttggaggctatgaagattgcagtagtgtgtctctgttggggaccgtaacccttgctcggccgacaaagctagttttggtcccctgccttttcttttgggttttgcggacgggctgtggtggtttggccacccgatgtcgatcctcttccgtcactgaaagtttgttggtggccgcatgtttcctcatgtctcgttgttgtggagtctttggttatggttttatttttttgttgttattttctttag

SEQ ID NO: 304468 - DNA, 640 bp, Cannabis indica
ataataataataatgatataatacaattgaaatcttagttttctctcttctcgtttcttgtagttctagggctggtgctatggctaattttgaatgttaagaaacctaagaaacatggtccgacgtctactacggatgttaggaagactaaatccatgatagaggtgttgggaatcaaaccagtagctttcacgaatgatgaagatactctgttggtggagtcaaatcagggtcctctcgaatcgagatcaaagcaggaagtggagttagcaataactgatatgtttactgaaccactgtaacccaaagcctctatgggatcgattagcaacaggaagatatcaaagcagacttcaacttctttcttactgctaatatgcaatgtttcaagagcatctcacaaggtaatcctactaatcctcctgtactacattctggtgctattgtaaggaatttagaaaattctttcaattatgaaaaggagtgaaaagttaagattaccatggaagatatacaataagaggtagctttatgggaatcttcaattgtttgctttgtgcttggagctaatccaccactctcaattcttgagggctttgttagaaaaatttggaaggataaagtgttggaaattatttta

SEQ ID NO: 304469 - DNA, 2237 bp, Cannabis indica
ttatttttcttttaatttttaaataatcacaaccattcaacatgatctagtgattaaatataaatgtaaccataatgggttacatattgatgtaaccattgaaacctcctctaggatattttaactcatattgtggagggattttattaagagctataattttactttgtagttattataccatctattggaagctttttaaaattgtttcaaaagtttgatattgtacttgacaaatcaataaccacaacttctgatatgatgtaatggtaaattaacatgaaacctattttcttggcgatgtatcaatcaaattttataacaatgtgattacatacttttaagcaaagcagtaaaaaatcttaacttgaccattctataacataaggaaacaaaatctagcaaaaaacaaaaacaacttatttgctagggacaagtgaggtatgtcttaataggttaatgtcaaaattacttttggcctattcaaatggcaatttgtcatcacaatcccaaaattgtcaatgacactgcagctgttgttctttagtgtaacaatgttttatgccagataatgcttcattttcttcctcatccatttgatgatgacagtttttagtttgtgttttgtttaaaggaaaaaaaagttagtgcaaagtgccaattaaaccctagcttaaaagaaatttattttgctgttgtccccttgtgccagaagagaaatacaaatacatgcatatatataatctgtattcattcaaccccataacttcatgctctgaaccatatcccactaatgggatgaaattaagaaaggtatgtcagtctctcacaaacaatatgggcttgcgtactttagaagtgtggtaggtcgattatttttagtgcatgttgagaaattggaacaattaattttattaaattctacatattttctctatttataaatgaaatttgatcagtagtgaaatatgtccaactgtaatagtccataacaattattgtcaaattgaacttgtagcaagttgtcacataaatatatatatatatctttatatttttatatattaaaggtggctacttaacgacaattcttgatttaacgatttttttaacgccaagaacgatccttttcatttttttaacagctcttttccaacgtcgttaacctattattcttatgaaaaaaaaatagttaaaaaaagtttaaaaaaccaattgactcttctatttcattcccactcctaatcccaatctcaatcgttttatttcttgggcttgaactttcattcggccggtaatgcttcacactctaaggtgagctttaggacagagatcggtgggcaaaacccttggagatccagcgacgagagcctcagacgagggacattagctacaaatccaagacagcttctcagataattagattgttacgatggagcacgattgctccgattggtgaggccatatcactagctctctcatttcccctaactattcttctacaaatgaccccttcagagatcccaactaatctaagacgcttactgcattctctttgttgctcgcctcaatcaccagaccaccgaacataatctttgctaggttcatttttcctttattcaaaatttttcattttcttgttgcatatgtctatgtttatttactttatggcgaattaattaacctttttcgtcgttggaatttcagggttatgatggtttagttgagcacctgatgagcaaatatggccgggtcaagaatttaggcttagttaggcacattggtcaatacttatttgtgcttataaattcaaagatgaccaattctttgttgcgtctgattatagtgtatgttttaaattatatccacatgagttttatatttttttttcatccttctatgaggatgagtacgtttaattcttgctccattagttttctttattttctttttaaaattaaaattcttttttactgtgagactttaaactacactataggaaatcatgaatatctccatcggagcaatttaattatatccttgtttgaattttgtgatcttgtttaatttattgatttgaattttgcaggagtctgagcttctcaaattcagaggcaaatgcaaaagaagtatcttccattgataagcatcttgaatctatggtatgctagcttctttatctaagtttttctttcgtaaaaatctccattttctcgatctctcataggcatgggtaa

SEQ ID NO: 304470 - DNA, 2911 bp, Cannabis indica
cgatcgtgattttcagaataaaaaccaagtgagttgtggctgtttttgaatactagtgaagtgagagagttcaccccagctccgaatttaaggagtggagaaggagtgttgaggttcctgtagtgaagcatcttcttagttagcccttctagagcttggtcgaatcttttggatgttgattttgatcgagatcgaatatctacggagatagcactagagagaacagagttatagtgtggtataaatagaatgattgattatctttcttttctttactctttttatagtggtgtcttcataaagaggatttggtgttaattatatttatatagcaaaaaggtagtgatatttgagtattgactaagaagctaatttaatgtgttcagatgggaatttgttcctttatactcaaatttattattttgtattattagaaagaaaaagaaaataaaatacttgggagattaattaaggtatcacccacacccacttcttttttttatatagttatatgtctttgtcctcttatgaagttgacttaggaccccaagtcctatataaaattgaacccttttttttccttctaatttttgggttcattgttttaccatatgaaaggaattaaaatgtgtcatctatataaaatgaaacccctttcttttctaattcttctcatttttgggttcattgttttacaatatgaaaagaattaaaatgttaccttttttttttaaccttttaaagtgtgaaaaaaatagatgctgaaatgggcatttgttataaaggaatgtggattgggatgggggtgggtgaagaattgtattccaaatgggttttaaaaactacttttgattagaagttgaaggaataaagataacttaagaaggagcaaaggcaaatatgcttcaactaaggatattagattttaatctagaatggtattttttttgtcaagtgtatttagttttatattttttgaggggaatgtgtattatttactcaaatacatgaaagttccaagaggaaagtcctttcgttttatactttttaataagatttaattacttattggcactccaaatttgttatatctaaagattatagtgggtccgtacaaaatggatcacatgcacacttgtttgtgtataggaggtgcatacaaatattgatatagatagtgagagagagctgacagtcaatactaatttttagtaaatatggtgacattagtctgtaggtatgaacacattaatacacataattattaatgcatatatctaatgccagttgtagttcttgtgcttgccgtttgaacttatccttagatcaatgcctagcatttcttgacttccatgttaataatttattcatataaataaatgaaaacatttctatcaactgtgatgtatgcaaatgcaattaagccacctttaaaaaaaatacaacttttcttgttagattataaaagtgtcagcaaattctatggtcagtcatagtccacaaggaaaaatacaattagataatgaatagcaataatgaaaacaaaagtcttttgttaaacatatatatggtatagttcatttaaataaaaagattttcaaaagtttaaaagttagatgtcttctggaagggtgttttcagaaatctaacttgactattcggaagaagtctcgtggtatgatagatgtcattcgaaagggcatccccgaatgtctatcgtgtccacttggatggagtctttaggaaagctagtcttcctctgaaaaagaccggttttgaatggctagttgttcctcttggaagggagtttcagatagtcaacttcagttgttgcctttcctattcgggaagtcctttcatcgtacactttgatctttcttccaggaagcatatgtctcattcgaaagcactttatcttatgctgatgtggagaaactattacgaggagtttgttaagtcataactaacttaacaacttaactcttgcagtcaccgactttaggatctatatcatggacctgtaaataccaccaacacttatcattttggtatgaacgagatcagtcgagtttcgagaggtgatcctaagagagaaagattgagggtagagagagaggtacatagaaaagagagaaattgggtttgtgttttgtataaataatcttctgtagatgaagaagattcttgggcaagagtgtgagagataaacactgtgagagaatccaacagagaataaggctcgattgtagttgtaccctattcttgctcaatcaatgaagaagtttcggtggtgttctagaactggagtagagccataggtcacatcgatctataggacttgaaccaatatatatcttggtgttatttttcattgtcttgctgctttaattgtttctggttttaatattctgttcatccttatttttatctctgtttattgtttgtggatttttaatcttgtcatagctaattatttattgattaagatttagttgatttgattttgcacttctgttgaaatttttccacaaattagaacttggtaatcgattaagaacacagaatcaagattattcccgcagtcattattcttgaagaaaaaatcaatgttgtcaatggcgagattcgaattggagaagttcgatggaatagggtgttagcccaagatatgtttccaagaggggagtgaattggaaatttaaactaatttcggtagattaaaacttttaacacaaaattaagcaattaaacacttaatcaaataaatgaaattaatatggcaagcaatatattataacaaataatcaaacttgtaaagtaaagagtttaagggttagaaattataaactctcaatttttacaaggttcggtagaactaagccacctacgtccttggtcttcaaagctatgg

SEQ ID NO: 304471 - DNA, 1498 bp, Cannabis indica
ctgttttctctgtttcgtgttatccacttcaagcttttttctagatcgaagttgttgacactaatacatgcccaaaaaagcactctgctacatattctttgctatatataccaacactcaaagaagatatgactatgagattcagatttggtattacataaaagacaagtataattattaatgataccaaacttggtaagtctatctcaggtattcaatctcttcttgcaagctaaccaagtgatgaacttgtgtttgggagtactataacgattctaaataaaggaattccacacctttgtgctaaaattttcagactcacaatcagcaatgcttattttcttttttatctcattcttgacctccacaattttcttccaacaccagctcctcccttgtggagcattacagctccaccaatcaatttttttaatatagactgtattcacccatttaacccacaagttatctttcttttggacaatattccaaacatatcttcccaaagtacctgtattccattgctcaatatttctaaaacccaaactaccataagctttaggttgacaaacctcattccaagctaccaaacccggggcagtagttttagcttttcctttccataagaagttcctacaaatactgttgattctctccaaaatatacttcgaaagaatcattaattatgcccaataaatgtgtattgtaatcaaaactaagtttattaagacacatctcccagcataagagatattcaccatcttctccacaatattgtcacactctacttttgagatttttcttcgaacaaataggaattctaggatatctaaaagagcttttagaatatcttgaacaatcaattatattttgaatatcattcttatccattccagagcaattaatagtcattttgcttacattacgaaacaaactagaagtttcaaaaaaactcaaaaagacccgaagtaaagattaatggactgaacttctcctctcaaaaatagaagaagatcatcatcaaagcataaatggttcaatttcaacggagagcatcttggatggaacttaaaatctttcctcatagaaattttagtcatcaatctagataagtattccatggccaaaacaaaaaggagcggagacatgagatctccttgtcttagaccccttttggaaaaaaaaaataaccatgaagagtactattaatcattagagaaaacttaggagtagtaacacactccatattttttttcttttacaaagtgattagaatcacttatgaatttacgacacccacgtccgccaccggcgctggaacctcctcgaaccaggatagctcatcgtctaaccgcagagtatgctttgccaaccatgggccgctaaaatcttagagcgagtcccatgggacaaaactgcccccgaaaatttagacaataaagctataacatcttcaaacaacgctcctaactcatctgaaaaaaaaaaaatcaaaaaa

SEQ ID NO: 304472 - DNA, 1221 bp, Cannabis indica
aaaataaatataaaatttaaaaatattaaaattaaacatactgccaatattaaaaataacaataaaaaataataatattataaataatatattaatatctatatatttatttatttttatgatgtgaactcttcagcgaaattcttgtattggataatcgtaataatactaaaagaagacgaggatcgatctcctgataggctacaagagatattaactctctactcattatttatatttaatttatatttattatatgttgagatcttattagacttatagttcatattggataaaactatttttatcaaatctggttatgttttttttttaactttaatatggacaatactttatttcacattatttattctttgtatgtatatttatataattttccaaagaataagattctttttgagtattggtacgtagtatatatggtgtctagcactacaataaagtgtcactctataattatttaacaattttttatattatttattaaaataaaataagtgtgtgtcacccaatattgatattgaattggaacaataataatattacactttataaaggtgctaggcgcaatgagtatcctctagcatttctattttttttaggtgtgtttttggggtggtattaaagcagccaccaaacctagaaatggagagttgatataggtggtagtttccaagtgggtgtagagtacttggatctcacatcactaatctattgtcactagaattagggtctcaaccaactacattgggtttgggtttagtttattgattagcttgatgagaagtagctagattgtttggccttggttccaatacacctttagttgggtgaactctcaaagagggaatagaatagatgagcctagctatgtggtgtactactagttgactagctagctatacctatctcctcccaaatccaaccatgtatatgatgtattgatgggattaatctttcccaattaatatatagtttagtccacctaaaagaaataaaataaagatactaaggggcaattttatttctggtagaacatggaagtgtgtggttaagaaatataggatagatagaggtagtataaaggtagtgtacggtaataaagttttaactcaaaattatttaactattaaaaaaaaatagcttatgcattatatacattattaattattaatgtgagactctctaataattatttat

SEQ ID NO: 304473 - DNA, 2058 bp, Cannabis indica
gttagtagaaagattatgagctgcaagtggattcttaggctgaaagagggactggacgatgttgagatggaaagatataaagctagactagttgctagaggctttacacaaagagattggattgattatatatgttttcccattgtgaagtaaacttcaataggaatttcgttaactcttgttgcagttaaggacttagaactagaatatgcttttctacatggtgatctcaagaagcaaatattcatgaggcaatcgccaggttatgtagagaaagggaaataagatcatgtttgtctgttaaaaagatcactctataatttaaaatagtcacccaggcagtggtacaaacgatttgacgactatgtaatcaaatctgatttcaaaagaagtacctttgacaactgtgggtatgttaagaatgagaagtgccttgtgttcctacttatgtatgtagacgacatgctcatagcaagcaaaaatatgagtgaaatagacaaagtaaagaggttgttgaacaaagaatttaagatgaaagacattggaccagcaaaaaggattttgggaattgaaattgaaagagacagaaaaatcaaaaccttaaagctgtctcagagtagatacattaccaaaatcattgacaagtttgggtttgtcgatgtgaaaacaatcagcacacccttgtcacaacaatttagactgtcatgctcacaaacaccagaagaaaaatgcaactacatggagtctattccttacaccagtgtagtagaaagtatcatatatatcatggtatgcgcaagacttgatatatgtcatggggttagtgtggtgagccaatttatgagcgaaccaggtcaagagcactagaaagttgttaagtgattatgaaatatctaaagggaactataaacactcgattagtatatagtctaaacaaaaatattgatgttgttataggctatgtatattcagattatgttggtatctagacacaagaagaacacagtcaaattttgtattcatgctacatggttgtacaaccagttggaaagctaatcttcaaaccattttagctctttccaccaatgaggtagagtacatagcttaacctgaagctgttaaggagagcatttggttgaaaggaatcacaagagaactaggcctcgaccaaaagattgacaacatcttttgtgatagccagagtgcacattgatacaatgttagattgcatttcatccaaaatgtgatcaatggaggaaatatcaaactatgcaaggtctcaataaagaaaaatgttgctaatatgctcacgaaatcacttggtgcaaccaagtttcatcactgcctaaagatgctcaatgtcacttagacttggtatcattgacaccatttgaattcttgtaattttagtggttgtgtattagcagtcaaggtgaagatttgttatttagatgtctgctaatactatatccacatgtacaggatcacttagctaattagttaagtggatgttagtgttagtatagttctgtacattactttacttagcctatgtgtataaataggttcaatttccaattgtaatgaccgattcatcctattgtaaagagcacataaattaataaagttactattctctctttaatttgcctaagtgcatgagttttggtgatgagaaggttcaaattagttgaatcggttttgctcttgattaagaaaagtttagtgtgttgcagctgtgatcgagtagtttggctcaacaataattttaatattgaaatttccttatgttttttttatattatttataactttttttaaaaaataatctaagaaataattagcattttgaataaaaaataatattatcttaattcttatgtaatgttttagtatacaatttatttataaataaattagtacggtaaggattttttgttcacttcttcgtccccatagggattttcagggccggccctgaaacaaagtaggccacagggaaaaaaaaatttggcccttatgttagaaaaaattttagtatttttcaaaatcagtaaa

SEQ ID NO: 304474 - DNA, 2067 bp, Cannabis indica
agaaacccaaaccgtaaaattttaaaaaaaaatcataaaaataatatataggataatttctctaaattttaatacaataccaattaaattatttaatggacaaaaaatgatatgtattattttatgttatagttaatatttaaatatggtctgaggtcagagtttagaattggggccggtgtttgggtacaggggtaagtggctaggattggggctagggtcaagactgggatccagggccacggttcgaatctgagatccagggacgaggtttgggttcaaggcccgggtgaggtccgagataaaggctgaggtccaggctctgagtcgaagtctaggaaggtcttaaatccagggcttgggttagagtctaggtctggagctagggtggggtctatagtcataggtcgggggactagggtctggggctgggttggggtctagggtcgaggtttgggagttgggtttgggttgggtttatggtatgaatagttttacgcaccttattaatacaagccatgacaactacaaaaagcctaattagcgctgctcaacatgtctatgtaaaatggttgaccgacacaataaataggcagaggttttttactgatcagtgggtaactgaagcaaaaaggttctaattagtgtcagttgtatctccaatgctaaaagaagaactgaggaaaaaaaagtgaaagttttagaaaatttatttacttttttcttcggttgggatggtcgctaaatttcttttgcttcagttggaaaccgacagtaaataattggtgagtgtttccactgaagcaaaatgctttaatttttgctaacctcccttttgacaatgaaactcatcattttgatgtcttcaaacaaacttagtattgtattttttatccgtatttccaaaaagagggacacatgtacttccaagattcaattcaattaatgaaggcccagtttataagtccaatcaagttaatggaccaaatttactaactcgattcatcagggttccagaaagacatcttacccaggagataaaaagaatccagagaagagatcatccagatacacctattagtgatgcttccggaaaggtaattaattagcctctagatgtcaagatttatttagtgctaattcaatactgaatcccaccacattaagactttttttccaaaattaactttagaaattaagcattccatttaaggaaatatggtgtttgtcaaatagttattgaatcaaatttattacacgtagattctacctatcatcaagcagattccatgtaagctaataacaatagcctcacgaactgtgtctcaccaaattggcccaatattaatatatatatattatttgtatttaccccatcatgatcatgtttacataaaaatcctagcctataaatataatgataatccttcacgcaaagggttcgtaattcattatttacaagcagaggttgaaaatagggtttacaaacacttgggtaatattcaaagacttttttagacaaataatattgactcgtgtactagagttcgttaatacttgaaccacgtaaaaattctcgtctaaatctctatattttatttattttccttaggattactatattttatatcggtttctaaaagtctcggtaaatatgttggtgcttttattgagagttgaagaaaatttgatacgattgtatattacaacaatggtagccaccaataccactttcactaaacctactgctcgtggtggagacgcaaccatggacgatgttgatctgcctcctactacatacgtcaggacgggtattgctggggatggagaaacctcaaaagtgggctgtaatacccggggattaagaaaaggattagcaaaaccttaactagataattatgagttaattgaggaattatattattatatagttcaatatatgtgaaattatatgaatttaacatgttaaagaccccgttggtgagccaggggcattttggtaattatgacccgagaagagtaaaatgatgaaattaatttaattatgtgcttaatagaactatatta

SEQ ID NO: 304475 - DNA, 1813 bp, Cannabis indica
ttagtaatcatatatatatatatatatatataaatgtgtgcaatcttttgtttttctttattgcttttgtcttttgagaagatatgttcagcttttggagataaacaaacagttacgctgttacttttcacaacaatatcaaactataaactttcactagcttagacataattgacttattataaagattttacgaataatataaaagatttgtttgtggtatatatataatatatagggagttcttttggagggcgatcaatctacctaaaaagtttcttatataaatataattaacatattatttttcatgaaaaatatgttaatatttgcataattggttaccttcgatagagaattattgaatcgctgaaagacaagcttgtgtgtaccatgttggaattggaatcagcaaaaaaggagctaaaacaagagaaagagaaaacccaaaaggtagtaaggaaatttcttcatctcaataaagtagctttgcaagaaaaatatgaagcacaaaaacaaagggatgaagtaagaaaccagttgcatatcctaataaaagctagcacatcatcagattatgacaacatatcaatcaacaccgcacacacccaaccgtactatgctgctgcagcaacagcagaagcccctactttaacaagcagcagttccagcactacaaggttggaaaaacagcctcaggtggtgggcatggaaattataagcaacaacaggagcagaatgaggaagagaatgagtgataatgaatcttttgtgtgtaatagtcttatagaagaagggatttattataaaccattgcccaagaaagggaggcttttgcaggctgtggttgaagctgggccattgcttcaaacacttcttattgcccctcttcctcaatggaacaatcctccaacacccattactacactgtctatgcctctgcctctgcctatttttcaagactcaataattgctaatttgccatattaacctttcaatccaagctcatcttgaatcaactttatgcttgatcaaatcccatatatagatcatgatctatatttaaaagttgaacacctatatccctggccatctccatcatcgttagtgacaacttgttatcttatagtaaaataaatatttaaggatacattacttctaaaatatgtacaaatatatagacatgtttaatgttgcactttgttaagcttttatacaatgctggtgtggcttctcctctattattacctctcgatgatgattaaaaagattaaggactagtaatgatgttcttgttaattctatttttggcatatttaattgataaatataatttattaatttattgtttaatttcgactatgtataaatattggttttcttattttatatgtgaattgaatattaagcaatctatctttggaaggaaagttgtctaactttcctatttatgaaaattaaggtaaagatggtaagtctggttactcaattatttcctacctaattgttggaattataaaactaggatctagatgttgggttttatgccctaaataaaactccatttcaatgtaatctctattattcgatatcaataaagaaacagaagtatttttcattcatttgtattatttggttcatattatcaattatatgtctatttgatttataaattcatccaaacccttttcacacttatgttcttgtttactgtgtcgtcagcacagtggaaagtaatcaagactatgtgattaaagatattcctagatttatcagaacactgtgtttttactagatacgacaatctacaaca

SEQ ID NO: 304476 - DNA, 2022 bp, Cannabis indica
tcagtttgcaagatctttaaccacttaccttaatagttttaccattactagaatttcataaaatttcttaaatgtttcaaatttctttattcaatgtataatccagagtgattatctaagaatttaacgataactcatatccacccctaaatgtacgtccatatgtttgattacagatgatccatattttctctttacagaatatgatcttgtcaaaatcactatgaccaagatgcaaatgtcatagatgtataattgtgggtgttattatttgatgatctttaggtttagttacaataaagagttcttaaaatagctcaagtggattctggtcacaaaacacaaaactcattttccatacatttaacatatagtttgatccattgatagattatggatattaacaacttatgaaagttatatcgtagtgttcaatgtattctggaaactgaaattcaaaatttcgatttgaaaattaaaatttaaagtcaaagacataaaattataccaaatatacaatgagtaattattcaagcttggaccaccactaaaatactaattcaactctaactttaagacgcctttagtaagcatatgaagtaggagatttttctaaagctcgaagatttatatcattatgggatagaatatttagaatatagtcatatgcaccgcccatttttattgaaaaaaatcgagtgacatcataagcagatgatttataaaccttcttatccaatgatatattatcttaaatattatcataataatcgttgattttcccgggctcttctccttgcagttcctgagctgatgccatggccaaaacaaggtcgaaatattttggaaaatcaagatctgctactaaaatttcaaagaaacgaggtagaaaggtgcgatcggaagcgacttgtgataatccattgaatcaactttcagagattctctctctaggaagtctcagattgaggaaggaacgaaggacgaggatcctgctcttagggattgctttcaacctctgttatccccaaaatcatcactgaaggctatacagagacaagatgaggtgcgtgatgactttgttcatttcatcaaagccaataccaatgtaacagtagaacttaaacaaggtatgaatttcgagttccccctatccttcgatctagctctcgttcgttacgcaatttgcaaaattcgttcaaagattctgatcaaggaaaccagaaggtgcaaatcaccttagatgacatagaggaggaggtttttgttttaggcagccttccattgtttgctatgtcttaggggtcgaataccccctctgcatatactcgaaaggtttgtgaatagaatttggagggataaggtagacagggtgaaaatgttctcttatggaatatttctcattcgatttcactcaatcgaggtcagagatcagatactaaatgggggatacattttctttaatagaaggtcgataattatgaagccttgggacccaaatactaacttcaaaaaggaggatgtcaaatgtgtgccaatttggattcaactagaggatttaaaattgaagtactgggggcaaaaatcactcttcaaaattgttagatagctaggaaaaccattaatggtggactctgttacaaaggagagggagagattgaactatcctaggattttaattgaggttctcatggatcaacacatgcctgatatgctcgaatttgaaaatgaatttggctcgaacacttcagttgggatcaaatatgagtggaaacctgtctcttgctcacatcgttttagtgttgggcactctgctgcagactgtaagaagaatgttgttactaaacagcagtgggttgtgaagaatgataataggaagtctgtacaggttgatgaggaggggtttacaaaggttggcactgctaaaaagatagttgaaaagggggaaatctgttgttggtgctaggggtgtgcataaatcaatccaatccaatgagaaccgaccgatccaattacaaccga

SEQ ID NO: 304477 - DNA, 849 bp, Cannabis indica
ctactaactagtagtaaagtaaaaagaaaaaagaaaaactaaaaaaaaaaaaaattggcacgtgcatggaacgataactaattttatgaatgcaaagattataaacacaaggcaacaaaagtaagggaaaaaccagtgtaagttggccaggactagtcctaattaataaacaggtgtcaaatgcatgaagcatatggtttgagccggaccctgacatttctgtctccaaatctaatctcttctgataactgcaacatatatattaaagagaaaaaggaaaaagaaatatgccattcatatcatcaatcaatttttatgaagatgtatatatgtatgtatgctctgattgatcgagagatgaagcatgtgcttgcaacttcatggaaattcatatacatatgttaattattttgatttgaaaactctacttgttatgatagggcccttctcatattccaagtgatctacttatttggcggacgtttggaggttttatacaattatatttattccggttcttctttttcactactacgtaaataaatataggtaatacttttttaagcttttatatattataatatgagattcaatcaaagaacttccaacacatgtgattactataaaacaaatttttagaggcgattttttcagtaaattaataaaattttaataaaaacacatacagagtcggttattttgttataaccgactccgtaagtgatacgtactgttttaattttaatgaaaaaatcctatggaatcggttattttgtattaaccgactccgtaagtgattttttaattttaataaaaaaacacatattatggcatcggttattttgtaat

SEQ ID NO: 304478 - DNA, 969 bp, Cannabis indica
ttttttttttacttttctaattttaaaaataaaaaagtgttattaaacgcatcttttaaaattttgattctcaatcaaaaaaaattaaaaagtaaaaataattttatagaacatgattatagaaaatatttttatttttttaatttttaatacaaaaaactaatagaaaaactattactaaaagtctcctgtatttatgtaaatgtaagattgcaaagtactagaaaacttttaagaaactgtaaattttaaagaaaaaaatcgagtactatcataatcttacaaaataaaaattattaattattataattagatatttaaacttgatatttacattagattatattattttgtaatcagatcaaaccgatttgatcatgtaaatcctacttccattgcttttgtgtttgggaaagaagatagagaagtaaaacactgggacactgggataagggcttgaggcccagattactaaggcccattaataggaataggattcgtcaatctttctgttttgttttgtaccctaacataaacatatccattcatcaacaatatgacagtacaaaattcaaatcctttgcagaatcgctgcagcacatgttgtggacccaatcatttctcttccccaaattagttgaaattaagtggttgatgttggaaacaatggtgagtactgaagaggttttttgatgtaattgtcgaaggtgaccttatttcttgtctcttctcctttcactctttctcaaccccatttagctaatacaaacatatctgcagctcaccgcaggtccacaggctgtttgtggcttttattcctcaaagcccatcaatattttgcctccaagaaacatctctttgtaattatccacttatttatttgtttatttagggaaatttacacagtttactgtgttttcccaatttctttcttttatactgttacactccaaaaataacttttgtact

SEQ ID NO: 304479 - DNA, 1370 bp, Cannabis indica
cctatttttactattttggaaaacacagagtccattttgtcatttaacaaaacataaagtccaatcggcaatttttgcaaaacacagaatccaaaatagtatttacccactgtttgggataccatttctctctaaaaaaaatagtggtaataatttcactctaaaaaaaatagtggtaataatttaaaatgcacaactcgtcaatttaataataattttaaggacaaaattttgtaattataataatttgggggtgtaaaataattatgtgttagtgtctcagcatgtcatttcaactcttgaacaaatgaacatgaatagcattaatacttcaagtgaaataatttaaaatagtataaaaaattcaagtagcaataacatgaatatatccaaataaatgataaaataattttaagaaaatatttttaccaagcaataaatatataaattaatattatttacgagtgggttatttctttcttaaaaatagaaaagtgtgactataatataaaggattattatttctatagtttaggtataactttttgctctgtgtgcaatttaagtgtggatctaatattactcttttttctttaattattatttagctatttaaacaataatgacaataaaagtggtttcatagtttggccacaattaaaagtggattaattgtaacatggtttgatataattaatgaattaaagaagtgtgtatgggtaccagtttaatgtgttacattatcagggaccaatataaagaagaagaaggaaaagaaagtggtgcctatcacgtagtcattaaaggagttgggttgcactttctttttagtcaagtctcatttccatcagtttcaaaaaagagaaaaaagtctcattttcctcatacttcataaaatggggtcacacataaatataatatatattacaagctgtaaggaactttatttcaatcttaacaaacacaccagagattctcatagctcattttatcaaatatcaaataaataaaaattaattgaaaggctgtctacttttacttaaggaaaatttttaatgcacccttcaaaaaaagttcatctatgcattcctattttttcggtattttgaaaaaaaaatagttttttttcataatcaaatatgttatagttatttaaaacatgtaataaactttgagaaatttagaaaaatttatcaagctgaaaatagatttcaaacagtttattttacatgcatataaaataaaaagtctcgcgtgtaatagattgtctaaacattattttcggcgtattaaattttttggaatctctcaaaattttacaaaatattttaaataactacaatataaatgattataaaaaaaattaaatt

SEQ ID NO: 304480 - DNA, 1215 bp, Cannabis indica
gggcacaaaacccacaaaaatgagagggacgcctctcaggagtaagcaaacatttttgaataaagagggtagcgcggtcaaatactataagctccctcccatctgagtaaaaggatgatgaaataataagaggtggagactgctcaaagatccatactccctcaaagtaaaacccattgaccagaatgaagaaagatgcctggccaaagagtgatcccaagagatactcgaccagcatcataaaaaaaagagaggctaaagtagatgattcacttaccaaagtaaggggaaccactaagccaaagagccaaagccacttgaccaagggtgattctcaatgtcagacatatataaaataaagatagaagttctatagtcagccagaaatataaaagaaaataacaaagtccttagagttttcacggacatggccacaagaagaggagcccagtggttacaactactagatgggcatgcatcacatcgacatttacctcggcaagccatgattgcatcatcgaacttagcgtttaaggattcaaccatttgtgccatacaggaaccaagaatgctatagtcgatattagggttttgtatccagaccgtgtatagcaagcgttcaatcttatcctctgattcttccttgttccttactttaatggtgcaaaggtgatgttctagctcgtcaatcctagctctaagcctctttgtttagacgtgcgagtgcgacaaatacctctggcgaatggagaaggagtcctcaagctgttgggtaaggctggctactgaggattgctcattggttaacaaaacttgaagatgatttgcttccccttgaagagctttgcatttacagttggactcctccaagtcactaagaccttgtcagaggtgcgaaaggtctccctcctcaagagggttagagccaagagtatattattgtaagacaaatgcttgcaagcaaaagtcacagttaaaaaaaaaacagtagcaagtgacaaaaataaagacaatggtaatatgtgctaacccatatgttgcatttgagagtagcctgttgtcgtccctctgctaaggagttacgcagccaagtctagttagaagtgtaaactcacccaagtaccggttatacccattggagcattggtgtaaagcccgcttagttaatttggaaattagtagttgtttatgtttaaattatgaaattatttatag

SEQ ID NO: 304481 - DNA, 860 bp, Cannabis indica
ctttttaaaaaaaaattattttttattgtaaaaggaaacaatgaagacaaagttaaacaaagtactgtatttttttttgttaatttttatatttgaattttttttaataattttaaaaaattagtatttttaatttttttaatagtttaaatatataatttttttgtgttcaaatttaaaattttttaagaatcaataatgaaagaatagatttttctaacatatatttttttatttgatgaaagaatagatttgaattattttcttcttcttaaaaaaaatatacataattatttttaagaaataaaagacacaattttgtagtcgtcaaatttcaagttgcaaaattattaattattctaaacgtatcattgtcaccaatatctaaaatattacgttagtattatgttagctacattaaatagaatctaacagaaatatcactttccaatatcgtgaatagttcgagaaaaatattttaattatcgcaaatcattcaagatctatctaattagttattgcttgcaagacgaaaaaaaagaaaaaaaactattttagaaatggatacaataaactaagaacttacaacaacaaaaagaaaataatgagccctttttttttatcattttctctttgaaatatgttgcttctttggggatagatttgggctacagctactgttttagaaatgttaatgtatctcaacatttaactagttgaaaatttagtgattgttttagaaatactaattcatctcaataatcaactaattaaaaaaaaaaaaaacattaatttaaggaataagaatgcattacataataaatgttatatatatatatatatataaagaaaaggaataa

SEQ ID NO: 304482 - DNA, 2888 bp, Cannabis indica
tgatgttgaataaaatggattacattgacatggagttttatttagggcataaaacccaacagtgaatttgaaatttaaaataatttcaataaattaaaactttcagcacaaaattatgcaattaatcaaattaatcaagtaaatgcaaatattatgataagaaaatatactgagaaaataatcaagcttgtaaagtaaagagtttaagggtaagaaattacaaactctcgatttttacaaggttcggtaaaacaaaaccacctacatcattcgtcttcaaagctatggatctagcttcgagtttcattatcgagccaagttaacagacttgactaacccttacaactgagaattattcaccaaagtgttttcaaacctcttacaatagttttgcaccgccaaggactatcaaccttaatcttaaattgttgtagtgtcgctctactataaacgggttgtttacaataccggtcccaacatcacctcaacacaatagggaaatgtatttatgattacaagcaaaattaccctagaattgtgataatagaacctagagtgattaacaagcacactgagaataaataaatacaaattttgacacaaagtgtgtgaaaagtgttttgttagattttaaacttgggagatcttaaaatcacttgaatgtgtttggtatatgaaaatgctcaaccaacaaattatttttagtggaaaacgagtttatatagtatgtgaatgaaaagtagtcattgatagttgttagcacaattttctaggcatattatgtcgtgatctaaaattttggataggaaccagaatttcggatggctaacaggggtaaatttccatttctgggcactaaaacgcttacaacttctagctcgtatatccgatttcaaaaattctaattgaattctcttattttactgatatgtgatcttaaaaatcaatttaaaaaatttcgatatcatttttgtgatataacttgtcacataagttagtgagccaaatttcatacttagaaaattttcagtgtggacttgtaaatcactgtacaagactaggaaatgtaaaagaaaaaaaaacttcatgaagtcttgtcttgagttctctgagtcttggagtccacttcaggtaacttttgaaagttttggtaaaactaccattttacccttagaattaattttgccttaaaatgcttaattatttttaatttatgctacaaaattaacaaatcattagtgacaaataagaatcaaatattttttaatcatcgaaataaggagacttgagagtttaggtcaacaacttaactcgtggacaaaaatctatcgtgtcaaatattttagtactctcccctttattgcctctgttgtggcaaaaggtattatggctactagagaatttatccatggagtgttgctatttaattagaaatggaagattcgttcattgtggaatatcccatggatcccttggttgggttgggatcgatattgtgctagcttcaacccacgaatatgaattcttggtcaaatgctacagagatccttgctcaatgtggatggctcctggaatcatcatgctctcaaggaatggtttatccctagcctcggtacttctctaaaccttttacaacaatcaccaactactttttatgataaattcatatagaaagatgtcacagttggtgatttctctttgaaaagggcttatatgagcctaatcaataatcgatggtcaagggagaataactttcaaaaaactctctaggcagctaaggtccatgagagaattcgcttcttcctttggaaacttgctcgtgatatttctcccttatgggaaaaaactggattaacctttttgggggagatgttaagtgtatcctttgtaatgcggcccaagacaactatgatcctttattcttctcatgtcccatggcaagacaattcattagctcttggaatattagaagtggtgcattgcactttaatgactataaggaggtggtgaattggatcctcaacccaaatttcttaactgatagagtgcataatgacaagatcaagttcactcaatttgctagcattctttactccactctttggatgggtcgtaataaagcctatcatgaaagtaccaaatggacttgtcattctatttcaaacttgatttctacaggggtccatgaatctaataagtcttttgttgataattctctcgagtctttgctcattaatattgttcgctttgaaccttcccatcttacatctagccattatgtgtatgttgatgcgactgtaaggggcatgctcagtattggggctgctattttttggattggaggagctttgtcatttagtcttttcacttctaaggctagtattacaccccctcccccgggctctcttggctgttgttaagcagtgtcttctccttggctggacttcagtcactttcttctttgattgtcaagttttaattagagttgttgaaataaaaaaagttattgtgtggacatagtttgtcacttttgccgaacttttggcttctattaatgatttatctttgatttgggttcctcgccttaggaatgaaacagctcatagacttgcttcttgggctgcttccaagaacaaaattgggacctattagtattgggaaggtagatctctttgtatctaccatcctctcttttgcctagtttatatatattttatcttagtgaaaaaaaaaaaaaaaaattaaactatgaagccaaacaaacaacccaatatgtttatattaaatttatatatttagaattattagtagttgatgtttacaaatatatatatatatatatatatactagtatattgttacgtgcgatgcacgtatgctatgtttta

SEQ ID NO: 304483 - DNA, 1737 bp, Cannabis indica
ttccaatagattctcttttttcctccacacaatttagatccatctcaagtttatgtttagtaacccaatcatccctactagttgagtttgcgagtactctcaatctttcctttgagctctttagttttagcaaacatgtcctttttctgctgcatgttccaagtgtttaattgttgtccacatgttgctaaaagccgagagacatggagaactggagtatccttagccttgcgtttcccacaccttttcaataatcttttgacaatcttcattgttcgcccaagcttgttcgaaatgaaatctagtgccccaccttttattgaaagtttccacctttgtccccggactagcttgaagcaatagaggcctatgatccgaattccaccaattcaagagcgatacggtattctttcgaaatctgtttttctaatcggggttgcacaaaattctgtcaagtttctcgaaaatcaagtttgcggtcctcccgttgcaccatgtaaaaccatcgtcttccgacttgatttctctcaaacaacaatccgaaagagcattcctaaaattcctcatgagataatcggttttggggccccctccctttttttctttgctattaacaatctcattgaagtctccgccacaaacccaagctccattgaacattggtttaagccgtctcaagagcttccaactttctagtcttcctcccgggtcggggctgccataaaatcctgtaaatcgccaagtaaaacccaaatcgttttcaacaagagcatcaatatgagatcccgtgaaggatttaatgtgaaccacgtagtcatccgaccaaagaagcgccaaacctccacttttacccttagcatcaactgaaaagcaaccaacataccccaattggattctaatgtactccatccgaacactattcaaccgcgtttctgataagaaaatcatcccgggatgatagtctttgacatgggatttgagggtgtttaaagtccaagggttcccaagctcttggacattccaaaataaggctatcattgctctcggcgacttagttcccctgagttcgccgcttttaattccgttccaaagttcaaatcagaaaactccgaaatgccctttgttgcacttcctcgacctgctgcattcacattctccaccatcacctccttgctgctagtaccccctttgattttttaccttttaggaattacctttctccttttagaaggtcccttcccccttttcaacaaagcaaagctagtatcataacttatgggaatgtctattagaatcggcatatcagccatgttgttgttcattaaattctgttgagggctagaagtataattatattggtgttgtgtcaattccccaaccgaatcaataaagttttcttccctccaagaaccatctctcttcgagcttccctgtccaaaattcatcctacccatagccaacccgacaccattattctgaatttgattaggagcttccattgcagtaggagtcaaattcaatttatggtctttctcaacttccttccccttccccaaatttctagcaactttatttagagaaatagaagaactaacccgtggcatcattgtcggagatgagttgaattcgagtgaagaattaccaatagcattcaaaacatgacccgtaggctgcatcgttgatgaagtaggcctttttttaggaaatccagggggggccttgttgggttttatgccc

SEQ ID NO: 304484 - DNA, 1594 bp, Cannabis indica
taaatcaatttttcaagtttgattttgaaaattttgctcaattgagtgtttttctattacatttttctttccataccaaatatgagaatttactatcaacttctctagctgcagtagattgatggagttaattgttgcaggactcggctagcacttacgagctcatagagatcagcacgggtggaaagctcagcagacacaatgtcaatgtcaagcaattgggaccagagacagtaaccgagttatcgaccttgcacttgtctgtcggtgatcaaacacaggatcttcatagtagcctagttttagaccatcctcgtggttattctcaacaacttcacaaatgtattgtatctcaccctaaaggacaagccatatttgatgggaatgtgaaagttaacaggtaatttttttttcatctgcataatgcttatctctggtaaattaaattgtcataatattgtacctattgttacagatcaaaaaacgccatgtgagaatatcgatatctatatggcttcttccttgttgtataattttaactgaaaccatgtaatttgattgaattcatttgtttgaacatattatttacaagtaagactgttatattccatctttaagaaaatttcaccattgtaacaagttctaccttcaagacttgatgttgtttcttctgtagatttctggtcatttgaactaaaagaattttgttttctctgcagatatgctcagcagacagatgcaggtcagttaactagaagccttctccttgaacctcgagcatccgtcaatgtcaaaccgaatctccaaatcattgcagatgatgtcaagtgttctcatggagctgcaattagtgatctcgaagaaggtcaactcttctatttccaggctcgtgggatcgacttaaaaacagccagaaaggctctagtattctcctttggagccgaggtgtttcaaaagataccttacccttcaatccagaagaaagtagagaatcatatcaaaggtttattggatccaacaacaaaggaatcctcataaaaaaaaaggttgtaattggtaatggatgtatctaatttgttgttacatcaatagcatttaactaaaaggaataatatgctgctatgaagctcaagcaatttttggttttgtttgtaagttggctcttttggcaatgctccacctccatgtgattcttaaggaaaacaaaactctgaagaagattgactttaacaacaataaagtgatcaatgtttctagtttctctccatgaagtagaataatgttttaactaattcaatactccacgtgaagaaaagaaaatgttggaattctgtggataaaaataatgtttgcaccctactactaggggtgttcattcaatctaatctaaattattttgctcatagtatatctgatccgtactaagtgcggattttatattttagaatcaattcaatctaatctgtaaaagtacgaattggatcaattattttagattgattgttttttaatattgaattatttaatatttattgaaaaaaaaaatattttttttcacataattaacaataaaaaatattgttgttgttttatg

SEQ ID NO: 304485 - DNA, 2950 bp, Cannabis indica
acattgaaaatgaatacgagtgtgtacatattatgctctccttattattcaaaagataaatggagaagacttacgatgataccattaatcttgttggtgataaggatgattcggttctccctaaacacatcaagaacatgaaggttggggtacccgtggagaagaaaccaataggtcatccaaggaaaagaaaggctggaagaagataggagaatcgtttcctgttagtgataaaagagtcacgatacctcgaaactgcattatttgtgacagttcaggcctacaatagagcaacaaggaaagcccatattttaggcgtagtgtactattagttgtaataatattatttttcaactggatttgttatttagaactgcttattttgttttggtttctgctttgaaattaggttgttagcaggtgctattttaatatgttaaagtaacttgttggttttttttttttttgtaatcaacggtttgtcaacattttgtcgatgttaagtctgtatttgagattattgcatctttagattttattgacatttatcgatgagaaggccaatgtttttgtgattcttgcatgttgagatttgttgacattatatcgacattttatcaatatgttatcgattcaaatgttagtatttgagattcttacatcttgagattttatcaacatattattgacattttattgatattttattgatgtaaaacccatgttttatgattgttgcatgttgtgaattgtcgattttatatcgatattttattgatatgttgccgatgcaaaggtttgtctttaagattttcgcgtcttgagattttgttgatattttgaagatattttatcgatggaaaggtctatattttgtgattcttgcatgctgagatttgtcgacattgtatcgacattttgtcaatatgttctcgatgcaaaggccaaaaattgtctttttgatatattattaatattatatccataatttgtcgatatgattctttcatattaatttttgtattgttgataatttagacattatatcggtaatttagacattttatcaatattatatcattaatttttctatatatatattgtacttattcattataaaattttaagtcatataaatttgtcatatctataaaagaacgagtagtagtttgcagacttgtaaccaaaaagttattgataataaaagtattcctatgacacataattgcataaactattgtcaaaatattaccaatcaaataccccaattattttagaaatatatacatgaaaataataaatttgaccaactaagaatttgatagaaaagatccagacaccagtcttgatgtctcaaagatgatggttacggatggccccacacaaccacctatgaaagctacctaatagtctttcatccggcagactgaggggatcaaactttggagaagaagggcttatgttttttcttcatctcagtatattcattaaactaagtaggtgggactctcttcctccttccaaacttaattcccattggtttcttgtctaagggaaatacatcaccctgtgattggctataacttggtaactagatatcaccctatgactggctatcatctatggcaataatggcggcatccacaggagtactaggtgcctcatcaaaataaggatcataaccgtcagggtacacatcaacatcttcttccattgaaggatcgggtgttagatccactgctggtttattgtgtagtatagtcaagataaatctcaactgctccatcataatgtcctggctagtcttcatttctaggtggctacgctgatatacctccttgaactctatcagagaggcttaaaaacccttttgctcatcctctatcttattcaacctcttaaccaaataactgttgtcagcacgatcaatgtctaaagatgatgctgtaggttgagtctcttactcgggaatagcagattccccatgttcttctactcttttaggttgcctctcaaaaaaagtagggtcttgggtgttatcttcaggctacgtctcatcaacacccaactcaacttacacctcagcatcattgtaagtgatggtctttgcatatgcctcttcatctaggcgaggatataatcccttcatgactaccaatttctgtttaagaagcaaatcaaaataagtgttaaaaacaataaaaaaattattttcatggaacaactatcaataaatagtcaacaaagcatcgataaagtgtcaataaaatattcatatcctatcgacaatacaaaattactaaagaacaagttacaagcatattattgacaaagtgttgatatcctatcaacaaacccaaaatattcctaaagaaagatgttacgagcatattattgacaaaattttgataaaaatgtcaatatcctatcgacaaactcaaaattaatctaaattaaaaaggcatgaaaattatctacaaactgtcaataatatgacaacatcctatcaacaaactcacatttatcctaataaaataagatactagtaaattatcgataaaatattgacaaaatatcgatatacgattgaaaaataaaaacttaatcactaattaaaaatgccaagaaattatctacaaacaatcgataacttgtcgacatcatatcgataaatagtcaataatatatcagtagcatattagtatttcaaaattatcctcataaacaagttacaaccaaatattgacaaaactgttgataaaatgtcgagaaaatattcaaaaattatcgaaaaatatcaataaacattaaattttttaaaaaataaatatccataaacataaacataaaagaaatgctcatacccattttgaaaataatggaccgagatccttcttcccaattttacccttgttggtccagcttagcatcctgggaaaatgaattccct

SEQ ID NO: 304486 - DNA, 4157 bp, Cannabis indica
tatacactatactacaacattttactgccaaactaatacctgtccacatgtactcgagacaataactgtcttaactgtttttagttgacagttatgttagttagttttactcctaattgcctaagtgtataaatagatcataggctcacttgtaaactgtcgaattattcatcttgaaatagacactaaagtaaataaagcttctaagatttctttgatttggtcttatgtgtgaaacaaggtggttcttgctgggtgtgattgaagtgttttggctcaacatttagagtgtctacacctcttaatccatttcaaacaagcttccaaatccagcttcttattattgaggccaatccaatcaaacaccatattacaaatgactttattgtactcacaaaagaaaacaagtggcagtagattcttgctctagctcacattgaatgcagccaaatctttttagctgatctagggtttgtaatctttgcctgcaaggcaactaacatataaatttgtatttaggacaattgtaacgattccaaataagagagttccaaattctataggagaatcattcagccacatcctgtcacaaagtttagaaatatcaaatttcttgctcagaaaatctttatatccaatgtgacttttgatagtgtccatcacttctacaattttcctccaataccaattccttcttgtggagcattatagctccaccaatcttgattcttatgtacccacaaattatctttcttttgagtaatatcacaaacatatcttcttaaagctccgaagttccaatgctcgatgttcctaaatctcacctccacgagatttaggttgacaaatttcagaccaagatacaagaactggggaagcagaatcaaccttgcttttccataaaaaatttctacaaatactgttaattctccctaaaatgtatttaggaagaatcattacttgtgctcaataggtgtgtatagctaataaaacagaattaatcaacacacaacgacatgcataagtactccaaattctaattctagcaaccatcttttcaatgatattatcacatttcattgtggagattttttttttagcaaattggaataccaagatatctaaaaggcaaggaacttctaacataactcgaacaatatctagatatgctgaacatcctcatttcccacatactagaataataaattgatgttttacttgcataagcttggaaacctgaagtttcagagaaattcataaaagttctcaacacgaccttaattgagtgtatatatatcattagcaaaacacatatgattcaattttaagttagtacatcggggatgatgtttaaagtcttttctcaaagagattttagccaccaatcgagagaagtattccattttaagaacaacgagtaaaatgagacatgggcctccttgtctaagccttctgttagaagagaaatagcaatgaaaagtactattaatcattagtgaaaattttagagtagtgacacactccataattaagttcacaaatgataaagaaaaattaaaagcttccaacatttcttttaggaatctccattcaatagtattatcggctttcttcaaatccaacttaattatgcaagaaggagggttattcttccctccgtattgcttaactaaatcttaataaattaagatattgtgagcaatataatgttcatgcacaaatttcctttgattttaaataattaaattaagaaaaacatttctaagtttggagcacatcaatttagtaaccatcttataaataatattgcaacaagcaattgatttaaattcagttacactatttgggaaattcacttttggaataaaagtcaaagttgtggtatttatctcttttaagatatttcttgtatgaaaaaaaaaataggacaacgagtgtaaactcttttcctattgtattaatttttcaatttttatatattgtattaatttttaattatatttattttacgtaaatttcttttatttatttattttattttttgtaatggagtaaaaatagttgtgtgacactttatagtaaaatataaatagagaaaatttgagatcctatgctataatgatagatatcaaagagattacattgtgtttctgaataagtttccacgtaattgtatatttttttttcttgtttgttgattctcatagattaatttatttatttatttatttttgaaaggagaggtaacaattttattaaaatgcacaaaacttgaaaagtttcaaaatacataatagcctaaaaaaattagagaattaaatttatagggagactcaactactaaacacgtgactcatctaaaataaaagctcattttgctaaagaatgggcgacaatattcttagactttttacaatgaaacaaggatatactataaaatatttctaaacatgagaaatattattagacaaaataccaaacttattgaaacaagtatttttactatttaccgcaagaaccaaccgcaagcaatcagagaaagcagtaacaatcatatacctaaatcacatgcaaagagagtccattaagtaaaactttggcctcagcaacacaagggtcaaaagttcctacacgtagaaacacacccgagaagaagactaaccattaggattcgacgcaacaacccccatccctattttgcattcttcattatgaagcctaacatctacaaacaagttgaccttgcctaaagtcaggtctagttcgatagtagtcacttcactcgaccccagaggagaaggatgaccattagatgaagacccaccaacattagcattcttggtatccccaaatatagtttatagtccaaaggattgaccatactatatatttaggagaagtttatgatcgtgaacaaaagtattacgtctatgccaaatgcgccaattaagacaatgaactcctccaatttctatgtacttaaaatatccatacaaccctacaacaattcataaaagcaagaggcgtcatttaaagaattgagccctttcaaaatcgaattaatattttgaaaaataaatagaacaaaccttaaacgctttcataactcattattaaaataccaattaacatttatctagattttatatatttcagtcttaatttgatttagttggtgtggtcaaatttttgggatttaaatggaagtcccaaatcttcttaggtactattttttagactgaagttccaaatcttcagtataatccatatttaagaaagttcatttttaaataaaaagatccacttcgacccatataaaaatattaattgtgtcttgtgctcatattttgaggaacccgaattatacaagtgatgttttcctttttttttacaataattttttaaacttaaataagaaataaataatttagtatgtttaagcataaatatgaaattaacagataatatactatatatattgaaaaataattgaagaaaaaaatagtttatgtttttttttaactttataaataaataattaaaattttaaaattatatttatggatataactcgtgtcattcacattggcactttcgtgttgtgtctttgcacttgtcatgtcgtacgtgtttaagctaatatttttcatatagcatctatgcccacatatttttgtatcgtgtggtacaaaaaaaatccaatccaaatatataactctagtatatatatattagattgtaactatgtgcaaggccggtcttgagttgaaatgagttataggtaaaataattttttgggttcttactataaaaataaatggtatttttaaaaattattgaaaaaatatgtacatttttgaaaggtatttttttttggacccctaaaatgagtggacttttggcgcgggcctagcccgcctatgcctgagccggccactacctgcaatgcacttttataagtaattattgataaaaaagtgagttttatatattcaactttaaattagattattatgtagaactcgatattaagtcgtacttatagatagaataaaaaaaattatttcttaggataaaagttaataaaattgagggtcttgtacaaaagtttaaagttaagtcctttatatatactcaaataataaatcgtgtatatt

SEQ ID NO: 304487 - DNA, 862 bp, Cannabis indica
tggcagctaaagataccccagaaagttaaaaatttcatatggcgtgtatgctctgcgtgtctcccaactcgagttcaacttcaaataaagcgtgtgcctctgtctgtggaatgtccgttctgtggtcaagctcaagagactgagtatcatatttttgtttcttgtaactttgccactgcttgctggtctagacttggggctgctgctatagagttggaaaatgctaatatagtctcttggtttgagaagcaatttgaaattgcagatgaggagttaattagcaaagttgttatgatctcttgggccatttggaaggctcgtaacagtattatttggaaagataaacctttctcggttgtggaagtgatggccttagcaaacaatactttacaccattggagaaaagcttaacacaaagatagcattccatctcatgatcttcaataatctggggatggaaaagagctttggactaaatcggttgctggtgtgactaaagtaaatgtggatgcggcctttttcgaagaagagaatcgtttcggttatgggctggtggcaagagattgtacggggcagcttgttgaagcctgctgccagtcggttcaaggtcagctgaatgttgcagcagctgaggaaatgggagtcaaggaagccctcagttggattaaagaaaaacattggaatcatgtggaagtcgaaactgatagtaaattaactatgcaagcagttaggagttcaattgatatgagatcagcttttggcctttttgttaatgattgtcgccactcaatccatactatgcctaatgtcagtttatgttttgtaaaacggcctgctaatcgagttgctcactatgttgcta

SEQ ID NO: 304488 - DNA, 3664 bp, Cannabis indica
taagtaaaaaataataaaaatattactttgttatctttgacttttttagaattaggaaattgaagaaaaaacctagaattttgaggagttcataatttcctctctctttctctttcggctctcaagaacctaaaggaaactagctactatcatccaattttttggagattctagcaagaattctaagtgtttttagtggaggtacgccctaggaactattgctctttgaaagttgttaagcttttagttgggtaaagcatgtgagaactggtttagaatgttgctgagttaagttatgtttaaattcaatatttcgggtaaaattgagttgaatgtatttggtttgcgctagatttttgggtttgtcgtgtagttgaacaagtttgaggtttttgaaactcaaacttagcttaacaatggcatattgtgtttcttgtgtttttcttgctggtattgtttagaaactattctgggatggtattataggtgttctagaaggtttggttgatttttggataggattgagtgagttttgaagttcttggtttttttgcaggagaattcgttaaccggttctgcagaatcggttaacggttacctaaggcaaggtccagggaactggttcaccggttaaggaattcggtctaccagtttggtcaggatcagaacctttaatttttgtgtttcctcagaatttagaacattaccatgttgtttatcgatagggctacctgtagtttttagtttaggatcacgagaaagtttattcaagttgtttacccatttatgtaaatgtgacatagggcctctgttcagcacgtgaattttccattcaggccaaccgacaagcttgaatcttgaaatgaggtaagattagcataaagtatgtatatgtatgtgtttatgtatgtaactgtatgctggttatgttgtcataccctactaacactagtatagttgtgatatggagtgctttggtgtagtgtataatatttaagggtatgttacagtgttaccaacactagtatagaacgagtacgtcgtgcatgtggtataatactcagtggtacccaagaatacagttcagccctaccaacactagtacgggagaagtacttcagtgcatgtggtatagagatcgtactttcgttaagaacgtttgaccatttgataagccttgtaggcaggcatatggaagcctaaatacaagtcgataatacattgtataatttatgcttatcttactgggtctattaaaatgatttcgaagacttggttttctttgccttacgagcttcaaccttagatggaagaggtctttttttagaaccagaagcctctaaaacatcaaggacgttagaaattcccttattggctgcctttcaaacctattctaggatcactttcaacctttgaattagtggactttgaaggagctttcttaggattctttgaaaaatttttagcaggggaaggggacttggaatttgacctagtggtggccatttatacaatgaaaaaaaaaaagttgagaagggaaaaataaatggaggttatggaagagaggggatcattattgaaatgggaggttgggaaaagagtgggttagggtagaagttttagacggtttgaaaaaccctttcatggcttatggatagagcaacaaaaatgatcagaaaagaaaaaaaaaagcaaaagagggagagagggagaaaggtaacatgtaacaaaatgagggggaaaatatgacatcaacaaaaaggtaaaattgtaaataaagaactttttaaatttataaatgaaaaacatattttataaaaaaaggtttaaaaagcgtacagtaataaaaatgtaaaaaaaaaatgctaaatttggtatctagtgtaaaaatccctttcccaaaagcaaattccaggacatcaactctttgagaagaggttggcgtatcacacaactgttgggaattattttaccaggatctagatttactaccatgtatgttgtttaacatcctaaatatgaatttctaaaacaatagaatataaacacatataaagttcaagaaaccttacattgattgcagtagaattaaatgtgtccttccactcagatgtctaactcttgttcatttttgtcgcagagtattatcaagatctgaacccgattctccttcaggtgttggattcttcatagtcttacacactatgattgagtactagactttctatatgtgggcatgtactctatcactatgagactcgaaaagtgaagagaaagagagagaaggatttgaaaatagagagagaagagactccgacaaatttgactaaaaggcttatttgtctatcacccttgtttagagtctatcactatttatttataagaatccttcaatgtttaggtttaaattgtatgtcattaaaaaatgataaataaatggctaaatacaccttaagtggccggccataggatgtgggcctcactaattacaattttgcttatttatacaactatttatcctttttttcacaaaggccatattttccaatttcaatcctttaaatgtacaaaattatttatttaataattaaaattaattatcaaataaaattgtcatttaatttatttattaattagacttaataatgtctctttttaattaacaaataaactctaaaaacttttttattcacaataaagcccttgcttagtgaaaattcataaataagacatagtctaattttagaattataattgattaattaaaaccaattaactgagtcttacaggcagtattgcctcaactagtgtggggaccatgggcctatataaccgagcttccaataagtagatctagaatttaccaagtaaatcctctaacttattaattcttccttacaccattatagatttggaattgcactctcaattatatagagcgctctatatgttccacgaaatatatacgctatgaaattattcattgttctaatcccaataatcaaagatcctacatagattatttacatcaagtagggacaaatttatcgtttcacccctaaatgtattttatccttaaaacacttagcttcctataaatgatgttttactaaactaatataattactgaaataagagatctttcatttatctctattaagccaagctcgaaggaaatcatcatttcacttctgtaacgccctaaataataaggcacgctacccaagatgcttatgaaaccctaatcccctaatcaggattactaataaaattagcgtggaaattaaactttaatcataaacggaatgaaaataaaacttgtaataatttaaactttacaatctaaaagttaccaaaattgggatcccaaaaacatttaaaaaatattattacaagtccttttctttcagccgacctaagcggcaaaacatagtctcaaaaacacatcactagtagaccccaacctgcttggtctattatggcccggacatttacattctttgtccagctcctgcactcatggctgatcagcaatagtcttaccctttcctacacagtagagcacccgtgagccaaccccagtaagacagtatcaaacatatcaataatatgcacatcatataatataaacaacaatgccattcaaatctgcatgtgtgacaca

SEQ ID NO: 304489 - DNA, 2021 bp, Cannabis indica
attaagattacaccaaaccaaacacatcccatctcacatttaacttaattcaacatctaatctttacattgattaatgcaacaaataaaatagttttacttaaaaaaattattaatagttgttgtttctctgtatggctcttgagccgatttatgaacccaataaagtaaaattgggttcatatgggctcatgggtgagtcaaggacgacaaacttacatcaacataatagattagatgaactttatctacaagatttcttccctaaaggcgtggaggccctagggagaatctttcgaaaattccaatgagaactcttcggaaggctccaaagagaagtctcttgagatttttctcgttaactgatggtgcatcggtaaagcgagacacttcatcacatgaaaacaagtcttttcagatgaacctatctgcacatcttttgacactcaaagataggacattgtagcttgtccctttcgtgccaacagaaaaattggtcttctataaagtaacataaactttggaatttttgtacccactactttgatatatactatcccatgcattcattggcgacacattttgaacctattaacatcacgtatcaaactagataagtaaactttaccttttgtattaggtttttggttatgtaggaatgaagaaaattttaattattttatttgtaaattctcttttagagaggtaagttgtaattagcattgcattgggcctcgttaatttgatctaattaataaaaaggttgcctataaatagaactccataccaactgtgcaaggatctaaattttttgttcttaaacaaaagttcagcataaattctaaagaactttcattgctttaaaaaaaactcgaagttaatatagtgactcatgaattaggtgcatttggttcggaaaaataaaaatataagaatgacaatgggaatgagaattagaatagaaatagaaatggaataaaatttaaaaatgtataaaaaatattgataaaaaaattattaatttttttttctcatgttacattaaaatagtatttcctttcatttcaaaatagaatagtcattctactaaaatagtagaaaggacattccatttgaatgttattccaatactttacactacaaccaatcaaatgaatgaaatgaaaattattttatttccattccattctattttattccctccaaccaaatgccacctaagatcatttcaggtttgaagcacaaagatggtgttttgtacatcaaaacataattgtaaatagaaggtcatactctgttatgagtgcgtttcgacttcttaaaggtgagttagttggagtcactaactcggccttttggaaagagttgtacttgagagtgcctcctaaagtcaagaatttggtttggaggacttcttccaattgtcttcctacctgtgtccaattaggcgtgaaacatatttcactcccctcattgttgtgtccaagatgcttacaaattagaaagtctatttctcattgtcttgaaaggagttcgtttgcttttgcttgttgacagatgacgagtattttggtgatatcgattgataataattattttgggggatgatggcttcataatagatttcattgttgggattttgggatgaaacatagagttgttatgctttgttggacgttctggactgtgcacaatgacaatgtgtggaacgataagaataagaatgttaaagaggtagttttgtttgctaaggatagttttgatcaatggagctgtgttcaaaataaaatttttgattattctttgttttctttacaagatggcgaagggcatgagcactggattacaccggttggtaatgtaaagactcggtttgaccgagtcaaatttgtttatatatataaataataataaataatatatatatgtatattaaaaaaaagaaaaattagaaagtatatacagaacgttttctctctctctgtctatctatctatctttatttccttctctctcttcaaa

SEQ ID NO: 304490 - DNA, 4199 bp, Cannabis indica
attctagccattattatatatatataagaaatcaaaattttgaagatttactttgttaccactagttaaaatttggtagctagtagtgatgtgactaaagtttttgtttgtataattaatacaatgtttgttgaaaattcatgtattatgaataagttggattttctatattgtgcattgtcgtaggagaaagggaattggaaaaattttactaaagactcatttagctgattatatatataatatatattatataagcacattgtttttgaaatggttttgtaattaatttgagcactggatttaattatggcagatgtttaattataattttttgttatattaatttattattttgcacgccgatataattactcttcttggtttaaattaagtgataattactacaatgacataattattaattgcatattggtattttctattttgtttatagatttaaaattttgtgatttgagctaaaattctaatatatattataatatattagtgaatatttttttataatagttattaaatttaatatttaattgtactaataataatatatattttgacattaaattctgattataaccttaataaatatttctgccaggaaaagtagtgcattctatggatttgttgaaattggtaattaattattgtgttcgtgtgttctattaattaattactatcgaaattcttatccaaatttctagctaacatatgaaagatatattgcggtgaattcagttgaaaatcaatttaatttattactttaaatctaaaccgtttaattgttaacgatgaaatacaaagaattatgaaatcttaaattttgattgataccctaaatattttataggtgatcatatctatttgtaataagagagactctgtaattgtgtcaattatattattgggggcaatattggaatgtaggttaaattacacatatacatatatagttcattcatgtcagaaagtcacgcgactcgtcggggttagatttttgaggacattaatttacgatgtgaagtttataattttggccggaaaatcgtgtattaattgtttctatgaacacatcaataattattataaactataaatataatgacaataataataagagtggacttgtataacaaaaagagctaataattttcatttaaattaatgtattgttttgtcagtattatgtatagcagaataccatttttacatcaatggtaataataataataataatattatagaccacttgcaaaatacaagtggtatatatatatatattgtaagtatatgtagttctaggtctaattcaattttgattctgcatgtgtaataataataatatatatattcatgataattgtctgaataaataattaattattagttataggatgtggaagaaagcatgatgagatagtgttcttcttttcttttttgttttgggtttttatgatctctctttattagtgtcttatcaaaactaccacttcaactttgtgtggaatatgcaatgtgacatttcatttgtgctcttaaaactatgcaattgattgtttgtttacataatcccaaaaaaaaaaataaaacaattactcattatttgattccctttgtctcattccaaattctaatttattcacattttttatttgtttatttattttttggcctaactgaatggattcttcagtgttcaattctttctctatctatttatatatatatgcctaccctagtttaattcattttttttactacattagtttaatttaagatgcccctatatattaataatattattataaatatgatctctcatattttttactgtcaaactcatgtgaaaacttaccatgaaaattactttttttatttcttctaatattaatatatatttttgtaataaaaaatttgagggaaggtataggtggagactttctccaccacaaatttagggcttgaaagacaaacatcaaattttctacagcagagagaacagtagtactatatccatatatgtatatatataggtgtgatgcagctgtttaatttgtttatgtctcatttcttctagcaaaaaccatatttataatgttaaattatagaaaaaaaaaatcaaacaaaaatgaatattatcattagttattacatactaaataatgttaataacaataattttaattattgtactggtgtcaattcaagtagtactattagtgtggttgcaataattatagttaattaattagttaaataattaattttttctttctttcccaaaattaataaactcccacttttctcggattctcatgtttttccttgagcagcacaaattaacaggaataattacaaaatattcctcctttttatatgcacaaaaaattctatcttttcttttcttaacaaattagagaatcttacaaaaaaataaaaaaaattaagagaatgatattcctcaagcaacttctttctcaagttctatcacttgttatatatataaagctagttttgatgatacatattaaaactatgaatattattaattaattatacaatatacaatgtgttattttatattttaaaaaggaaaaaaataaaagagagaagaatcaattttgtgagatgatcttagacaaaaaaaagtctcttaacctttttcttcacataatgaattagccctagccaaacactacacacatatacatatctacatgaaaatgttaatttaattttattttatgtcacaaaacaaaaatcttgcaataattaataacagaaaagtaaattataaataaataaataaataaatttaataaattacacacctttattggattattcacagttgctagtccaaactctttaaacgacaacaactgaatacttgttgtgctttgctttaaatttagttgtatgatgtcgtttgatatatatatagcgcctatatagctctatatatatataacatagctagctagctactatatatacatacacttttctagggcaacctttaaaaaaagacacaaaattagcttaaagctatatcaaaaattagaggtaaatatttctaatgaataaaaacaaacaaacaaacaaagagaaagagagagagagagattaagagtcaaattaagagagaaagagagaaatgtacgtacatgaatatataaatatatatataatatatgaagcatgattgttcaaaagtagtaaaaggaaagctttgtttgagtgtttttgttatagctagggcattttgagcttagaagaatgaagtagaagaaggaaggtgagtagtactagggtgagcccaagactatggagagtttaatgcacccatctcttccaatcccaaaactacttaatttttttttttttgggttaataagaaaaaagtgttttttgatttgtgggcatgcatcattggttgtgtggtcccaaacaataaggtctaaactgcaaaaggttttagctttcatgaagtagctacctctatatagctgtttcaataaaaccctatttgtttttctcagaaataaagttggagacagcattgtattttttgatgagtaaattaaattaatgtatggaaataaaaatgaaacctttttttttatttttctttgaatagttgggaaagaaagctgcaatttagatgttatatcaactatatatatatttaatatttatattgtggcttttaaggcacacaaagttttttgtagtgaaatgaaaccaattaagcttgttttgtctcatgaatcgtctcttcattccccagcctttttatatatttagtcagacttttttattttgttgtgttgttcaaaaatcaaaataataataccaaaaaaataaaataattaatttttgtttagagatgaaaataaagcaaaagtgttatactgtgagtgaagaaactttttgttgtttgttcataaaagtttatccagttttcttaagtacgtgacttctgtacacaacgttgtggaagctttcttttttcatttcttattttttgaaaatatatatatattatttttttggggaaggaaaaaaaataaaagaggaaaagtctactccataatctccttttattgtacgactcttatctattgtactgtagttggattctattgcaatattacctctgattttttttcttttttttt

SEQ ID NO: 304491 - DNA, 2491 bp, Cannabis indica
actgcctacccttttaccatcaatagagaaaaattattgtgggaggagatgagatggtccattgatcttctcattgacaacctcgagcctaatttgaatgcttgggtcagttttttttttccttaatacttgttctttatctttcgagataaagaaaatgcttatatgtttgtgattgtgtttcagattcaagagggaaggcacatttgcctgtatggaggtgaagatatggagtggatcagggatttcacaatagctgcaaaaaaagtggcaagagatgctgggatcagcctagagatggtttatgtgggaaagagccaaattaaggagagagttgtgtcgaccattattgacacaatccacaaagagaaattgagcagaactcttgaccgtgaccacattaattacttttggttaaggttgatgagaatgttggaatctaagcgtcaattggccaagtttgaaaacacaactcatgaccacatactggaagggatcactgtgattttaagctatgactctagtgattacaccaagggaagatgggctgtgatgagtaaggacattggtcatatggttaggagcaaagggacacacatgctcaaagccttgactgagcacagactttggattccgcggcagcaggagattgggttcgtccctgctttagatgagtacctcaaggaccatgtccagccccacgagccacaccactgcaccagcctcgttctgccttccagtggtgccttgcctgatgtcatgaagtgctgcgattgtggccgcctaatggagacttacactttgttccgctgctgcctagaatgaacttgacatggatttttttgaaaatggctatgcttgatgatgatgcttcttattattatttacaatctctactactattattgcttataagcaatcaaataatggcaagaagacctaataaggtctcttctcttcttcatcatctatttcacttctcttttttcccttaattgttgtaatcgagaataattatatgtgtaagttgttttgagttaaatccacttgtttcttgattccaatgtggcctcttacattaaaatttccaagaggattcgttttcaaaatgtaccactagcttcaaaattgatttattcttccaagacatgaaatattctccaagttgtaatatgataaataagttgcaatattcctaagttcgatagttgcctatgaattttgtttgagatggataatgggaaatatcttgagcatatagcagcgatatgagttggggcattggttaaaaacttcaaagacgagcatctcaatccatcactagttcttaatcaaaaccctcatcactcttactcggcagcaacagaaggcaacacaaaacatccacggtagcctcaaaaccctttccattctttctcaagcttaccctattatctcaaggtagcctctcaactgtgtttttgtaacaattaagatcaacaaatgacaaaagtaatcaactatgttaaggtttaaatccattgcttttctattccaacttggactcttagagcaaactaaaagggtattgtgttttgaattcatttcaaaatttaccagaagacaggtaacaaagtgcaacaaaaaaattagtgcacactgctgtttaatactggcttagaaatttatttatgcttcggaaacttgaacatcccctattttaatagaaggggttcaccataagaagcaactagaaaaaattgaaaataaatatatgtatatttataataaaatgtgacaatctcaaacactaaaacaaactacgaccaattatattgcgtagatgctttatattaagatgcattttgtgagattgaagatagtttatgctttcgttgacacgtccgtctgggtttacagaccattgatgaacgcaacgcctatcaaaagcaacaatatagaaaacaaaaaggaaaaagtaaatgagatttgaaaaccccaaacagaacaaacctatttgatgctgtttcgctcgcagagcggcgcgtttgatgttttgaatgactagggcttgaagatttcagtcttgttggcttcgatttataaagacgaaccctccatggtaaatgaccaaaacgcctataactcacctcatattgttttcaattgaagaaagcccaagcccaaaagatcataagactagactagtggtaaaaatggggaattttacaaaaatactgcttttggaccaaaactttacaattatactgggacacggcaaaaataacatttttactgccccagcccaatttcattacttttgtactgcccaagcccaacagcataacatttatactgtgtgtgtggggaaacaaccttcttcgtgtgtggggagacgccggagacggaaatcaccaagaaaaaaccattaaaaccggcaagaataaacaaaagcagtaaaatcgacgtcaataaataatcatggcaaaacaacagtaaaacaacactaaaa

SEQ ID NO: 304492 - DNA, 1326 bp, Cannabis indica
ttagggcacaaaacccaatacatttctccaaggtgcacaattaaaattaatctccgaaaagcctataatacagtcaactggatgtttattgaagatctcttgaaggctctctgctttccttcaaagtttattagttgggtaatgatctcttttgagaatacttcttattccctcttagttggaaaaagctttgcaaggttcgacaaaaattcactcaaaaagagatacgagctgctgctaaaaaaggtaaatttagagcttcaaaattatatttttccactatcactcagccttcggttctctataacagagatgtttggtgtggattaaatatacctaaacatcgtttcatactttggcaaactatcaacacaaacctgctcacttgtgacatgttaagtaggctttacattgaattaagctctctaagttgtcgagtttgtgacaactttaacgaaagtcataatcatctttttttagaacgttactctcacaatgtggtgaaatctattttcagttgggctgatttttctatttggtcgttgagttacagcagctagaacaactaggtatcgacccctacccctggtttaattcgatattttaatgaagtttcttttttcttaataaaaaaaatatattttaatgataaaaattttgttattaaaataatagtatattattgtttaatgtatatatactaagggattaaattttctttatgaaaataataataataaaaaaatagataaaatagtaagaatgtcatttttaagtattttaatttagagaaattatttcatacactatttttttatttttttctttcaaatttacggtgttagttgttccggtcggtggttgctccaataatttctatggaagttgctatttagattttaattgaaatttaagttgctccattaattgttatatgaatttctataaaaatgcaaaaaaaaaaaaattactttaaagtaaaaaaaaaaaactctttaaatttatttggcatttattttagtaagtatctatatatctatatatatatatataaaggagaagtatgtggcggtgacgtggccgtctaaaatcatcttaaatagcactatctcttctctccttaattctcttatttttatattttttttattagatttacaatttaaaaatataaaaattaatctatcgtattattatatacagtacatatatactctaaaattaaaacttataatttaataatattaaaatttaaatatccctaatctaccatattatatctttatatattaaaagtgcctatctaacgacatttcttggtttaac

SEQ ID NO: 304493 - DNA, 1578 bp, Cannabis indica
tatatatataatatttatatctattttttttttaccttattctcaaagaggccaatgagaaattgattatttgttcttgattctgagtgagatctcttatagttctccaaagttatttatgaagaggcttttattttttttttcctctaatatacagaaataaatataggtaattttttttaggtgtagtccatgtatgtgtctgtaaatacatgttgttacttgttaagtaatttctttaattatgtgtttgtggataagttggaaagccccaaaaaaaaaaatgatgcattgaaattgaaaagagatcacaaatatataatattcatttaactaatctcttaagtttaaagaaatactaacaccaaatgtagtacaaaaattataaaaatatggatttacaatttttaaacaaaaatttatattgttgttatgttatttacacgttatttttatgttaatttgtatttgtattgtgattgtttatagtttattcgttgtttctatgttggtttcatgagattttgtgtaatgtaactacaaaaaattgtaaaaatgcaaaataaaatttgtaaaaaataaaaatattattaataataataatagtaataataataaaactaagcagtttgtgtaaaaaaattcaaaaaataaatatatattgttgtgttctaaattttaatatacaataatattttaaagagtactgttattggatatcagtagtgcttagcaccttctacatatattatcttgtgattatttttttaaaagttattacattaaattattttagacaaaatacttaattgaactaatagtgatattgacacgtagaaaataatttaatgcaaactaaaaaaagtaaaatataattaattatgattaataaattaaaaagtgatgcatagaaaattacttaaaagctcaaacaatttccatggtaaactgatgatggaaaaatgatggttctagatggatgttcaaataagagaacatttatttattacatgttacaatgctatgatggttctatattttaattacttaaatagatactctttttctgccactatgatttagtagtaatgatttagtgactaataaccacaccaaattgatataatatatgactaaaatattgattaagtgcaacattttatattttatactactttctgacttttcccacaaagacttattttgtaatatttgaaactactcactgttttttgtccttaattaaaatttaaaatcttgaatgctcttttctcttttcaaggatttatagtgacaaaaaaaaatattattaaaggctcgtgactcaaagattacatttttttagtcaaataagtcacaacttacgagctcaatatgtaaaagctaaaacctctatgtttactttggttggtaagcccaagttgtataaaatccattatggaagtcaaactcactcaaatgacatagtcaatgtcaagaattcattctcattggattttttttagggttaatttcacaaatgcacaaaaataacaaaaaaataataaaaatacggtttcacggaattttaaacaattt

SEQ ID NO: 304494 - DNA, 802 bp, Cannabis indica
tttcttaaactcttatgtgtttttttttcattgttttagaattcatattaggaacttcccgtggatatgaaagccatgggaatgtacaacctgataatctagaatcttctcgcatgaatgcaaataccaggctggcacaacatggaaccaaggattttctcagcatgatgcaagaaatataagaaatcagcctggaacaggtcgaccacctagacatccgcaaaggcttaatcacaatgatagagacagcacatacacttacctaagtaaagggcgtgtgtcaaatctcttttcaagatgaaggctagtgcaagaggaaccacaagagacagggtcgagtacagatcctagtggatcattgtcaaggacccgtgggcaaagtagatcgagtagaactcatgtacatgacaggagagcatgagatgaggaatattcacgacattattatagaaatgaccaaaaaagcatcatcaactcttaaagttatcaatccgaaaggtattcaagacaaggtcagtaagcaattatgaccaaaaaaatgaaatgtgttgcgaccccaatttatgtggtatttaaattgtagacaattagatctgtgcaagcatttgaatttaaatgctccagatcttcctaatcaattaaatcaaaacgtaggcagacaaccaccagtttataatggtttggcctaatcaatggccttctccaattcatctaagaggttccactatgagcaaataatatgttaccgactaatatcagatcaaccaagatcaatatggaaatacatgttggaaattatttt

SEQ ID NO: 304495 - DNA, 1694 bp, Cannabis indica
atcatctacggtcaaatagccaacttatatttttttcattattttatttctattttcaagggcctccttcaattattaaaggagagctcccttagttcatttttcacattcaaaaaatgtagacataaggttagagcatctctctccagtttctctctaaacaaattaaagcttaaacacttagccatttttctatagttccatctcgtgatgataaaaaatcaaagtagacgtagctgcattaccatcgcgacatggggaatgaactattataaattttgtgcgtctctctaaattatatacttacattcattattcgcctcgccaatccactaagatagtgtttgcaactttttagcgttaagattttggtgctttcattgcgagccacaacttgagtcctcaaactatagtctgtttccttttttgtgagctttgttccaaaaggaattcatcagttcaaccaagaaatcatccatgaacaagcaaaaaaacacttcaggctactactcagcaagaagtaggcactgaaattccccataaagaagtgaactacaagcgagcgtctgaaaggactcggactaagaaatgtggttctatgaggtctcagcctaattttgagcagttacctgttaggggaatgagctatgagcgagtgtctgaaaggactcaaactcgagatcgtagacacacaagtccaccaaatgcagctgataggaccaatcacatttctactcgaagtaattcaaacaatgtgagaaaccgatgtcctccgtgggattgtcttcataagtataatgactcttggccaccttgtgaaagggaaagggacctgtagtgagacataggggaagaacctaaaagctctaccaggaaagtgaagagtatgagatttggaggctgaagatcaattaactactccacactcggaagtacttctgagatgaacaaggttcttggtgtaggtacttcactcgaggtcccgatgactaatagtatgaatgctttccatgggtacatggaaacgtgttgaacttgagcaatcaattaaactccctccacacatgtcactctaagcaggactattttgaaggaaatagttagtgtagtattgcaagcagttgctcacaaagcaaatgcttgagagatgactctatcatcatacgggatgaatccctgcagttgccagcaaggacaaatgaccaggcaacaacaaaaaggcctaagtcaatcaatgcctttgatcaacttaaaagacaaaagagcctgcatgacaacattaacaagaagcggccaactgatacacacatcaccacagtgtgtaatgccaaatttgacacccttgtcgttgtagttaagggtatcactattccaaagccaatagagtacggattagatcaagagtggtcttctcctctctcaaattgaatcaaggctttagagatcccctcaaagttcaaaaatctagtatggcttccatacactagcaaagaagaccccctctctcacatacacaacttcaaagtacaaactgacctacaaggcattcgaggcgattctccttgttgaatatttccaaccacactatcaaaagtagcacgacaatggtatctcaaactttctccatgatcaatcaattctttgggaaatgcttaagcaagcattctatgtccaattctccccatcaaggcaca

SEQ ID NO: 304496 - DNA, 1062 bp, Cannabis indica
ggtagtgagtgagtgcagtgagatatctaatttataggatatcattttgtcacttcacaaaatgtatcggtcactgtacattaaatgagtatactttttaactttaattatccttagatcaatctcaaccgtcaaatcaaataactctctcatctaacggttgcagattacaattcgtacgtacaataatagaacaaaatcatatcccctaattttataatgcaggaaatctcacgtgtcattattattttaattttccaaaaaaaaaatggaaacaaatatttaaattactttaaaaagaaataataataaagaagaggaaaattgtctgctgtaaataaaaaagtgaagggtaaaaatttgaaggtttgtgatcaacggaagagatgagaatcagagaatgtgtccaatcatggggttaggaatttaacttagattttattttattttacgtgtatatatttgaaatggaaaatggtacagtttcagagaaaaaaaaatggaaaatgctcaaggacaccctgtatcaggcattataaaatttgtaatatgattattattattacatttttaatatcaaattttaaatattttaatttaataaataatataaaaattagaaactaattataaaataaataacaaaaatgggttttattctcaagtcagctattgaaatgcccaatatttgataatggtatcaactttaaggttttgttttgttgttttggtaattgtgtaaacattgatatcttaatctttctaaaattggaattaatatttacaggtaaggagaatttattccttaagcatactaggcactttgaaatcttctctttctttataaatcaagtgaactggattttttttagagagaaatttggactgcttaaaaagaaaacaacaccatttattttgttttggatttgatttttttattacattaatatatatatagtattatttgagtaatattctttatttataaatcaataatatgtgaatattttaacatttatttttatttttatggtaggtatttatgtttaggacctccttagg

SEQ ID NO: 304497 - DNA, 2841 bp, Cannabis indica
tttggtttgttgcgaaaaaaaaaaaatgcctatgtaatttttttaagggataagttaaggaatatattatcttttaatcatttaaccaaatttagtttctttgtaaatttaattcaaacatatctatttttataagtactatacctaaaatgttcagagttacaatttccctcacgattaacctcttgaaagcacacaattcagcagccatcattctccaccattgttgcaacgttctcgtgacttcaccgccaccgtcctcctcctctgtcgccaccatcaacgctataccggaaacttgctgattttttcgtttagtgacagcaaaaatggaagtgttataatgagttatcaattggtttttttattgttttttttttttttgaattttttctcattattttttgttgtactattttagtaaaaatatatttgcataatttattttattgggctctgtgtaatatgattaagtgagcttaaaaattgtgaaatgcggataaaaatttatgtgcccatgcaatgtttgttttaattcttcaatggcatgtgttattaatgcttactttaggagctaatgatttgaatgattagcttttatttgcaatgagtggaagacacgtggtgttttaggcgcatggtgtttcaaagttccatattgatccttatcaatgctgattaaatagttgagcttttaattgccttctttcagtgttgctaaaaggaacctgaacactaggatacaatctcttttggtggcctaaaacgaatctatgaaaaatttaaattactatacacatattgaaatacataatatatctatatgtagatgtgacattagttgaagcatattaattaataatatcttataatttaagtacgcttgaaagatatatttacagaggcttttaacattaggtggggtttatagattttgaaaatatgtttcaaagcttgagaggcaagagacaagccgatacttagaaatgttttcccgatgttttatgaacttattatcattattttagggttcatctctcaaacacgtattatcataaactcattatatgtttttatagcttcttgcatatttgtaataattttattcatagagtacttaaatttgcacgtacaactaatatgttttcattaattagcgaccgctccttaatgcacattgcggtcaagaagtggagtaaattgagcaaaaatgaacattgtagtgagaaattttcaaaagagattcctagctaggccacttctgagacttaccactccattcaatcatgaagcaacatgaacaaatgtgtgttcttaacttatttgatttgtttatatgttacaatacttatttgtatatatttccatagagagattttaaaaaaaaaaaaaaaatactgtggtattttgtagtttagtgacataaacattactacgactaaaattgttatatgtatatctgtactgtaagagacgtctgcatttgaaactcacttgatctcgtccttaagttctctctttaaaattaactactttggaatgaacaactaacaagcctaacattgttattataagcgaataatcttcaccactagaaaaacaagagtaatgatctaattcttttttcattactttatttaaagcacaacgtatacctaaataaaatatgttgttaatcttatttaaggcacgaagtttacctaataaaatgtatcatttatcttactttaaggtaattatttagcacgatatttacctaataaggcgtgtcgttcaccttattttaaggtagttaatgttgagaatcatggggttttatctcaaaaccaattggtaatgagtggagtagcccatgttcttatatatggcttaattctctaccatttattttatgtgggacaatgcccacaatattctcctcaagatgatggctattgtttgctcatcaatcttgaaccgtatcagagtggacatagtcactatctgtataggtgtggatcggataggatcacttgcccgcaagggatatggctctgatagcatgttgagaatcatgggattccatctcaaaactaattggctatgagtagagtaacccatgttcttatatatggttgaattctctaccatttattctatatgggacaatattcacaatagttgcaacgaataatagaacataattaaactcacattttcagtcaacgattccataaagttattgatcaacctttttttagtagttttatgtgtttttttcttgtatatgtacatggttgtagtaaagcatgcaagcattccaacaatgagtgattagtagttccctaactctatgtttgttgagttgagagattcattaatgttagaagtaatagttggatacctattgtgtttgaaatggtaccctgaccatttgtagtatcctactttttctaaatagggttgaatatgcttatcaaagctttcaagctccctcatatggtattcaaatgtcctctctatgtgtgctctagctactacaaagaatggtttctcaattttgcttctattcttttttaaggttgtttctaggttgaatgataggtaataaatccaatagccatgggttatatctaggaatattttagcagtttctttgagtatgctctcataccggtctaagatcaagcattgttcttctttgaccccataagttcgccttagtatttcaaaaaaccaagtccatgcattgtaattgtaacgccctaatgctaaggcacgctacagtgctttttcaattattgtgcaatctttgctaatcaaagaaatttctcgaaaaacgtgtcaaattaaaacttttgc

SEQ ID NO: 304498 - DNA, 2415 bp, Cannabis indica
cgaactgctcggggctgaacctcgataaaattcttgtgtctttactttgctttaccatatattgattgctgtcaattacttatcgcctactaaataagactcactgtcgttggctaaaagcgaggtgaacaccaactatgcaaggagaattggaagtcacatgcgaggcaaaagtcagatggatttatgacggttattcttgtctgacacagaatcagatcttgtctcttatgtgcaagcctttgccttacatgtgccctgcactaacaatggtccccactgtacaactagttcgccacacgagaaagaaccatcttggggacccaattgacaaatatttaatgtattttaacccaatagtaggccttttggtagaaaccctagacaggtcgtggatattcccatgcccatactttaccctataattacgcctttatttcctcataaaggggggatcaaaaaaagtaatacccgaaactctaagaaaatctctctaagctttctacttttttaagagaaactaagagaatagagttagggttttctattataaacaccattgtaatacattatacaaggcttctaaggccaatatacaaactcatgaattagggatcagtaacgcctgaaccatgtaaaaatcattgtctattttatttattgccttttctatttcttaagctcttatttaatttgtttttgaaaatctcgataaacagtaattaatattttcaagtaaaaggaaaatagtaattgaaaaatttaatacataccatacaaatatattttcaaacataatatatcaaatgtatattttattctttttttatatggaaaagataatctaaaacaaaatcaagcatttccttctttatataatactttttattcttctttagaatttgttatttttttgttttacttattttaatttgtagttgaagacatcaaataacaataatttgttttattttttgtttgtaaggtggaattatttttaatagatataaataattcaatattaatgtaaccaacccaatctgaactattgtggattggatttgagctattgtgcagattggattgaatccaaaatatgaaatctccacctagtgcggatcacatgcactccaagccaaatagtatggattggattaaatgattgatggatgtgtatgttatgcattcatttactcttatttattcttgtttaaggttatttttcttgactttttagttggatttgatgtgtttctttaagtgtgtaggtttgtgcttaaaagataattttatgatggactgagatatttatgaaatttttgaccatatttccttcatttttttgaagagctatgaaatacaaaatgataaagctctttcttagcttttcaaaacatgttaaatcatcccgtttggagtccggatgcaaaaattataatgttttactgagtaaggtcgaatcaataacagaaatgaccaaaatagcttttggcactgtagcgcctgaatagaggtgatacagcgcttgaaatgggaaaattggatttttgcacaaaaacgaaacctcagggaaactcgcttggctccattgcactgtatcttaggtgccatatcatcgactgtacggaatttaaatttaaatttaaatttcaaacatcgtcttttcaacttttctagtgtataaaaagaacattataactttggctctagaaggagagacaacattaagagacatagaataacaatttaaagtagaaattttttttgagagatcaaggaaggaatctgaagctgcactcaagggttttcatgagtttttcttctttcttcttaatttctcttttattattcaaattataaataatattttgagatggtaaaccacactatgcgtggctagttttctttaatgttagggtaagatagatctctaattatgacattaattttatgatttaatccagggtttactttagtctaatatgctttatgtgattctaccatatttaattgctatcatgattataatttatgtataattttactttatgtgattataattaaggctattgtctagatttcgtgatttgttactcgagaggtgaacttgtaaataattgggcattgggtagatcaacttaagttgtgtgagatcaagagataagtattgactaaggtaaccgaaatagttttaaattgtgagatcgaaaggtgaaagatttaggattatttcataagtgacacttaatgaaggtaaggtataactgtggaaggttttgccaagattgctactcctttgagcgagctgactcgaaagagttataaatttatgcagactgataaaatgagagaataactttcaagaattaaagaaagagattgattactgcatcagttctaagcctgctagtcagt

SEQ ID NO: 304499 - DNA, 6219 bp, Cannabis indica
gatgctcgctattcgttgttcagattcgtccaacgggtatattatacgttgtgttgtaacagtcaacatgtctcatcactacctttatatacgtagcgaggttggtgccttgctttgtattactgatgtcatccttacaattgcgtcttctgatgtgaaatggtttcttgtcaatgcatgaatcaatagtttgtacatccttgtctcgctcaagactgtgtgttcagcgagttatagatatatatgctctatcaatctccacatttaatgagttattccattttaatatcctttagtataattgtcattatattcgttgattcatattctctaaggttgacacgtgtcctcctctgaagtgtcagccgaattttggatataataattgctgaattttaggttttcccagaacacatcaagaatatgaaggttgggggtacctatggataagaaaccaataggtcatccaaggaaaagtaaggtcggaagaagaggggagaatcgtttcttgtctagtcataaaagagtcacgatgcataaaaattgtgggaactatggcagttcgggccacaacagagtaacatgcaaagaatgtatttgaggcgtactctactattggttgtaataacatgttttgtgaattggatttcttatttaaaactgcttatttggtttggaattctgctttaaaataatgtcattagtaggtactcgacttaattgatgaaaaaaaaggattatttctatttttattaatattatcaataaaatgtcgacattatgttgacatactatcaacaaacacattaattttttaaaaaaaattctttagcgatatcatcgacaaaaggttgacattagagatgagcataaaatctagaaaattaaaaaaattgttcaaattgacctaccaaacatcgttggaaccgaaatcgacagaactgaaaacttaaaagattgctaatggttaaaaccgccattgaacagttattttttttttttgtaataaactgaccaaaaaaactgaaactgaccattatacattaattcattaagtttttttgctttgtgtattgtagttacgagtaatatataataatatattattattttattaatattaaagttaaaagaataagataattagtttttgaacaattaatttgtatgtttgtagttgtaaaatgtagaataatgtgtttatagaataaattggatcaatttttttttaaaaaaagtccggtttgggcggttcaaaccgaccaaaccgtggttcaaaacggttggttttaagatagtttctagattggtcgatcggttttcggattgcaccaatccagaccgaaaactgaattctgaatttttatatagaaaaaactgaccaaaccgaccgatgctcatccctagttgacatcatgtcgtcatactacccacgaatactttaatttttgaaaaatcattcttcaacaatatcattgacaaactatcaaaaaagtgtcgatatcatgttgacatatacccacaaacactttatttttgaaaaactattcttcagcaatatcattgagaaactgtcaaaaacttttcagcatcatgtcgacaaactacccacaaacgctttaatttttgaaaaccattcttcaacaatatcatcaacaaattgtcgacatctcattaacactttatttgtaagaaaatgataatttagccaatattatcaacaaaaaatcaacaatgtattgacatgctatcgatatatcatgaacaatacgttatttgttaaacaaattcatctaagtaaataatgtcgataccatgtcgacataccatcgataaactagtaaaattattggaaaatagaaaataagtaaaactataacaattaatggttacactaattgtttaaaaagatggacattaaaaaataaaaaataagtaaaatatataaactgtaacaattacaccaatgggtgtctcaaaatataaaaagtatggcagattacacagaaatatcaactggcgttctggtaatagagatcaacacaccaccattcacaaaacatcatcacgcgatcatgcgtgagctatgggatattgcatcatcagatgatccacgtaaacaatggcataaacgccacaatcaccactaaatgcaacataaaatacagaattagtagaatataaaacatattttaattaatatagtacttttttaaagatatttaccttttttttaccttaggaacaaagtcgtgactgaattttaagttgaatggatcttcaaaagttggttgacattgttcatatcaactgccatgatctaattattatttggaaattctctagatgcatagagtaacaatggcaacagattttcctaggtcattaggatggctaccatgtccttccaattataaatgctagaatcacagtcgtacactgtaattttcaacagctcaatctcgacttcaacagccacacattgctactgataggaaagattcagaataaagtaaatgaactcattaccccccccccatcttagatagaattagttctataattatagagaacagttaaacagttaacaaactataataaacttgtaattatggttgaactttaaaaacttgctaaaacaatacatgaacacctctacagtactccatgatgtaatcctcccaaacaaagtccattctgggaccattgtagtttgcccaagcactgacgataatactcatcaaatatgttgagaaaatgatacccttataaagaaatgtcaataaaaagaagtagcgtcgcctcctcaacatatggacgactgcatctatatgttgcatataaaggttagaggtagtagttagacaactaaatatattaattgtagattagtttagtcataatatttagtacaaataaaatgtagtaaaattgtagattggtttacttacatgatctataagccattcctgcggtatcaacaacttctaaaagaacgatagaccatgatcaccagccttcaaatcccaaagttgatggttgggaatgagtctagaacaccaccttcgaagagtatccaacaaccactcatccggtggagccaggggatcaaacgtcaaataatgcctttgtttcttcttcatcttcgtgtagcctttaaacaaagtaggaggatttctcatcctcctaccgaactgaaccctttaggtggtgcctctaaagccataacatcactctgtgactcactgtcacatatggagataataggtgcatcgacaggggtacgtggagcatcgtcatagggatcatacccattaggaatgatgaattcatctttatccatagcagatggtggtggtgatgcagctgctgatggctttggtgctagatctacggctggcgtacgatacaacatatttaatatagatctaattttctctttcatgatgttttggccacccttcaactctatatggctactctgatatgcctccttcagctcggcctgagaagcgtaaagagccttttgctcagcctcgatcttgtccaacctcatcactatttttttgtacttagcaccactaaggcctgaagatgacatagtgggctgagggtctaaagcagtggcctaaaaaaatatataccaaaagtatacggtaagcacaccatcaaaaatattcaacaaaatatagataaactattgccaaataaaacaaataaaaattatttacaaatcaaagatgtgtaataatagaaatttgtcgatagattgtcgacatatgatcgacatcctattgatattttcacttgtcaaaaaattgtcgacattatcttaatgaacaaaataacaacttattgagatatttgtcgacaacatgttgacaatctgtcgacaatctatcgatattatcttaataaataaactaacaaataatttaaaaaagtgttgacaaaatatcgacatcctatcgatttatcttaattcaaaaaaaaattaatatagcaagtaaatattgtcgatatgctatcgacatactaaataaagtctaaaaaatatcttaaataaataattaactactcattatgattttactaataatatcttgttgacattgcatcaataaaatatcgacaaacacaataaaatataaaaaatgatagcctaaccaaagtatcgataaatcataaataacatatcgatatcctaaccaagtaaaaactagttatgctcaaaccatgtaaattataactaaccaagtaatcacaactaatgacaaataataatcataaaaaaaaggtaaaacaaatggtatatgagtctctacctcagccataggagcatttttgacatgtttcactgctttttttgcttggtttttaaaagcaactgggtcttggaggcatccacacaaaccttaatcaagatatgcacaccatcgttagtgatgatccttgcatactcctccttatctaggcaaggaaatagccccttcatcacttcaagtttctatttaagatatgaaaagataagagaaaaataatttagcatttattacaagaatttctcttgaataattactctaaagacaaaagataatcatacccgtctcaaagataatgcactgagatccttctttcctatctcaccatatcttgtccagctaagtatccttagaaactgaatcccattattcgtgccatacctcttcccaacctctaaactagcctcatacgtccaatattgtactgcaagtgtaaaaccataagctgtgtattggcactcatgtcgaacttccaaatttagcttcttctcgtagtttgccttctgttataacatgtccttttgaagggactacataagtctagcaaatgtgtacttctcccaaggaatttagaagaagagcttaagatctttgacatatctaaatatgtcaagcataattaaagtgttagcctcatgacccagtagcactacatcaataaacatgcagaagtcaagcttgtacaagtcttccagattatgacaatttgaaaacctctcttggagtgtttttatcttcacactatcagaccgttaaaatatttgttgatcaatcggtctgacccgagtaggaaatttttgtagccttctcctcttttgttggccccgaggtgaagttcaggcttgtaatgagtgcaaactcaactactccaaatttgagctccttccggccaatgtaaaaatgcacctcctctgccttctcaacatcaacctttatcttgtgcaacattacttggtgaaataacaccaaagaaaatgtgaagggtatgacattccaaaaattactgaaactgcttgctttcgttgtctcattcaaattgtactcctcataccgcatcttaatttttgcaaaaacaccagtgcctctatatgtcacgtggccaataaaataatcggatgctggaactatgagtcatggagccatttgaaaaaatatataacaaaagcatacgttaagcacaccatcgaaaaataatgggtaaaatatagataagccatttccaaaaaaaattctttaataaatcaaagatgccctctcatagaaaattgtccacaaaatatccacattttgtcgacattctgttgatattatctcaattaagaaataacaaaatacaataaaattttcaaaaaaaaattcaacaacttgtcgaaaaattgtcaaaattataaatcaaatgatgcataaaagttatcgacaaatggtcgatattctatctacatacataatatattctaaaagaatatatattaacgaaaattgtcgataaaccattgataatctatcgatatcgtattgatatacatttaaaaaattaaaaaactcagttatgcttaaacaatcaactactatcgataacctatcgataacatatcgacaacatattgacatattcaataaattctgaaaggtatattctaatcaaaattgttagtaaaccatagataacatgtcgatatcctattcatatacagtaaaaaaataaaaaataattatgctcaagcaattaactgtaagaacattaataataaaccctagatcaatttgtatataacatagaacacaataataatgtataataattaggtatgcgtacctgattaatccatagcaattacttcaattcaatccataacaattacttcaattcgatagtgcaatactatcaactaagtct

SEQ ID NO: 304500 - DNA, 2188 bp, Cannabis indica
caaaataataatgtacaatgtccaatattgttttatgactacaattcgccgcaagcatgactgctccaatgtttgaagaggcgagggaattaactaagcagtggaaaaccaaccaaagtgattaattatatttattaactaattatagtgctattaaaattgcatgatggcgtggcaatcaacatggcaagcgctgagtggaaaatgtcaaaaacatgccactaagttattaggttaatgaaaagagcattattattaagaattagtggtccctaatattattattaaattattagatgatagtttataaatggtttatctttttttataataattaattattaaattagaaaatgtaatatcacttttaaattcactaacgatataaggcacattctaactgcccttagcattaatatatataatgaatgaatgatatgagcatgtgttgaaagctttaagcaagtatccattaaaaagtttccatagcatatatgcttaatcatagagtcatatatttataatctatttgattttcttaaggtattataagatttgttaagaaacaaacaaatagtagtgtttatataaataaatataataatatttgtttgtatttttacagctcatcaattcatcacttaggatatttggattttactttaaaaaagttagaaccagaatgcttggagagaaaggttactcatttatatatatatatatttatatatatatatatatttatacatataaaaaggatagaataattagttatctagatataaacactactatttgtttgtaaggatgctaatatgcataattatgttgatatgtgaaagactggtcctctgttgatgtagatagtcatataaaatgcttactaaagttttccttataataatttgggccaaaggagagagctttatatttatttattaccaagtttatttcatatgataagtccctatataatgtgtagagcttcttctgagatctgaggtgtagctaggaagaagtagaatgtgtttctatcgatggaaaaaaaaaccatcaattaaggctcctaaccaccctcaaaggcttccaatattccatgcataatatatatatgtcgattatataatcactacgtgtatattaaataatagcgtgggctattggaagttctttgaggaaggttataagtcttaaccattattattattatgttcatatactactcgtatttcatgaatcatgatttaaagaaacaacaatatctgcacacacaacacatttatatatactcacaccatgtagatatatatatatatatatcttataatttttgatggggtttatttggtcatcacgactacttctaagctatatgtcagtaacacatgcattatataataatttggttcagatcatatttttttactatgataaaattaaatctcgagcttgttttagatatgtcatgcatggcgtcaaatttggtttatttatttacatggtagtgacgatccgcgaccgttaaccatcatatatgtttgaaatatctcatataattagttaaggttgcgtatcatatatgggtatttatcgaatcgatatttccaggggagcgccttctcaagcagcgaacaggtggtcttcctcaggcgacgcggcttcttcttcctcgtggctgttttggagttctgtcggaaaactaggtcaatgaaggtttgtaagccatccatggaagtgctcagatccggcagatatatccaggttagtggagctgtgagcagggctgagccagaataaaatattagggaggccattaatttatccttgtgtgaaaaatttgtatcaaatatatttttcatataattataaaatagttttaatacaaaagtacattaaaaaaaatagatttaacacctaaaaattccatatcatgcactcaataataataataatataaatcatttatataatcaagtaagataattcttgtaaaaaaaaatcttaaaatttgtattttgaattttataagcacacacttgatatacatacaaaaataaaatattgtattacaaaacaaatgaagaaatataatattatctcaatttttttattaaacaacaaaaattaagggaaaaaaataaaaaaatacaaaaaaggaaaaaaaattacaaaaatactttgggccggc

SEQ ID NO: 304501 - DNA, 4388 bp, Cannabis indica
tcattctcaaaatccaattaaaaactaatctaatccaattatatttgtatatatatatatatattaaaaaaattatatatatatatttattatgtataataaaaatatatattttaattatatttttagtggactttatttgatgttgaatttgtagcgtttggttgttttgtatatttattttcatgatgttttgttatatttcattacttagtaacgttgttattttacttatttcaaacttttagttgcattacacttataacaataatatttttagttgcctgatagctgaataggcaaatattttaaattttcaagtaagcggtaattagattttaaccttgatcgtagtttaactgggctaacttatgatttcgtaagctagtccaatagaatgaacactaggcaaaatatgagaagccaaggaaatttggtcgaatccagtggcggtcagggaggacaatatccccttaatgttcgtggccaaggcagaggccgaagaggtgtagctcgtagtcggggtaatattaacccaccacaggctacctaagattgagaacagaggtttgtagaaatacaagccaaaagtaatgatcaagtgaagaaatttgatgtctaaggtagcagggtgcacctgcgattcctgctcctgaggtgcagataactcctgctcttgttgtgctagtggagcaggttgttgttggtaaccatatggaactcttatatgaaatgtttcgtatgcaagcacctccagtatttctctgaggtttggatgttatgaaagcaatgactaatagttatcaatagaatactgaatttcatgggtgtcacaggcaatgatcgggtgacatgcgcaactttttaattccaggaggatgccctgctatggtgggatatggtgtctctcacccgtgacgttaccagagttacctgggaagagttccaggacttgttcaatgttaagtactacaatgaggcagttcatagtacacagaagaaagagttcaccctgttggcccaataggagaatatgttggttacggattacacgacccagtttgatagattggctcgattagcctcaagaattgtgttaactgattttagtaggaagaaaaagtatttagcgagattgaaccccaaaatcaagcacgatttaatgattaccactgatgatacgactacttatgctaatatggtagacaaggaattgcgagttgagggcaaaagagaatgcattcaggaatcttgggggacacaaagtgttggtggggccactgttcctcctacctctagtttcagtaggggtggtagtgactcaaccactaatcagaagagaaaagtttcatttgtgtttggtggctcgattcaaaacaagacatttcgagggaaccaaggccgaggaggtcgtcagagtggttcaaagagtcattatacttatccagaatgccctagttgtaaaatgcatcatctgggtgagtataagggtcaggcatgtttccagtgcagtgtaactggacattacaaaagagattgcccgcagttaaagaaagaagagcagaagacaaaggcaaagcccgctccagctaggacgttttccttaacccaagctgatgctgaagctagtcctttagtagtgacagatcagctttgagtcaacaaatcttttttactctgtcttgtttgattctggagcaacacattcctttgtggcagccagagtaattgacaagttggatatgccatgtaacagatatgaaataaggtttggaatcttgttacctggtgagaattagttatctccaaaagatgggataggtctatgccaattaggattgaggatagggattcaagtgttgtcctagtagaattgggtatagtagagtttgatattatatttgatatggatttcttgttaaagtacgttgctagtattgattgtaagcagaagatggtgacttttcaacctgtgggtgaagaaccgtttgtatttgtgagatcaatttagggttctcgagttcttataatcttggtgttaaaggctaaagacttgttgtaggatggatgcttaggctttttagcagtagtgttagataacactcaacccgaggaaattaggccagaagacattaaggtggtacaagagttctttgatgtatgtctagaagaacttcttaggttaccactgcaatgggaaatagattttgtaattgatttaacatccagagtggagctagtttctaagggaccatatagaatggctcccgctgaactttgaagataaaacttcaaggaatgcttgacttagggttttcccgaccaagtgtatcattctagggagctctggtgttgtttgttaagaaaaaggatgggttgcttcatatgtctattgattaccaagaactgaacaagttgaaaattaagaacaaccaccattttcctaggatcgataatttgtttgatcaacttcaaggaaagacaatcttctctaagattgatctttgcttgggctattgtgaacccgagaggaggacattccaaagactatcttttgtatcgagtatggccactatgagttcttggttatatcttttggactaaccaatgctctggcagcatttatggatctaatgaatatggtattcaaggatttcctcgatacatttgtcatagtattaaccgatgatatccttgtgtactctcaatcaaaaatggagcatgagcaacatctacgaatagttgtacaacaactacgagaacataagctttattaaaaatttaagaagtgtgaattttggttatcccaggtgtccttttagggtatgttagtaaagatgggatcatggttaatccaaaaaaggttgaatccatcagggattggccaaggccgaagacaatcactaaagttaaaagattagctgggtacaactgccaatttgtagaagggttttttaagatttcaatgcccttaacaaagttaactaagaagaatcaacagtttatatggacaaacagatgtggagctagttttcaagaactgaagcaacgattaatcacaactcctgtgttagctctaccaatagataaagaaaagtttgtgatttattgtgatgcatctagatagggtctaggatgcgttctgattaagttgatagggttattgcttatgcttcttgtcagttgaaggagtatgagcagcgatacccaaattatgacttggaacttaccagagcggtctttgctttgaagatttagcgacactatctctacggagaaaagtgtgaaatctataccgatcacaaaagcctcaaatatttttttactcagaaagatttgaatatgagacaaagatggtggttggagttagttaaagacttgcaaaattctttatcaacttgggaaggccaatgtagtggcggataaccccgagtaggaaaggttcgaggcaggttttcagcacaactatggtatcttctaagttagcagtggatatggtcaaagcatttattgagtttgtattcgtcaaagcaacaataacggaggtagaaataaaagcctcaccaatgggtacttaattaaaatatgcagctcgggccaagatgcatctcgtaaataattgtgtgccctcaatgatctcgactataaaatgtctataacaagcgaaagtatctggtcgatttaacctatcattatatttctaatctttttatcattctctcaagtatcattttgaagttcttgggtctcagtttatggggaaaatagatagataattgattctgtgttctaaaaagtatgggtatttacattcaaattcagacagaggcattatttcttgaaaatgcctccaaattctgaaaaatttgaaaaattaaaatttaagaacaataaaaatcaccaaaaatcctaatatttacataacgatttaataaaccttatgaaccatccctaaaatagaaaataaacacgataattaagaagaaaaaacttgaaatacttactagtttctggaatgagcaacaatctgaaagaattcctcattgaaaattttcaataccaaaaatctagtatataacgtattctgggttacaaaaaaaatagtcgctgatactcagaggaaataaacaagagataataagggaatgcaagtttaagagagaacgaagaaagaaaattatttttctttgtaagccttttactgagcgaaaatggtactgtaagagtggagaagatgtgtttttataaaaagccctcatgggaaccattggatcttaataaggactaatcaatagtgatcaaaccatgggtcagttgagggtagagatggaaattgggcggttaatgtacggggaatgcaattcccgcccccatccccgctacctatt

SEQ ID NO: 304502 - DNA, 4630 bp, Cannabis indica
ttgaagtttgtattagatgcaatcggggcaggtccccataaatcagtatggatcaattcaagcactttggaagctctataattggataacttaaagggcaatgcatgtgattgccaaattgacaagcttcacagaagtttttcatttcatctttagaaatttttacattgttggactcataaacaagtttaagaatcctaggggatggatgacctagacgcctatgccagacatctttcttggaattttgaaaacgggttgcaagagcaactcttgattttgacagactcgagacaccagagaagtattgacactgtttctgaccataaccagacttgttgaggcctgagttgagttgataaagaccatctctaagcactccttctagcagcaccttctttgtgattttgtccttcacaaaacaaacatcagggtgaaactcaacaaacacatcattatcagatgttaggctagatacactaaccaaatttttagctatcttaggtaccagaagcatatcattaagcagcaaaggtctatgcatattgttagtgtttaattttccagtaccaaaatgagaaatgcataattgattaccatcacctataaccaatttttccttaccaccatagtcatgtttctgcatcatgttattttcatctgctgtaacattattactagctccactatccacgaaccatgcctcactgtcaacaatttctggtgaagcaatgtatgctgcagctgcttgttgtttctggttgttttgatttccaatttttggatcagaacccatacaggcttcatcgtatctgttatagcatatggcagcagaatgcccatatctaccacaaacctgacaggttggtttggggccatttgatcgaccaccacgacctcttccaccactgtttccagcaccacgagaatgatttccacgacctcctcctaagttgttctgattagagtggtaattagtctggtgtgaatgggaattactgttgcctcatcctcgaccaccattgttggatcgatttgccaaatttgcattaggagaagtgggagtcttaccagatctggtgttgttgttgagacttaggttttggagacgttccattttgttgtcaaaagccagtagaatcccttgcagctcctgctaagtagttgagggacgagcttcaatttgtaacacaatgggaagatattcaatgtccagaccagaggtgacattggacataagttgattttctgggtaaggttcaccagccaaagcttgtgaatctgaccagttcttcttctgcttcaagtaatcctccattgatgtcgagcctttgcgagttgtttgaatcagagttcgagtctcatccatttttagatttggaatgagctccatacagattctcgagggccttccatagtgcagcagctgaatcacaaccatgacttccgttgcaatcccttcggtcattgaactatacagccaactggccataatgagctgatcactcacaatctagtgttcgaactctggattaagatttacttcaacaccagatccattttctgcagtaacagggttagaaataaactcaggaggacagggaagagtaccatttacgaatccatcgaggcgatgacctctgattattgttgacaccattattttccagagaacgtagttcttgcaatcgagtttcagaggaaatggttggttgagtgtactgaagggctgagtgtagttgatggaggcaggaacagaggagcttgcagcacctgctgcagctgtagtggtgacaaggggagtttgagagtgcaacgacattgatgcactttccttgctctgataccaagttaaactttgcaaaaatgcaaagatggaaaactcagctcaaaggaggctgagggaacattttctatatatactctgataagaaatacaagcaccaattggaaatggacaagtggccctaatgttggaataaaagagaccacactaacaaaatacatcactcacacatacatataactaattactgattaacatacactaaacacacttaattacagtaaaataaagatagctatgacagagtgtcattcttaacaatttatacacactgaacattaatttcttgagcttgctagctagcttttctctttaaaatgacacctcctttaactacactattgttgatcgttgtaattttgttatcttcatccacatattgttgctcatcgatattcttttctaatctaacatcttcaaaatcactttctttaaaccaaactcttgtttcttccaaccaagtttttgaattaggcttctgcactcccaacaacacttcaacaaatcaatatttgggtatttggtataaggatgattctcctcgttcagttgtatgggttggcaaccaagagcatccactttctcttacaagctctacttcatcagcagttcttcaaatcaacaccaatggaaatctagaacttattcaacgcgaaaaactacaaaattcttcctcgacaatttggtcaaccaacgttgaccttccatcaaatagaagtagtagtagtatgttgggtgtacttttagacaatggaaacttcgtccttagagatgttacttcaggtgaaaatttgtggcagagtttcgaaaatccatgtgatacattcttatctggctccattttgggtttcaatctcaaaacaggagaagattacaagctaacttcgtgggaaagtgaaaatgattcgtcacctggaaattttactttgggaatcagaaagaaaacacctcctgaaattgggatttgaattaataattgatctaaatctacgatttactcgaaaaatggaccttcgaataaattgaggttcactagtaatggcaacccaaacatatattctttgtataagactccattcaacttagtcgaaaatgtagaccaaggaacaacatatttgaatacaaacgatgagttcaacaactcgattttatatctttcaccaattggaacaataatggttgtgatgaaagataaaggtgactatgggaatgtatagctatttggggcatgcaaaagcacagagtttcctttgtgtaagtgcttaagagggtttaagccagaatcgcaaaaagagtggagcgaaaaaaattggagtggaggatgtgttagagaaactcaattaccttgctcgaaaaataatgtaactcgaaaagatgtctattttgaaaagatgtctatggttcgtattcctgatttctatgactttgtgcaagttgcctcaaatgatgtcgatacatgtggtaaatggtgtatgaataattgttcttgcatagcttattcttacattagcttggtagggtgttttgtttggtcaaaaacccttattgatattagaatatatgaagataataatggagatgatttgtattttcgcaagtactcaccagaattacaaggtaataaaatataattaattaagtttatattattcctaaaaatttgtgtataatattatcaatagtggtgaaatgttaaaataattatcgtattaaatttgttttagctctatcaagtggtgctatattgttaggtatcatagcatttggtgtacataaaagaaaagctgaaagaaaaggtaagaaaatctcatagcatcttttcttaaccatataaaatcttatttatttatttattttgaaagaaagaaatttatcttggatcttttgtcttttggcagatattttattattcaatacttgctcctcttttttaattagaatttcatctcataattccaagttattgtcgagtctactacttccctgttgaaaaagtcaactttatgctaaagtacttaaaataatgtactactaccataaaatttattttaagtaaaagaattatgactaaagaaaatatcataactcatcactaaaaaaaattgtggctaaaagtatgagtaacaaaaattgttatttgttattaaattaatgaggatttatatatgtaaatattagtaattttttattgtaactaaaatgatattatatcacaaaaattctatatgaatgttttgattaaaatgtactaaaaaaattcacttttaaatgttacaataaaacttgtgattaaaagtaaaaaaattatgactaattataaataataattcttatactgtgattaaaaaatttgtaactaaagatattatagtcacaaaaatcacaatttgttgtaattaactaaatgtgttttaatcacaatacttattgtggctaaattaaattagtgataacgagtatctaaatattatgttttagtcacataacactactacaaaaacaccctttagaggcggtttttaagccctttcagcgtcggttttcgcgaaattcgctaccgacgctgatcagggcgacgctaaagggtttatatgaaccgacgccataggtaccagcttataaccgacgccataggggtacctatggcgtcgattattagctaataaccgacgccataggggctttatcaaccgacgccaaaagcaagcaattttcagttttttcaaatttttttttatttaattatatattttaatttcattttaattatatatttaataattt

SEQ ID NO: 304503 - DNA, 683 bp, Cannabis indica
aaacagttttatttagggcataaaacccaacaccccttcctcgtggaagcggtttccacttccccatatggttgcccttgtttggcttgagttttgctacgagaatcttcctgccttttcccattaatgcggtcccctgagacatattgtaaatcactgtgccaagtttcttgccaaatgtgactcgtcatctgtccctcccacactttgttacgatcacacccttaaggctaaagtccgcattacctctaaccctttctacattgccaatacacgcacaacacttcacccacttatatgccaccctcacctaatgtctactcaacacctttttcgtttaccccaaggacaaattatgccaaatcatccttacaatgccccgaaatcggattacaacattcaacacttcagtcaagctcgcactgcttctgttggccgttttgtggcgggaccttcaaacactccaggctccttgcctgtccatatggattctcatttcccaacttttacgacaagatggaaccccgtatgctcaacaacttgctcccccatgtttcccaccaacctcttcactcgatgagtcccactccaatgcccatcaactcacctagagtagcagctggtgtagcacttaagactactgttgggttttatgccctaaataaaactcattacaatctgat

SEQ ID NO: 304504 - DNA, 1040 bp, Cannabis indica
ggtatcattattaaatttttttggctgatgtttcaactttaaaagctttagaaaatttcctcgaagatctctagctgccataggtttctcccaactcttaaagcaaatcggtttaaagtctttgtgctctgcctagaaattgtagtaacgaaacggtttgatgcctatatcttcagtgatagcagcagatataacacaagaacaatgatcggaggtggcttcgcatttgaacatagcagtagcattaggaaaattatcgtaccaatcttcattcacaaaggcatggtcgattcttgaataaattctgctagttccatcttgattatttgtccaagtgtatctcgatctactccttatcaattcttcaacatgagcttgaccaaaccaagtagttgaatcaatcaaatcatgctacacatttggatttccaccggttctattctcatggttgaaaactgagttgaaatcgcccaacacacggtttgacaggatattttaaatggagtaagtttgtccaaaggctttttctttcatctatggtgttgaatccataaacaaaagtagagcaaaaagcatttgtcattattcttattaaaaggagtttcagcaattactataaccctcacaaaccctttcctccaaaacactaaaagtctcccctcaatagcaggacttgaaaaatagtcccaattagagattttattctccatcatctcactaatactgtttcccttcaactttgtttcaatcaaaaccataacacctattttattcatgttcaagaactctaaaacaaggtcttgtttattcttattatttgttttttacctcgcttttagccaacgacactgagacttatttagtaagcgataagtaatttatagcaattgatatataataaagtaatgtaaagacacaagaattttataaaggtttagctctgagtagttcggtaatagcctaatcctcgttatttttattgacttaagaacaaggagaaaggttcctttcttatagctcttgcaacagtatctctgaat

SEQ ID NO: 304505 - DNA, 820 bp, Cannabis indica
gattgggcctacaagcttaacccattaaaaatatagtacgacatgacacgacccatattttgaaaaagtatagacaaaaaatgggtcaaatcagcccgacacgaacatatttacaatattagtaagcaatatgatgcctaacaccactgtgaggtggcatcaaataaatggttagtggttttatataataattattaaagttaaataagtgagactcaacattcaatgcatcaatagccatacgacacattataagggtgctaggcgctatgagtgtcctttagcatttctttattggttagatcatgtttagttaagattcttgaagctccattttaacttctaaggtttaaaaattattttttgaagtatttggatataaattaaaaaaactcttttttaagtcaaaaattattttgagagaagtttgaatttgtaacttcttcaaaaaagactattgaaaaatgtattttctaaattaaaataatttataatttaatcatatatccaaatattttaaaactaattttgtattgaaaaaataagaaataattatccaaattccaaacaggaaaaataagttgccgcttttttttttataaggttagtcaaacggaatcataggtaatgcgtgtgtgtgtgttttttaattagaagtttcatttaattagactaactcaacctcaacattagactgagaaaaaacacaatcaacatataattgagaagctctaatcacaaggtgagcaacccaattaataaatggtttgacaaaaattaaagaaacatcactaaaaaaagataaaagttgtttacaatc

SEQ ID NO: 304506 - DNA, 2004 bp, Cannabis indica
ttcattttaaaattttattaattcaattatatcaatataccaagcactgtcactgaggttgttggtagtagtgaaataagcttgttgatgattgttttgttcattgatgatgaaggtattttggttagtgttttgatgctggttctggtttgaagaagaagagttggtggcttgaaaggatagatcaaaacaatggtagcattttgaagcaacatgaccaggcctcgtgcagatctaacaaatgggacaattgatgttgttatatcttcctaccacgacctcgatcgcagggtatgaaagagcggccagttgattgttggtgcgaggttgaagagctgcccatagtgagggatttttgtatctgtgtggccagattggcagtaggtaaagagagatctccagaggaggtgttgagttgttctaggcgcatctcatgactttgcaacatgtattgaacttcctgcaaggtaacttgatcatgtctagatgttagattaacaacaggatcatattcgtatccaagaccaccaagaatatacaaaatcaaatcatcatcagaaataagcgtcctgcagcagattaactatcagcggtatttttcatcttgagcatatagtcatgcacattaagattgaaaacctagttgaagggtgggagctttagaactagtagtgaatagaagatcaagggtagtccaaagatcaaaggaggtttcgcattgaacaacatgaccaaacattggctcaaaaatagagttcagcaactagcttagaatggcctgatcaacacgacgccacatggcatagccgagattaacttagcgagtttcacttgggatacaacctccagtggtgtgatcaacaaactgtggtggacaggttttggttccaagagtataatcttccaaatcacgggctcttagagcagggagtacttgagacttccaataggtatagttggctttgtcaagttttatggtgagaagagctaaacttttaaaatgagtctaattggtaggtggagtttgagctagagaaggtgcagaaatagaaggatcaggtacaggggttctttcagcaatggttgcaggtggtgtatgtgtggctgaggactggtcggttgaaggatccattaacacaagtcaatggctctgataccaagataaaaggaataaaataaggtgtaaaaatcttctctaatattaaattgctcaactcaatccattacagaggtaatcgttcccttttatagagaaggggattgtatagaatgcaattctattgattaaacaataatagaataatattctctttgggaccattgtacagatggcagaatgaagtgattgtaaatgatttgtagaatcaattgcacggtaaacacgtcaagagaaatctcactaaccagaatgtaggaaatttaagataggcttttactatcttgcccctacaccaacaaaacaaacaaatcaatttccaaggtcaatttcgacctttaactgttccctttgacttttcaaagtctgatcccaaaacggcctcgttttgtctttgaacaaaaccaaggaaggaatcgagaaccttctcattcactccctctctctctgattttctcgaaaccctagcagagagtttctctctgagaaactcgaagctaggttttaatcaacccagaaaaccccagaaatcccagattaaacacaaaccaaagatcagatctagaatgatctgatctatacacaaccacacacacaaaaacagaaagattagagttagaaaacaccaaatttttcccgaagttcaccaataaattggctacgtctccgtttgagctgctcctcgaatttgagagctcgattccactatcaaggatgtttcagacatacaaaatgaagattccaagtcacaggtatggtttttgactggtaatctctttagttattacatatactgtgttttatctctctctctccctaactgtactaactttcttctgttttcttgt

SEQ ID NO: 304507 - DNA, 2284 bp, Cannabis indica
caatcttgtcaatcgtcagagtgagcaactggatgtcccacccagctttccaaaataaagccacaccgccagaagctccaatcgaagaactagccaccccatcgaaaaatcccaatctcctccaaatccttgtcatctcagactcacttgttttagtttccatcagaaataccacatccgggttcacactgcgaattaaggatcgcagcgacttaactgcctgaggcttgccaaggcctcggcagttccaggaaaggattaacatgaggacgtggggggcatgttctggcccgcctcctcgacctgtaaaaaatccttatcgatggcaacaaagctttcatcttccttcgctcccagtcgagtctcttcttgtccttcaatcccaggggcagtctcattcgttccatcctccggttcacatggaagagtagaagtagtaacagataattctcctgttatcatactctcatgggttagatttgtgcaatttcttttaaatgattcccttcccccgttgggctcaagagttggaaatattgagcatgtgggctcctggtccaattggtccactcttcttttctttcccacgctaggcccgataccagaaggcccaatgggcttttcaagtccttgtaaatccctcctcatgcctcctttgaacttctgtttttggccctttctcatcaaaggattattattataatctaacacacttttaaataccatggccaggtgtcccacctgtgattctgtgggccccagattgtcagggacccttgcaccacgatcaatcttcgtacaatcagtcacaccacctccttcacacgtactgtccttttgcatggtcggactttgcaccattacaacgttactcccatcagtggccgtaaaaaggttctccgccgcccccaaaatcatctccggctccatctgtgatgtctgttcgaccgcctcctccgagacaacggcatttacagagcttggcacagacgacgtcgaaagaaacgcttcaagattaggcactgcattgtctccctgtaatgagggcatttcattacccatcatcacttgctcctggttcccttcaggatccctattctccaccagcaccggctgttgctcattcatctctctttcatcctcttcagcctatactctttcaaaacaatacttcagtcgagcaccaaatctgacccaaggcccatacatagaaacaacatggttgaaatcatcttctatcaccctcctttttacgcttacaaaccatatcttcatgaccaacaaagccacatttaaagcaaaagcaaggagattttcaaacttgaaataacaccaaaggcttactccctcatccagggggagatgcagacccactaatagcggcctttgtaggtttagcataactcgaagacgaatatactccgctgtagggaacccgttgcgccacattctatcgatgcttataacacttccgatcctatttgcaatagcagtagcattgtttttagtgaagaatctggggggaacatcatacactcggacccaaactggcatgagatgtagactcgtcgatgaccatatcccgttctccggtagtggtttcaacagcagatacacatcgcccaaggactgcgttccaacacaaactccgcctcgctcttattcttgaatcggaaagtgtaggtattcgttgccacttctgacatactccatcctggaattctccacttctgggcaatgaccgaccagagcagtcctttgaacactgtttgtggggagagaacccgtcccaccaccgtccgttctatgaacttagggccaacctcccctgcttctccctcttgttggagagagagggagactgtatctcgggagatacattccaccatttccatgacttcctttcctttgccagaggccatattcagagaacaaatcaaaaagattaagacacaaaaggtcttggatcactcaacagaggatcaatgaagaaagaataataatattcagtagggtttttggtgtacggtaaactttagtacggagagcatttttcttttttacctcttgggttccatcaactacttatttcacactacctactgattgacaaaaaaaatgaacaaattaaataattaatatattataacaatttatatatatatataatatacattaagtaatttttttgataatcttagaatttgtgaataaggtgaatgaggttccatcccaaaaccaattggcaatgggaggagtagcccattcctcttatatattctat

SEQ ID NO: 304508 - DNA, 1602 bp, Cannabis indica
tattttattttattttcttaaaaaaatgtatgtaatttaaaagaatatacatcattaccagttttatataaagagatacaaatgaaatcctttaggtcacatggtttcacattgattcttactattcatatctagtttattcattaaagaaaattctggtatatatacaggccctaaaaacttacaattaatataaccttttttttgtaaaatatttattgattttgactgatgccaatatttattgagaagttggtcttttatgagactttctctttaatatatatataactttttatttggtaaactagaattaattttcatttacaaaagcacagaaaaacagttgacaaaatagaaaatatttattgtagaatatattaggcatagggaagttgtctaggaatttcacaattttggtacttaatttattatagctaggttacaaactatatatatataaatataaatatatataaaagctggcatgcataataataatgctcaaaattttccacaggtggtttttatgaaacactcattttcattcatgtaccaaaaaagtcttaatgaacatgaactcacctttaccttatccttaagtcggcttgtattaactctagagtagtttagaccactaccccattcatgttttcctatatagatataaatatgtattagcatgaattaaagaagtcaatttttaatatatatatttaatatatggaatatatatatatatatatgcacatgctcttggaatattccttgttatataatatatatatatatatatatatattctcccatggaccatatagaccatggaccatggaccatattgtcatgtcttttatgtcaacacaatctactcacttaatttgtagttcatgatcatatatagtagagaattatatgcttgaaattcagccctaatttgttccatattttatatatgtttgactggacttttcagtgttatcagtttatgaatctctcaaactaatgaaactaaattcattcaaatcaatgtctctgtgataagaaaactttgacaaaccattatcgtttatgtaaagataaattagttttcaaaatatttatttaatttaatttgtatatttgattagaattaaatataatttttattgtatcaatttgtagttatgactaatttgtattgagaaattggattaattatgcatttgttagaccattttttttgtaaacttaaactattcaacatgagtagaatatgtcatttttttttcttaaaatcccattctacccctctcatttgaacaatcctctctctttcctccttctctcccttgttctctgtaaacacacatacagaggagcacacaatcgatccacaacccaccacccacaaccttggttccttctctccacgaccaccataaccacaaacccaaggacccacggactcaatgaccatcgcgaacccaatgacttctccatcaaccacggcttcactatcggcaatgttatcaaataaataaattatataattaatgtttgttatctgtgagtagatgttagatttagggtcgaaaatagccagatctgagttttgggcaa

SEQ ID NO: 304509 - DNA, 2574 bp, Cannabis indica
caatcaacatccaatccgcacaagtgcggattttgaattttccaatccaatccaatccgcacaagtgcggatagccgcactttgcggattggattgaattggatcgtgcggattggattggatcggctattttatgaacacccctaagaataaccatgttataataggtgtcatgcatggtccatatgtatatttaggtgatatatatttatatatatgataaacatttgagctggtcatgtttttaattttatcaacaaaaccctagctgacaactgtgaagggatccaaatttgaatgagttcaaatatttttttttttaatatattttattagtatttgtttcatgtgtttatatagctagcttttttttttaagtttggagtagctagaaagaagtacttgataataaaaaattttaaagccaacacaaagaatttgatcgtgttaaaagctctcttgaaaatgagactattgtgtagtttgtgaattttttttaacatatattttctttatatttttaaacatagcagttagcatttatttacatttcttgatgaaaaaacaacccaccgggtcaattttttttaaaatgaatgtcgaacattatcatgataatgagacgcgataaaaatagtagaacgttattataagtacgtagcaagactatgagatggtgttttataaatagttaacagttttttataatttttattaaagtaaaataagtgagattcaataataaattacactactagctagcgatattacatctcacaaagatgctaatatgtgtgtgttgattttcatagtccaaataagaatagaaagtagaagtaattttagaaaaatatttttatagaattctaaactcaatcataagcctcaagatctcaatatatttatatagattacttttaaactactttaaaagaaagttttatctcttgaaacctatcagggccttaattttacacggctatatttaatgctaaaaattattttctcaattttatcataaatataattatttatttattttacaataaattataattgattaattctcaataatatcttatttaactctaaattaaacaaatagtattttcaattaaaataatatatctctctcataatattatacaatttttgttttaaaaaaactaatatttagttttaagtgaataaattaaatggttaaaaaaatttaatgattcactttataattgaataatcatacaaaataataattcattcaaaattattatttttccctcgaaaataattttctataaaaattaattctttctcaaaataagtatttctcaaattaaaccttttcctatactgtatggtacagaggtgatcttagagtcatatagatctaaattttgaagctgcaaaaaatcttagattattattgaactcatcaataaaataatctcgttgattaattctattattacctcactataatataaaattacactctttgacaatatataattatatttacaaaattcattttagtagttcattgatataatcaatataaatagttcgtcctttaatttattagttcatataattagagctggtcaaaattatcattttacccttctaattatatatttaattccttatatatcattaattcaatatgaactattaatttataattccaattttaaatttggatccaactataatcactcccataattaatactataagggaactaatatttgatcatttcgaaaggcttggattccacttattattatataatacatatatatatatgttcccagtcattcatgctattcagtttttaaaataaaagctgtaagaattattttctctaagaaactttaatgtgaaagcaataaccttatgttatggtcactatgaacataaacagaagttcatgaatacttgagatttagattgatctactaatgatcatcattgtgatatgaataactattttatgataaatgacacgttgatagagatgttagttcatatcggttcagtcgtgcataatcaaattatacatagtaccttcactaaatgtttatctacatatgtgactgaatcaaaatcacatgccactaaagtatagtgcttagtaaactgtactaggtaattccatattaaaaattacatactttagtacaataccaacttatgctattcgtatagtatgatcataattctctttcacttccttacaagatcatacattctctatgaaatatgaaattttctgatatttattaattatatctctataattaatatattcatttatattatatttgtattttatataatctccaatataaaatccattaattatctgcttttagggcataaccctaacagggagccctttattatttatcaaaagagaaatgctaaaaaatactagtggtgcctaacatccttctcgatgttatatcgctataggtgaaatcaagtatgaggacgtcacatataacttaagataataacttttaaggcatatcgctaatcaattgtagagtacctgtaacgtccccgcttcaa

SEQ ID NO: 304510 - DNA, 1919 bp, Cannabis indica
ttttttttttttttttgaagtaactataaagagggggagattaggaaaccacaaaacagctacaggagatggagggaaattaaattctccaaattcgatccttatcttgtttcaatgcttccctagcatgatgttgggcaacacagttaacatttctggagatgtggtaaaggaaagcattagggaattgagatagagatttccgaattaactcaattacacttgacaaagtcaaattgtccttccatgagctcttgactttagagattaattgtaaacaatctaattcaatggacacaagtggaattttgattgcagcacaccaatagaggccttccaacatagcttgggcttcaacgaaaagaggtgtagaagcaccccacttggacaaagaaaggcctgcaatctgctggttatggttgtctcagattgaagctcccagacctgttctatactgcttcaaattaagggcaatatcaatcgaaagcttgaattgatcatgaagatgtagggcctgatcatatgcattggatgccaaaggattaggttggggcatgacagttggagcagcttgatagtcctgcaacaatgaacaaacacagtcttccacctccatgggattgttagtagttcggttgaatagagcattatttctcttgttccaaatctgccaaattagactaataaataaggtgaaagtatcaatgtttagatgatctaagcctcttaaatagaattcagtattgtcgcaattaagattagctacatagaaggctttgagagaggattatttccacacagacttagctctggaacagtggagaaggggcatgggtgactgattcaacttctttgtggcaaaaatagtagaaggggctatgaaaggattttttctgggaagggttcagactacaagggagaatgtggttgaaagctttccaggtaaaatgtttaatttttgggagtgttttgatattccaaactgttttccaccagtgtttgaggcattcaatgttggaggaagatggtaatgtaagtggtatgcagagttgacagtaaaatttcttgatggatgatgtccctaaattagggtatcatttgatgaagggtcaatgggtatcttcaagatctcttgggcttgataatagggtaagaattgatgaagtttatgaaaattccagctactatcattatcaatgaaaaaacaaacattgtaatcagcagggttaaaattatgaaggaaagaaagagagtcaatcaaagagatggaccagccattttccactttccaaacgaggcctttcttgaggagttccctcccctaaaggagacttctccaggtatttgaaggacagtgtccaataggttcatgatgaccatgatgaccacaagatctaacttgcttggattgtccttcctttttccaccatcagcagccatgtcttggtgatcatctttagctgcatccaggtgatcatctttgacatcatcagagctattctctcctgattcatcatcttcaactatatatctttagggagttggtctttgtcagtttgatcttcttgtggcgactggtcaccttagttggatattctgtatctcctgttttagcattaggatgagtatagtgaagaccacacttattttgggtaagtaccataattactgaatgtaattcatcaatgttggaatatgttttaccgggatctagatttactaccatgtatgttgtttaacatcctaaatatgaatttctaaagcaatgtaaataaacacatataaagttgagaaaccttacagtggatgcagcgaaataataatgggtccttccactcagagctctaacccttgtatcctgtctgtagcagagtatcaccaagatctaagcctgaatctccttctcttgaatctggatt

SEQ ID NO: 304511 - DNA, 1966 bp, Cannabis indica
tttttttttttttgtttaaatgtacaattaagtttgcatgagacatatatcaaaactttctttttttccccacatttttataaatatcccttaaaaacattatgcaaaattttcagctcattttctataccaacattatagctctgtttgttgaattaggtaattgatgaaacactacgtgtggttaatgtctcattgttcacatgtagagaggcaataacagatgttagcattggcggtaagtaagtcattaccattactttaatttttctttctctctacatatatagtatctcaaattagtaacaagtttctcttttaattaaggatacacaataccaaaagggtggaaagttctgatttggtttagaggaattcatttagatccacaatgttatcacaatccaaacgacttcaatccttcaagatggaatgtaagtaacacatataaaatgtagattttgtagtgaaattaaaagcatgaatatgaatttttataaaatggtgtgaatatatttgtttttatgtaggaatgtaaacccaaaaaaggaagtttcataccatttggaacaggaagtaggttgtgcccaggaagtgatttaactaagcttgaactttcaacttttctccattattttcttctccactatgagttagttctatttctctttctttttctcaacattattattaattgattatagcttaaatttggtaacaattgacaaatttgatttcttatagggttgaaagagtgaacccaagtagtagcattagatacttaccacacacaagaccaaaagacaactgtcttgcaaaactccacaagctacctcaattaaaagacaacaattgacaaatttcatttcttataggcttaaaaaaaagattggagccattaattaaagaaaattttgtaaaaaatatgtatattttgcaaaagaatttgttttataagcttagacttggtatgtctttagtccaaagttttgggtggctagaagtagaactacaagaaaaagaaaaaggttttggtttgttatgataattttcatgtatgtgtaaaatatattgtagtgtataatatgtcagactcgatatttaaatacatcgatgataatatgttatttttataaggttttgtaatttttttaaaattttggtctattatataaatttttgttatttttatatatccaaataaacaaagtaaatatagaaaattttaaataagaatgttatattgtgatactggatataaaatgtattatgggaaataattaaaattttaatttcataatttattattattactcattgaaattagagaagatacttaaactaattatgataataatagaagtaaaaaataaattaagtagattattggagcacatgccttggatgttaacaatggcattgccatttgccaaggttggtatgaataataatttatgatatacaacagaaatttgatattgatgatgacacagcaattactaataataatatgccaagtaatgaatgactactctactcagccacgtctctcagccttaacttatcaatatcataacaaagattttggtatactgcacatgacttaatgagttattacaatctcctctctcactcttatttaaatggagtagttggtgcatgtgtttgagttgcaatctaacaatactatcatcttaattatcttctcatgactcatgataatattttgtaattgcatgtagggctggttttaaggtaagatgggttaggtccgcgtttaggattcacttattttaggggctaaatttcttaaaaatatatattttttaataattttaaaaaatatcatctgttcttataataagagttcaaaaatatttttttttcttaagacccatttcatcttaaagtcggccttgattgcatgtcattttatgttagataattagtatttttgctctctaaa

SEQ ID NO: 304512 - DNA, 2261 bp, Cannabis indica
ggtctaaaatagtatttaccaaagatgaaatcaattattttttttaagatcatttttttcccaattcccaatcaagatgcccaatttaaacatttcaaaaagaaaagacatgccgaattaaaacttatgaaaaaaaaatacacattcctaattatttaaattattaggaatgtttttttaagaagccaatctaaataacatgagcatttatagtaaaacataaatgtattagttctaagaatgcagatatatattctaatttaatttataataataaatgctcactatttgaccatttagacccgcgaactcgaaaaactcggtcacctgccctgactcgctgacctaaaaaataaaaaaacattaaaacccgtgtggtcgggtcgggttcaacccaaaattacccccacgggtttcgggttcgattattaaaaagtgtttttttttagtcgggttctaactcgtgacctgaaaatacagcaaaaaaaatattattttattatattaaaaaattaataatattaatttttagtttatcacactttactttttactgttcattcaatacctacctactcaatactcactatttgaacaagaccaacataaccagtaaaacaaatggctatagtagatgaatcgtttttcaaaacgataaaaccatgtcctgaactgaagagcatgattatgacagatctttatagtaacaatgacaataaaaccacctacttttctcaaataccagccaatgtgataaaaataaaaagccaatgtgataaatgaaacttggttgtctgagcttttactcgagaacccaaaagccaatgtgataaaaaaaaatatatatatatggcatttttaaaaattaaaattcatttgagcccaaaaatgacattcgggctcaacccaataacatccgaacccgaccacgcctaacccgcgcatacccgactcgaaactcgccatacctaaccacccaaaaactgggtttggttgtgcatttccaagacccaaaatccaaaaactcgaacccaaccacccgaaaacctaaaaacccaaccagtgtacaaccctactaccagccaatatattatatgggactctaatgctcttaagcacaacatagactatgtcaaatagttgtgatcaaatcgatattagagacacttaacattacaaaatcgggctccctctaatactattatagaatatcattaaccattactaagacaatatgtcatgatggtggtgaacatcattagtacctaataacacaacgtatgccataataaacaaataggtacaaaaaaaataggatatcaaagaaaaaaattatcaacaaaagaaaatgtgagagaatctagctaatttatacatagaaaagatacaaattaaaataattaagtaatgaatagcaaaaaacaccttcagcataaaaaaaatgcagtacgtacacctcttataaataagtctgaatcactttctgatgtaattgatttattttctgatgcttcagtttcaaataatagtgcaggaataacgtgttaggcaaaagaccagacaattttgtggcactttgtgagtgtggattcttttgcctgcgttgaagttcttgaagcagagttcatggccattcttttggcagtgaacacaggtcataaatcattcagattacttggaggcaattaaggctttacaatgcaaacgtttcaccccttgttgaggggtttttttatttttgtaacattttgaacttgctaagtcgttttgatttcataacttttaagtttgtgtttaggaagaacaatgttttagctgatttgttggctaagtgggcaaagaggaatgacttatcttgctctaatgtgcttgaggaggtagctcctcttgtggctgccaaaattgttctcttgtagcaggttttgtgaatgaagttttaatattaagcaaaaaaacgtacaccccttaaaagactgttttggcatacgattagaatttaggattaaggtgtgtggttaaagtgcatgggggctccatcataaaactaattagatatgagaggagtagttcattcatcttatatatatagtattttattttcacaatgtgagactaattctaataaacaacctctatctaagaataccaaacaaattatattctaattgagaggttattgtctaacaaattataaatatttacatatataatattcattacacttgattttactaactttatttagaacttgtgtgaatttc

SEQ ID NO: 304513 - DNA, 2493 bp, Cannabis indica
gatggggaataagcaggggggatggggattaaaattcttaacgtggatggggacgggggagcactccccgccaattccccgccccgtgtgcatccctaatcataacgctactagctataaattgaatgagtacttttacccttatattatataagacaaatattaaataattctcaccaagaaattaataggcagcatcctttaataattaatcacactttgcattaaatgatttgagtacgtatgaagttatttggaatattgacatggcctttggtgacaagaacatcattcaaagcatcttgctctctataaagaaaatatattacatgtgatgtgactgactgaggataggacaatgtctattatttcctaaataaagagagaaaaaggatatgatatacctttcttaatttctgccaaaaagaaagaagacacaatatctctcactcactaatacataacatgaatttgatggatccaataaacaactaggccggctatatatgtatattcaatctaattaattaactcacttccttctctacagtactcagtgtctggacaacttttccaacttgttggtcctattgtgtgaagatattttgaatcccctaattacacaactcacattagaatagttaaattatttagttatgaggtgaaaaatgataaaaaatattactccatcaaatgaactattgttttgacctttttggctaatttgtgatcagtttttttcagaatcatttagcttctgttcattcttgtgttttatttttctattactatcttttttatttatcctctttttaactcttagttgtcaatctaacaaggtcttactttgatatgtgtctattattttgtataacgtgtctttacatactttgatatgtgttatttattctcttttaagtgactaaaagttgtgactaaaagtcacattatagtcacaaaaaatttatgttaggactaaaaaattatcactaaaggtagatattttttatagtgactttcccatctaggatatttaagtcttctgtcttggacataagtcacccatcttgcatatgtcaccccatccgagataaattatcctctccgagatgtgtgagtcattctatccgagatatgtcatcccatctaagatatatgtgagtcattccatccgagatatgtcatctcatctgagatatgtgagtcattccattaatgataagtcgtcctatctgagaagtgtgagtcattttatccgagataagtcatcacatctgagatgtgtttgagttatatcatctaggatatttaagtctttcgtcttgcatgtgtaagtcaccccatccgagataagttaccctatccgagatgtgtgagtcattctattcgagatattttatcccatttgagatatgtgagtcatcccgttaaagataagtcatcctatccaagaagtgtgagtcatcccattcgagataaatcatcacatttgagatgtgtgtgagttatgccatcctcctgagatgtgctagtcatctcattcgagatatgtaagtcttcccattcgagataagtcattccattcaaggtatgttatcaaattcgagataagtcatcatattcgatatgtgtgagtcatctcatcttagatgtgtgtgagtcaccccactcgagataactcatcccatttaagatatgttatcccttctgagatatgtcatttttcagaaatatatgagtcatctcattcaagatatgtcatcttatttgaaatgtgtgagtcatcccattcgagataagtcatccctcaaagatatgcaagtcattccatttaagataaatcatcctatttaaaatgtgtcatctcatccgaaatatatcatctcatttaaaatgtgtgatttcatctaagatatattatccaatccaaaatatatcactcaatttaaaatatgggagtcatcccaatagagatatatataaattatttatctaggatgatctatggtgtaactcttccactacatgtttaacttcacctaggatataagaactattatatctaaaagatttaattcatatagtgaatgttcttatatatagctcaagggatatgattctgataccatgttgagaatcatggggttccatctcaaaaccaattgacaatgagtagagtagctcatgttcttatatatagctcaattctctaccatttattccatgtgggacattgtccacaatacttatcaaatatagttaataataatacaccccaatttctttttctcttctataaaacgtatctcttcctttttataagagttgagaaaaacgtaagcccttgctcttggctgagtgcactatagcctatgcttgcttgaatgcagttactagttgtgctcgaaatggaaaaataaattttgagggggccaaaaagaacattatttttttattattgaaaatttggaggcttctttcaaaaaaaaaaaa

SEQ ID NO: 304514 - DNA, 4675 bp, Cannabis indica
ttgtaagtgattaattaagctaatctcattcaattttcgttgtttcttcttctgattgattttgtttttatggtttgtaagcgattaattaagctaagctcattcaaattctgttgttgtttcttcttctgattgatttgggttttctggtttgtaagtgattaattaagctaagctcattcaatttttgttggatcttcttctgattgatttggtttttatggtttgtaagtgattaagctaagctcattcaatttctgttgttgttgttgttgtttcttcttctttcgattgatttggtttttatggtttgtaagtgattaagctaagttcatttaatttttgttgttttttcttctgattaatttggttagtaattaagctaagctcagtcagtttttgttgttgtttgatttgattttattaggttttggttccgatcgctaatggtacggagccgatggaagcggtgatcaccattgatgttttgcgaagagctggagctgatgttaccgttgcttctgtggagaagaagcttcgtgttgatgcttgtcatggtgttaagatcatcgctgatgctttgattactgattatggagaacaaatcttcgacctcattactctacctgtatgtattatctactttaattgtttcttttgattgtttggatgaagagaaaattttgtgttgtcgaatcgaggcttttcacttttcagtttttgttttgcttgatgtcttcagtaatttcgtttttgttgatagatatttgattgagattgtgtcgatggcgccaaagtgaaacttatacaatactcggattgcaaattatttttgttatcgttttgcaatttgaggtgtgtttatgtgaaaatagtcattataaaaattttattaacaaaataaccatgtttagtcgcacaagcgacaaaaaattacactatgcgaccataaatttaaactattattgtcacagtataaatttgatgtggttattttgctaatttaacattttcatattgctagtttggcaaattttcaataaatcaatctattatatgtaggatggtttttcaactttgattgtttatgaaattatgttttttgggttgttcattgagctattgctgagacatgtatttgacttgaaattactctttattgcctttttcatcctatagggaggcatgcctggagctaccaatcttaaaaacagtggaattctagaaagcatggtcaagaagcaggctgcagatgggcggctttatgctgcagtttgtgcttcccctgcggtggctctcggagcttggggtttgttgaagggtgtaaaagtaagcatactaagctattacggctattacgattccttgacatgatgctatgtactgtactgagcagtttcttgtgttttggtagtgattatcgatgaatgtatgttgaatgttgacaggcaacgtgttatccggcatttatggaacaattagcctctactgcaaatgctgttgaatcaagagtgcaagtggatggaaaagttgtaacaagtcgtggacctgggactacaatggaatatgctgttgcactggttgagcagttgtatgggaaggaaaaagctgatgaaatttctggcccgctggtaaggtcatattctttttcgacaaaagatgaaaaatatatggaggaaacatctgtttgaacacacttgaatgagcaaagctctttttgtttgtgactttagttattgaagcttaaatggggtttttcagtagattctttggaagctaaacattggatttcaaatgaggaaaatccaacactttcgaatgcttagagaaattgcgtaagacacttttagaataatgattgcgaaacaagttcttgggaaggttaagcagatagagattgtttgggaagcacatattggtggtagagattcacttttaaagcctgtcaagtggtgatgccaatatctagcttgggctgatactgaactcatgaaattggtaaaaaaaattgttagctttggctcaaaagactgtcaactagtttgcactactttttatagtttaccttttctcttactgtttgtgggtgaatttttttggacactttgtgtgctttcacagctgtataaaagtttaattcgaaaacaatcttctactgacgagtgatacataaaatacccaattgaattgtttgatgtgttattatccctcttttacactgttaccaccatacctaaacccacttggctaatagtttcgtttatcatcttgttctactttttacagaagaattgcttcttttactcttctgatttattttttggctcataaaactttaaataggtaatgcgatccaaccatggtgaagactatactataaaggagcttaatcctgtgcaatggacattcaatgatggccctagagtgagacttttgtttatactttgcttttgttgttgagtttatgaatatatttagtattaatctacctctgttagaaaggattcgagtaaattactttaacatgcttaagtctaactcgatgaataatggataagggagccagcttatatatttgataatttagtcaaaattagtgtcttgtgttccctcctttatcaaaattacgaggaacactgatgagtgagttcaaaaatgggtttgctgataccgaaattttcacaaattcatgcacggtttactttgtcccagattcttgtacctattgccaacggtacagaggaaatggaagctgttatgatcattgatattttacgaagagcaaaagcaaatgtagttgtggcgtctattgaggataaagtagaaattctggcttctcgccaagtcaaactcgaagcagatatgcttctcgacgaggccgccagactttcgtacgatgtcatagttttgccagtaagttatttggtcaccatttgattcaagtcatcatccatctattgatttccatcacttgatgttctgtaatttttttttaagggcggacttggtggtgctcaagcttttgcaaactcagaaaagctagtaaacttgttaaagaagcaacgggaatcgaatagaccttacggagccatctgtgcttccccagctctagtcctcgagccccactgcttgctcaaggtatggcaaccattcacacgaatgtgactcggtttatgtatatatctgtttatcaagagcttatgctcctcaggagcatctctaatactctcatacatataataaataagtgttatagtttagcatttgaagaataaaaaagctttcaaagaaaaaaatctctttcattacactatggaagagaaaaagaagaagaagagagagtataggaataaaaaagtgatatgataagagaaaatgaagttattcagtcacatatgaaaaaaatactcttttttttttgagtttgagtttcataagaacgaagataagaaggggttgtgcgattattaattttaattgatgatatttataccacaaattttcttaatttttgcaataaaatatttttcttttattcttacaataattcttttttacatagatttgaaaatgtcattgtgtatttgaaacatgatgctagcctaaaagtattttaaatcaataatttatgtcctgatatagtgttaggaacataaatattacttctaaatacttgatacaaatagatttttgtaatttcaaacaactatcggcttcttctatacaggggaaaaaagcaacagcatttcctgctatggcgaacaaactgtcagatcagagcgaagccgaaaacagggtggtggtggatggaaacctaatcaccagcagaggtccaggaacttccatggagtttgctctgggcattgtagagaaactgttcggacgggagaaagcgttggagcttgccaagacaatgctattgtaagcctctactcccataacatctctctctatatatttatctatatatatatataaaaatatatatatatatatatttatataaatgagatgatagaagtggttggattcatgtttgaatatgaatccactaggcttacttactcacgtacgtgatgttggttgtgtataaaataaagtcccaaagatttggttttcaacattttatgtgtctctgaaatgatcttatttgagttatctcatcaactactgttttgctagtttctgttttgagtcattaaccacaattagtcatgttggataattgtacaaagtcactaattgagctgccttaggtgaaactccatataaggagaattactagaaggtactagtgatgtctagtgctgtaaatatgggtcgagattattgatacggtatgaaaaaatatgtgtttaggcataatacggcacaatacaaaaaagatataggcttaaatacgatacgatacaaaaaatatgaacttaaacacgatacgacaagttcaaaaataccgtacctaagcacggatagtttaactcgaaagcatgacacatgttttttaacaaataatttgataataaaaagaagaattgaaagcacgagatattgaaaagtcaataatttaataatagtaataatgataaatatttatttatcaattaaaaggatagtaatattttaattataataattttaattttttttatatgattgtgtgtaattattattgaaa

SEQ ID NO: 304515 - DNA, 2397 bp, Cannabis indica
aacataaaatgttatttctgatctttattcataagtaaatctgattatatgaaatgagttttatttagggcataaaacccaacagcttctagaccaggtggtgggtagcgtgagtgatctaacttcgaagaagtgggcgattttcagcagtagtgatctgacttcatctttattgttgtgcactgttatcttatgttgttgtgttatgccagatgagcttggttgcagaaatgacttccaaggaagtgggggccttaatcatagagcttggtcatgttaaagctaagaaccagtctctgcacactgataataaagccttacttgtcgtgcttgaaaaaactaagtctaaggttactgttgaggtaaacaatgtcaaggcaaaggtagaggattgggtaaataaggtcaaggctgagtgcaaggtctgaggttgattgtgttgataaagcagacagcgacaagtacctcaaaatgtacaatgaatacaaggccaaggctgattggaccataaggaggagctaatcacgcttaaatccaaagtaacctctcttgctggtgagcttcaacaaatgaaagaggagaaagacaaaatggatgctcgcttgatgattcaaaacactgcgctgaatgccaacctcgaagaggtcaacactttgtaaggcgagatttatgagaaagagcaggtgattcaaggcgtggttggcaacgttgcggatctgaagaaggagagggattcactgaaatccaagcttgaaacccataacttaatcttgcacagtgtctgtgtgactagtaacgcacgttttgacaccataataaagttacggaaggaagctactcaccaaccaactaatggtagaaaagcctttatctccatggcagccatgtagagggtcagagagactgttgaacaatccacagggacactagtgcacacattgccaaaatagaggctaaagctgagaggttctgtctttgctcactggagatatcctactcgatgcttcttcacaccctatggaaaaagaatcctaccatactcagacatcttggaccaaacgaggcacaatctacccagagggtgcacgcccttgaggacaacacttatcttgaaaaatacgaccttcatggtgatagtgatgaatctgtcgaagagttagctggagacctagaacctgagcattcaaccaaagttgtggtttctttggggaatgatgtttaggacctctgggaactcccctaggataaacctgaagaccttttagctccagcccaagactttcctcgagatgcacctccaaccccaactcaagaccaaatctaagataattctttagcccaagcacaagaccaatccaggactaggcgaaggagtagttttatctttaagcttttctttttattaccttttttgcggagactctttaattatgccttaaccgcgaggttttatgcaataacttagaaacaactttcttttgtttatgtattatttttttttgtttattatgcttgaattgctagtcttatgctttatattacttgctaggccattaggtagattgccttaggacttttagagctttttggtttccaatggccaaagcttgatacctttagacttttatctttgaaagtgtttgttaaatcttggaagtgtacaaattgcaacttccccttgttagatgtcaaccttgtcaaagttccctttgtggcacttgtaaactttgcgagttaatcttagatggagggactgtcagcttattctcagatcgttaaaggagtcgcggagcttaactcccttccatgtgttacctgattagctgccttaagtagaacactatgttggaatatattttaccaggacgtagatttactaacaagtatgtttttaacatcctaaatatgaacttctaaaatgataaaaataaacacataaagtatgagaaaccttacattggttgtagtggaattaaatgactcctcctgctcagatctctaacccttgtatccatctgtcgcagagtataatcaagatttgagcccgacaatacttccgttgtttggattctgtcttacacactatgattgaggactaactttctatgggtgggcatccactcaatcactaaaagcttgaaattacattgtgaagaagactataggattcaaaaattgaataagagaaaagaagaagaagcagtctcaaactctctagttgtctgacacgaagaaaactaagtcaagagtcattagtttgattatgagaccattcttttcttttcatactaattcacttagggttgggattgaattatttggaataaaaaatgataaaataatagcaaaaatatgacctaatggctggccacatgtgggcccatcactagttagatt

SEQ ID NO: 304516 - DNA, 631 bp, Cannabis indica
atatatatatatattgtaacgtaactgatatataggttaataaaaaaaaaataagaaaatgcgaaatgaaaaaacttcttccatccaaataaaattattgtctattttaaaagtaggctataaattaatttatggccataatattaatgttacaattacataaaaaaagaaatgcttttagatagttagacaataaaatttgaatatcaaaaaagaaatctataaaaagtgtttttattccccaacatatctaaaaaaaaaaagtaaagtgaaaaatttaagaaagaaaattgtaataaaatttgtaataatggtgattttgaaccctaaaaaacccttcattgtttattttgtcacacattactcatgtgtgatagtgtttttgagatttatattatttataactattaagtttacgatcgaattttgataaatattggatatatattaaaggtgcatgtgactgaaatctgacaaaaataaataaagtgtgggatgaaagaattaattgcgtgggtgtacgtcggtcggtttagtcgggttatagcatatttttattaacccaatataaatatcgggttgcaaaatttaatcgtaacccgcccaatgaaaatttagaaaaagttcaacc

SEQ ID NO: 304517 - DNA, 1556 bp, Cannabis indica
gacacaaaagttgtactcattcattaattgcatcatgcaaaataagaaactgaatacaaagaggatatagtcggaccatcaaatcttactaacaatagccaataaaacatacttaaccaaaatgtgagctgctatattaatagttctaggacaatgcacaagattcaccatattaaagtttctaaataacgaaccacattcatccaaaataagttttaaagaagactccaacaatacatgattattaaacttagacattaaattaagacaatcattctaaaaaataacattatgaaagccatgtaaacaacactgagagcctgcattagccttgttacataattttatattatatggacacttccaaaataattaaaaactttattgaattaagtacaataaaatataaattaataataaaccacaccaatcataaacgtgcgagtgttttcttatttcttcacggggtagaggaaaaaggaggcacgtaagcttgatattgagatctttagttttatggcactgacactggatctccctttgaaccaaaaagttgatgagaaacaagatgatttccttgattcacggtcaaagttggaagttgatcctgttatcgagcgaaaacagtcgctcaggaacaaatcacgagttgttgaagtcaacgaggttgaaaactctagaaaacctaattttcaatctaatgcgaaggattcgtgcaccaatttcacaaccaatcaggtaagaactccatcatctaagcttgaatatggtgaaaccttgaaatatgttgaacaacttgttgcggaagtcgatttggatgaggttgagtctgaggcctcactatggaggaattctgtactttgtgttgttttgggaccgagtctcccttttcgagtttttgaaggttttatcaaaagattttgggtcaatcttggcgttgatcgaattatgaggatgcactcaggttttaccttggtaagtttttttgatgaaattaccagagatctggtgctcaaagctagtgtgatccatttccattaaaaaaaaatcattgttccttggaccactgatttggagtcgattaaaagggtgaattcagttcctatatatctaggttagattgaatggtctaggccttcaatattggggaaataagactcttagtgctctagtcagtactttaggcaagtctattatgattgataaagtgactcgagacaaaacgatgattcaatttgtgagagttctagtagagattgagaataaagatgagcctccttgctctattagttttgtgactgaaaggaagtagttggttgagaaatatatggagtatgaatagtttcccactaagatggcgttcggttggaagtaatggaatggaatggattggaatggaatggaaaggaaacaattttcattccattcctttgtttggttgcattttaaagtattgcaatgacattccaatagaatgctatttcaactattttggcggaatgactattccatttaaaaaaaaaaaaaaagaatcattccaatataacaagaaaaaa

SEQ ID NO: 304518 - DNA, 4532 bp, Cannabis indica
aattttaaaaaatatcatttatcattatagtaaggactcaattttttttcctatgacctatttcaactcaggcccgatcctgattgtagactatgataacaaaaattattccgtttttaaaacataaataatgtttatatataattaaatttgtatttttttatatttatatatatatattatatagtgaaataacgaataaatagtataataaaaaaaaatatattttctattcgtttagtacgttgtattagactgtattgtattgtattgtattatattgaattgaattatatatatttttttttatataatattatgttaaattttaatatatactaaaatattatatatttaagtgctaataaaagtcagtactacatataattttacataaaaatattatggaatagaatttaatataatactatacaatataatacggtgtaatacgacgtgccaaaccaacctttagtgtaatttttaatttataaggggaattgaaaaaagagttagtgttaaaatatactctaaactccaaaatttaagtttaacaattggagtaccttaataccttaattatattgtaatttttttagggtggaatgtattgtaattcattggatgtggaaaagacatcattaatagtgtaatagtgtttaagctatttatatagctattattgtttttgttattaggaatacatgaagggacatatatcgattggctaccatggaagtccagccccagctttggtctatttatttgttttttatttttatttttcctgcatagcttaggtctacttgaaaagcataagtagctagccacttttgatggttagtaaaagacaaaagagttatggtgggcctttctttggattttggcgatctttccatgttttgttttattgcactccaaatcattcttgtctatgtaggagaatttatagttattactattgccacctaagttatgtattaattatcactttagtccctaagatactttttttatgcaattagatccttaaagtttatgaaaaggtagcaataattggatccagttcattaacaatggttaaatttcaacagaaatgaatcaattttttaaatcgaaaacttttcatatacaactagaataaaataattaattaaaaataatttttaataaaaacatttttgattaaaaaaattaatactttttagggattatttcataaatacacaaaaacaacaaaaaaattacaaaaatacgatttcacggaattttaaatacttttacgagttttttgattttatttacagtcattttatattgtactcttattaatttgttgttaatttttagttatttgtatgttatttttttgttgttgttttgatggtatatagatgttattttcatgttgcttttatgtagttttcttgttatttctatagaaaaccgtaaaaatgtaaaaaaaaattctataagcgtaaaactgtaatttttttttacaaaaaatagtatcttatgtaattgtccctacttttaactctcttctcttgttcattgtcacctctattgtaaaggatgagttcagtagtattggcgccggggggggagtgggggaaacaagtgaaactaaccataataaggcccaataaaatagaaaagaaagcccgtcagattaataggacgcaattccattaaacagaaagagtaagtgatgtgtcaatttaggaagaactacccaaaagattattgaaaacgggccttaaagacaaaatatactagaacttatctcgaataagatcagagaaagctatagcttgaccaaaactgagatgaattctaacttgggtcgttcaatgatagatcatatttgaaaccatgtcgagatgagatttaatcaagtattaatcgagataggattacctcaaatttacttgaagttaagagaagtagtattcaggataatctgagatagattaataattgtgtcgcgataaaatctatctaggtattgactgaggtgcaataactttagatttaacaagcgtcttctttagaccaatccagattgagatatgatatatatcaggattgtccaaggtgaaccaaggattgagctaaagttaagagtttgattgtgactgaacttgttaacatgttctattcaaagtggcaaacgtattctgaagggtcgtctgttccattgtattctcaaagttttagtgcaacgtaccgttgcagcacttccacccacaagatgtggttcccaaaaggagattgagtggatccttctattcttgttgatccattgcttatttccatataatttttttgcctctacaaccaaaaaagcttgttccaaatcatcttttgcttctttgtttctctggtttgtgttggagaactttcaggcattactagggcaatggtgcgtctttttaatgttgcacaaatagcttatacttctttgcttgcttctgcatcttctttgttccttctcagtttgtcttgaaggcattggatttctccgtctgaattgttttcacgcccagacaacccatcttgtgctgaatttttatgattcaaatttctatccttaactttttccgccaactccacgtgttgttgattatttgcttcctcaagatgtagagggcgttagtatccttctaagaccaccttcatctggctattctcatttttgagtttctcaacatgttctttttgatgggccaatctcactccttgtgttgctattttatcatcctcgaatttcaatctttctaagatctccagccacgatggaattgtgggaagtgtctcatattgttctttttgggtggttgtatcattttccctttcttggtcagtgttatttgcatgttgtgttgtgatatcttcctctttgtctgccatttgagacccctttttggatggaaaaatgagaaattgtcaaaaactactagaattatggatgtagaaatcttcaagaagagcaaaaaagagtgtttcccacagacggcgccatactgttttgaccaaaaattgtgatttttcctttttgatcaaattatttagtcaattattatttggtggaattattctcttcaagttcataatactccatttttatggtctttttctcctattcccttgatgtgaatccattgcgttgtttatattttacgttctttgcatgcatggttttgttgttactctttaatgccaagattgacatgtgaaccgatgagttgttaattctttaaaaactagcttttgtaaatgtgattatctctttttaagttttttttatttgaattagttttattttttatgagtctggattgtgagttgttctaacttaatactattttatcttctcggcaatgcaaactttgatatactctttgtttgatctttgacatctatcatttatttttaattttcttttgtttattaggccgaggaaagctctaaaatagtggagaagaaaaatggatgacaacaatccttaacgttcttttggtaattgaatgggattgggatctcgttggccggatgaggctataaggaataaatgccatccttatgcttgtcccccttctttggaatggacatgagttcataaaagtacaaaatttcagtaaggttgggagcaagccaacccttaaaagcataaaaaataaaaggcctaataacaggctataacctttggggacaagttggtagggagctagtcctacaaagactaaaaaattgataaaatagttttggactagcaggcttacatcagacataagatgtgtctgactccatgcccctgatccctcgtagttgtgattagggggtctcagagtcttgagttagacaatgaaagacttcgggttcccgaggcatgatcccattctctttgataatttttttctagataatgggtgcatcccagagatgagtgcaggttatcagcctcccaactggtggcccgatgaacatagttgaggccggggaccgagccctatataacaactaatagggcactatgggataacttggggccacctcttgagatgaagagtttgacggatcttcaggatttgacatctttgtcttagaatggagttccaaaatttctcagtgaaatgcgtaaaagtcgtgctcgtgtaggtctcttaagattttgatcatctgaaaaacagaatgtactctgcagttagctcccatatcaagccctaagcaagaagagaatgtgggtcccctaactgttgagaagaggcccccttcagatgctaaaattgaaaatttcctatgccaatcatcgggtgctaattgcaccatgcacaagaagaaatagtacaagaggcaaagggaaagaaaaatggtgagttctattataatatctcagaaaatataatgatattcaattggacatattttattaaatatgtgattaagtaggcattatagtaggattaaaatcttacttaagctaattacgagttaattagtgaaatacgagtaaatgaacaaataaagcg

SEQ ID NO: 304519 - DNA, 2015 bp, Cannabis indica
aaaagatttgtgaaatgagctcccctatattctgaattttcagtcacatgatttcaaaacaccatagcaggtaatgcaatcactttctaaaatcattagaatgaaaagtgaaaaagtctataaatagctaattgattggtgaaagcattaatgatgacctgaaagtcaaaaatcatcatttcggcagaattgattaccaattttattgagtgttgttatgagaatggttaaaaggtattattggtgcttagggcgcgtttggaaagcaacagtgtaattggatttgcctctaattacacaatttgacatgtttgtctgaccatgtaattagaagtaattgagggattttaattacactctccaattttcatggcccccatgagaattgaatataattacacggtgtaattactaaaactttctatactaaacattagctattaaaaaatattattttctcatgtaattactaactattttgccaaacaagatattaggaattcatatgtaattaccacctcatattcaaacacaccttgtattttaaaatatagtgtaattactaaactgtgtaattactaccctagtaattaccctacctagtaataacacagtttcttccaaacacacccttagtattttcttcagtgtcatactcttattgatgtaattaagtatcaggtcttatataatttacgaaaataatttttagagaatatcactaactatcgtggggcgccacttataaaggtaatagacaccaataatattttattgttatagtgtcaaacactatcacgatggcttgtgaatggtgaatgtcttaacataatactttcaaaattaaaatacaaaagagttatacttaattgcattaatttctctaatttattagctgaaaatagaaaaagttagaatgttgtaattgataacataaatacttaagtctacttaggcatttcatctaaatatctaatttttaattttaacggtataaatacaaagtaccaaatgaatattatttaaaatacaggctacagaagttatttttagacaaaacacaagctctactgatcatggacactagtatgattaatgtgtcaacaaactaattatttgtcctcgataaagaatttaaagtaatctatcttagaacaggaaaattataaagaaactttgactattgctccatgagcttctccctcgacctgcccaaacttggcttagtcaagtagaactgggttgtgttgcttgatgctccaaacgaaaacaaatttggataacctctagtttgatcaagaaattcgatgaggtaacaactattcaaccaaaacccgaaggtgtggactaattgagtatattcccttttaatttttgttaaaatatttaatttttaacttaatttatgcttcaaaaattgaaattaaatatttaagtataacaattacataaacttagatatttaattaagtcaccaatattcctagagaaaaaaagttaaatattaaatgtttgtgacgtcaaaataaaaaataaaaaatgaaatatttgaatggaacaaataaattatctcaagtttttttatacagccaaataaagagttttccagctcttttcttttctttggtttatttaatagagtcaccttgtccactaggcaattcataagagtcatgtaacaaattaggtattcaaaaaaaaaaaaattaaaaaaagtaacaaattatattaatcatcataaatttaatctagtgaaatctgtgaaatacaaaattaccttttgttactgaaatgaagatcctgatcaggtagatttatgaaagtgataaatcagtcttctctactaatttctatatttttcatttatttatttttggtaataaaagaatgatatatatgaattagtaaaacaatatgtggttataataggatacctcatattattattttatttttattttgttaaaaatatattttcattttatacaatctttttttaatttttttttcctttt

SEQ ID NO: 304520 - DNA, 533 bp, Cannabis indica
aattaataaaagtggtatttttcaatttaccctcatatttgatctctatctcttttttgttgccatttttttgtagtttaaaattaaatgattggtgttttgtcttttagtattgttttcgttgtataggtaataagtaataaaagacaaaaggcaggaaagaagagtaaatggaatagaactaacttgtgtgtcttttttcccataagtactcttttgcacgtaacttcttcaatctccaatccatacataagatccaacttattacgtcatttttttttaactcaggtgtttggttttggaatataattaatttccatccaactatcaatgatgtcttctataaattttagactgacaatcccaacaacactatccacttgattaattaatttgtaactaaactcaatcatactattaaatataacataattatatatatagtagtgtgtaatttggatatgagtgttagagtttgtcgagaataggttctatctcaaaaccaattggcaatgagtggagtagtccatgtt

SEQ ID NO: 304521 - DNA, 1243 bp, Cannabis indica
ttttacatattattttcatgttacttttatatagtaattttgttgtttttataaaacgctgtaaaaatataataaaaaatatttaaacctagaattgtaaataaattatcaaaaatagtacttatacttcgtataaatttgcctttgttttatacacaaagtatggatattagaatgagaactaaatagtgatacttttatatgcatttgatcaaatcattgtagttattatttcttagaaccttaaaattttagtgacgtttacattaaacatgtaataagttacgagaacatgttagtcactatttattttctttctatttttctctatgaactttggtcaattatgttatttttcaggtaaattgtatataacaagcacaatccatgtattttgaaggaatgtgtactttacataattcattgtgagtgcctaattaagtaactctttgaaacactctgtatatatcaaattaaataaactagtaattattggtgacttgtgagatttgtacttaagaaaactattgtattttatcacattttgaaaaacaccataatatcatagttccatctcttatgtgcttggttttcttgctcggaccaatgtcgtcgtctctgagggctctggagtggtgttgcttcggatcaacactccctctttacatgttcctcatgaggtttcgggttacggcaagtggttgtcgaggccgggctttcgggttttagagcattgcttcacctcaaagttgtaacagttgttaactagtggatgaaatttcttcctaaaaaaaatcaaatcatccatttgtattttttgatactaaattttaactaaaactaacatatgtttaagtttatagggtgtatttggtaatactttttaattaattttatgtttttttaattagaaaagtaaaaatatttttcaaaaatatattctataaaattgtttccacttttttaatttttttaattgagaatcaaattttaaaaataaaaaaaatcgctttaataattttttaaacaattttttttttcttaattaatattttgaactccaaccccaacttgaatattgggacttggatttcggctccagtcccagtttcacactcggaccacggccccagccccagccccaaacccaaacctaacttaaataaaatcaaaaaataaaaataaaaataaaagttatagaacacccttatactttctacttttaaaattaaaaaataaaagt

SEQ ID NO: 304522 - DNA, 767 bp, Cannabis indica
ctaactatattaattattcattcattaattattaattacagccaaatagtacttaacagtcaacattcctccatcactactttacaatcaaacgccatgcatccttttattaacatataccatacgactcttcaaaattagatttaaaacatatatgaagcttaaacttaggttagatttatgaatgaaataatataagatgaagacatatctaatttcataattgtgggtatatatatatatatggttttctactaattttttcttgatgtgttctcatttaattgatggaaatagaggaagagtggttgaaattattatccttatgtttttttatatagcaaactaattaggtttagtatttcacaacaaagtccatatatagcaaataagatgtttattaggttcaattaattaaatcacttatttaatataattgaattaacctaaataaattgtattaatttgtaaacttgtatattggattattgaaaataactaaatacattggccaacctgatccaatcaaagccccaatcaattagtgaccattttcaatgtgttgaagaatgcaaaaatcaaccgtccttttcttttgggtacgtattgtgcaaataaaaaagaattgttagacataaaatttataaacactactattggataccagtcatatatatttagcacctcatgttattttataatgggtaaatatcattttgaactctgtgttttgcaaaagttatagattgaactttgcgttttgttaa

SEQ ID NO: 304523 - DNA, 1782 bp, Cannabis indica
atacagaagcagctttttaaaaaaagtcagataacgtaagagctgtgcatacatttacaaaatcaagagaaccttgaaaaaagaagagagataagtagggaaaacctgagacataaatagatagtaacagcaacaccagcacaatagacaaactaatcacccataagatctacactaacatataacataatacaaggaagctaccacttagaataccttgtataaaagcatctccccatgctcacaacgttcattttcaggaggaaagtcatcttctagtgtcccttcatatgcttcaagaatttcaactgcttttaaagcactaacacgaaaacaaaaaagtttagtagaccaaaacttagtcaaacttaacaacccaaaagcacaaccaagaagaattaattcaccaaaaaaagtaaagatgcttatccttacatatttgtgtatgcctcatagagaagaaaaaaaaataatagtattgattgtatacatacataatacttaaaaacataaacaaaagagaggaaaaatttcttaaagcacagaatgaatttaagttccattttagatctagatttttttaaaagttcagcttgcattactttatgtaaccgactttctgacaagaaccttagaacatgattcacaggtgtaattttttactaagaacagctacatgaaccatgataggcatcagcaaaactcaacagcagaatgaccaatgtcaaaagcacagtttgaacatatgaagtcaatagatctataatctataaccagaaatgcattctacaaatttccagttgtgtataaagaacaattctatttggattatggatgagagaacataagtttagaaacttcttggttgtgtttctagaaacttcaattatatagtaggataacaatggtaagtgggaacaagaaaaataatttaagtttgccactgtaaatgatggccagtactacaaagataatattaataattaagattaaattcatactttgaatttaaatgatgagcaacagcaaaaccaatccaattcatacgatgatttgattttagagacaagagttgttgtcttgtctgaacaaaacctgccaaatctcgcatctgcgcctgtaacacaaaatataaagagccatcattacctatatcaaatcaaggaactaagcaacaaaatgtttgttgtaaaaacgatcgcataactgatgtaataaataagcatgatgttagcaggaatatttaacaagagtcatgtattccaattaactttgaaacagaaaacaaaagtgctcgatttcaatattttcttcaagttaccaacagagcataagtctctaaaagaagaaaattaacatcaaaagcatacctgtaacagtgacaggtcccgcaaaatttcaatattgtctggatctatcctcagtgcatttctgtagcatttgattgcctccctgtattctctatcggaccgataaagaagaccataaacatgccagcatacatgacttttcagatcattctgcaaagagacaaaaaagcgttagagaacataagacctactgactttgagacaaaattaacattaaaattttaagacaacactctcacctttaatccttgccgaacaagctcatatgcttcagatttacggtccatgcaatttagtgtcagccccttcattgataaagtttctaaccaaaaaaacacaaaggaaatgtaagtggagttaatttagtttgaaattgatcccaatgaaaataataagtataaaatagcaagat

SEQ ID NO: 304524 - DNA, 3344 bp, Cannabis indica
aattgtatttattatatcaattattatatcaattaaaaaaagactattttgctaattaaaatatttgaaaagccattttcctaataaaagttttcataaaggctattttgccaactcactctcatgagagtctaaccaaatctatttttttaaggataaagaaaaattaatattaattatatttattatattaattattatgtcaattaaaaaaaaactattttgctaattaaaatatttaaaaatttatttttctaataaaagtttttataaagactattttgcgaactttttatttttggtgtgaaagagctaacttcctcttcctagaaaaaaaaataaaaaataaaataaaataaaagaaaggaaaggacaacggctaactaattgagccagcgccagtcgtcgagattagtcgccgccggtaacttttctttggaatttctgaaaaaaaaaaataaataactattcaagtatgtattgttgctatgtttaaaacttcatatagttgttgttatggggttaatcaaacttaaatacactcatggttcacgttcacggccgcggatgtgagccaaattggatgaactgagtgagcccatctgggtattttgtttagctacttggttaatatctttttgtctattatttttgctactttgaaaataactcgctcgctagatgtttgataatatgcctcagaaattatcctcacagttaggcaccttaacgattttcattctatgtttgataatatatagtgcaccttaattctgagtagtttatgttacatttcttttttggaggagcttacatcactagaaagctcgcatatgattaccagattatgagctcggaaagtgctcacctcgttaacttctatcaatgacatcaaaatcaaaggaacaagtattcatttcaactttttttgaagtttttatatgcttcatataagaatccacaatatctttaggtggactttgtttagcttcaaagtttagatcccaattcaaagtactaaactttcagctggttactgtagtggtactttgttagcattgtccttcagtgcatggttattatgtcttcaaatattgtagggttatatggttaaatgaaaacatttatctctttcaagagaaaaacagaacatttatgtaacgcattcatcgaactagtacttgttattttcgtaattgatagcacaaaagaaaaatctatccttgtttctaatagcatcatttttcaatatcaataagattttgttacctcatttttgggtgtttagcagtgcccgcttgtggtttcatacatttcactgcggtggtaggagcacatacatgattatggtagtaagaatgctgagcttatgtacaacagttcgattagaagccacaggtttgaatgaagcctcacaacctcatccacggcagacataccccacgcctcgtctttcatttgctaagccttcttgggttgtccgtaccgaggcaagtgaccctcttcatgtgttctctatattttgagttcactgttctcttttattttctctttggtttctctgaaatttaataaagtaattataagcaatataatttagttcttttctaacctcacttccaacacttctccataccattagaccagccttcggggttacgtcttattgaaaaccatactattgttccttaatgttagtcccctctttttcaaccttcctaatagatagctatcatccttccttccactaatatttctgttatcttatgagatctgcatctgtatgccaatattctaaaaccaggaaactgggagtttggtatatctcaaattattagtgtttttttttctccctcaaaatatgtcataacctccatcaacattgaatgtgatacttttgctaaaacactgccaatgagtccgttcatactattaaattatggtactaactccttttacttctttctttggcagtcaaatgttcatagagaagaaaagaaaacgccagatccaccttgtgtggtctgcatggggagtggaaggactggttgccacacttgccagggaagaggtctcacttataattatctttcattctcaaaatttaagcttttgcaccttgcatcttgtaaattatgctctttcctacctatgatggttacctattacctcaaagtaaattttgagttgttaaaagattatgatttacttggagaattagctgtttgatcagctatatcattatcttggttccatttttctcaacttaaaactggccacaaatattcccatcatctgagttttctatttaatctagtcatctaatgtcactatatgctagtgtcttaagcagaaatttctcatgtttcagtcatattgtaccgtgtggttatcttcttaaggattttcaagattctgttttgctgaaatatgttgcgtgttgcccagacatctaagctgagagaatcatccataggcagttcctctctcagttcttttcatcttacacaagaatattgttatatgacagggaggacgaactgtacacacgttgaaatgctcccgaagggggagtggccaaaatggtgaggcgttgaactctcttgaaacagttttgttttggaagcatgcttggaatttcacctgatggttttactccaaactaactttgtttaaacactcttgcaggtgtaggacttgtggcggaagtggtcttgactactgtcctcgatgcctcggtacgggagagtataggtacgtaatgggatttcagttcatgaagagggatgttagtcacacccaagatcgcaacgaacgtcgtagtgtagcagatttctatgaagaatgatcaataacattgaagtgaaaaactcaaaattaattattgttattattattatttttgctgaataacccaaaattacttagttccataatctttagcgatattggccacattttgtgtatagctcaatgtcttgtagaaagagcactaccatacttacttgttagagagatagattagtgttaatcttagatagctcaaaggtattatttgtactgtatctactatatttattttattcatttatttgtgatttgtgcatctactagattcaggttatattagtttattttaggaaaatttgcagcaaaaatctttaaaaatattgatttgatacagattagtcaccaatcttcaaaatagcagtaatcgtctcaagcttacattttttgtaagtccgtcaatacctaatttaacagctttgttaagtgctgacaagaatgccccatgtcaaaagtttattggtccacgtcataattttaattaaaattattaaaaa

SEQ ID NO: 304525 - DNA, 2270 bp, Cannabis indica
agacaaaaatatttaaatctaattcaaggagaatttttaacggttaaaaaaattaagagcataatttagtatatgtctcgaaggaaaagtgctaattagccgtaattgaaatttgaatttgaactttttgtttgcactatctgtggatggagtcgatggactcgtgttttatcgttactcttaatttaattggattatatttaatcatttcaattattagatcaataatatacaaatatagtacaatggtagagtatgaggtagtacaggttccgtaatcagtttaattatttaatcatttcataatacttcctctttactatttttagtgttcttaaattttttatttaaaagctgtttttgtattatgttttcaaattcagtctgtgtaagaaacaattaatggtttgttctcatcatctccaatccatgggaaaacctctttgctatggtatttgttttctcctctctcattccttttctaggtttggaattggtacagtttgtcagtgttgaatttgaatttgaatgctgttatcgtttgttttgttattagatgctgggaaaattgaagtttctctaagttttttcaataaaagaatctatggtatcttctctgaagttgaagccacccacattgctgattcaccaatttcctccttgaaaatgaaaaatgaatttgacttggtaataatgtcttcatttgatttattttttatgattgtgttaatagtttttcttatatctgtaaattacttttgaaaggtgagagctttacttgaaatgttacaagggttttctagttccttgttttattgggacaatgatgggaaccgttttcgtgccaagagtgaaatatatgttgctcagacaagaagtgttgaagcccttatcgatcaacttatgtatgccggaacttgcttgcaactggtgggaaatgtggttgctaaagttgagaaacagccgggatcttcatcttctccgcctactttgacagcatttgcatcctctgcttctgcttggcttcgtgttaagtatccgaaactgaaacctaatcatcgaattcgaataaaagtattgtgttcattttaactttttattgtaattttctttctttattttgtatcagagattacgtgatattgctctaaaggaacaaacgaaaatgagcaatgctggaactggatttagtcctaccttgctgggattgacaaattctttatccaggtttgtaatgattgttgattcagtgtttttttttttttttgatcaatgaacatttcatagaaaataattagtttaatacttccaataaataagatgataaataattcatatgtatatgctcaacatcacaactaatttatgagcattgagtgtcgaatatgaatttgagatatctcaagaaaacttgatacaaacttgcaatattctctaacaaaggctgtagcttagaacaatacaaggatctcttagagaaagtagagaccaaagccaaacaattactctctataaaactcttatctgagtcagagtcagtggtaatactaatcctaattctggtttatttatttcttgtaattattatctaagtttaaatttgttctgtattcttttgacccaaattgttttgtcagtaaattaacaaaaataaggtctgtgagtggacacattttgtttttcttttcacaaaagagttaccagcatggctttgtctgtaggttgacatgctttattaagtattatctatgttcttttattttcttgaccgatcttatatttctagcatatgttgccttcggtttgctaaaatcgtcttgcttccgtcaatgattcattaattgaattacgcaagcaagtgctctctcgatttgtttttgttatgtagattgctgattactgtttattgatattagcctttgctcaggtgctgagtacctattgcagatagtgcgtagtgctgttcctcaactattttgcgactctaattcttctgttccagcagctgacatagcagttcatatccttgattatctttacaagaaactggatgaagtgtgtcttgtgcaaggtggcgaggttgtgactagtttcatggcacggcattatgcttttagctatgttctcttaattaagcaatcaaagttaataatttttaacaatttcaggaggaaagatatcagatgctactttacatgtttattggtagtctgttgccttatattgaaggtcttgattcatggctttttgaaggaacacttgatgatcct

SEQ ID NO: 304526 - DNA, 1254 bp, Cannabis indica
tttgaacaggcatcacagttttgtgggcagccgcagccgcccttgtacctgcaatgcaaaagggaaatgatacagcaagaaatcttcacattgctttaaacgcagcaaatgttctgctttttgtatggcaaatacccactggacttgatattgtccttaaggtgtttgaattcactacttggccttaagctgcacatagttcaaagagagttgtatacttatatgtgcttcacctattgctgcaactgcgccatcttcagtttctgaagttctattactacataaatatttttttcatgtaacatcttcagtttcaagctggtattagttgattgtatatgtttatttgataatgatgttgtaaaatgataacattccattcgaaattcattttcttaattggcagtatctctgtttgtctggctattagtataccaactaacacaataaatttttcctccttcaccagacacaagttgcataaaggcataaagcaaaggtaaacagatattcataattcttctcacttacagtcccattgccatggattcctcttcttctacttgcttttctgcagtttcaatcttggtaagttcacactcattctctaacttgtcattttcatgtataccttaagataaaaaaaacctgatagtcttggtaatatgttatcctcaaaccatgctagagaaacgaataccagactctttcaccatggaatttcttcataagtgaccaaagacaaaaatttaagtgttcagaaaaaggtttcctgggactcaatatgtgccttccctaaaacccaaggcaaggataaaagttccttttccattgtttccagtattatgataatgcaagtttgagtatctcttacaaacaacaatttctcaaagcttaaacttattcgagctgcttcccctttcctatattaacaatacatttaagaccacatttaggtgtcattatcatactaattaattagtactttagtagctttatgtagacgaaagtcacaggacaatgttagttaaataataaataaataaaagcatttaactttctggtcagtgtcgtttatctaacactatacttgttgacgaaatctaggaacttgctttcactgattttcttttttaatatatatgatatatgatgttccttttcaaggctgtcttagttgtaaaatagaatcactaaaggagggttatatccattcaattgaccactgcacgaacaatttaaagtatcaatctt

SEQ ID NO: 304527 - DNA, 653 bp, Cannabis indica
ttttgctatatatggacaacatatacgtacacaatttaatataattaggtgagtaattctgctattttgatacatgcaattttagtgtacctacgtccacacactatacaatattagggaaaagtactagtaaataccaaaactaaaactaattaatcactatttaattaacaatgggaatcactagaattatgtagcaaacaaacaaacaaaagagaaaaaggcataactaaatatagatgcagacaaacctcgtgttgtgtggtatagtagtaggaattgtctttacttattatatcttttttttttttgaataatatccttctttttatttgggtcaaaggttcgaaatccactataactcctctaaaaaaaattaaaggtttagtccttttgaagtttattagcttgtcgtaagttgtgtcatttatgaaatcttgaagtaattaccgataattcaattaaagttagttaaaatataagattcttatagttcaaacgtgacttctaaaattgttaaaatgaccccccaaaaaaatatgcactaccataattttttgtttgttaagcacaatatatatctttatatatatactaggtgattgttacgtgccaagccacgtagtgttagttttatttaatattttagtttt

SEQ ID NO: 304528 - DNA, 4248 bp, Cannabis indica
attatatttatttttattttattttatttttataatattttatttttttatttttatttttttctaagaatttattcatttttatttatttattattatatatttttatttcaatttaagttatattttctaaaaggaaataaataaagtagtccagtctatgcataattccagttagtttaatcattttcagtgcaatccagtctaatcctacgtaccaaatagacccttttaataaataaaataagatgggattataataaataatatttaattgaagtcaatttagtaatgatgtgtagtaataactttggggtgtaaatataactacaccttatagaaatagtttagggattccaccaaaaattcggaggcataatttaaaaattgtaataatttagaaggataaattttaaggaaaatgtaattttattaatgcaaattagctattaaaatagcttccaaactagtcgggacaacacccttattaggattagcaatgagccgtctgattcttttaacaaatttaaatgaaataggaactgaataaatagattgtacaagatgattataatctataaaattaaaccaaaaggagagagaatttactcattgcttttaagggcctatccaccaattgacagttagtttccaccaccactataacagtagcagctgccttttccatttaattttaactcaactaagaacctctttcaaagacaaagctttagcaacatgagaatccaactgtccaaatttcttgacagacttcaataaactcaccatgactatctgagcaatccatccaactctaaagttattcccagcttcaaaaatagcgacatcgcagataacctttatctcaccactaagttttgtccaatgctcatttgaaagagcaccattaacaggtgttgttgagaccaaagtctcttcttgttgagcaatcctccagtgatcgatgtaagtaattgtaaccgaaaccacaccatccatagttgagctcttattgttccataccacatcattttgggcatgccaaactccccaaagaatcatagctaacttagctattaaatttcaaaccaactacgaaactcagtaaacaaagcccggacctcaatccaatcagccctgtaaacgggcatcttaccatgctatgaaaacttaactcatcttcaactctacaaactggacaaatgctattcactttggcatgtttaaattgcaacaaagtaagagttggaagacaattagaaagggctactccatataaaattcatcattttaggaggcaattagaatggctctccatataaaataaaaatagatttaaaaggttatcatctcaaaagaaattactacattctataaaaaaaaatactgcagtatttaaatttctatgaataatgtatactattgttttcaaatttatttataaaatttacataataagtataaatttttatcccttaagtttttacttgatatttttatagctattgaattcaattagagctgataaaaaactatttgtatgttgcaaataatgtttaaattatataaatatatattataggttaaacaatgttgtaaaatatgatgaatttataccaatttcatatttactttgtatatgcactttccaatgtaggacaatttcattactccagcaattattaacgttcaagaattaaaatatttaaaggcaaaattcaagaagaaatggttgaaggttgagatcaaaatgaatttttttatgcctcaaaatgcaaaattcaggcttatctgcattaagcagatattgtaataattagccaccctttgaaagtaagggtggagaggaaaaatagcaccttgctcagttgaataaaccagtagcacggaggttgttcaacctcttaattggcagcctgaacggaggggattgtcatagaggttgaggcttgttaaatttcttagggacaggcatggcttccgaaaattcctcctcggtatagtcctccatttccttttcaacttcctcttaggaagctttaggtacttctgtatcattttctatttcagtcgccatcacttgcccaatatcaggatctgttgctggaactgctcgagtagtttgttttgtgcgagccaattctttcttagtcggaagagtgggtttggacatgagtttggaaacagaattagctaactctgtcaggacgaactgccttctaagctaagtaggacacccagtagctacggtattttgaacgtctgaccagactatataagtccacgaagctagaaggaattgcttccaacttctattcagctcccaaatatgtcgatcatagttgtcaccaccgacctggtcgggatagcagtggtgttgaaatttagtctccgaagagtcacccgatgatacttcctcagaaagttcagaagaaattgaaagctcgcttgaggatgaagacgagctatcttcacaaagtgttggatgatcctgaaagagtagtttaagcaggtcgttgtctatttgatggtcacctccccagaattcagttgggttcatctacaaaagatgaaacatataaaggcgaaacaccaagcaactcagaaatttctttttgaagaaaaatattcccgatactttgaccaaagaaaaaattggatctagttaaaaagatttcatcttcataatgaaattttgacgaaaaataatttttagggttttaaaaacctagtttcctataatacttaaaattggggaaaacgactaaaagacggagtgcgcaaaaagcccaaaccaaattaacccttaacagacgacattaattaaactatagtcaatcaggatagaaaatcaagatcccacgacaatgaacatttaactaacccaaaaactcacagaatacatgcatagaaattgcatgtaaaaattcatgcaagaaaagggagaggatacttacttaggggtttgacttggcattttgaagaagaaatctctgagaaattggtccatgcagcaaaagattcgagaaaaagcttcaagaactcgaggaatgctttttttttttttgctctaaaagtttgaaaatactaaagtttcaaatggggctcctttgaagtatttataggaaaataagagagtgagaaagattttttaggcgatgaagttcgaaatgattgtgcttttctcctaaaaattcaaaggtctcacttcatttgaaaaactggatggagaagtgtgtatccgtcagacacatcccccaatgcatggtgttcgaagtaaaaatcattttggcaggagatttaaaaggacgtaaagtggatattcttcgtgtaggcacgacgccttgctagacagaccatgtgaatgcatacacgtgtcgcatagccatgcaaggattgaagttaagaagtctttgtactaccagatgttcccatgcaaacttgggggcaaatgttatcccaaaaatttctcgagtgatcacgcggcaacagggacagtgacatgtggcatcccattatagaactgttcggagtataactttttcaaaatgttttaaacaaagtgttgcccctgattttttccaaaatacgtgggccaaccagaggatgacacgtagatggaaagggtccagcgtttgagtaaatcagctaagtctccttaagcgaaggattaaccttagacatgcctcccggagaaggcatgtaagcctcacatgctcccggagagcaaggctacaacaaagcatctccgataggtgtcagatcctacctgaacagtcacctctcatttaatgccgcatgtgaggaggcgtattggcactgccatatgtcttaaagtctgacggcacaacaccctctctgctgctactacgttatgattaatgagcctagtgacggctactttatgaggaatcacgtcagtcaaaaaggataaaggactacatccataaaacccctacaagcctaggaattagaccatgcattgcctatgatatattcattgggaatgtctggctttactgatagttacagaaatacatgtaccttaattctagggatctccccacaaaaaacacaataaataccccccaaactcattaaagagggtcgagaattctgggtttcataagaactagaagaggaaaaatccaccaagaacattctctgtaataaatactatcataaatacactgactcgtggactaaggctcattaacgtcccaaccacgtaaaaatcctctcttaatt

SEQ ID NO: 304529 - DNA, 3032 bp, Cannabis indica
tatgagaccacgtaaagatataaaatttactttgaagaatgaaatggaacaaaagcataatgttgaggatctggtaccaacctgaagtgcacaataattgcttaacgaatacagaaattcttcgcttgcattttctgttatcatcttagtcattgcatctggatttgggttaagaatctgcgtgaacatttttataagaatcaaactaatggttcacaaaataggagcatccttggattttaaggagagaggtatgaacccacctgaggaatgcatccaacaattcgttcgagctgaatgccactgtctctacaataagacaaaagatcagactcgtaaaactcaactctgtccagcaaagtcttgttgtccccatcatagacaggttgacccatttcatccaaagcattcaagtacaagtttatccaagaaatcttaatcgctctggggttgatatcaagcccataaacctgaaaaaggttgtacagtcaaataagaacaccaaaaataaaggttttagagtcagaagaacaccaaaaataagaacaaaaacaataaaacaaataaagaaatgaaagtcagcaagaaaaccttggaaggcaaccatttctcagctatggcaattgaaatccaaccattgccacaacccagctcagcaacagtcctatctctgaagatagaatccgggtgtctatttaaaccttcgtagaaggtaaaagaccagtcctccggtagaaaaatgctggggatcaccatagtggtaagcttcttcctcccttggtaacctaattataatcacaaacagaatgcagacacataaaaaccaaagagccaatatatatatacatatatcatacatgctaaagtctttcatatggcttttactttttcttcttcttttttctttgctggaaaaacagaggcaagcaaaagagaaatgggttaccctcatattgatcaaggatgatgtcatcgatccggaaatggtaggtctcgaagcatttatcagaggcttccttggaaggaaaccttttgtggaggtcggagaggaagatccgggcctgaacacgagtgttggggtcctcaagacgttcaagcagatccctcaaagcggcgtatgcagcgtccccagactgctgacactgtttcaagaagtcatcaagagttgtttccgccatttcgctaaaagtggacgcagaggcagtagaacgaggacgatacactgaaatgatatgttctcttctctcagtctcgggtcttgcacagaattaataaataactaaacaaaacatatggtatgtgggacacgcaaagatcttttcttcacccattttattattattattattattattattattattattattattattattatatttttattttttttcttcttaaatgtattattatgttttaatacttcagtaaaaacttttaagtaattttttttttatgaaaataagatgagcgtctgcctatgtgattgtgctctgtggcagttgaatgtcccatatgggttttaaccgttttttcttcaatcaattcccagtattgttcagttttttcccagttctttagcagttaccatcactcctctcatctctttactgaattgtcctgattttcataccataaattctaatctccattcgtttttcttcacctctgttcttctcttcttacattctactccttcttctgctttcaatggatccattaacgaacaaaatgaaggccaagattaatctaacggaagatgaggaatcagtttttgagtttcatgacactgaatccacctcgcctctgctctcggttgatacagttttatatgcgaaaatcctcacaaaaaagaaagtctggctttcaactttgcaaaatcaaatggctgagcactgggatgggcgtttcccagtcaaaatctctgaggctatggacatgtttatgctgacattcggttgtgaaggggacaaaattcgtgtcttagaccgtgaaccataccactttcaaaaccaccatatcgttttatacacaccagaagttggcaaaaatttcacctctgatgatcttacatttactccattttgggtgcaaatctacagacttccctttctaagcaagaccagaactttggctattgctcttggcaacattattggagaatacaaagatgtttttgaagactcactaaatgaaggttggggaccattcctgcgtgtccgagttctactggatgtttcaaaacctttgaaacgtggtaggatgatttccttgagtcatgtgaaggataagttctgggttgattttcgctatgagagacttcccgaatattgcatggagtgtggtgttattggacatccttacaataagtgttctgtgtttcttgaaaaattagacaatggagaagaaccagctttggagtatcagccttttatcaaaggatctgcattgccaacctcgggatatgatcgttatcgcactgactttgccaagggagatgcttggccattgattactcgacttgcaaagaagagtttaacatcggcaattccccaacttgccaaacgtggtcagccacatccgcgcattctgttttctggcgagtcatccaacacaaacaactctgaagattctaacaataatatagatgacattgttgctgcaagatctatggttccaaaaaacacgataaaacctccatctgttgttttcaatccatctacattactctcttcagcacaaaatcttcacaaagggatgaatgcaccagccactaaagataccccaaccaacttctcggatttgtcctcaatctatatgcctgcttttgtacccaatatcaccaatacttttgctacgtatcccccacagactccactaactgatatccgaggaaaataaccaatgcatgctcctgccaccaatgctttgctccctaaagttacacctgccactatttctcctgctgtagtgcattgggggacagaaaatacaaacccaaatgtgcaaaccaaaagacaaaatgaagg

SEQ ID NO: 304530 - DNA, 2172 bp, Cannabis indica
aaccaacatgaacacaagcagaaagtactccaacaaaggtaatgtcattcgggtgagtagctccgccctctgcaatcatgcgtttgaatagggatatggcttccgtggctctcccatgaaaagcaaatgcagatatcattgcattccaagaaacctcatttttcttaggcatattattgaaaatcctcagtgcatcgtctaagttcccacacttggcatacatgtcaagtaatgcagtaccgacgtagatatcattcatgaggcctctttgtgatgcatacttatcaacccattttcccatatctaaagcccccactgaagcacaagcagaaagcaatgctaccaatgttcttttatctggatcaataccagcctctttcatgaaattaaataacataattgcttcatctgacaatccattttgagcatatctgtcatatataagataaataatatatatatataaatataagaacttgccaggtaagactacttagttagcacacataaaataagtcgaatttctaaccaataaatagttgaaggtgaaaacactacgtaacttattaagaacagagtaagaatcacttgccctgagatcatggcattccaagtcacgcgatctttcttaatcatactatcaaaaatcctccttgcagagctcaaatcaccacattttccatacataccaattaaagcagaccccaaataagaattgagctttaacttatttttaacaacaaactcctccacccatgtccccaaactcaaatttcccaagtccccgcacgctccaaggacactcaccaaagtcatctcattaggctcataacccgcatccttcatctcataaaatagtgcagtcgcatcccgggcataacccatctgcgaataccccgaaatcattgaattccaagaaacagagtctctttcggtaatttcatcgaacaccttccgtgcacacactagttgaccacacctggcgtacatagtaataatggagtggctcacatgtccatccctatccaaaccaaacttaaatactgatgactgggcaacacgcccatggcttaacgctaacaggttagaacaagccatgaaaagaaaagggtatgtgaaattattggggtttatccctaaaaccctcatttgatagtaaaattcaagagtaagttcgtatttttgccatgtagtggttagtccccggatcatgatattgaaggcatagtcattgggttcagggatacggtggaagagcagggaagcgtaagtaaagtctttaagatcaatggctttggatagaaggaaattgggccttagaatggagtttacgagcatttgggtatgtatttctcgcagtttcctggtggagaaacattttttcaagagagataatagcttctcagaaagtggtggacatgggtttttggtagggtaagtgggagacttttgaagagtgaatatgagatggcgggaaataacctctgcatgcattttcgtgcttagcatcgtctctccaaactccctttgccttgtaaagacctttattccaactccaaacacaatttgaaaattttttattttttttttaaatcacaccaaacttatcatttatccaatcaaaattttattatgactaaggcttaattagtgagtgtaatataaacaccgtaaattactccccacaatccgatttttggtagtaaaaccatcggaaccttgctcaagtatacactagtgtacatgtggaagaatttaagtggtgcgcttaatattaattattttaagagtaaattgcagcatgaccactagaagtatcacctcgctagcaattaatccccaatttctatttttttgatggtaaaactttcaaaattcataatttgccactttattcacttttagttgttaactgtcaaggttaattcttatgtatacatagacagagtatatatgtagcacaatttaattagccaatgtaaataagtgtattaacaataactttatatatatatatatacatactagatgagagttacgtggcgagccacgtaaatattagttttatataagttttagttgtttttgtttaagaatccagtaactgagcaacggcaacaataatggtagatagatctatttaagtttttcatatttgtaaagattataaat

SEQ ID NO: 304531 - DNA, 2374 bp, Cannabis indica
ttttaaaaaaaaaaattaaatagattttttcttaatcaatattttagactctaactccaatttgaaacttgggacacagactccggccctggccccaatcccaaactcagaccacagccccagtcctagacgtgaacttgaacccgacttaaataaaatcaaaaaataaaaataaaaataaaattataaaacacacttttgttttctgtttttaaaattaaaaaataatagtgattatagaacatatttattttttaaaaatacaaattttgttttaatttttgtgattaaaaaattaaaaaacaaaaatattgccaaacgacaccttataatataatgtagaaataatctaaaaataaaaatataagatcattaaattaaaattttaatgaacgattcattctaaatgttttaatgatttttatgatgtagaaaatctaccctcaaattaagtacatgatcaatgtcatattttacatgtgtgattctataaaaaatatatgtatatgaaaatttggcatctcaaaattactttttggttttttaatagcataatagatgataatatttctttatttattacaagtcttcaacagctggtttggtcggagttggatatcctaaaataataatttaaaatacttttggatatgctttgttgcaaatatggacattaacaataatattctttattattactaaatattattcttttggcactaggaatttcttttacttttttatccaaatcctctagggataaattccaaagaagaagaaaaaaataggtaaatatcattttagactctgtgttttataaaagttactaatttgacactttgttttgttaaatgacaaaaaagactatattttttaaaattatacaaatagaaccctgaactgatttttttatcaaaataaaacttaataataatatgatatagagatattatgataaaactagttatatttcttgtatctgttcatgctagatattgtcttaaagttgtttacattaaaaaataaaatttttaaaaattgagttgagggtcttatttttaccattttaaaaatataaagtctattttatcatttaacaaaacacaagattcaattaataacttttacaaatttttattattaaaactacttccatgttaagtaactctaaaatttgttagtgatcaacacattcttatttaaataccattcattttcttttaccaaagtttttgttgtttcgcggtggtccttcaattcacaattaactttaatgttaacagtactcctcaataatggctctccaccttacatagccggccaagcagcgattaataacaaagggtttgagttggcttaaggccatctctaatggtaaaatttaaatttggtgttaaatcaataccaaaaaattactatttcagtactaatttttttcaattccaatcataacactaaaaattacaccaaattttatattatttgttattctattattttattaatataatatgaatatttaaatataaataattatttagttttttattttaaaaagtactatttaattattaaaaacttaaaaagcaaaaatagtatggtatacagtaccccactaaatttggtgggacactgtagacaaacttatttataagaataattttagtgttctcttaaagtaaatatagtatgaaactacactatatttagtgttttgaagtcaaatgcccaaattacaattttttagttgttaatgataataatatttttcatacttatgttacaattgtataatttataatatcaaactttatataactattttaactattattatgaaaaattattaactaattgtacaacaatatgattttgtagtggtgttatggatagagagtgtgatagcaatacacgttttttttaattttgctttggggaagagtcgtgcaatcctaaccaatagactatgaaaaacgttcttatcactttatctttgaatatatttatataaaaaatatatgtaatactaaatattataagttggtaaaatatcaatcactatgtttttatttatttatttatatattttgcttaaaatcactatgtttttcttgattggccatacataaatagtgtgacaatgagaaccctgtattagtatcacatagtaaattaatactgttttttagtattcacattcagtttgctaataattgttttttttctcttaattacaattgtgccaagtctttttttaccaaaataaaaaagtaaaaagataaaatcacaataatgagcataattaatggaaaacttacaaaaatactataatttggattaacttttacaaaattactgtcacacgaattttttt

SEQ ID NO: 304532 - DNA, 5500 bp, Cannabis indica
tctaaaaaataaatcctaaaaatactcttttttttaaaaaaaaattatcccaactattttatttttaaaatatttttaaactatatatgataaaatattgaatgaaaaaatcaacaacaaattacttctaatttattactaatgactccaaataatactaataaaaattttataaataatactattaaacttaaccaaaaataataattatatttcaaaattattaggaattaaataataaaactcaattttaattaattatattatatcattatttcattaccaagcgtagcgtgaagtgaaagtaatccactgtgcatttcggaagagaaagaaagccatagcgaaaaagattacaaagaaagaagagaaacccttcaaatttcctaacttaaatcccaaaaaacgacaccaatcaacaacccttctccaaagatttcatctttccaaacaaatttcttcaaatttcattctgttctgtacaaatgcgtgttccccaatttctcataatttttacaccaatttcagaattttaacataaaggttacatttttaaggagtttcgggagttgggttttctccgatttgccaagaaatttcatataagagttatttttctgtttttctggttttttttttttagggtttgggaaaatgaaggaggagaaagatgaaggtaaggcaagttcatcatcatcgagttcatacaattggttggctaattttcatagagatttattggctggtgctgttatgggtggaattgttcacacaattgttgcaccaattgaaagagcaaagcttttgttacaaacccaagagagtaatttggctattgttggaagtggaagaaggagattcaagggaatgtttgattgtatagctcgtacggttaaggaagaagggattatttcattgtggagaggcaatggaagtagtgttattagatattacccttctgttgctctcaatttctctcttaaggtacatgtcaaaatctttttcttttctatttagggccaaataagttagttcttgtgattcaaaactttatagttcttatggttgatattgaatacttattgggttttgttaattagataaatattgtgtgttttgtcccacattgctcctataatatgtgtgagtgatttgcgagttttattttataattagcctttattaaatctatcagaaagaaaattcattctgtttactgaatgttactaagaaattgttacttaatctgtcaaattagtggatagttatcggaaaagttgtattttagtagtcaagtagctcaagattttatgtgtaagaaaccttaacatgcttatctattcagctctttacttttactaatattaaatgacataaactaatggtcccctgttcctgattatttaagataatgcaatctagcaatttgtaatatgtttaaaattcagtttagctgatgtttatcgatgtaacgattcattatgattcaatttcttatctggggtttgcatttttgtatgttgagagtacccaaaagccgaaaaaagctcacaattcaaaggctagtttcgggtttttttttcacttgccaatccttaaccttttttataagggaactaactagtggctagggattcttgagaaacctgggtttcttttctttattatgattgtgatagatttttatatacatatatgtattatttaaagaaagtgaattgaatttttcattattggacaaactttgaagacaagaatggatttatttttaaattcaaacaagtggttagattaaagtttttacttttttggcttgaaaaacaggttgtcccatagtatttgagcaacaataatcatgtccgtactagttgatgcaatcatatattactagtggattgttgcttttatgtaatgatgttttgtatgagacaataaagtattgagaagaatctttaatgatttgttttctatttccgtcacaggatttgtatcgaaacatgttaagaagcggaaactcaacgtccggtcattttgcttcgggtgcatcagccaatttcattgctggagctgcagccggttgcaccacgttagtccttatataccctcttgacatcgctcacactcgtcttgctgcagatattgggaggaacgatgttcgccaatttcgtggcatatgtcattttctcacaaccgttggtaggaaagatggtgttcgggggatctaccgtggccttcccgcctccctacatggaatgatcatccaccgaggtatctactttgggggatttgacacaatgaaggagatgatgtccaacgaatccaaacccgaggtgtcactcctcaagcgatggatagctgctcaggcggtgacaacgacagcagggatgttgtcatatccgttggataccgttcgtaggcgaatgatgatgcagtcggggctcgaaacacccatgtatcgcaacacgtgggattgctggaggaagatttataagacagagggagtggtgtcgttttatcgaggcgcggtttctaacatttttaggagtacaggtgctgctgccatcttggttttgtatgatgaggtgaaaaagttcatgaactggggtagattgtagcagaggaaatccagtttttttttttttcttttaattgcctaccatttttgttgactttttggtttgaccatacatgctaatgtaagaaaatgaaaggaaagaaaaaaaaattacactacagaaaaatatatattatatataaatatagaaatactttgcatatgaatattattattaatgagtaataaataaatttaactataaatattaattttaaatatattaaatcattaaattttagtttgataacgaataataaaaataaaatttaaatttctatatttaatttaattatttaattaaaaaatatatttatatgaaaaatatttaagtaaaatttaatttcttttatcattattttgtcgaattttttttttaactgatagaacaatttcaacttatataatgtaaaaataattaaatagaaaaattaatcataaaattcaattttttttaatattatttatttatgggtaatacctattaagaatacactctattaattttacaatgcacttttcaacgggtattacctattatgtttaggtgtttctccaatacactttttttagaatgcactgataaatctttatttattttggcatttaagaaaaaaatttagtcgtattttcttttataattttatatgttatagaaaaattttaaattttaaaaaaattcaagaataatttataacataaaatattgtttaaatagtatattttatatatgtataaaataaaaaagatacgatagcaacaaattatttcaaacatatcggtgcatatacaaaattagtctaaattagatgtgttatatcatttggtgttgtattttggtgaatattttaattatagatatcattactcgtataatttagctttgaagtatttggataatgttaaaaggttttatatatattgaattgtaaattttatttaattagactaacttaaacttaataatttcaataatattaaaaaaaagattagactctgaaaatatacaacgaatatataaacgcgacactctaaccatttaaagtgtttgtacttattggttaagattgattgtttaagagagattctacatgattaataataatggaatgtaaagagaacattccaatagtgaaaactttttgaacagtcaaatatatataaatgtatttatacatatttaaatatgattataatatgatataataatccaagtaagaagcatatataatggagaagaaaaaggaaaaaaaaggtcccctatgctatgatttttgtccaatgaaatgagttaggggtgagtgttccacagtcaagagataatgaacgacccccatcactcaagaagagtcaccactcaacttataattaaaacctataataatataatttatttatttatttattacaagaatagtaatttgacattaagtaatggtaatttgatattattttaagagtaataataacataaatgtgtactaaattgttacataatgttatatttttctaatgtatactatgtatcgctttaaataaaaagtagcagacctaactcataatatgagatagtgttatactgataaaaattttattagtgtagatgagttttgtgggtattcgcccctattgggatgagtatttttttacttaatagcatgtttattaataagcaatgagaatcgatagtaagggagtcattctcttatatttgtataatgtgtgaaaactaccacatataagatgtatgagttacttctctcattgctaattggttttgaaatagtatcatatacaccttaccatgcacctacctaatcttactttctaaactacatacttctaaattctaacatggtatcagagccaaactaaactctaacgagtatccaatctaaatccaaaaattaatctaaaaggatgagccaaaaaaattatttgtgattcggggtgagtgagccaaaaagattaatttattaaaattaggaaactaagaacttgattaaatatggaagaggaaaaaaaaaaggagtacttcccccaccaattttctaagaaatgtcattaaaggtaatggcttttactttttaaatattaaatttataatgataatttgtcttttaaaatatgtcttacaaaataaataccatatactaaaaatttaatacaaaataattttttaatcaatttaaacattttgattacgtttcatgataaagcaaacaagataaatcattatcattctatttccaaacaattttagtaaacagcatattaaaaatattgattttgattattcttcatttagttacatttttttattattttattctgattctgaatattgtgcagtaaacgtgatggagatgggaataattttttttattagtattatggttttaataaatgaatcctcgtagaaattatctgccttaacggggattctctacctacctccaatgaaaaatatgtaagggtggtgccgaattgggaatggaaatgaatagagcacctctcatttgttatgtttgtcatccaaattcttattaacttagtttgagaaactcgtaatttcgtagtaaaataaaatattaagaaaaattaaaactttttatagaattttacatttttaatattacccaaaacattttatgtatttcataaatttttatataaaaaaagtattaattaagtattttacttttatttaaacattttttattacatttatcaatacaataattttttctaatcaacataattattaaaattttaccattattttgtggcacatataattattcgattgcttataaaattggggaattactttatatactattttaattttttttttttcaaatttacggtttgagtttctaaagt

SEQ ID NO: 304533 - DNA, 1419 bp, Cannabis indica
atggtttggacaaaacatgctcttcggttagacaatgagctattttggttcgaggaggtgccgccgccgattgtgaattgctgccttgttaatcatgtgtgatttagatcaccgcgtcaaaaaaaaatcacacacaaagactcatagacataatgaaagttctcattcatgaaaatgagtatttctattaatagtccataactaataaattataaatagaaaaatgagtagttcatgatttttttaagtgattgcagtccccaagcaatgtagacatccacaaaatttatatcaattattagaacataataaagaataaattatattatagtaatgatagatcttgaaacttagtaatggtgtgatgtaaccagagtttgatatttgcttttatagcattgctaatagacattagtggtgcctagcaattctgtatatgtcgtcttacgattagctaacgatactccttaaaagttattacatcaaactatataggactcgatatttaattaaaccaatagcgataataacgcatagaaaggtgttagacaccactaatacttttttagcatttttcttgcttttactacacaaatgatttcttaaatgggctattaatatcacacaagcccaataaagactcctagattgggattagttaataaactataattgttttaattgttgtggtaatcacccaaaaacttttttttttctatagaaattactttagctaagaattcactgagtcatgattaattcataatgtaaaataatagatattataagattttttttaattatgccactttaacatttatagtctgcaaaagtatgagaattacattttttccccaaattttaggagaaaattttaaaagacaaataaccactaaaacataattaatagtacagtaagttatgatttctttttaaaaaaataaaatatagtaaagttattactaaaaacatttttgtataaaaatatgagaaattaaaccccacaatttaagaattgtattaaaagccataaaatctatactatagtaaacatttttataatatgaaaaagctaataatttaaaaaatatatatgaaaaagctaataatagagtaaacatttttataaatttatattcaaaaaaccttattttcattaaaaaaaagaatatactttttatagtaaaacgaaaaaatggtataaatctgtaattgtaattaggttaagtgttaagttaatgttgagcccagtagatttcgaagcccattttggcccacatactagttactcaaaggtcggttcattgaatttccacattagtccccattcaaaaacatacataactttcataaaagggctcttctgtaatttcatttgaaattcaagattttatttttaatttttttttttaaaacaga

SEQ ID NO: 304534 - DNA, 2666 bp, Cannabis indica
gtatgaaacttataaaaaaatacagtaaaaaagcaaaaaataccatctggcaatatttttgtaaacaaattacaaaaattagtataccttgtaaatttccctattgtattcacttcataatttctttatgggtgtgacgatattaaaaatttataattaatatttaaataaatttattatttattattaaattgtgtgaattgtcataatttattcaaatttattaatattctataagttttattattaattttttgttgatatcaaaatatctatgatatttataaatttatagtaccgatatttccaaatttttcattctttgaaagttaatcaacaagtataagtttgcttcaatattttttttaataaataagaaaacaaatagctgaggttattttagacaaatgtgacaaatataaagtagattgatagtgggaagaaggaaatatttaagatattaaagcagtaatgatgttggaatagacgtagataactattggtgatgaggtaagagatcttttagtggtcaaaagctcaaaaaggcaaagaccaaatctgtttgcttttgcatcattgaaaaacataacccgagtagagtctcagtacttaaacagcacctatctaaaaagctgaatctaattatgcataccgccattcctataatccatattgcaataatcatatcataaacttcaatcttcaacaaaaaaaaaattatactgttcgttttttttttgaaggacgagataggtttaaaagggtaagtgaaaattttgaagattttttaacacctcatctccataagagagagagagattcccacctacaattaccattaaaccccacaactgaaacctacaagtaactcttgctttttgccaagttttgttcacccaaagagaaaattcccttgtgtgaattaggaagattacaattcttaagtatctgtccaagcagcaaaaattggcatgtgaggcatggatagtgcagatctctgttgagtggttgggatccatgaactcacatcatttgctggattagtaaagaactttgacacagatggaggcacaccgtacagcagccccgggaggctgctcttatccgggctaccttcccttgagctgcttaaacttgtcaccaatgatgaagcatttgacatgtgagtccccatttttgcagagtcttctacctcgagctggtgaatcatattctctggggcaacaaccgaataagattcgcccttgtagctgttgtccatgctaagtggtttctggacaagttgatgctgctgctgctgcgtcgaggaggaatggtatagtgccattttccaatctgattcgccttcgttgttttttggggttatagcttcttcattgatgctactagaggcagaattttgatttgcagcctcaatggcagcgcttccaacgtccttggttcgcttagcgagttctcccgctaaaagggtattactagccataatccgatccacatcataccttgttatgtcaaagttagttactgcatttaatcctctaaactttatggctgcaatgtcataagcttcagctgcttcctcttgagtacctattaatgaagagataattgtaaaagatatttaatttttaactttggtgaaaatcataaattgattgtaacacatcattccaaagtaagaatcaaagttatattttcagtgtgtataacgtctgaaagagcagctttagcaaaagctcatttgactgacttattacagacccgtacacaatttcaaaagtgtcacaagcataaccgagcccaaaaagtttgaaatgatgctaactaaattctctcctattattttaataatttgttaataattattttgaaaatgatgattctttagccaagtctagatttttgcaacaatcgagtcaagtctgaaatttgaaaatactcactgaatgtcccaaggtatagatctttgttaccagccactctcccaatccgagcttgccaacgtccatgctgatgatgtctgtaaacaaagattttagggtcatataataatttgtttttagctaacataatgtataaaataaatggtgaaaagcttagacaaagtcaaaatataccttgttactcctctatacattgaagctccccttgaaaacccactgcttttcctggtgaagaaagatttgatagtaaagtgaccaagtataaaaagtaaaagaaagattaagaagaaagaaaaagaagagtgccattatcaataacataagagaaagagctatagctaccttcttagatgagcaacatattcctgtctggtcatatttttcatttcttcaagttctttatgataattttccaactgtcaaaacacaaaattactagttgcatcagtaaaataaaaataaaaaaaggaaaagtcaagagagagagcacaaaatcctcaccggaaaattgatatgagtagagggaccccaatacttaagtgcagctaaatcataagatcttgcagctttttcttccatatcatatcctcctgaggtaaaaacatcatgaacaatgagacatattcatcataagagcatcatgtaaataaatataatatatatatatatattaaagtggcaacaagcaacatatgaaaagggaaaaaaataaaaaataaaaaa

SEQ ID NO: 304535 - DNA, 713 bp, Cannabis indica
atagtaaataacaatacaaaaattttgtctgattgaattgaatagaggaaaattcaaagaagtgacatagaaggaatatgaatgtggatgtgtttgttgagtgtgacgtaagggaaggtgtcacctacgccattcatattccaagaagaaaggtcaaaccccaaacaaaactgactcttactgttactgtattattattattattattattattattattattattattattaagttagttataattattcatttatttgtgtgggcgtaattgctgactcaccttcatcagccttgatcgtcaagtttcactgctctgccacgtgtcactcctcatctgatacgtgtacctgtgtgtacatgtatgtgttcagattaactcactgtttcgcaatttctcacgcccagcctcacttactcacttttgacttttgagtcctttttccttttgcccaaaatatctattgaaaaattctaccatgcatccattaaaatagatatattgatgtattcttatctattttagtatttgaaataatttttaatcaaattttttctcatagtcatataggttatagttatttaagacatcttgcaaaattttaaaaaattcgaaaaagtttagcacgccgaaaattacgttcaaacagtgtgttgtacgtgtgactattttattttacacgcgtgtaaaatagactgtttgaacattgttt

SEQ ID NO: 304536 - DNA, 2678 bp, Cannabis indica
atacataattaatatttattcttttaataaagaactatagtagtactactacaataataattattaacgttcaatttctaatgtttttttttccttaaaaaacttaatcgtaatagaatataaattataataggagaaagtgtctttgaagattcagaatttaaaattaaaaaatgattgtatttttccgagaatagaaaaatgaacaatattattcactttggtattgttcggtaacaattatataatcaattttttgattaattaatcaaaaactgtgaacaaattacaagattttgttaagtgaaatttaaaaaagtaaaaaacaaaaaatttaccgaacaagcctttacaagccttttatttctattttcttaatgacagaacaataatttgttattttgttataaatgaaaatattaaaaagattaataatgtgattaaaattaggaaaaagaaatatctagagaacattaataataattaaataaatggaaacttgcatataattttaataacaaaaacaaaatgttatataatacaagcttaataaaaaattaggccaaatactcctttattccatagagcaataattgaaagttaggactcttgttggagtgaaaggaactcaaaaaagaattttataaaccacaaaagtttacattcccatacatacatatttttaaaaaatgtatataattatctttttttttttcaatatatgtgaaagacattatcttgaatattgattttgacgaaaaaaaaaatatataaatggagataaggttcagaacattattattcagtaatttaattataaataattgtagtgcgtgcacctataaaaattaatatatatttatatagtactaataagttcaattagctagagaaaaatttggtaagacatagaatcccgtcggccgagaattataggaaagcaaattaagtaaaacccataacgctgtccagtggtgcccatttccatttgccaactgttaagactataacatatgtccaaacctttacgattctctcattttattgtcctattccattccatctctatttctatttgactattccttgtccctttcttgtttctatttttcttttatttattttttcatattaataataataataacacattaaacgagttggtatgtgtagttaatgtctacactccaacttttttatatttttattattgctaaatattatataaataatgaagttgactaagtgatataagcaccaaaaaaattatatgagatctgaaactgaaacaacctttagtggactcgtaagtcacagtcataatcaactatttgtaagattagtcataatcaattgatccttatttgattttattctcaacatcaaactatgacatcaaaaagttaattttatgataattaataactaacttgattttactcaatttttaagcaaaacattaatttttattataaaaaattaaatatcaactagctaaatagaaaaagtacatagatattttatatgataaaaaaatgtaagaagaactttacctttaagactattcttccttgcttatccaataaattaattaataataaagttttcatatagtacactaccatcagacaaggcaaaactatttacatccacaaaaaccaatcgaaaacgattaacatatctatctagctaactaacccaaatgataaattaaagatcttaacaataattaagacaacaatctttctgtcgggtaagggaaattattattaagggaataatagttaatggtggaaacaagaatttatatttatatacatacatatatgtatattagccctaataaattaacattaaaatattgtccgtaaatattaaaattttggtttagggtccgacaataagtaatggcggacaaatgtttccttataattgaattaattaattaaggtttgggtgtttaattttggcgcatgcatatgaatatatattgatcctaaaactaaaaaaatacagttatattatatataaattatgtaaaatagttattttgagtttaattacctaccatggcctttgatatatatatttttttggcggtgtccctagtggagccgacagagaacactcagggtgacaaaatattatatgggctgtagatttgagattcgattacctttatttctatttctctctttctttctatctatctatcttatataaatatttattatatatatatggcattaattaaggacgtgctgtcgtttgttaaaattttaggggccatgtatttgagctgtcggtgagccattgaggaagttcccacgaaattaacggctttattaatatgaattatacatctatatatttatataccatgcatgaacatacacaattatatctaatcgaagaatattaggatgaagttggccggaagaggagtcactaaccccaaatttgttgagaatgttgtatatatatattatatatataattgtaacactcgtgtgtgcaactaaaataatgtttatataaatatatatattatagtactagctagcattttttaattagggaaaaggaagtgtactaattaaaaagataaatgtgtaggaacagcatctttgaagggaagaaacgtgagagagtggagagtggtaaacccgaaataataa

SEQ ID NO: 304537 - DNA, 2259 bp, Cannabis indica
ttttttttttttataattatttacaataaaaaatgtaaaagaaaaaagaaataaaaagagagtaatgaagatttagtggacgaaaataaggggttgggatgaaaaaataggtggttgggatggtaaaaagggggctgccgacagtggtggtcggagggtttgtagagaaaagcaagggaagaagaaagagaaaaaaaaaagaaaatgggggagggggggtccgtgccaagttttatttagcctggatttttgatggtgcaattaggtgcgccgataaaagtctaggctgaataaaaacacatgaaacactgcgtttcatttatgttgggacttttgccagcgcaattaagtgcgccggcaaaagttcccaccgaaattttcacccacgctttcatttgggcgggaagttgaccgctaaaaaattttagagcttttgccagcgcacaattgcgccggtaaaagccaaatcctgatgcaacgtgtcaattggtcaaaatgccaatacttttgctgacgcaagtcaatgcgccggcaaaagttttcacctacttttgcgcgcacattttttcactgcgagagaatttgatcgcctatttttcaacaattgtgccggtgcatttaggcgccaataaaagtaaatttttttttcacttttgccggcgcatgtaagttcgccggcaaaaggtggctggaaccgctaaaaattcccaccttttggcggttggattgccactttttgtcggtgaattaaaggtacatcgccggcaaaatgtactattaccggcgagaaaaggcgccagcaaaacatggagttggatccatttttttgacttcttttgccggtgcatttgttgacttgcgccggtaattgtacacttttgccggcgcaattaattaattgcgccgacaaaagtgttatttcttgtagtgaaaataagtttttgaaaatatgattagttaaattgtttttgaatttttaaatattgatttgcgaaaatagtttaattttaaataaatagtataggataattctacaatacaccccttaaaagggatgcattgatacatccttatttatttttatttattgagtttttcggcaactaaatatttttagagcttaagaaagtaataacagaataaatagcaagacaacaactaagagatttttacgtggttcagccgttaactatccttaatccatgagtccattttattagactcatcgtaactgtttatacaaatagatatacaatgaactataactcttttccaccgtgttcctcttgaagaagagaaaccttagtaggaatattttagtgattgtttatattttaaaccatgctccccagatagattttgatatttaccaaattatgtctctcaaactttcacatgtactaaatcatggcccttgaactttcatccatgttagatttttttactaaaattagaaaaaagtttgtaaatcaaacaatatcaatagttcagggttcatttttaacgaacttaaaagttcacgagccatgatttagtacacatataagtccgaggcaaaaattctaatttatttatattacgtagttttcaggttgcttatatttaaattatgctcttttccaatggtaattaaaaataaaaaaaagtccgtgaaatatttaaatatagtctataaaaatgtttaaaaatctgggtgttagtaaaaaattaaaaaatgtgtgattgtaatttaaaaatgccatcatcgatatgaagaattggttgggtgtttgaaattgttgagtcggaatgtataaaatttgagttccttgacaaatttattattgtggttgtagagagaggcctatcttgccgtacgtcagcatttagtcataattaattaaggcttatggagatatctgccagcaagcaaagcggcctccataacaaccgatataacttctataacttctccagcgtcacatgtgttccctttgaatgtacggcctcccgctttcttgaaacttgtcatgcaatttaggaacgtttgactacactcttggcttaaatatgcatctgcacccacaattgtgtcaatggttattttattattcaactttgtatatatacaaaaatcatatactctatatatgttatgaatatatccacccaaagaataacatatgtatttttgcctaggaaaactacatcatgcacaattataattagtaattttcccttcgaattttgacatgtattaaatcatgcctcctgaacttt

SEQ ID NO: 304538 - DNA, 1781 bp, Cannabis indica
taagtttttttttttcatatttgcttcgaataatttctaacaataaataaaaaaaaattaatttgggattgactccttctcataaccatatgaattgagttaattaatcatagggaatatttcatttttgtaggaaaatttggaaacgaagagagggaaaatatgaaggaaaagtctttctcaaataaataaataaaaaaagaaaaataatgaagttaaagaagaaagtatatgtgacctagtaatgccggtaagacagccgttaagatttaaaatttataagcggacaatctatggactctctttcgtattccaacaaatctcaaccgttgatctaaatccaacttgctcgacatttaatctaggggctgttttggtttgttgttgtacgcactctcttccatttttcaaattttcttcctactgctattctcccaccatttctattccttctcttcgacacgcaaaggtagagaaattcatcaattaaagtattcgaattgggtttcactctctccacttacccttgcgctgtgagtaacattttccattttcttttgagtttaattgcatttcgtttttggattctccgtcatttatgtgaagtttttggttgagttttttcttcttaagatgagttgattcactatttattttgattttgttggaatctggatgatcagattagttgggtttttaagatggtttgtaatatctgttctgtgattttgttgtcaattcagattttcaagaactctaaatcttgtgggtattattgcaaatttggagaggcgttgggattggggtatgatgctattggagagttgttttggattgaattggtgtcaacaagtgttaaccttggaaattaccttgaaacgtttgttaaggaacaatgactaggctgaggagaactagtgtacagagacctgggcttctagatgctccttcccctgatgaagttcagaaaataaagcctttgagagggtaaactatcctttttattattattatttttacaactttgtagaaatgattttttcgtttgcttggcttaattttctggtcatttttttctgtattttctctggttaatattattcggtgattgtcttgtagaaggaccagtggccctacaagaagatcaacaacgggaaaatggacagctgaagaggtgattgtttattgactaaacttgatttcatatgtattcttttataaaaattagtacttggatatttggttgaatttactacaaaacttttacgaagttcctacagctacatccagtgttaaattagtgatttctacattttcttgttgtaaaatgtttttacttttctttttcatgtttcttttgtatctgttgctaatgattgccctttataaacaggatgagatattgaggagggcagttcatcattataaaggaaaaaactggaaaaagataggtaaccaggggaaacttaaattactttaattgtattgcttatcaatttgaattccctttgggttgtttaacagatatactttgtgggatataatgtgctgacttcttactcttttttcttcttacatttgaaatttatgtaatatgcagcggaatgctttaaagaccgaacagatgttcagtgtctacataggtggcaaaaggttttaaatcctgaactcatcaagggtccatggtcgaaagaggtaaattgttcttaagcatggtacaatactatttatgtagttatgatatatgcatgtatgcccatatcttgtttctctttttgtgg

SEQ ID NO: 304539 - DNA, 1319 bp, Cannabis indica
ttaaaaaaaaaaagtaaaagtaaaagaggacaatataaaaagggtatagtgtctaattttctcataaacttggctgattaatttttgtgaaagctttcttgtactgaagatgggcccacaacttgctggtccttcttgagaaggccacttgtcgctcggttaaaaccacgaacaactataccaaaacaatattacacatgtaaatgtaatagtttcgtttagccaatctgtaacaccctactaatttaggcgtgctacaatattttcataattactgtgcaacctttcctaattaaagggtttagcaaaaatttaatttatttaaactttaataaataaataaaataatacttaaaaaacattttacaaatttcaaaatcccgtacttaaactttataaaacaattccaaaatattttataaacaaaaggtggcgcccaacgactacaactaactctatgctctctccagttaaactacagtctataaatacatgaaaattaaacagatcacatagagatcagattagattgagagaggaggagacttatagtggggtaagtcttggaaccctagggttagggctcggagatccagaaatcagaaaagaacatacacaggaagaagaagaaagaaaattagtacaatattcagagatagatagagagaaataaacactgtaaaaataccaaggattacctatcttacctttgtgatttggaatccagctttgtacatcattgatcttgaagatccattagtggaaacgaggcgatcttgaagaggacctacccagatttcattggggaacctctataaaaattctggtgcacactttccatttttctttctgcatttaataatgtgtttgattgttgtgtgtgttttctaggttttaatctgatctaggaagggttgaatctgggtttccactgggttttgttgcagagttcatgttcctcagaaaagaaacacgaagctctgctctgctagggtttctttgggatttcgtgtttgagtgtgtaaatgatagaatgagttcgagaaggttctaagttattagggttaattgcttaaactacttgtagtctagggattaaaagaccgttgtttggggttgtgactcttgtgggtcaactgtgctttgactcagtaggaaaggttggttttgaccttgggaaattgattattgttcttgttgtgtgtagggtaaaatatgtaaaaatcctataaatactaactatataaatatacatatatacatattattaagggccatttataaaaatactgtaaaatgagagaaagtttacaaaaata

SEQ ID NO: 304540 - DNA, 1555 bp, Cannabis indica
tttcgactggatagtgcctggattcttattcgcctgtttgcaacacaaattgcactattcgacctctgagattactgttactttttttcctctgtaattttcctaccaggtagggtgttgtatcttcagttaagctttcatcttctaggtattctaacgtactttaccctgtagttttgtcttagttttttaaatttcaataaattttatattccagctaatatacttggtttgtggtagagcttccccctcagagcattaggactgaggagatagtcaagaaagaagctcaatatacgaccttctctaaagaacaattgaaggttggggacctggtgataacttaactcctccgtaggtctggtttgattacaaaaattcaaaagtattgacccagtcagcctttgaggacagcgccaaccccccagggaagtgaaggaggcaattgccactaacttggccgtcataatcactaatgcggccaaaaatgataataccctgaactctgattgggtgtcgtgctatctcgatcctctattcgaggaagaagagatctcagagaggttttccactgcctatctcgatgcggagaaccaggtgccagcactttgggaagaggtaataggcacttccgcatcctctgtatccccattctgagttgcatgtcttggagggatcagggaggatttgacaaatatttcttaggcataaatagccgtagataccccatgaagattacatagacagagtataccaaattgttaggagccctagaaatccaggaactcctttgaatactattaaactggaccctttgatggctatgtctctacccaattttaaggagtatggcaacttcattggtcataggggcattttggcctttgttcgtaggcaaccttgtagcacttcactaaatggttgcactcgcgcacaagtttcttcactggatttttgttgttgccatttcgcttatatttgtatgacttgtaattgtctctttcgcttactcatattgttgcttcacgtgtagatacaccagaatccgtgatgttgaagtcttggagcaactaaatctcaactgctatggataaagcaaggaactcccaagaaagaggtaaagggaaaattaagacagggcttccaggacccaaaaactgtgtcctccctcaacttcctcatcattagatgttcgggagattgctcttcctactaagacaggacccacagttccaggcccttctactttagttggtggagagaaagattctgtcatctcccgggaggcctctaaagctcttatcactcaaagagagtagaccttacaagacatcccactttcggaaggaatgatccctgataccacaccaaatgcagggggttcagatgacagcctaaacaggattgtctttcccccaaaagggactcccgtaaagtctaagcgcaagggatcaaagacttctttgagtcttcgtatgaagagggtcaagccttcaacccggaacttgggggcatccatcataccgttaatgtaacaccctaactatcttaggcg

SEQ ID NO: 304541 - DNA, 773 bp, Cannabis indica
taggtcatgtactcaaataatgtttaattccatataataaagatgtatgtacataaaggagaagccaatattgtattccacatatattattaattattttttattatatatgaggatatattaatttttgcttcctcacaattaggtgcaaggttttagtcactagacctcataatctcatatatctacacacactagcaattgaggagataaaaggtcaaaacaaatagacccacatccctcttttcttctcttcaacatattatttattttcttcatgataatcatcttatggacatcttatctttagacttatccattaatcacttcactggaaagtgcataattaattagtgattaatctgactctagctccacgtacgtattcttatatgaatacgtatattaatgtatttctgttgagaatcactccatagcttgatcaaagctcaaaaaatcaattggagaataaagagtaaataagataaaatagagaaaaagaaaaagtgtttcttgtattaaagttattacaaaatttaagttctaagcatttataagattgcttatatatagctatagacttgaaccggtacacatgattagttgacagttagttaactaataacttaactgacactaacagcgagataggactaagttcactaacaatcataactgaacagccagattgactaactgtgttataacagaatgcttaaagggaaaggattaagggtcactcctttctaacaattctccaccttgaaccataa

SEQ ID NO: 304542 - DNA, 1018 bp, Cannabis indica
taattttgtaataaattgtgtaaaatgaatttttcatgtaaaaatttctataaaaaatggctagcatagtatattatgattaagttggcattgtataaattaaaaatttactattatccttagtattatttcttaaaaaatattcttcctaatgaataatatagaaattcatttacatatatgaagtaaagtagatagatatctcctactaaaggattatggataaacatcattattctattatgtttttcccatgtttggaagaaattaattacacaataaagaagaatgagaatattttggaaagtgaaggaaagggaagtaataataaagtcttttaacactttttatatatgtacaaattttatcattctaattatggaaagcaaaaacataaatcttatcattaagaaaagaaaaaaggaaaaaagttattgtgaaaataagaaaaaggaaaaattaatatatagaatcaaaaattaaatgcattatctaaaaaataactaaattatttatttatttctgtcaagaaaattaactgaaaatttattatttattaaatgtgtaaattcgctaacaaaatagtataatagctaggataaatccctcactaaatcgataatctaaaaaataaaaagcagcataagtcaaacaattgattgccttgttcagagatcgaacaagaaacccaaaataaaagctaattagaattgttatccaataacatgtactaaatcataccttttaaattttttaagctgctaaaaatttctctcgaattattaaaattattgaatttaaagacttgtactaaatcttgtactaaatttaaagacttttactaatgtgatgattgtctatgtactaaatcttgtctttgaactttgatataatcatacccctgaacttttaaaagtataaaattatgcctttagagttcgtttggaacggcgtattaggttgtattgtattgtattatattgaattgtattatatatcatatttttatataatacta

SEQ ID NO: 304543 - DNA, 1153 bp, Cannabis indica
tacgtagaaactcctattgtaactacagctgctacctaaatcgcaacaaaaaatcgtatagaaactcctattgcaactggcactgcaaccattttaaaaactcaaaccgtaaatttgaaaaaaaaaatgttaaaaaaatagtatatgggggcaatccctaaatatatattttaaaatataatattttaatgatatagaaaaaaaaaaaatgatgtatagtgtaattaaaaatataaagtaaaataaaaaaaatatgattttagtactaaagttttagctcaaaataaaatggggtataaaataaagaaaattttatatttgattggagaaagttattaacccaattctttaaattttgagctaaaaatgtatttgacctagctaggatgctgttatataaatgttttactgcactagctatactagcaacatgtctattatcattataattaattgatttaattatcttttacacatcaataattgaaccttgcttttatcttttttttcctattattttatttggaattcctttatctttattattatctttgtttattttatttgctttttgtttggtattaacaggtgctttatttggtttatttatgttttgtctttttcaaagcaatatatattttttgaagcggattttcaagctatattctacttgcacattgtatatatcgtagtagcatgtgatgtgcgtagttatctatttaaatttaatattttaaaatatatattttatatcatatattaaaacgtgacttattttgtaatatattttgaatatgattaaaatattcttaatgaatttggagtttctctactctatcttttagagatatcataagtagctagactaagatctaatcatatatattcaacttattattttgatcaatatagtgtctaaacttacttttaattatttttataaatcggtaatacagtttaatattttaaaacactgatcgtaatgatccaaaatatgttagactttttatttgggcttacattaagttttattggttttattaaaacttgggttgattggatagttctttgctgtggtagcccatattgttggtgatcaattgctaatggacttagcatctgtgtgtaaagtctaggtgaagcagaagtgtgg

SEQ ID NO: 304544 - DNA, 1290 bp, Cannabis indica
cttgttgcctattctagcagcgagttatgatcatcgagggggagatttagtttttcactttttgtacaaatattctaaacattgtccatattttttgtttagttttttgtcaagttgttttgtttctatctattgaacttaaccttgtgagttggtaaactgtctagttattatcttttggtttattggcatttgcttttgtgttttggttttttgtgtctctcttcttgaatattatgcttggtcgttgatcataatttgccaagggagagattgtaagtttcatgttttctgtatgaaaaattatgtggctttttactagctttgtatattattttctggttgctatcttggtcttttgaactattcagctaagttggtcttagttgcatctgcttagtctattctcttttattgtttgccatgttagctttttagcttttttggtttttatttagcttagtcgatgccaactgtcttaagctgttgagttagttagctgagccagtttttctagagtttgatatatagtgaactgatattactttttcctaactaactctcatcttcaatagaatcctccagtgattcttgctctgctagggaaaaatatttttctatttttcttttattgtaacttgcagattgtaattcattggatcttcagagtttgaagaaggagtgtgaatctataatgtctaaagagagttcagactattctgttggaggaatttcagctttgtggaagcaaggtcagcttgtcttcttggatctaagtgtgcttatatcagttgtcttgattgtatctaagagttaggtaaatattgtgttaagtctctaattatattgtttgatttgtaaaatcagaactggtaaatgtaattgaaataattttatagtggatgttactttatccggttcttaaggacccaaacattactcgattggaatgtgttttcaatgtagatgaaacttgtaaatttggtgttcattgatttatttttctagtcttaattcatcaagatatccacttaattcaattactaagctttcaaaattattaggactttcaaagaaaaagttaacctattcctctaatattgttacacataaatttaaagaattaattcccttttaatatatgtataaataatcaaatttttgtttcttcatttcatcatgatcttcttcttataacaaacataaattttagggccaagatgcaaaatagtcctaaatctaacaattaacttaataaatgttccttttttaaaaaaattaacaaaatgt

SEQ ID NO: 304545 - DNA, 1405 bp, Cannabis indica
tttaattaataataataaaatagatactcaattataagatagtatgagttatgactatataaataatttataatgtgtaagaaagaagaatgaatagtttaaaatctagtttgtggcattggtgagtatcaaaagtagttgggaaaaaaagagtacttgaaaacaaaagtatggcttttattaaaaatataaataaaaactaaatggagctaaggcttaacatagctctcctccacatggggtgtgggcaccctacctctttataattttactttctagcaatttttcttataaaatatttatggcaatgaattttgtacacttttgttttattattagtttattttttgaatgggattctcattccaaacacacaattgcaagactagctagtggtttaatttggaatggggttttgataattagataaatggtatatattttatgtgattaaattcataaataaactttttttgtatgtatttttatctcaaattatgtgtgagtgatttgtagagttggcttggttggattgctattgtaaagaccaatttatgattaacactttggattattaaataaattaaggtttattcatgaaatttaattattatttataatatacatattgtggagattaatttaagtttgatataattaattatgctatttttatgaatttctcgttgctctgtaatgtgtttggtagcagtggaaaaagacgttgaactattagagagtcgcgttttgtatggtatagaattattttaataacggggtgtcattgttagactttggaattataggaattttcgagtttggaaatgaccaatttacccttggaagtttttaaccattgaatttagctagagggggtaaaaaggtctttagccaaatgtttcttttgtcttatttgggcttttggtgctgactaaaggcttaattaaataaaggaaaagctttttatacttaggaaggaaggaaaaataagaaaacctaggaaaagcacatttgtctctcttcatttccctctctttttcgaaccacctagaagcaacaagaagttgggattaattttgattcaatccaagagtcgaagcaaggttttaggatctcaactcaaggtaaagattctccagtgtttttacgtacccttgttttctttaagctttaacttgaatattgcatgaattacggttttaggtggctgtgtagattaggtttgtttgatgttaattatattctgaagttgagttgtgattatttatgtaattttagggtggattagctaattattaagatgttagagtgaagttagagcttatgagctcttacttggagctttaaggaataagtttttatgtttgtaacggagttttattgcttgattatggtttattataat

SEQ ID NO: 304546 - DNA, 3427 bp, Cannabis indica
aaccacatgccaatccttaattggtccaaatcattaaatttttatttttttttttaaaaaaaaatagtttaaatatactaataaaaaaaatgacccgtgaataaaaacttaacatttaacgactacctacagagtttcaaacatataacttaagtattattaacgccaaaaaataaacttagatattaatttgctattaatagttaaattttaaaaatttatgtcgtaaattaataaaaaaaacatgagtttttttacaaaaaacactatcaattatattttttgtatagatctttaatttgtgatttatttttcttgtgttattaagaataaaatgaaatgaaaatttagtagaatacttattataaaaaagtccaaaaaaaatatcaaaatttgcaaaactcaatttgtttctagtttcattataggcataaagtggttaaagtatagatgaatgatttcacaaggtgttcctataatttatttaatccttttttattattattatttgaaaaaattatttagcaacaaaaaaattaagatattatgataaattcttcttaatagtaattttcctttgaggtaaagttttgaggagtataaaaatacaaaaacaaaagtgtgtcatttataaaattgataaaaaagaaaatggtgttcttttgttaaaaacaattgaaaacaatattactttttaataaaagaaaaataccaagaagctattgaacccacaatggataatataaaatagatacaaattcaaatataaagaaaaatgattttttaaaaaaaaaattactcatcaccacaattaccattaatgtttgtatgcttaatccaaatgaatacagaacaacataataatcttgtcccaataaacaagtctaatttgatcaataaaaagtcaaagtcaaaaatgaacttcttaattaatatcaataataataataataccttagcctcaaaatgtttgtataaaagaaatgacaccatctgagaaaaattgcccaaacaacaaaaaaagggacttaaaattagttcttgggttgagtttgggtaccgatatgtttggtaagaacatagcaatctggtggtgtgatgttggtatagtagttgtgaatagtttcagtgatttcgaacccgaatttcttgtagaaatttatggcgtcttcgttatttgtctgcacatgtaaataaactttagaaatgttttggtttgagctgagatcaagaacatggtttaggagttttgaaccgattcctattcctcgatacggtgctaaaacacctaaagtcattatgtaaacggcagcggcaggagcaccaccgctctctttcttctcaatctcgagccggcaggcgatagaaccggcacatatgtcgctgtaatatgctgaaaataagagaaggaatgtaactgtgaggtgaggggaaacaacacattgttcgaattggaaatgggattttgttggatttgaaaagagttatggcaaaaagaaaatcggagaaaatatttttgtaagaatacaactcaacctaattgaaaataaatttggatatgagtatggaaagctcagacaagcagaggaagattattcaaaatgtaagtataccaatttttgaatgcttattcacacttaaataaaactcaaattagtatacaaatacttattcaaaatattcaacagcaagcatggataagatttacactacaaactacttactacgcggatgaaagttaaacaacaaaacttattagcaaaggctgataattcatgctattgtgttgtgttcgtatcgatacaaacaattatttcatcgtgttaaaatctcaaacacaaacatagcactattattttgatgaagcaatgtcttgatatgatatggtagctttataagaataaaaataaatttgggcaagagtatggaaagctcacaaaaacagaggaagattattcaaaatgttagtaagtttggttggtacattgttataaataccaatttttgaatgcttaatacgactaaaataaaactcgaactaagtataccaatttctctttcagaatgttcacagcaagcatggataagattttgacatataccaaaagaaaaaaaacatagcagttgtatatactaccaattaccaaactgattgtcaaatttacataacaaactactaactacccgggactcgattactcaaaagggaagctcaaatggtaaggcatgtggtttgccttgcctttacattacaactactaactacccgggactcaattacccaagagaggtagctgaaaatgaaatggttaggcacatggtttgctcccacaaggtctgaagttcgagtactcgaactttcctggttcccaaatattgtatgattaggcggggatcctagttttaaaaagaaaaaactacctggaactcaattagaacatgaaaattaaacaaagcttatttgcaaaggctgacaattcatgttatcatcgtagttatcaacacaattattccacttattgaaatcttaacagcaaacacgatacaattactaaacatgttgaaatctcaaacacgaacaccacacgattatttgcatttttagtaggtttatacaacacgattaaacatgtcaaaaagtgagacatgaacactactcgacttgattattaaacgtgttacccaaacttagttattgtcaaaaattcacatccctatcaaataatcagatatattgtggtaagaagaatcttaagccacctaactttcactgtatgaataatcaaccaaacattataacataaagcaaaagaacagtagattttgtaaaaactagtcaatatttcaacaaaaatcatccataacaacaacgaacaaatgagcattagaatcaaaaagtcagatagtaaagcagtaaagaacaaaaacatacacaaaggccaaatgaaaaacaccagatcagatcagagattatatatatgaaacgaaaaggtcgatgggaatgaaatggaatcgaacctagcttggtgaattcgccggaagagagagcatcgacgtagtacttgtcgttgtagcgaacgggaaaaagagcagtgttgagcttctttagctgcataagattcttttgccttaatccatccaacgagatttggagctcgcgcccagctcccatggccgatttctggggagagagagagagaagtagcagagtgtgtctttgagggttttgcagaacatgagagagagaaaggggtcgatttttccttcctttctaacaaatttatattttcattgtttttaaagattaatttgcgtcctaaatacataaatttaaataaatacttaattgtatttactctatttataaagatgtcgtttggtaacatttttgttttttaattttctaaacacaaaatgaaagtaaaat

SEQ ID NO: 304547 - DNA, 3796 bp, Cannabis indica
attatttattgatgagttcaataataataagtatttatttatttttttttaggaaaatcaagtatttatttgagtttggaaatatatgattattttactattattatcgaaattaaaaattaatcattatttattataaattatatttatgatttttttaaaactattcaattttttcaaaaaaaaatatcatatgtttaaaatatatcatatatgtaatttataataaataaaaaataaatagcattataaattacacataaattataaattgcataatttatgtctaaaactaaaactattcatgcatgcatgactttgacaagtaacatttctagtatatataaaaagaataaaatgtttaaagaaaaagaaaatgaaaattgcacccattttactaaggataaattaatctacaaaataataattgtaacaaaattaaaaggcagagaacaagagagaggagcagtagaactggacatattatagtctttgctattaccgtcattaataataataatagacaatatcatcataacatgatccaccgcttaatcatatcatcatcttatcttgattatattggtaactcagccactcttttcatattgttatactcatttaaatcacatattattctctacaattttaaattaatggccaacaacaacgatggtggcatcggaagcctctttaaggaccacaaactaactttcctcctaatagcagctggaactacctctgtcttaatcaccatataccatctcatcagtgtctgcttatataaccagaaccaggctcctaggcagcggcagccgcagcagcagcagtggcaccggccagctgggaatagcaccgaggcctctgtggccgagcttatcccagcgcacaagtataagaaaggcgaaggtttcgggggaaacgacaaggatgagggtgtggtttgcgcggtatgccttgccgaattcgaagaaggggaggagctccggaccttgccggagtgtttgcactcgtttcacgcaccctgtatagatatgtggctcttttctcattctacttgtccggtgtgtcgcggtgatgccacgccttccccctcgcccaggatcggttggcatggtgagacaaggttgaattctacctagctagggcatattattggtaaagattttagatatggcacgttacgtagctattatatattaaattaatacgttatgttgtaataaaaatgtatttgtattgaatgaaatgtgtttattattgcttggtgttaattaggacttaaggtatagtgtgagaagtatacaataagataatattgattattattaattagtgaacatggtaaatattatttcactttgttaaaataaaggctaaagcgatggtgatcaattgaacatgcgaaagatgtgtggaatattaatagttaccattaatccatattcgagcatatagaaattttctaggtacttgtacagttgccacttatcccccacttgcagttcatctttagtattcgatttcatattggggatttattaatactaaataaaatgagattcttgatatcatacttcaaaaaatgtaaagcaagatgtttgatcattagttatagtacgtaataacttcactttctctcaagaatcaaagataaatagcatacatattgtaccatgacgtactactagagtatgggaatttccaatataattcaggagaaagataagaaaaatgcttaggagaaatgttgagcactatatatatcaagtggcatactgctataaatctattttgatatggaatttcacttgatttaataaatgatatgataaattactaattaattattaagtgacactgggaacttaaagtgccaaataacaatacttgataatagaaccaaattaataagaaaaataccaaaggatattaatagtgtttgacacctttattaaatgcaataattattattaatacaatttaattttagattacacttattttaattattttattaaagattataaaaaatagtaactaattataattttagccatgtcgcgtagcaatggtcaattaacaaatatcgaaaactaaccaacttatgatgccgcatgtataactaacctaaccccaattgctaaaagtttatatgatcagccgaattcttgtgaaacaagactgccttgcacttgcagataaacgagagtgagtgtgtacgtaagtaccatacttttttttttcctaaaggtaccacacattgttaagtctatactttttcgtagtttattttgttttttttacccttaaatttcaaacaaatcgtgtgaaatgaatattgatatgtatatatttgaagtaaaaaatcaattttgatgtgaaattagaagagaataatattgcatgtcataaatatgtcaatttcttttattttagaaaaatgctcatagtacggtgacaagacaagaggtggtaaactgtaattggtggattatggtctcacctgtttcgattagaaacaaccaactaaatgtgagactttacattgatgtacgtagtattaaacaccgccaaataatataggatctcaaaagctttaagcaaactaaactaaagtaatattagatcaactgtaaattaaagtatactaaacacttttgctctttccctagtttttttcaaaaagaaaaatgctatcttcattttctttttctaactattatatttcagtaaactgctaagaaagaaaaaagacaagagtgatgatgccgaggtaacaaggaattgccagagatctcatcgaatcatatacggtgatcattctcctccgtccgatatcgtccgatctctggcggcagcggagacagtagggcggttttggtgcggcagatgggacaagtggaacgagagaaaagccacgtgtccacgcaagacttgtggaacgagtgcaagcactcagggagtatccgcagctcctcttcctctgcgaattcgctaagacaaacggcacaaacattggcgtcgtttcccaccattcttccctcgccagctttttcgaaaacgatgtcgttttctccaaccgataatagttcatggcctctgctgccgtttttttcattctcaagcggcgggaccagctcgattattgtcggcggctgatgatcatgatcgacagggccctgtgtcaactctgattgtgcaggcactcgagagttgggaagggttcccctgatttggggacggtggcggaggcggcggatggcaacgatgagacggtagatggagacggtgaaggctactattacaatcacaattaagaggaagtgtaatatggggtcatttctgttggtggagatttcgctgccgtcagactgatcagaatcgtcaacgttggccatgactatagtgataagatcaagacaagagaggaagagattggaacttgggtgagatgccactcaaatatgcaaactatggtaatgtgggcggttatagcaaagcttaagttttatctgtgttgatgaggacactattggttattaacactatataggcccggcttggtattacaagggcatattacatttttacgttctgttaaaagttattggaaaattctaacatcatcacttaaaagaggcacaaccatttttctattttagtatttcaaataatgtgttagtccttttaggctaattaagaattttactctaaactttgactggtttcaaatcatgttcctgaatttttaaggtcgttaaaaatacttttaaattagggctatttacaaaaa

SEQ ID NO: 304548 - DNA, 2065 bp, Cannabis indica
ttaaattaattactgtagctgcatctacttttcccttaaaatgttcagatttttctgaacaatacaagattttgcatgttataaagcagtatgtgtctgtgtctgtggttagcttcctcagaaaatcagctctttttgtgatttctggctttcggtccctatttctgtcatgttataaagcagttttcatatatcggtaatgataaaaacaggttggatactattttgcgcctagtgggaagccttaccccgacaattggatcatcacagatgtgatttatgaaatggaaggatttctaacctcgaggtaattgaattgttaatcacaatgaacaacctatcattatttctttacacggtttgagcagtgagcacacttggtagttggtaccctctaaaaagaaacaacaccggtcacaggttcaaaccgggatctccttaccccatcccatcatccctccttcaccactgagaaacatatttttccaattttcatctaggtcagggaatgacgtggaaggaaatccaggagctacgagtggggatgaaacagtaagctaagcagttttaaacgcacagaagtttttgttcgataaaaattggatttgtgttgttgacaaaacatttatgctcacaggtaccataccattctctttcctggtgtaagaattggcttggacctaaagtaaatataacaaggacacctcaggtatcgatatgtctaatgttaacgacctttttttgtttagattgaaatgtttttcatatttaattactttttgttctttatatcgaatttccagtcggagcatgatgggtctgatgtacatgtggaattgaatgtagaacatattcatgatgtagacattgttcccaacatgacaaagctccctagggccaagtatgttacgtattatgaagattctgagagtattccgggtaagaggacagcagtatgggagctcgataaaggtaagattggcttttgacattgctgatggcagagacgaggatttggtttttgtaaaactcaaatgtttccctctttctcgtgtagcgaatcataggaacattgtcagatcgccaattctaatgcgggagttatggcttcagatgtggcacgatgtccatccaaacgcaacctcaaaatttgttaccaaaggtgagtcatttgtagtcattggtcatttttggagatttacctcaagcagtctttaccgattaataatttttaacagccaaacgaggacctttgagggacgaagactgttattgggattatgggaaagctcgctgtgcatgggccgagtactgtgaatacaggtaaaattatttttcaagatagtgaaagtaatccaacttgattcttgcttcttacaagtcttacactttcttttccttgatgtattattatacagatacaatttcggggatgtacatttaggacagagctgtaggttaaagaattcttcagctaaaatgctcttggattacttgtagattagatggtaatctttcttttccccttttcatctctcttacacttaattttgaactagaacataatacattacttgtttttctttactatattcccttagggtcaccgcctactcggtttcttaacatggttcttcaacatgtcttcttggaatacattaatcctggtcaaatggtagtctggtaaacaaaacaagtctcattagtctttgaaatgaatctttagaccgatattcgaaatttttaacacttcttttgtctttcccttcctatagaagccgtgtcacaactaccgagcaatgttgttgcttctaccataatcgtctgaagcaccggccatcattctattttagtttcgacgtaaatacactcagaagatgaaaagtgggacaataatttttacaccttgagaagagaggcctagagtgaagtacaacatcatcaattgaacttcttagactatgacattttttttgatttaaacgtttatatattacatcagcataacctgggactcgaacccaggacctccaatacacacgcaccccctatggccacttgagct

SEQ ID NO: 304549 - DNA, 6056 bp, Cannabis indica
gtaaatacactggtaaaagttagattttagccactgcaaatgtgcgctggtaaaactttaaccttttgccagtgcagtttacaaaatgcactgtggtaaaagttatttttaccagtgcagtaacgaaccggtgctggtaaaaatgacatttcttatagtgatatatgattatacatgttatactctaaattgaggtctagctggctaattaacaagttgacatgatttcttatggttaggagataattttgagatatattatgaagttttattagagtttaaaaaactaattgttgtaatgtcgtctagtcacactttgagatatataaatatcctcatatacgattgacaaaagtaatatttatatataggaaaacttctatttaaaaatacacttaggaccaatataatatattgagaagttaatataagtatattagtaaagggtaaataacattttagacgtaaatgagtgtctgccgtttattgttctggggcagtttattgtccattatggttttaactttcagttttttagttgttcttaggccttaacttatctgcagattttgaaaattgcttggtatcttcatctacctaaaatttatttgtttcttcttgcttgattcatggatccgttaacaaacaaaatgaaaggtatagtcaatcttgaagaagaagaggaatccgttctcgcttttgattatgatgaatctcagagattagactccaccaatgataacactcttcttgattgtgtccttaccaggaaaccggtctacttgacaacacttcaaaagcaaatgaaagttcattgggatggtcagtttcctgcccgaatctctgaaaaagaacttgctttattcatgattattcctttggctgtgaaggagacaaagaaagagtcctaacccaagagccatgacacttttaaaactaccacatcgtactttaaaaaccaactgctctacagaatgtataatatactgatctcaaattttcaccattttgggtactagtttataagctacctttccttagtaaaactaagggattgacaaaagccttaggggacattattggtgaattcttagaagtttatatagattccctaaacaaaggatggggaccattctcacgcattagagtaaagcttgatgttacaaagcctttgagaagaggtcagaatatacgtttacaacaaattatagacaaattctggtttgaatttgttatgaacgacttcctgaatgatgtatggaatgtggccgtctgggtcacccatataaaaaatgttcaacctttctggaacttgttgacaatggcattgaaactgaacttgcttatggaccagagatcaaaggggttgctctactaacatctgcgtatgataggtattgaactgattttttgaaagataatgtttggcccctgctaactcgattggcaagaaacactctcagaagcaccattttttcccttccacttcgaaaccagccacaaccaaggaaactactatatggagaggcttcagaccagtaacaacaacttcaggatgattcaacaactttgtctgctaaccaagtagttaatatttctccatatcacatagaaaatgagcatattgatagaagaggatctctattttttgcaccagcagctctgaatttagcaaccatgttgcccaataacaagtccgcctctatggatacaaatgttattgatgcttttggccatcataaacaccaattgggagactctatttgtggtattgcacctggtttttctgtaaaatccaatcaaacacatgatcgggttctaatggaacaggaatcaccaaacatcacagtgactttttccaacaaagtcataaacaaaactgttgtctcctcatcatcacacaatgtcttgacaccctcctcatcaccaaaggaaagtgagttgtctgatctatacatgccaagtgttggacatccaattggctatattgcaacttatccaccaatagtagcaacaatgaacacattcaatcctaactatgttttagtttctctacaacttgcttatcttaaaatgttcgattctataatttgtatgactgctggtgctgggatcgacaaagaaaacaattctccaaaccgtgtgcgtaagaggcaacctgagaaaatgtcaatgcgaaagacacttaagcgatgtaagggacccaaacctaccctcccagttttaaatttttctactgatgatgagacaaaccagtatgcttccgagattattgcagatacatctagttacactgacagctttgcagagactgtctttcagccccacaattagccatgaaaattgttagctagaatgcgcgtggtttggggaatccaagtgcattctgccaccttcgtttacttgtcaaagaatggtaggtattatgtttttcttgggacctgagttcgataccaccgaatttcagtattacttattattcaaaaaaaaaaaagaagagaaaactcctcatgtattatttattatggaaactaaattagattgtaatgtagttactcattttcatcaatctttacatttcaataatggacttaaagtccctagaataggtttaagtgggagtttacttttattatggaaagacaatgtggatgtaactcttataaactttaatgcaaatttgtttgattgctacatagtgtgtaataatagacctacttggcatttctaagctttttatggtgcaccagaaattcaaaatcgaatacacacctataagctcttagaaagatgtaaggatgttgcaaccttgatgtcgtggtcagtgattggggattttaatgaaattctattaaaccaaaataaacttggtggcgctttacaaaatgagacctaaatggataacttttgaaatgtcctggactattgttacctttatgagaaaccttttgaaggtgatttttacacttggatcaaaggatgccataatgtgaatgcaataaaggaaagacttgattgttgcttcattaatgatcaatggcaagggacttttcaaccgataacaacacaccatctcgactatttcaagtcagaccgcagggctatctcagtcactgttgtccctttggctagccaaaatcaaacaattcaaagacattcaaggttcaaatttgaaaaaaaaaatgtggcttaatgattatgatgccactgatttaatactgcagaattggaaaaaaaccagactagttcggcaatagagaatttctgcattaacattgcatcttgcacaagctctctccaaaggtggcataatcaaaaatatgggaacatgaaaaaaaagatctcaaaggctcaaaaataagtgaaggagcttaacaatgtggctattcgaactgatgcttctatgtttcagctgaaaaaagttgaagacagattagaggaaatactagcacaagtagagacatattggcaacaaaggtcaagggtagattagttacaatgtggtgataaaaatacaaaatttcttcatgcttatgcctcatcaaggaaatcaaataacaccattaagtccttgtagaattcatctagtgcagcaacaagttcaaaggaagaaatgatagaaatcatatgctcttattttggtgaattgttcactgctacgggtactgattttgaagctttgaaccaagtgcttaattcagttccaaccacagtaaccgatgaaatgaatcagtctcttcgacgtccatttacagaaaatgaagtattggatgcactttgctcaatgagtccagataaaagttcaggaagcgatgggatgtcagtaatgttttaccaacacaattgggaacatgttggtttagatgtaactagtgtggtactaggatttctaaatgaaggccatgacatgagtatcttaaacaagttaatcattactgtaatcctaaaataaagaaaccaagaacgatgggggattacaaaccaatcagcctttgtaatgtcatttacaagctgatatccaaagtcttggtcttacgctttaaagatgtgctttcctcaataatctttgaagctcaaagcacttttctttccaaccgcctcatcacagacaatattctggttgcttttgaacttgttcatcatctcaaacacaagacacaaagtagcaagggcttctctgcgcttaaactagacatgagcaaagcgttcaatatagtagaatgtaataacttacctactgtcatggacaaaatggggtttgatcaaaaatggacctctttgattatgaggtgcctttcatctaatagcttttcatttctcttaaatggagagattgtgggtaatgtttggccaacaaggggtctaagacaaggagatctattgtcaccttatctctttctgatttgcttagtatcaagactccttaatcatgaagaacaaatggggaatatctaaaaggtctgaagctcactaggcgtgcccctttggtttcacacttactgtttgcagatgatagtctcttattctgtcaagcaaatacaagttcagccttggccatcaatcatgtcctagaagtttatcatcgagcatctagacaatttcttaatactcaaaaatcaattatgtatttctctcccaacacattagatgaagcaaagaatttttttagccacattttgggaatgccgatctgtgagtgccatgaatcttaccttggtctccctgcctattcaagtcataataagaaagaattgttcagcaacatcaaggaaagaatttggaaacttctacatgcttaaaatgagaaacttttctccattagaggtaaagaagttctattaaaggctgcagtccaatctattcctacatatgctatgagttattttcgattgtcaattgggttttgtaattaaattaaatctatgatgactaatttatggtgggattccaacaaagatgggtccaagattcattagaaaaggtgaaaattgttatgcaagtcaaaatttgaaggaggtatgggctttcattcctttgttgatttcaattaagttatacttgcaaaacaggcatggagattgtttgagaatccaaactccttgttgagttgccttttgaagcataaatacttttcaagaaattcctttatggaagcacaccttggacactcgccttccttaacatggcaagaaatacattggggaagagaactgctattgaaaggtcttagatacaagataggtaatgggtttcaggttagaagtggtttggatccttggattctacgacataatgaatttagaccaatcacctacaccgaccaaccaaccttgcatgtatccacctttatcaatgatactatggaatggaatttgtctcttctacaagaacactttgctcaaatcgatattgatcgaattgtcaccattcttttaagcttttaccaatctcaggatcgactcatgtggcaccataatacaactggggtctactcagttaaatttggattccacctagccaactcaatctccgaaaaaagtgatgaagaataaacttcaaataatttcaaaagttggtggaagtttttttggcccttacaattacaccaaagtaaaaatattttcttggaaattcattcaatatgctctacccgttgccactgtcttgcacaaaaaaagttattgattcggcatcatgttcatcaaggtgtaaaagcacttgggaattaattagacatgctttatttacgtgtaagcatgccaattctgtttggaaaaaagaaacacattttaccattaatttcaatcatgctcatggtatgtttaatggtgattgttaggctaaaattagtctaagtttcgggtcgtatttttggttagttttcactctttgtttttagttttaggactattttacgcttgattcttttgtttcaggtcctcgggtgtttaaagaaagtatttacaagaattgaggacaagtggtgaaagaattgagaagaaaaatcaaaaaaatatgttgctgccaaatcccgtcgcgacgggcaatatcccagt

SEQ ID NO: 304550 - DNA, 1864 bp, Cannabis indica
tatatatatatataaatataggatgctatatgcaattaataaatcgattaattagttttacagctattagatctttaagtatataaatataaatatatatatatttctttaataagttttccctgatgattatatatatactacaacttagattagtactttacttaatttgctaactgctgggattttttttctttgtttttcgtagatgaaattctcctcaagtcattaatttaatgggaatattatatgtatatatgcatgtctgaaatatatcgtaatatgtatatgtacatatacctagatagttcccagcaatatatatatttgatcttgatcttacaataagaagaggtgatatatttatatatatataccaatatataaaacactactttacttggctctataaacaattacaactttgatcaagactaattaaaatcccaaattaaaagtcaacgttatcgatccatgtattctgctaaaaaaacatatattaggtaatataaagaaataactgaatataaattgtagtctgtatatatatatatatgtgtgtgtgcagatatgtgtagttagttttctcaattgtgctacgtactgtaacatgaataaataattaaacaatcgataaaatagttatttataggaaattctaaatattggtaaataacatgattttgtgtactatttgtatcatagtggatgagctaacgttgatagcttaaggattaagtctccaacatatactctaaccaacctttatatgcacattattaattaataaaacctctacacacaatgatttaggtcaaaatcctcatttcaaattagttgactactggttgatcaatatgtcgacaaaaaataaacattattagcgcatgcatagtattttatcaatggacaaatactgcattacaatgtaattgatcaaataatatttgctatattttgttatataattatatttaaattataatataaagacaaatataacgtattgtaattttaaagaatcttgttataggtagaaacatatttgcttatcttttgtattttcatgcattaatttgatgaataattttttatgatatgaatccaagtagttatatctaggggtaatcactttcgaaaactcaattgattagatgataaatatattaacacttcttagacatacagtttatatatatatatatatatacacatatacatgaatatgtttatattttgatcctaataaaaaaatgaggtaaaaatattttatctaataattttgttgcatttgtactattttagctattataagtgtcaactaagtttgttaacagccaattgttaatatattattggattaggtattaaataaaaaaacttttataattttctaaagaaaaacatttatttgtttaattaaagtaaaactaatttaattttctattgaaaactgtatatttttaattaaaaatggaatgaataataattattaaatacatggtcaaataatatgttgtcacgtgctttgagttagcacttcacagtcaaaaggttgtaatgctccaacaaaattataaaataaaatacttttgttgtaactttttcattagtatcatatgtgtacattagcaaattttatgtgttatgtgttgttcgagtagtggtgtgcataatttccagactataacacattaaagttagtagaacatgtatttttgtatatagtttgtttgatcaatgctatatgaattcttgaacaaaaagatgatatatactgcgaaatatatatacatttagttagtaataagggtgtttattggatcgcatccaatgtttttaggtctatccagatccgatccaa

SEQ ID NO: 304551 - DNA, 1782 bp, Cannabis indica
gttttgggatggaaccccattcaccttattcacaaattctaacaattatgaaggtgttagtccaacaattttttttcttggagacgcccaccttactcaagctaggggtaagggtgaccatctgacttccattctaacagtcatgaccaccctttatgattaacggtcatcccaacagtcatgacttaacatattcttaattttatctcgaaatttgcgtgccacgtgttgctattcttgacacgtcatcgtcgttagaatttgggtaaacatttgcctcctagtttctagcggtatgactatacggtaggaactttcttgtgtagttcgtgtcttactttagttgtttacgactcagtggtacggtgcgtagaatgtcatgtttatactagaattacatttaaaatctaaaaaataattctcccacgtttcatatttttacaacatatcccaataataatttttctttttacaagaaaaattaaattacaagaaaaataaattatttacaaaagaaataatttaaatatttacaaacataaaataaataaattacttgcaatattataataatccttgaaagttttgaggtctccactttctcttgcgattttcttgcttaaaatttgatgaagtttgctgataaaagaagtaatagttgagtctctttatataaattattgaactggattacatataaaaagagcaaaattatatcataaaaaattacttacatataaatatatgtgtattagtatatctacaaataaaaggataatgagtaacttataccttaaaattgcaagataattaaagagagaaatttgaaaaacttatgagaattgatgagatacttctcagtatttcaattgtagattctaataattgtgttgtttaagtttaaatatgtacagttggtttttctgtggatgtgtcgattcatagaaaggataaaaacagatagaaatacatcgacttaattacaattaaagtatgtattggtaaatattttgtaatacaatcctaaaaatacaacccaaacaccaaattgggaacatatcgatagcattttataatttattttaataaataaataaagagaattaagcaaccacaaatatttttaccgattgtttcactatttttgaaattggaagattgactcttactgattatgtgtgtgtatttttttgattgtgctttaaatgataattaaatctctaaagagcctgttcaaagctaatgaatgcaattgtgttgagtttttttttataaaaaagtgaatggatacaacaggttgtaatataggagattgtaattagcattttttgaaaaaaaaaaatatttcgacaggtgatttcgaatgtggagattaactaagagattgtaattagcatttcttatagatacaattgttcaaaactaatttattcggttaaagttaataatttttgtaagaatattttgttaaaaacacaataaaagttaaatgaatattaaaaaaaaattatatagacatttgtatatatatatagaataattttattatgggacatttaataaaagccccattcataaagcatttaatacctatgggcttcgacagactaatttatcttatccagtatttcggctatgttgaaagtttggataactaatttagctaattctatctacttgagattatttatcacatccagtagagtgggattaatcaatctcatacatgtgaaattttttcttatcgttttttaatttttattttattaatatattttaaat

SEQ ID NO: 304552 - DNA, 5241 bp, Cannabis indica
ctgagccaacagcaaatcctgcaatggtaagttttacttcaaattcaaagactttctttttgggggggaaaatcaaattcaaagacttcaatcagacataattgaacagtttaatggttgtcagttgtaacaaaaaaacaaacatagatttggtgcccttgaaaatctgaaaatcaataggaaaaataaatgcaaatccattactgcatgtgcatgcaaactataacaaaatgaattctaatttctacaccatttaatatctactaatattaacagtagctatcaagagagctattatttgtctcaaaaccgatgacagctgagtaaacatttatcttgatatacctctagaatgaggaactgaactgatgcactttatattaacatccatatcagatttttttgatggaatcgattttgctaagttacgcaagtcatacacatacactgatcttccaactgctaccatcatttcaaatcctgaaagtgacaatgactgcacttctgatcctacatttaccaaacacaaaagttccttctccatacgtgtgtcccaggctaatatcttattgtccaaaccaacactgattacttggcctattgtaaagggagaaaaattccatgtattaacttcttatgttgagacatgtaaaaatcacaatataagtactagttctagaacaagcaaaaattgaacacaagttaaataagtggaagcaaaacagggagcagaaaaaacaaggatcaatgactacactacatctataattaagaatgaaactaaatgatgatagaggctggtggtaagtttgcttacatgtttcattagaatatccaacgcaaattgaaagatcgtcatgatttccaaccacctcactagttccggaatgaaaatcatacctgtaccaattacagcgaaaaggtcagagcaattagctagcaccagtgaacataaagccccctttcaaaatttgacaagaacatacaagcaaatacaatttttagatcaaagatggaatgcattgcagtagaaaaataaaatattctagcaaagttgtactcttgtcattttttcttttcatacaaagataaatacactaacataccaattattaaagatcctatcaagagaataagaatattatccaccacagaagaaagaaaaatataaaatttctgtagtacacaccctaaaggggtgttctcgtagactccccatatgttttagtatcctgaaaagtttttgagtctaatttttttttataatcacgtacgttgtaactttttaagactccctataaattttcagaaaattctgaatagtttacaataccgaaaggttcaacgaattacttactacatgtataagaaaaactaattgtgcgtgcaacagaatatttaaaccttatttttgacattgtaaactactcaaaatcttttaaaaatttacaaggatcttaaataactataacgaacacaatcatgaaaaaaaacatggactaaaaaccttactggatgtcgaaacagatcatttagagggtggactgtagacaaaccctaaaaaaatatacatcactaaaatactaatgcaacacaaaacaaagtcagtgcaaaaaccaagtagaactagaaaatatctacctgcattgataatttattaagcccaatttcatttataaccatgatatgacatgaactacattcacatcaaagttaacttgcaatgatattcataaatctggtacattcaagtcaacatgacttgcaaaacagcaacccattacaaaatatgatataacccacattggttatttcaggtttctaagataaagaaaaagacgaaccttctaacggaaccatcagaaccagcactaaaaccaacgagctcgttctggaaacagcagtcgagaagcgaagcttccgaagaagcttctaacctaagcaccgagccattcacatcgtacaaccggaaacactaaagcataattttttccaaatttaaatgcagaaaaagaaaataatatatcaaattgtggattgaaaaatgagaagaaaaagaagaagactcacagaatcccaagaagagatgagaaggttgtttgattgcggcgcaaactgaatgctagaaatggcgtcttgaatcggagagtcaaataccaaaggaagtccggtcattttgacccaaatatattgtaactgaaattgtcaaagaaaaagtttgcagttgttgttagaagcattttctgtggaaagttgaaggtgtgtagaagagtagtgttagcttcatctttatcttacagtaaatatgaatcagaaagagacggcaacattgggcaggagagatgggttcgaatgggggtagagatagagaagaagagtccagagtaaggttcgtacttggtacttggtagagcccagaggatggtgctgaggagttttacttgagaaattaaatgatatgtgaacaaatttacatatgccaaataattagggtaattaggactttttttcaaattgtactcttcataaatctttctaagcatttaaaaatgaagttgataaaaatttaggaactatgatttggtatagtaaaattgaatgaattctacaattttggtcttaaaagtttgggaatttaatttaatacatgtgaaagagcataaaaattttaattctccaaataataatcttataatgattatatattaagttagagcacttagacaagttttaaaatatttaaagaaataaattaaaaatacattataccaatattttaaattttttatttattttaagaaaaatacttaggagtactttaaggtatcaagtactagaaaaaataacataatattattaatgtattttgatatcagacctcacatattataatttaaaaaatagtatataaaaccaataacaaattataatgtgtcatattagtgtaatgttgggcacctccaagtgtcaaatagggatacttttaatttaaagtttctttaaaatttatactttttagggtatttatatatttggtaattggtatcatgtgttttatctaaatacaaatttagtaccttgtaattttaataatgcttatttagtaccttgtattttacaatcatacctatttggtaccctaaattcaaattcttttgataaaatttaatcaatacaatcaatagtctaaaattttatgaattctgaattcaaatttatttatttgattacatataattgagaactgtttggttaaattaataaaattgtattgcttaaattttattttagggtaccaaatatgtacaatttaaaaatatgaggtaccaattaagtattattgaaaacataaggtaccaaatatgtttttggtaaaaacacaatgtactaaataagtatattccctactttttatgctttgcatttataaaatactagggaagtttttataacaattgagaattgaattttatatttttgtaataaattttatatattatttacaatatttcttaatttttattttaaaagaaacatatattattttataattctcattatcattatttaaagtggtacaacttgttataagaataaatatgtatcttatcccttaaattgtaatccaaaaaacggtgtttctgaactattaataataataaatatttccccaaaattattctcattttttgtcctacatgatttttaaaaaaaaaaaaagaaagactttttattaattcaaatatgagtacatgagagttttaagttctaccagagtattagactcagaaaaattacaattagagaagtatcgagagctacccaatgagctacttgatttgctgatcgtttgagaaaaaataacttaacattaatcagagaggaaagcaaagtttgacaatcctgtatgagaagtccaaagacagaagacatggaagtattactttgaattgcctaaacagtaaacatactgtctgtttcaagtgttgctccttgccaatcattgttttttatccaactaagggcttctttcaccctggcttcagccacctccaccaacggggcacctagaaagcaagaactcttgctccttattaatttgcctgtatcatctctagccacaattctaaagccatacataccatcatcctcaaacattgcagcgttaacattcattttgattgtattggtttcaggtttagtccaatgctcaccgacgtcacaagaagaagcaaagttaagtgacaacaaagaagaaaaacattgagctttcttccattgatcaaaacaggtagatgccaaagttacaacatgggaggcaaatgatgttttgttgttccaaactttattgttccttgactttcatagtgcccagtatcacaggctcaccttttcaggtagtagaacacctgtgcgacaccttgacttctcgaagccaaggtcagccttccaaccattcgagtaacaatgggctcattttcgcgcgaccgtgtgccccgtgcacacttctgtctctcgaacaactctcgccgagtcatgctcgcaagcatccatgagtgcatccaagcatcgaggctctctagccaagatactcgcactgtccataggttctcactatgataaggcaaatcccaacaccgacgctcaccttgtcactcgtggccaaggtagcatgtgtgacaagatgccaacaccaagccgacgtgacaacgcttctatcatgccccattcgatactgtccgaacagtctccctcgtctcccaaggactcccatatgtctatggaccaatcctcaagacgccatgcctccatgcatgttggtaggccctcgagacaagccaccgaactagtagcatacactagacctctatctctttccaacatggtgcatctgtcccatgcgcgtatgcaaactagcccacgaatgactagccgtgacatctcgtgttgagactcgtgaccaaggcgcaccacaacgtctcttggaggtttaggccacgtcccgtgcaagcggcataccggcaaaccaagggaaacgtacctgttaacctctggcagcttcttaaacgcattaccgggtcggcccgataatgtccacgagtactccaactcatagagatatatgagtcccctcgtggtcctcatatgcccgtcctactagtcccgttgactagtagtgtaatacccggaattaagaaatggattagcaaaaccctaactagataattatgtataattgag

SEQ ID NO: 304553 - DNA, 2856 bp, Cannabis indica
atataataagatattgtaatttcggcatgtaattagctctttttggtaatttatttataaggtgatatataaacccagaaattcaaaacgatgaagctttgtactttgataccaaaaatggatccaaatcaataatcccacctccaatcatgacgacaaggctttcaaccttattcccttcaatcaagccttcttcaaaaaccaaacccatctccacaaacccatcatcttcatcatcgatcaaatcagaaccaaaaccatggtctgtctatctcatcatttccacaaatacccctatcaagacctacgtcggcgtcaccacctgcttctctcgccggtaatttcattcaaatactcaattggggttcttttgatttagttactaaaccattaattgttatcaatttcttcttcttttttgtgggtttgtttaatttgatgggtttgagctgaaagttcttatctttgttgataaagtttctatttttttctgaaaattgttagtttaattgaagctcttttttgaaatagattgaaacaacataatggtgagcttaaaggaggagcaaaagcaaccagatctggaaggccatggatttctgcttgcttaattgaaggtttcaaagaccaaagtgaaggtgattcattgatttagacaaccatagctttaacttatgttaaatttctaaaggtaattgaatttaattttgtcttattatcttcttggtcataacccatgataatagttacatcaagctcaaatttctagaaaaaaaaaacatgtctaatactacatagagcattcactcacaacaccttctataggtatcatcttatgattagttcgcgatattttctaaaagttattttcttaagttatatgggacctgctactaatcaaggatggtgctaagtaccaatagtaccttttatcaattctctagtacatagggctattaatacaatgcgcaatttatggttcaaaatcctaacttatgcggaccgaatcatttcagaccaaactaaataaatctgttgtcaatagttaacaacgtttataattttttgattcggtcacggttttataattctagccaaccattcaaattaaatcaaacacctaaatcttttacatatacttaatatgttttttattttattaaatattttgatatttgagaacaatcttaggcaaaatatttatattgatttaatattgtttgggaatttccttatattgttatctatgtatataaactttgaaaagtaaaaaaaaaaacaattacttaaaaataaagattagaacaattacgaaatacaaaccgtagtttcaaactaaaccaattcgttcttaagtggattggtgaggttcaatttgagcatttaattagtctagtttggtttaaaatttttaaataccgtaataatgatttggtttgaaaaaattgaaaatctgaaccaatccagtccaacattatttggggacatgaaaactataacaaatcacattgatgatcatgtgagctaaaacccacttgggtcaagaacatgtctgtgaaaatagaggtaaaaaaaccagtcttgattaataagataagttgtataacattctaagcaagcaaacaagtaatttgattcatcagcagtgtgaatatttgaggttcacaatggattgtagtgtgtgatttgatgatactcatgtcttttattgatttgcagcttcggaattcgaatcaaaatggaaaattttctctcgaaagttgcctcgcaaaaaggaaaacaatggaggagaggaaaagcaaacaatggaaaatagttcacttcgtttgttacaacacaggcaagcagctttgaataaagttgaaacttttttcgattgcagtaacttagaaattaactggcatttgaaccttgtctgatatgttgtcataaattgttgtatgttcaagtgtccacattgtgttattaagagcaatgtcaatttgatatgacaatactcaaatctaaaatgaataaaggctatttattgtgccattatttctcctctgttagtgaccacaagaatggttgtgttcatttaatattcattttcataattgaatcttttcagttaataatgttttcaaggcattatttaggcttcaacatataaattagcaattatttagattatctttattattttattttgtcattatgaattttcctgcttatctttcatgataaatataaatgaagaactcaataatcctactcacactttaaacaccaaccttagcaagatcaagatcgaacaatgtagctaagatccaaaacagaaagtaaaacacaaatgattgcacgaaaaacacacaacgatttataacagttcggtcaatgtgatctactatgaagaagatgattatagaaaacctctcaaactctcttgtatttccattatagcacagctgattgaacaccctggtgtttatattgattgtgtgatatgtaacaataattcgtagatactgcaaatgaattagaaactctacgaagaacctcgataaaattaggcctctatcataaaaattaggacaagaaactgataacagattgaatgattttcctcaagaaggtactcactgctgcacactctgaaaattctaacatcagcacgaaacggaaggagctgaggcagaaagagcaaaaaacaggtactgaaaacaaatacaactgttaatgctcacagaccgaaaatgggaaatatataatatgaactcggagccagcggtaaatgttaggggtagcaaaaaaaattatttttataggatagaaaaatatagaattatttacaccacatattgaaatttttaattt

SEQ ID NO: 304554 - DNA, 2462 bp, Cannabis indica
aactccaccaaaattacttagggcgcatgcatgtgttgtcctatatatataaatatatgccatagttcaattggggattaaaaagtaatgatagatgatttggtaataagttaaagattaaaatgatattgatagatagtgaataggaactctataggtgtaaaactgagatgggtcagtacttgatgccatgatcatgattcatgtttatatatatgtatatagttaaagtagtagaagttattagaagaattaatataagtgatatgggattggtgggttttcttatgtgttggctcttacctagcctagtttcgtgaaaacaacaaaattattatatgattccctttttttaacttttctttattgatcaagggtttgatatcgatatatagttagattttgagtgatgaggggtccaaaccaaatggaataatttaattttgtgatgatatatatctgtatatatattcatatataaatggagagagcgcgtcgaattgacttgttagatctgttttgttgcttattgtgatgcaaagtgacatgcctaataagctactacaaacaagttttcttgtgaaagctactagatttagctataattaaagagttttttaaaactaaatgatgaaagagatttttagccatactgaaatttttaagtttttttcttttttattgtggaacggaattttatttaaaaatactgtgtactgtgttaagtttttatttttgttccacggttgtttttagttattatactgttgttttaattgttttgttttattattttaccattgttttataaaaatacagtaattttataaaaaaaaatttatatgatagtaaaattgtaaatttttactcaaaatttagtattttttttttttttagtaaatctcataattaaaatcactataatatatatagctaatcaataatagaagtgtttttggaactttagaagctaaaacagattttaaaagtcaactatgacctatatatataagaaattaaattattcgggaagagtaatatgagttttgcttttgtcataggagtatttttttatattttggtatattaagaaattataaactaagttgtttatttgatggtatacattatatgtagttatattaggtattctgtctgttttcgaaaaaatttaaattgaaaaataaaattcaaatattcagttgtatgtatgtctattttattcttcatcacgtcatataaaaaattagtatattatttttaaattgcgataagaacaaaaaatgatgcagttatctaaaatgcttccggtatattatataatatgtaaggttttataattagtttgtagatgcattataaatttttggatcacgttgtgttagtttttgtcaaaaatattgtatgaatattctctcttttcttataactttttataacaaagttttagttctcttttctcgcaaagttttaattcaactccttttctttgtccctttaattatattttatatttacaataaatattgatcgatttttatacaagtcaatcaacttttgtgttatagcttcaatatcaaaatgtcactgataattatattctcataattatcttaattaatctcattcgttttgtaactaatattattaattaattacttatgacaaataataatcaaacctacccaattaaaaaagaaaatgatcagaaatggatggacctggaatttaaaactattgtgtatagcaaatatatatattaatatttaaaatagctatttgatgaagagagaaaatgggctcatcataaaaagttatggagagcaatatgatatagaatgatttcatttggattattaaaggggaataaataataatgttcacaaccctagctacctccatcgccttataattatttttcagtgatgcttcctagggtttccttgatcatatgaatcacacacatatataatatatataatatatttatacatacatttataatatattttctttggcccaacccctatgtcccattagtataatatgcatatcatacaaacgtgtggcctcatcaacacacattttttctttcaaacacaaattaataaaaagaatatgttattagtattattattattattagtattgaggatggggtgtagtcccgacatcttaccagtgatggagtcagaaattcggttttatttttatttaaaaaaattatagaaattgaaatgaaattatgaaaagaaagttaaaagactagtgtttacatatgtacttagtacaaaaaaatgcatgttgattattttttaaatgtggttttaaattttagtggtataattcattatgctaaaccttcacaattgggtgtgatcaaattaagggaacgctttatatacaagtttctttatgggttaatttcacaaatgcacaaaaataaacaaaaaaaaaaacaa

SEQ ID NO: 304555 - DNA, 2262 bp, Cannabis indica
gagagagagagacgaagagagtgagagggggcgagtacagtgggtgggtggtggaggtgagccgtggtggtgcatttgaaggtgtgggcggtgcgtgggtggtctgccgtgggtctgtgggtgcggcaccgagagaaagagagaaagaaagaaagagaggcgaaagagagagagggctgatgggtgtgggattttgagaggggtaattttgggatttaggtaaagtaggcatatttttcatagtataaaatgtattggttcaaaaaaaaaattttgaaaacttttaagtatagaaaatcaaatttctttcaactttttttccataattaatcaccaacatttatgccctagtaaaaccaatgtggtcctcttatatatatttgtacacttattattattattattattgaaacgtttttatatattacatttttcgaattacacacctaaactttgatctagagccacctgctttaatttgtgctactctttttgagtattgcctaataagactatatggagagtattgttatttgagatcttaatgtctaacactatacaaattcccagttaatttccaatataatttattattaatcaaaatgtgtaagatttgatactagaacaaaaacaatatgttatacatgctccttctaatttcactctatatagtaaattctattgtatatatcaaacataatcatgccaattactaactaaaaattcatctagggaacatagtatggaaaaagtaatttttccaaaaaatagagttcttaatttattgattcaattcaaacacgagaaaatataatccaaaatcctaacaaggctaaaacctcatcatctttttcttccaaaaaaagaaaaaaaaatgatatgaatattgaatgtgcatgattagccacttttgattggtctagctagctagctagtacatatacaatatagaaaaatactaaaactattatatcgttattggagtagttaagtatcaggtcacgtattatttatcttaataactattataaaatatggctattcatttataagttgctacccccaatagaaatatttgctctacaatataacatcataatatataaatatttattttataactctttgtgatgataattatgttgttgttgttgttcaaggttagcaaaaggtacaagcaataccgtcaacaaatggacatggtggtatcctcattcgaatcggtcgccggcctcagttcatcaacgccatacgtgtcgttagccctagaagccatgtctcaacattttcggtgtcttaaaatggcgatttcggatcaattaaaacacacaaggagagccttgggagaagaaataatattgtcatcatcatcatcacctacaagtaacaataatagtaaagataatcatcatcatcatcatcaaaggctaaaatataataatagcatcaacatggattatcatgaaataagtttccaaaagcacatgaataataataataagtcaagtagtaatagtaatagttggccaaataagttgatgatgagtttccaacaagaacaacaacaacaacaaccagtttggaggccccaaagaggcctaccagaacgttctgtggctgttttaagagcctggctctttgaccattttcttcacccgtatgtagtatatatcttattttctttggaaatatatatatatacatatatatatatatgacatgatatatatagtaagttatgtttttgtgtttttttaaggtaccctactgacacagacaagcacatgttggctaatcaaacgggtctaacacgaaaccaggtgggctactctttattcttctttgtctattttctctttttagtttactcatcctaataaaacttagagcattggatactagtgcagtcgcaggattcatatttaattacaccaatgataatatgacaccgaaaaaggtgttaagcactaataatgcattttcgaaatactgtaaaagatatgtgtctgttatttgatgtgattaaatatatcaaaaaaagaaaatttgtgtgtttaatttgtttcacattattcatgtgggagtgatttatagaatttatattatgttagacttttatttgggcttacattaaattttattggttttattaaaacttgggttgattagatagttctttgctgtattagcccatgttgttggtgatcaattgttaatgggcttagcatctgtgagtaaagtctaggtgaagcagaagtgtgg

SEQ ID NO: 304556 - DNA, 3990 bp, Cannabis indica
ttatgtaatagtcgacgtaatcagacatagaagtattagtaataaaaaaaaaaaagtatatttatgatcatgtgtgaattagtataaaaataaatcatattttcacaaataaatattaaataaatattagtaatataatttcttaattttaaagatttttattaaatctatgtgtgttatgttatatatgaattttgataatttttatgttttatgtatggtaagagtgaaaatttaacgatttggccaataatgtcactttgatacaattaagtatttgagatttagcgggcaaaatttatagatagttagaatatcgagattatgcggggtatttgactatgaccattttacccttagttcttgagataacttaaaagctaagcaagagcattttttatcttttgccttataagattattttaattaattatccgttaattgattactagggttaatttatgaatatacgttttcatttttaagttagaaaagcttagaacaatcaagataaatcaaataaaatctctctctctctctctctttaagatctctctttctcaaccatagacacaccaaggaatccaaccaagttttaaacaaaatcttatcttttcttcaagtcttcaagtgtaactgaagagtgatggacaactatcgcaaggtgaaacctagaatctttctattttgctaattttgggatgaaaaacttggtctttggtgtatgttttatgattttgattctgtgtgagtctgagtaagctagattgttttggagattgatttatgattatttacgggtggcttagaagattatagaaactgttgaattgcgtgagtttgagttttagaattcaaaacttgctcaacaatagtaattttagttgttcaaaaaaaacaatagtgattttcgactttttagtataattgtggtttttgagctgtggtatatgattagaacccattatatgattaatgtggaaggtatcacaaattttcagtaagttttggttggtttttaagtagaaaagcttgagttttagaagtctaaagcaaaacagttcactgtttctaggaaaacaagtaacagtttcatctagcaggccttgggtaaatgattagccatatggggatttagttacccatttgggatgattttagggtacctcaattttcatattttcttgatatttagggtactgtcatgttatttatcgataggaaaacttcagattattagtttaagttcccataagtgttttagcgagacacttacctgttttactaatgtgacttagggcctccaatcgttgagcaatttttccactcaagttgaccgatacacttgattacagaattgaggtatttcttgatgattgcagttaaaaatttcagtgactttctctattttggttgattttagaattatgattatgtaaatcatacttaacaataccacttcatacgggatatttaacacactaggaaatgcataaataggaagggcatatgtaatatcccaaaaaattattatgataattaattggacatattttattaaatatgcgattaagtgggtaatagagtagtgttataatcctacctaagctaattacgagttaattagtaaaatatgagtaaatgaataaataaagcgtaatttattaattacggagatttttatcgaactatgggagtatcgtggataccattttcgaaataaactattttcgggttcggcggttgtggagactcagcgaagtggtcaaagatgttacgataatataagatggattgaattggatttataccacactagtttagaattttcagttgccgatttgacagattaattcgaatgaccaaaatacccctaggatggattttaggttttaaggatttataaggggcaatttagtcttttctttagggatgggatttttgtcttttcgtgacttatttgcgctgaaaaggggtaaatataatataattatatgtttaagtattaatttttttggaagaaacctagaaaactaaggcaattgcataacaccattactctccttcttctcctccttcgaaacctagaaaacgagctgctgcaaggtttgagttttggctgagttgatcaaagaggtagctttaaggtaattttccccttctttttctttgattttctagagttgtaggttaggtttgaatggggattctagtgaatttggtgctgtgaagttagtcggggaccagagcttgtcctaggtttaattttagtgttttgtaggttctacttggatgaacttcatggttgattggtttggaattaagaacttcagtttatgaattcaattttcattctttaatggtgattttgttattttgaggtgttgttgagttttgaatgtttggttatattatgtttatgttataaaactattgtggatagtttgaactagtttggaagagatttggttgggctttggagcaacaaaccacatttttcccattttgtagcagggaaaatcgattaaccagttccataggcataggaaaatcggtcaacctattttgccagcagtggaaagtctagttttaggcttcgaaaccggttttgttcggagtgtttcccagagcttagaatatgatattttaatgatgtttgagttattccgaaccagtgggagttagatatgtccggttgcgaagttagggttattctggagttttgaataagttttttatcaagctttgttgtcgtgacataggacccaggatcgtcgagcatagttccactcaggtcagcccgcacacctgactgttggattgaggtaagaaaagtgttatgcaccatttatgattaacaatatgattattatagtctaaattatgattgacatcccaatatgtgtttgttgtgactcgattatgatcgaggtaatgatacggaacaattattattgtttgtgactcgattatgatcgaggtaatgatatggagcaattattatcgtttctgactcgattatgatcgagtaaaagatacggtcattaccgttataagtaattactctttgaaagcgcaattaggttttttatttattgtttgctttattggacaatgatagtgacatacatagctcgtagacgacgagtggtaagaatgatttatggtaattgtaattagagtgctttatgaagcactaaaattatgtgtttatgatgatgtatgactagagtgctttgcgaggcactgagactatatggctattgattgggtgaatgtctatttagtgaaaagatgaaatttgtaattatgtgttactatgagtattcttataatttgtaatgaatgtgtttgcatggacgttaaagttatatatgcatcctgaatgtgtaatgacactctggtatgtatattatgttgtaaatgctagtactttctacgctttatgtctagtactttttcttactgggtgtttgtgactcacggttgcttcatagtgcaggtaagaagaatatcagttgtgttcgaccatgagtcagaggtctcccagtaatgtacatatcagccgtggtgtcttgacttttgagaagtaggattaacccttgtctatgattggaaatgtaacctacttttgtaataacgattttgttattagttgtaaaagaattttattaccaagggatctccacattacgacagtattttgaatgaaagtttttattttaaatttattcagtggtttaattaaaccacactttttcctaaactaataaattagtaataataagtttgtaaaagtacacatgtggcgtccctaagggtcagggcgttataacatggtattagagtgaccaagtttaaaggtcttgaagactgactcgatatgtacattggctgggaagactcgattaactcatgacttagtaagtgctaattgttaggttattaatagactatttgttgattatttgaattgtctgcttatttgaa

SEQ ID NO: 304557 - DNA, 1787 bp, Cannabis indica
agagagagagaaagaaagacctaactagggtcaataaattcaggttcccctataataactagcaatgaggaatacatgccatatggcaaagacaatgacagttgcttcctatcttctctatttatgccactctccgtttatgcctaagcacatgttatctttccagaacatgtcctgttttcattttttttatataaatatatatagttttccctcctaacatgaaccaacttttaattttcaaaatcatgtagtgtatgtacctttccttttttttttttggttctctcatcatcattttaccctaccatgaccatcatgtattatcatattgtgcacatttatataaatatgaattttgtatcttcataacataatgggattgtcacgataagtcacaatcttcaataactactgtttccctcctcttcttcagcttctatttctttcatgatttccttttctttgttttgaaatcaaatccttggaatctcactacttttgataaacatactttggatcgacacaaacatgtgcaaaaccgttgcaaaggtggttgtttttttgtttggacaagttcaaaaccttgatatttaattaaatgttgttgtgtatggtagctattcaaaataaatctgtgaccgtggcttatgaggaagtataaatataatagttacatatgtgaatgtgatcatgaattgttataatcaataaatgtttttattttgtctttcttttaatttcataataaataatacaagttcaaaacatgtgacgaaaggtgacatatgctaactagaatcataataattagcatctgaagataataactcatatggttcagtccactcttattttggggtttatacaaaattgagatacacaacaacaagaaatggaaataccaaagaaagccaaaaataaatcttaataataaagaaaacataatgggtcagttgtgaaaaacaacaaggatgatagttatgtcaagaatagccattccaccagaagaaagaatgcgatgagagcccattgagaataattgcaatagaagccaagttatgaaaagatatgaagaaatggcaaagggcttgagattattagggcccgtgtattgggccccctaagcccaaattccagtccgaccacccaccgacagtgaaagcctctgtttggcttcctctgttttagtactcctctaaagtcttagcctataaaatgaaatggggttgtggaggaggggtcctgttttagtctatgaacccctgaagttccggacagtgtccttattgaggtcaccaccctcatcttatagacacactggctaaaagctaggaccagctttgaaatggcccacctcttggttggaatgatgtggatatggctggtgggctaaatgcctaaaagccttcttagtcagggctagagtaataccaaagggaattgggtgggggcctgtttggtttgtgggttcgaaccgacaccgatggagacaagtcctattatcagttgggtctatctatcatcagtaaggtgaccactgatcagggagccattcactgggtcgactcagacaccggcatcctccaatataatgttagcactaattatttatctggttgtttggaatggggttcctaagacataggcaagtgggttttttggttttcagtcgtacgttttttaataagtaaaaacagcttatttctttatgtgacatttggattctggatgatgatttcgtgtttgctgatcatttattttcatttttctctctcttttttctt

SEQ ID NO: 304558 - DNA, 2025 bp, Cannabis indica
ttccaccccacagtaaaaaataaataaataaataaataaaaaattttaatatgtgatataaaaattcgtaaatttttaatgaacaaaaaccagaacctttctcatattatcatgtaaacaagtatttacatcatcacattggactcaaaaaaaccatgacataatgagcaatgtacatgaaaaactcccttcatttttggaggacaacataacaacagaaaagtgattaagaaactagattagtgaaaaaactatcctataatataaacatataaaagagtaccattttaacttgatggtacttacttaaaccacctaaacttatctgatacaactgcctactctaactgatacccaacacttgaagagagtaacaaccttaaaccgacttgcatcgtttcgtaacctaaatacagcagccctgccattgttttggcggccagcttaaccgatagcgaacacttgaagagagtggaaatcttacactagcttgaattgcctagtagcttaaatacactggccgtgccacttttcgggcggccagtttaaccgataaccaacacttgaaggcagcgcgaagcttacaccagcttgccttgcgttttctatccttcgaggtatggaaaaaatcaggaatttgaggggaaaggtcttgttctgcttcggtatttggagtgaagctaataaagttaggcccttgttcccatgtgggagattgaagctgatgaaacatgttctctgtaacgaaaatgggctgctaaggacaactggctcttgcaaaccattagaagaccaattggatcctacattgtactgtggagataaaaaatcttccatagagaaactgttcctatgattttgagaaaacacttgaaatgaatggttattattctgtggtgcagaagaaagttctaactgatggctaacttctgctgcttcacaagggtatgatggtagagttgacgattggctgagaccgagttcaatcatcggctgagtcactgcaaaaaacatagagattcagtttattagatacagtacgcgaatgtgaggaagaaccgaaattgacatgtacaggttaagatttgtataccttcttgtgtaattgagaagtcattgtattgtgcagcttgtagacttggcagcggtcttggaacatcagcaatagaaagatcatcgatcgagaccagttcaatttcatttttgtatacctgttgcttcagattttcaaccagaacctaaggggaaaaaagaaaaagagcatattcatcagtttcacataacaaatactgaagctatggaatcagaaaatcgaaaaaagcagtgaaattagagtggataccctctgagatggattgagttcttcgggagagaaaaagcggccacaaaatgtagctccttcaaacttaaggacagaattgaagtagatgataacatcatgttcaactctatggtatgcatagaatttgttatcatttacataattgaaagcgtgttctacaatcgcgttccaaaccttgttcgagatcccaggtagtatctgcaattccaattttccttaagacatattatcaaactaaatcaactatcttaggttgattatcatgctaagatgatgtttgtcttcttaccttttttaaccccgaacggtttttcatgtacagctgcaaaaagtccttcaccgtttcaattctagaggcggccaacttcttatggaacaccccatcttttgctatcttttccaaacgccatacttcgtcgtgtaggtgtggagggtgatgcttcctatatgctgaaacaaaacaaaaaccgatgttagaaaattcaatctaaagcaggctctgaggggttttaggtaacggcctcagccaccctaccctaaagacggccctaatctacaaataggcactgattgattacttgaatcgatatcagcaaaaatacaaaaagttaagtctatgtttggcatcataactaaaaaactattttttgaaaacaacggccctagccaccctaccctaaaga

SEQ ID NO: 304559 - DNA, 1058 bp, Cannabis indica
aaaaaaaaaatatataatttacaccatcatataacaaattaattaatttataattttagctatatataaaaaaacaagaaatggccttcaaactatactaccaccaaatcattttccaatgtatatttattaaacatgtgaaagtaatattacacatacgaagtagtgaatggtgtcaaccattgaaatgagtgaggccgcatctgtcagtagatgaaaaatcagtggccgacctgtttgttcggatgagtgcatgcatgtctcgcttcttcttcctcaatatatattttaattagttaaagaaaaagaagaaaaaaaaaaagataacagtttatttagttatttttttaaaaataaatagcttcttttttttatttcttctgtttaaattatgtaggaaaatttatctaaaattttatacgtgttccaaaacacacaataattaatattaattgaaagtgtttggaaaagtgaacttatctggatcaggttctaactgcaacccttcgatggtgctgctaggccctatattactcacaagtaatagcccatgtttcaagcaatgatacacatcaattatatatatgatttgcttcatgcaacctgatttattgctttaagtaatattttttttactattattattataacatttttctattttagttagtttaattagctaggttaccgtgaaagaaaaaggagagatagcaagtaaaaacaaagaaacaaaaaaaaaaaggtgatgattgtatttatggaggagtaaaaaaagttactggtgggctgggatctggtaggaaagtttgtgattgtcaagataattacctttgtcccttcttgattgctctccttcataaaaaataacagatagtattttatgcatgtaatattaggggtatcatgttcaaactaataattattttacccttcgaaaaaaataataattgtttacttaagggaaaaaaaaactattaattatttggttaatggtaaggaatgttgattaaaagttaattactcaattattttggtgataattaaatatttgattatta

SEQ ID NO: 304560 - DNA, 604 bp, Cannabis indica
agtctatattattttcactataacccaatacattactgcaattgcaaaaataaaaatgaaagatagtataagtttctttttgctacctaataaaaaaaaaatatagatacaacaacctgtatgctttgctttatttggtaagtgctggtattcaggattagctattttttttttcttttaaatgatttatttatttataactaagttgaaaaccataagagaaaaaataacaataatatatataggaggatcaaattaataagtatataagaacaagaataagaaatgtatatggtagaaataaaaataataattaaagaaaaaccaaaagagaagaaagaataatgggaatgattctaataaaaataattccaatttttaaaatatataatatttacaatcacaatttcactattttggtttgtggaaacaacttcttttccccaagaactcccttacaagttacaaacaaacaaatgaaaacacatccaaccctcaaatgaaaaacaacactctttccaacccttttcaaaaccaaaaaggagaatgatgtctttaattagaaaatcaaccagaataattaccaaaataataattctttttt

SEQ ID NO: 304561 - DNA, 2432 bp, Cannabis indica
ggttgtctaggagttttccagtctcattgttgagcttggtatttggttccattggggttaagactagtttgatgcctaggcagccaatctcttgtagtagtagtaaagtgaaaggcctttgtgtgatagaaattcctttactgaatctggctatttcaaggcctaggaagaagtttaaacttccaagatctttgagcttgaaacgggaatcaagtgtagatgaaaaatgtggcaactcttcaaggttgttggttgatactataatgtcatctacatagattaatagatcaaggaagatgcctgtttgtatctaataaacagtgagtgatcgtttttagattgaacaaatttttgttgtagtaatgtggtgcttaatttggcataccaatgtcatgaggcctgcttcagaccataaaggcttttctacagtttgcaaactacatttttggggattgattctttaggagtgtagtcttgaggtagcttcatgtagacatcttgatcaccatggacgaaaacattgttgatgttcatatggtggagatgccaatttttaatggcagcaagtgcaaacaacaacttaagggtattaaatttggccacaggcacataggttttaaagtagtccaccccttgttgttgagtataacttttggctactaatcgagctttgcagcactcgatagaaccatctgggttgtatttgattttatacacccatttattacttatgacatgttgccctgggggaagagggacaacaatccaggtgtcattggcctatagtgcatctatttcagtgtacattgcctagttccatatcttttctttacatgtttgggcataggatttaggttctgtcagatgagcaacaagtatggttgctcgaaattttggagaaagctttctgtatgataggtagttggtaatggggtaagatgtacttggggcctgagtttgaattttgcaggtatattcctacatatgtgcaagtttggttatggtactgccaattcttgtaggtgggatagttgctgatgatgttggttcagcaaagattgttgagtgttttgcagtaggtgcttttgggtaggatgcagaggagataatgtcaactttaggagcatttggtggtgcagcaaaagctgctaaattatgtgtgacatctgaatgttgatgttgatgcaaatgttgagaaaagaaatggtcaatgtgactgtgattggtgttggtattctggaggagggggtagatgaattcatagaatattacatcccttgattgaaagaagttattggtttgaatgtcaaggagtgtgtaggcctttatgttgtcaaggtagcatatgaaaatgcatactcaagctctaggagagaatttctttggattgttgagatgagaagcataggctaaacatctaaactttcttaagtggctataatgaggagctttattgtgcagtagcttatatgatgtctttgctaggaatattttaccatgatctagatttactaacaagtatgttaaactaatatcctaaatatgaatatctctaaaacaatgaaattaaacacataagggtttaagatctcgaatccttatgtgtttaatttcattgttcctttctgtcgccgagtattattaagatttgagcttggatctctttctctccttcaagtttggttactaccgtcttactcactataattgaatacttgacttgctatgtgtgggcatgacactctttcactaagggttcgaatatggtgaagaacaatgaaggaggtgaaatcactatggaaggaactctctcatgtactagttgtctgacatagaaaacttggtttaatttggttgaaggcatcaagtaaatgagtgagagcatcaagttccttttatagtgtttcaactaggtcttagggctgaattatatggattaaaaacgaataaaatattgggcaaaaatcacactagtggtcgacaataaaatgaccaatctctagttacaattttatcacttttttataacaaattattcttctttcaataataccatatttttcaattcaatcctataaatatcaaaactatttatttaataattataattaattatcaaataaaattatcatttatactatttattaattagaccatacaaagtctcttaattaataaattgaccccaaaacatattttcttcacaattaagcctttgcttagtgaaaattcgtaaataagacattgtctaattttagaattaaaattgattaattaaaatcaattgactgagtctacaacgagtattatctcaactagtgaggggaccatgggcctatataaccgagctttaaataagtagatttagaatttaccaaggaaaatctctaacttattaattccgcattgcgccactgtgttgacgacactat

SEQ ID NO: 304562 - DNA, 1774 bp, Cannabis indica
gctttcatcaatgtggtcttgcaaaatggtaaaatgcatttcctgtgttggtagttcccttctgcactttttcctttggtttccaacctttgctaaattggttgaaaaccatcagctgccactgtctcctctttctttgatgtttcttttttatctttcactacccactgttgttgtttttgaggcccttgagctttcctggaattagttgtattgtggcctaaaccattacagtttttacaaattgtgggtttccattcatacttgattcccactattgcaacacctccatactcatcttcaaattctattgtctctggcaacgcttgtttcatggacacttctataagcacccttggaaatatgagcttttgcctctgcttggtgatttcatccaccaaaatcgggtccccaatctgcccaactagtttaaacagggtgttctgaccgcagtatttcagttccaagttctctaattggatccaaattggcaccatcctcatgtcttctttttgaaagtctttatcagggttccatgctttcatgataaccggcctcttattgaagaaggtataacccccatttaggacattatctctctcttcaacagatgcaaatctgattatgaaaattccatatgaaatgagccctaccctgtcaactttttccttccaatctctcctagcaaatccttcaagtacttctaatggagggttagcacccaagacataacaaacaatagcagaattccaaaaggaaacctcttcctcaatatcatccaatgttattttcacactaggtttcccagcactctgaaaagatgagtttaaacttcgaacaacagaccctgatctaagaatagggggaacagaggtcttaccttggctaagatcactgttacattgcttatttgcatccaggaagtgtgtgaagtcagctcgaacatcatcctgtcgttgcagctctcgaagtgatgatcttggagacaaagcttgaaaagcttcatcatcaggtgcagattcaaacacatcttcatcttcctctatgaaatcgattggttcgattccaaggatagcttccatcgacttggtttttttgacatcaccagaggatgacggtccacgcttctttgcaggtttagttggtttcgacacagacagcttcttccccaaattcttggataatataaatattcgaacattcaaaattattgttattattgtatctcacttgttgtctcattgtttctcacttattttcatcacagtatctcacttgttgtcatcactgtatcgcatttcttgtcattactgtagttcacttgtagtcgtcactattgtatttccgaaatctatatcttaatcttagatttcatctcgaattttaaacattttttaaaatatttttaagacattagagaaaatttattagtttgtttttttattattaattaatatattttgaaaaagtgattattattttttaaatatcttaattaaaatatatatatatataaatgtgatattttagttattagaaatgctaaaaggcaactatctttgttggtagcatatcactattagtgtaattaagtagcaggtctcatataactttaagaaataagatttagggaatatcgctaaccgattgtagggtgccacctatgaaatgtattgggcaccactcttgccaaatagttatgctctttagttataattatgtgatacttgacattaaagttatcatttaaaaaaaacgtaaagtaggtttttgt

SEQ ID NO: 304563 - DNA, 1275 bp, Cannabis indica
ttgaattttttattttttttatttatttaaataaaaaataaagcaaaagcagttcaatcacatctaagtatgaaggataatgtatcttaaaaaaaaagtatgaagcataatgcaaatttcttgctccatcccttaaaccaaccaatctggaaagaccgtcatcctcaccatctccaaaatatcataatgaagagaattaaaaatacaaataaaaaataaatatcctaaacaaaaacacatgattctttacataacaaaaacaatgacctatatgaaaagagttagagttgatgaatttcacatgtcctttcgtaattcaatgttctgagatccaaatacttggtgagaagtgctttgaataaacacacccaagctgcatttgctcttccactgaatcattcccatagagagaaattaattgttccaaatactgatttctttgcttagatatctttcgcagtctaaagttattttgaattttctaaccataaagtcattgaacaagacgtgacttttgttctccccactcaggcagtcagtcaccaaaccattttcgttaaggctaccatcacattggcgtcttggctgtcggcctatgtcctcagcgcctgttagagagacttgtcaggtgtttgcctgcctttggaaattcacctgagcaatcacaaaatttataaatgataattaggctatagttttcacacacaacaaaatagaagtaaactgggtatgatgattttatagcatcatcatgtgctttaattgactctaatcacttcaaatcatataccctcaaaaccttcaaagtcttatccaatgaacttgaataaatcaacccattacagattgccaaacaagatatattatcagcatgttcaattcataatttcttatagttacttctagtttgtacataatttttctgtctcatgaatttcccaaaataatcttttgttgttggaagtgtgtccacaagcttaaaatattctcggatctcctagacgccctccatactattttactatcttgatgagcaataaagacttttttctttgatgtaacaagagatttaacatagatatcaccatatccaagcttggtaaaaagtcttaaatcaagttgttgccaaactatgatattttttccttggaaataaactcaccacataaggctaagcaagaaacaaccaatatggccagatagtacaactaacaatttatatgagaaaaatctagtcatcataaaaaccatacttggaaatgattctaaagactc

SEQ ID NO: 304564 - DNA, 4215 bp, Cannabis indica
cacgaagacccagggtatttgttgagcctgtttttggatgttgtagagctggggtgaacatccaacatgtgatttggttccactttccattccaagacctagggtatttgttgagtccgtttttggtgccaagagaaggatgagacacaaataaataagttgtatacaataagccaccttgttgatgcgtgcttacacatttgtaatggctttaattgtaaaaaggaggggggggggggggggggagggatggcaacatttcatggccctcttcgagaaaattcactttagctttcatgacgataagtaaattcttttgaaattgcacaaaaaacctgtaggatatccaacggtatcttaagtgagtggacaaatttcttggaaggtctgttttcctttgttgttttttttttgaatgtattcaggttaatattctctattctacaggtttaacatggtctattgttttgtagtttttttcttatcccttttaataatacaaattttcatttatattttttttattcttcgataggaggccgaggtgagagaagcaaaaaagttgaaatcatctcatgaaaacattgagttgttaaaagtaaagcttttggaagaaagagctcgaagggagagagcagaatctgagttgtctaaattacaagagatgcagctaagcatcaacaagttagaggatgaattgtcatcttggaagttactgattaatgacatacctggtgtgtcatcttctgaggacatatgtatcaagttttcagccttacagaggtaagcatataattttatatctgtaacttgtattattagattaatttaacaactttggtatcattaataagaaaagtaaagaaaagtcttagctctcgggatttgctcccctgtaactaaaactgaacacggtaaataacatctataatgcataattttgctgtatttttatgattggaatttttcctttgcatattggtgatgaacgtgtagaagtttcatatgagatttcattttattgtattttattccgtggaggtatgcatcacatcaattatcattttgcacatatttttacaagccttattttgtgcacgtgtctattgtcaaaagaagtaattactactttattttgggttgtaacttggatctacaagtccaaggatttttggtactatctgtcctagatctcaacagagattggggaagttttctgcattaagcagtatttgtctaattgttttgttttacattgctatatttataattgtattcagattggggtcatatgatctcctcactatgtatttctcacaatattatacaaagttgtttctctaaaagaaatgaaaaaagaataaaggaagtaattaccactgataacatgtaattgtgtgtatggtgaggagaatgattaagttgcttcttttctttactcatagcagaaaggcttcaatttagtgggctctgtcttcaaacagataatcattgttttgtttccctgttattgtaatttttttcaccctttattttcttaaaggttttttcaaaacatctgatagaaaggaagagttccctaattataagatgataatgtagttggacataataaccttccaatttagaccacttaaacacgtaggaaaatcataaaattctgctcagggtattttccgttttgccaacaaaaatatccatatcaatttcaaatccagatcttgttcctttgggagcagaagtcagaacgaataccgagacttttttttttgaaggttgcatcctttttttttttttgtttttaaataaagaaagccatatccatattatttttcaatctttcttgcattttattaataaaagaggaagaatctgcttttgggttaccaatttctgtgctgtctttttgttgtggactatgatagttgatccatcaggttaaaagccaacactacttaatgggaaagagtgacctgacttctttgcgggttgggttgggttgtttatttattttatttttattgcaaagaacccacctcaaaccaaaataactgacaaaaaacgcaacctgattaactcgatgaaaatccaaattgccaaattaatgcatggccaaatagttttgttaaatttcataataaacaaaaccagtaacatacgatcagattttgaccccaaatttactaaaaaacactattttatacaaatttatagatattaattattttcctaacaatatttaattcattaaaattagatacttagatttaaagttatgaataaaatactaaattttgtttatttatttaaaatattttgttagataatagtaatataacagtaaagttgacagaaaaaataaaaaacggtcaaaccaagaatcagttaatacataatatgtagtgttagttgctttaatggaggccgaggttagcaattactagtgttagtttcatgaattatttgtccattggccacttattttattgataaacgattgtatgtaaagatcagttttgctgattttttaagtagttttttttttctgatgcagagaggttattgatagcaccatgaaggtgggtgaggcaaatgctcgcttgaaacaacttgaggtggctttggattctgcacaaatagataaacaaaatgctgaagctgaggctgctttggctaaagagaaggcagaattttcaaaatctgagcttaaacagatagagaaaatggtaattctttattgttagagtagcttttttaaaagtaatataactaatagcgttttattatagaatgattaggttattatacaggacttagcttctgtatgatgtaaatgctgtttatctatcgcagcactttaaaccacacattgaagagttttcttatggatgttgaagtgatatgtacacttttaagctactatgataccttcatttttctctttctttttgctcattgttgaatcatattggacaattgcagctttccatggttactgatgaaagagagagcttgaagaatgttgttaacaaattaaaggaatctaatagcaatgaagcaagggaccaagaagcaagtggaactggaacttttgttcaggttgagaaacttctcatttgttgctctgttctggcacaattatagttacacaatttctcctaaggtggtttcttttgtcgcatggtttgtgtttgcaggaacttgaatcaacacttgcaaagaaagaatgctatattaaagagttggaggctagtttaattgaacaaaaagaattcaataatagtaaatgtgaggaggtaaagttactcaatgagaggttaaataatgaagccaagagaataaaatcactggagagggagaatgatagattacgttcagagatctctttgttggagtcaaaggtaggttccaataatttttgaggagttctttcacaattatgttgtcatatttaaagtgaatatacatactatgagcttgcgtatgattataattgtatgtaaaataaaaattaggcgagtgtgtgttcctaacctctgaaagtattcttaaagaaaaaatattattacgtgaggagtatcctttttcttggctgccttgaaaacgaccggttaatacttaagttagatattagatgtatattagctgtaaaagaattagatatttagtagatatttagtctcctaactttgtatataaatatgtattattctatgaaatcaacacacaattcgaatcactattttctacatggtatcagagcattgttattcaaaattcgaaaaaagcaaaaattagggtttgagtttagggttgtttttcggaaaccctatttggagtgcgaatttagtctcaccgcccactcagccgtgttgcccagccgccgatctacgaaaccccgaagtccggtcgccggattcctcgcgcgtggggctcacgcgccgcctgaagtttctgcgcgtggggctcacgcaccggcgcgtggaggcgcgtgtgacggcgccttcgacggcgttcttttgccgattctttactgggttcttctaagcccactcgcatctgttctaggttgtaattcggtatttgtttgtcttcttcgtgtttgggtgttcattctttggtgttcttttgttctttttctctgtcctttgtgtttgcttttgagattatggcagagataagatcagattcaaaatcagttgttgtttctgatgt

SEQ ID NO: 304565 - DNA, 3898 bp, Cannabis indica
agagagagagagagaattaaatttaaagatcgagttgagtggttgaatgaaggagtttgatatgtatttatagagagaattgggtatgtgtttgatgtgtttgttgactttgtcgtatttgtttttgtttaaagttttaggtttaattaatttaagaagaagatattttatagttattagtttgtgtgtgtgtatgaaatggagacagagacagcagacgtgtatttatattcgtcgcgttttcgtaagaaaagaaaggcaagacaagacccttattactcttctctattgtcggctaccaccacactttcctaatcctaccacacaccaacatagtgtcaactctcttcaccaattagattattatcaaacttctttaaaactaaattaaacaaatattatatttatattcttgctagacattcttgatatcaatctgatcgtaacatttttgatatttttatttctggtgaactcttacatttattcaatgaagttgatatttcatctaaaaaaaattaaacaaatattatactaatttcaagttatttttgtatccctccataccaaatctcttgcatatgttgtgtttttttttaagagaaaaataaataaataaaaccttcgatactcattatttgaattttatttttaacattattaattattaaaaaaatgaaacagttaaaatgtctattataaattataactataatataagttgttatataaaaaattatatacaatttctttatatcggaaagaaaaattgccgctaggattgaggttaaagggtcccatatatgtgttattaagaaaagttagttagtttggtagttagagttaattattcagttagttcgttaggtgagtcgtataacaagtttcctatttagcattcatagctgattcattgtgtatataatcatgtaacaactttgattaatggttgaatatacaagatctttttctctctctttctctctttcttctttgtcttgtcatggtatcagagcttcttcttcttcttcttcttcttcttcttcaatctagcttcaatggcaactgtttttcccagcagcaatggaggctcgtctcaggccggtggatccactcataatctcccgaaatcatctcttgttactttttctcactctctctcggttcgacttgatgaacacaattatctaccttgaaaacatcaagtgtttgcatcaattaaaggaagtcaactacaactatttcttgatccactactcactcctccaaagttcctcactgaagctaatcgaatctccaacacagtcagtcttgagtttgaagattgggagtagcaggaaaacatccttgtttcatggttgctatcatcaatgtctgagaaaattttcacaggaatggttggttgtgatacaacttcttagatctggatcaaggagtactacacaacattaaacaaagccaatattggcagtatcaaactttgcttcgcaatgccaaaatgcaaggatcacttggtgattacttactcaagatcaaaagattggtcgatctacttgcttccattggtcatgagatctctccagctgaacacattaaagcaatctttaatggtttcaccagtgattacaatgtgttcatcccctccgtgaatacatgaacagatcattatattttccctaaaatggaagctttactcatggctcaggaagtttgaatagaaaagtcggcttaagaattagatatctcaaagcctgaaacaaatcttgctcacatcaaaccattcactcgtggtagaggtaccttttcttctccctattttcctaattcgaataatcctagctctcattccgtgtctagaggtcattagatgcataatagctatgtacagtactcaactcatcctcctcttcctggctttggccagcaacttactcaacctacaaccagagaaggtcaatctcgtggatcacatccaccttcaaaaggagcctttacatatggcagaggccaatacttagatctgtcttgaaattatctttccaatacaagttgaaccaggtcatttggataaaaattgagagagttatgcccattttactaagggcagtttatgttgttttgtcccagttgcaagcactgacgtgaccaaatgacagtgctcggccatgcatgttctcagacttctcggggtgtgtattgacttattttttgatagtgagtcatattttaggagtcccggcaccccaaaaccttattttgatgtctgaaaccctaacgcgagaccactgccaccaattgggactagagagtggtagtggtccgccttggcttatgggaagctatagatggtgtttcttgcttatttcagtcacattgatgctagaaaactactttggtcacattggttcttggccaattgcttaggagagcactgccaccattttcaccaaaataagtggcagtggttgcataagaagcttgtgaagccttggggtgacttttctcacttatatttgatacattgatgttggaaatacaacttggccaatgaaactcctccccttatgaggtggtcgaccactgccaccaattgtcccaaaagtgtggcagtggtcgaccaagtggtttctacaccacttaatggcttctttcacttgattttgacatattattggtgaaaatgtactcttggcaagaaatctcactccccttcttcatggccaaccactgccactcatcatgcacaaagatggtagtggtcagctaggcttgctccttggtgggaaatagtttccttcacttgttttgcactccttggtaatgagggaaaacatttaaataatttccccctagtgctttgtatgtggcgatcactgtcattcccttgtggcaatgctctccaaaaattggagagcactaccacttccttgtggcaatgttctccagaaattggagagcactagcattttcatagggcaatgggcgcataggccttattccatagggtttttatgctattttaactttatgcacaaatctaagtcatttcatgcctaaatgagtcaagtccttgtggatttccttagcagattgaggtctctagggtgaaaacactcgcgtgggcccatgaaccctagtctgggcacatttgggtgtgtgagtcccgacaccaaatagttggttaatgttttctagccctttagaggtgccatggggcccttaagaaggattccttaactcattgacatttataagtcttggtaagtcgcaaggtgacttttttatttttcaaaaattgggtataacaaaaccaatttaatttattcaaacgataatattttgaaaactaatcaatatatataataaattaattaattaaaaattataatttatgaggtttaaaataatttgtatatttttattaaaaatatatatataaaaatatgaaaaattaaaatttgatatacttttataacttaattatcatttaaaaaatacaaccgcaagcgaagtgcggtttgtttcttaatttttattataattgtagcccatgggtaaattaacatttactaataatatatgagaagttctatttgcaccacataagaagctaattacatcctattattaaaaaataatttaaataatttttattaattgctatttttttatttttttttctcacatttatattaatttcaatacttattttagttttaatttgatatatttttttctctaaactatgtatatatattttttaagaaaattttatatgattttttaatttaatttttttgtctataatatttaaatataatttattttatttaataggtatattttttaagaatataaattgaaagaaaaaattaaaaaaaaacttaagtacaattaa

SEQ ID NO: 304566 - DNA, 1566 bp, Cannabis indica
ctctctctcttgtacacgcccaataaggctctcttctctcttcttctctcacacgcctctaaggcaatctcactttcactagagatcaacctactgattcatattttgtatccttatagagagttatattagatcccacctacaacgatctaaaaaatattatctttaggtatcaatacaactaaaagaggagtaggtcattacccactaactaaggagaccgaacctttataacaaatttttgtgtttattacttttctattctattcgtgtaacacgtggcaagcatcagatccatacaaccccactgtcaatttatcactttttgaagtcaacactctatagtcatacacgcctatacatatatttatacatatagtgtatgcagtttagagtgttctgataattcatgtcagataagtgagttttgagagctataatcttatatattgtatagtactcaatttttacttaatgttcttcagaaaaagtcatgtgctaagaagtattgagattttcccaccaaaatcaagggattactcaggatagtgtggaagaatgtgaagtctttcaacaaattttggagaagatctaggtttgaattcttgataataccatgcgacaaaaaaaaaccaagagttagagaatttaaacgaaataagtcattatttatgttgcataattgtaaagtttctgaaactttgtttatttttatttttataacctagaacgaccaggtgcaagagataagagaattaaggataccttccggaaagactaatccaatccataatgatgtactgaaaaatacaacatttttattacccgaccaaccatcaggagaagcaaatacaacgggtaccatgtttaggatgttagattagatttaatctaacatacttgaatagtaaaataatctttccaacaatatcttaatgggaaattagagatttgccaatttcactacctttaggttaggcaattcgatccttgtgcgtgtatggaatttgaggtggagtgtttttggactatatagttgtgctaggagaggctattttttgtttataatggtggctttccatgggaatcgattcacacacaactgattgatcggaggatggtttgattggggacgaaagtggatttttgatcaggtacgacaattaatttttgatcagagaagacgaacaagctatggtgacaatagatgagacaaagtggtcactggtggatggacgaaggcgtggtcgtgccgaattaccaaagttcatgggagagagacaaattaatacattggctcttgtgtttactgagttgttgtaagaaaactaagagaataaatggaagacttcttcagtcgtgaatagtggagtataggtggtattcactggtttattgcaatgtatattttgcttgttcaaacatggaatacgaagaagatgtattttgggagaagaaggagttcacgaatgttagttgttcgaatttaaaacaaaaggggggggggtgctgttaggttttatgccctaaatataactctatttcaatgtaatctattttattcaa

SEQ ID NO: 304567 - DNA, 2778 bp, Cannabis indica
aaataatttccaacagatgtttccttctgtctttattagattccctggtttctttcttgatatctactgattattttgttcatttgaggaatgatttccttccgaagggatactttgctttcagttacgggtaataaaatgatcctagcattaactctcgtcatgtatgtttctccgatgggagtgtgattttgttttatcttgctttaaatacccttgttctatggaatccgccttcctacccacagaaggctggttcatccgatggtgggttagatggaaggtgttccttgtttgcacttgatcctatctgacctatggctttgaccgtcagtttcaacttatctcggaccttgacttttgggcgtgctactgaatgcgccatcatcacttatttcttttttttgggtttgattccttcattagttatcactccgagcagcgaacccctattttgtcctttcttgagtctttcatactttgtcgttatgctccattttgtcttcttgtggccttgtgagttttttattattttatctatttgtaggccgctttgttttcctccattttgttgggccttattattgggagtatgtctaattgggccttggcgccttttccaatctctaattgggccttcatgccctttcccattttctccccccaaacaggcaccaagtaatagaatggctcggagaaggaggttggataaaggaagatctataatatggaagagagtgagaaacagagtcaatacattgcttcacattatccattttatgattatgcaccttatcattccggactctccatatcgtgtccacaacaacaaaagcatacagaaaaacctcgtccgggtttacacctttacgctgaagattctagatgaacttaacccaatcccaaactctaatcccgctgtcaaacataggaaagattccccatggggaaaagcgccacgggtgataagcaaaattgcgttgcagaaacatgggcttagatgattcctgatcagtttcacaaacagggcaacgagtgtcctcaatactgaaccgtttacaaacagtggacctggtcgagagcgcatcaaaaagaatgcaccaccataaaaccttgtgacgctcgagaatcttgctattccaaagcttgttctaaagagctggagctacattacagtaggggtttcttatgagggcttcgataagataggccgacttacaagagaatcggccattacctcctcagtccaaatccaataatcttttccttgccccgtaggactaccacctttcaagatgaccccaattatttcattcatacaggttatgcagtttctgaaggtcacagttcccctatctgtcaacatatcagccacttttccagacaaaggaatcagtgcccccgagctttaagaaaaagattcttaccgtgagagattcaagggtcatcccaaatattcgtatcttttccatcagtgataactttgcaagcgccttgtctcaagatatcattagctttaatcatatttttccaaaaccaggaatcagagggcttggccttgcgcttaagtatatcttttcctctcaaatatttaactctcaatatttggcagcatagagactggaatcatgagagcagtttccaaccctatttggccaagaaagctagattcatttcttttattttccgaaaaccaaggcccccacgagatttagggaggcacatcttatcccaagattccaagtgaatcccatggttgtccttatcaaatccctaccaaaagtcacaaaccataccatcaatctttgtagcgagctaactagaaagcttaatagtttgcataacataagttggcatagccagccccacaaatttaatgagggtagcacgtcctgcacgtcctactttagacaacgtttttgctttccaaccttgtaatttggaagtaagactcaacagaaggaaattcaagtctgcatccttatctcttgatcagaataaagggagacccctctatcctagaacagttaattggttgcccaatcatttgcaaagcaaactttatttgaaggaatgatattgagtgggccatcctcgtatcaaatctcttcaatgaggcagatgcttgatcaataaataatcattttttaaaaaataaataaataaagagcaacaggttggcaacataagaatttgccaatataagaaattatttacagaaaaaccatcccagaagagactacagatagaaagtgtgtaaactatttacattgcctcaatgatgaaacacttctattcttgtacatgctttgcatcaataggagcaaagaatggcagaaggacctgtacagcttaattgtgttgcataatgaatgaacaagttataagcagttcacgggaatctgttcttgaaattttcttttaccaatgcgctatcaagctagttggagttggagttggagttggactcaagactcaatcttttcatacaaatctccaagagcacggtataggacagcagcagctggtggcctaggtacagaccctagaagaacatctgctgcagttaaagactgattgccatagaatttggagttcacatgtcttcgagtagtcacaatactcccttcaagtgaacaacccacaaatgcccctgcccaaaagtcaacatagaacaggatgtagatgtatgttaatttatatttttatgcatgtaaactgaaatataaaagggaaatttgattttctaatacttaaaaacttaaaaaaaaaaattaa

SEQ ID NO: 304568 - DNA, 1688 bp, Cannabis indica
ctctctctctctctctcgcccactctctctactcgcaccctctctccctttcacccaatctctctacttgcaccgctattcctctctcacctaactctctctcttgccaataatcaagttcccccaaattgcttaacacctcacttgcgggcatgaggccaatctccgaagtgtttggacatatctcaaaaatcataagtgctagtttttggagtcgacatcggattcatcgccgactaatctcaaaatttagaggagctaaaaaactctttaagtgtgtccttgctaatcacccgagtagtagttggctaatctcaagagttatccttgctaatttttaggattaacacttgcaccctagtctataacaatacttttatgtgttcttgtacactaagtttgttgagatttactcccatctttaagttccgcggtgctcctttaaccgattatgccttgaggtcttttttccatgatcctttatgggagaacattggctctatttctttggatggtgcgtgtttgtcatgtggagggagagcctcttgagctttctcgacttcttgtatgagttataattttttgaggattctttttgccacttgggctttctcaacttattttttttggtgcaacctcattatgtagggagtatagactctttgagtagtctcgatctcttattggttacttattagatataagggagcttgtggcctttaggcagtgctcaacctcttacactgtattcgtggaacttaaagtgtgttttgaatgatataaaatttgtatgccttttagagaggcgttcgcctcaaagtcatatctgattcctcttttctcttcttttttttacactgcttcgttcactttgaaaatttcaattgacaggtatagtgagaaagtaaaacagacatgtggagagtgatgattgccacgtgtaaagtgaaaacttaacatttcattgataaggaaaatatgtgattgctcgaatacacgtgctatgttcggagaccagccttggtatcctctttaatttagtacaatgtacaaaaggcaaacttgcctttgctaggaacacttttccatataatggaacttcactttgaggaacatcttagatatttaattttacaagttgtagagcagaggctttacttgaatgtatcagcctacgggcattgggggtatcgtctaatagcccccgtagggatctaacgaccttcccaaagaacatatgcttgtatctatttttaagactctattaccctcctctacacggatgtacttctttgcactctcatagaagtcatctatgccattcaattctcttttcaacatattcccccatagtcaacttccagggcgtactccagtagctatggcaaacttgagttaattttcagacatttatactattttggtgacttcagcattgcaacactggatgtagctttacaagctttcttgttcccctttcatcacattggtcatacttgttatgggcataacataatcacacgcagcctgatgcaattgaaggaattattctgaaaatttctaccagaatgtgattgttcatggttctagccttttgaatcacttatatgcgactcccttaagtgtgaccacaaagcattgacacctttccttgcataatacctttttcatcttcattagctcattaa

SEQ ID NO: 304569 - DNA, 1095 bp, Cannabis indica
ttcaattcatttacgtcaatccttttaaagaatttaagctttaatacagcttgttcagtagagtaaaatgttatttttttttaaatattaaagagttcatttttactttttgctctagacttagaacgagttcctttactaaaatgtccattcttgatacttgatttcttaggcattagtaagttaagatctgataaaaaatatatatatataatcacattataatttagactgtctcatcaaaaataaaaataaaaaacttgtttttccacattttccatttcgaaaatcaaggtctttcataagtatataaaaactttataattattcactaaaatatatcttaaatttctgattacccagatcttcaagcacccaaccacagacctcaaaaccatctttctcactcaagagatactgaaaatgatagctttaaagaacagcaatttatcaatttttaataattatttcaagaaaaatgaaaacccattggaataaaagtagaaaaaaagagtagttctaattttaaaggagaaattgaagattaagtagattgaaatgtagcgacttgttcgaggccataatcaaaactgaattaatttgataggcacggagaatcgcatactgagtttgatatcgccaaccttcaatgcaaactgcgccatcttattattattcgacgcttttgctctgcaaattggctttttctatttttattttcatatgcaaatgttaatacgaaaaccctagaaataatagaagaatgtaaaggaatgaagaagaagggtttaaggtgcttatttatagcacttgttggatgaaaccctaccttctatgatactggcccaggcccacctaaaaacctcaacttaggtttgggccttcaacgctgtgctcgggcttttgtactacaatgtaaatagtgaaaattacatcaaatatgggatttcataacaaagttagaaaaatatggcatttttaggtttgccacttttctatggcattttttcacatttaagttttttatggtatttgatatgccatatttttataaacttattatccaatcccatattttatgtttttgtttttagc

SEQ ID NO: 304570 - DNA, 2121 bp, Cannabis indica
tttttttttttttagttttcttcattaattcagccattaatccttgctaccattgaagttaagttggaagggaaggatcaaggtattgaaattttagtggaaaagtatagtttatatttgagttgttgataattgagttctgtagagtttgcttaaacttaaaattgtttatggaatgattttttgttaagttttaagttgaattgggatagttttagcagtcgtggtttgagttaagcaagattgagttttagaactcaaaacttgctcaacaatggtgttttgtgaattttagtgtattgtgattgttgaattgtggtttatgcttagaactcgtattcaaaatgttctgggaggtttggcaggttttggaaaggtttggaaaagatttgagaagtgaaacctcaaagtttgtcgtttccaaaagggtccaagaaatgatgaatcatctagggatccaatgatccggttggggaggtttttgggaacctcaaatttcatgttttatctatatttagaatatttccatgctatttattgatatgtaaacttctagttttgaatttaagtcttagaatggaattaaataagatatttatcgatttactactattgtgacaaagggcccaggatcgtcaagtgtttcccacttaggttggccagtataccttaatttagatttgaggtaagaaaagtaattgtaccacttagcatggcatattgtgatacaataattaccgtttataataaagagttattactctaaattaaaattgttgttaggtttcttacttatcggttgtctcattaggcagcgatagtgacattgattgtctcattaggctacggtattaaggttgtctcattaggcaacgagagataatggttactttataaagtaacagtaatggtttgtcttattagacaaatacttgaagttaataaatatttattttgtgtatatggcctcctgcttttgaattaagaatgcgattacttacttttgattatatgagtattattagttatatatgtatgtcattttgtaatattgttttgttgcttttcttgttgagtctttgtgagtcacggggtctttatggtgaaagtaagggaaaaagaaagttaggggagccatgagtcagaggtcttctccaacaaatgtacatatcagcccatctgactagtagtgcctagttgtcagtatatttgtgttatgatgctcttgacttatatatttattcttatatgataatgtttaccgagatattcgaaaactaaatatgtaggagctaaagaaacaataacttgcagaaataaagagacgaatatttttgacatagttcgggtcttaataaaccttagtcaacgagtcagtttattagcctcgaagggcagtattgatgtgttacagtatttttgtaggaaaccctaactctttacccttagtttctttttcaagaagaagataagggtaatctcagcagagtttttgctaggtgttttggcttttttgcatgagaataaatgggtctttatagcctaagtggcaggtatggacaaacccatgacccgcctaagatttctgcttaaaaaatctcactgttgggtaaattacatgcaatgttagagctgactggatgatctcataggtaccattatgcccgtgcatgcaacagatagataatggggaccattttgtaccacttggacacgtgtcactcaaaggtccaacctttaaaagtagggaacacgtgtctctcaaagcttgttcccttacaagcatcaatgtgtcaagtctgtctggtaaaaaggtggtggtcgtggtacgcttaataccatgcttggatgggtcgaacttaaattaataaactcttatgctataaatttagcataggtaaaattgtgttttgcatttatttttaatactctaaatgtgaaattttttcttaacataatttttggcacgcccggtgggacccattctccttttcatctccaactatgattactattatttaagtttaattttatggtgctaatcatgtttaccgttttcaggaaaaaaatggcaccacaagtcacagtttacttccacaaactactgttgggttttatgcc

SEQ ID NO: 304571 - DNA, 2627 bp, Cannabis indica
aaaatatttttcaaaaacatgtttttttattttttaatttttttaattgagaatcaaaattttaaaaacaaaaaaaaagtcactttcaatatttttttaaacaatttttttttcttaatcaatatttcagactccgaccagacccgatccaaatcctccccacagccctagcgttgaactaggtctctgactcgaacccaaatctaaccccagacctagacccgacttaaataaaatcaaaaaataaaaatgaaaatgaactttacagaacacacttttattttctatttttaaaattgaaaaacaaaaatagttacagaacgtattttttttttcaaaaacaaaatttttaaaaataaaaatttcactttcattttgtgattaaaaaattagaaaacaaaaccgttaccaaacggcaccaaaataaaatgaaatttatgaaaacacattttaatttttttgtttttaaaataaaaaattaaaaatagtaaatgagcacattttttgaaaaacaaaaattctaaccttcatttttgtgatttaaaattgaaaaacaaaaaaattaccaagaaaaagtaagaaaaaaaggaaagaagggaagaaaaaaatctaaaaggtaaacctcgttagtcctgtaactaacccaaatcaccatctcctaaaccagatatataaagtattatccacaaggtccacattgatctttgaatttaaaaaaaatattgagagctagaaagtgttgtttaaacaaaaataaaatgacttgtcgaaaaccttatcttaagacatataattatcgagtctttcataaaccactttccaatggcaatgatttatctattggtttcaggttttagctcaaacctatctacacaagcatgaacaaagtaactgaaagcaatcaaaaaaaagaaactgaaagcatagtaacaagcatcagaaaaaagataaacccagcagataaatggtattaactgttttaaattatccattatgttcagagtgtaccttataatagctccattcagtctggtcaccagttttgtaggaaagtgggctgtcactgcaaaacgcaagctttgcagttgacaaatataaaattcccatgaccggaccagcagaagtggataggtagcatgcataagtcttccgaagctgttcctcagggacagtctcaaaattctgtcggaaaattttttcgtaaccaccttctgcaagcacctttgttccttgagctattcttccgacagcagcatcagcaaaactaggacccgttttcactggttacaatgagggaaaataaacagtgggaatcacaggtttcaccatcaccacatttgaaccaggttataaataaagataagcttgttttcttattttattttatttccttacggtaagaatgacatttgttttcaagtcaaaagaaagtctataaataaacttcagctacacagccaactaacacatggtagcaagattatactgtaatatattatgttcttgaacgtaataagtacaatttgttctcctaaaaccagaatttgggaaacaatatttaataacaataacttggatgtttaaaagatgacaataaatcgaagatgaacaacgtatatatgaactccaaataaaacaaagcaataggacgaataactcacagtgttgccacatattcccagcaagatcctcagccttcttggtagcttccgcagccttcttcccccacttcccaagaacatctttcactgaatccatcttatctgatcacaaaaatatgaaaccccaaacccattatcaaatatttccaaaccctcggatcacaaataacttttacttgacgattaataaatgaattgaagggcataaagataaaaggtatactcactcttggcggaggaggcaggcggcggtgcaggaggggccacgtagggattggactcctccggcatcgaggtggcggcatcggcggagatcggagcccgctcttcgacgtggatcgccgccggtggtggaggaggagaagcagaaggggattcttggttcgattggggttggggttggggttcgggggcaattgtaacggatgcccatgtctcgggctgcagaggaggaccgatgtcgtggggtatgagcttagggtatggagcgtagtcggtggaatgagaaggagggggttgatcggacggttgctgttgcttactcatcttctttcttgttaaacaacagatttggtggaagaaaaggatctgtctccaggtttgaacgattggaaagatagggacaaagggtcacttcacttggtcaaaatgaattgtcattgatattaccgtaacagtaaggatttgtacagttggttttctttttacttgtgctgtgtcacggacacttttttttttttttttttttttttttttttttttttttggagaaattgagctaaataatcctatttcaaaaccacttttttttaataaaattaccatttataatatttttgaaaatttttattcacactaaaaagatatagggtgattttacaatacactctcttaaaatagatgtattgatacacccttaacttatttcgacatctagaaaaaaaatttaagtctaatttttttttc

SEQ ID NO: 304572 - DNA, 2104 bp, Cannabis indica
gcattaacttcttacagctttcctaaatattattatattggttgccgaaaatctcggtcaacaatttcaaattttggttgtcacatgcaatttttttttcatttcttaaaggataaatactattttgtatcatgtgttttgcaaaaagttactaattggaccttctattttgttaaatgataaaatggattctgtattttctaaaattgtacaaataggatcctgaactgattttttgtcgaaataaaacttaataataatctgatctagagattttataacaaaaatggaccattttaaaaaatatagggtctactttttcatttaacaaaacagagggtccaattagtaaattttacaaaacacagggtctaaaatagtatttcccatttcttaaatatctatttagtattattaatgtataatattattattaaaatttaacatacaattttataaataaaatctatatttattttttatatataaaattaagaatatatttatgtttattgagtttttcgaagagtcacgaaggcttatagccttcatccggatccattatggtacgtggggccatgaatgatttcaatcctttgatattctgaagtgggaggttgcagaagctcgtgaacctttaatactttgcgagaggagtacatgtgtcaactattctttggtctgtctgtcacacgactcgcatgagcgcgtgatgccttgagttatggactaacagctggctatgtcagcaaaatattcaaggcaaatatcataattaatgtacacgtccttgattttgtggatcacattgatggcaatctttggcattcccgagatgttgcatctaggagatttgtgttttctcatgtttgatcttagtcatttggttgatcgcaaattcccttataaatacaaaggaaatcgactattcactttatcttctttgccatttttcactcaaactttcaaagataaacttacccaggaaacatttcccaataaatgttcaattttgccactgtgctttatgatcgtcttctccatctctggtcaagatttttcatatgcacacccccatttgcccccagtaacaacactagcttcctcgatcatccaagaggatgccgacaaaatttttaggaagctgtgcaatttttaggtgaggaactcagtttcgacccataatcttacaccgacagcctcgattgtaacacgtaagtgcttttccatttgactttagtactgcatttcttgtgtatttatgctctaggtagtatatcatatagggtactgccatgatgtggatttttttcttgggaattgctaagtaatttttttcgtgtggggcgatcttaagttttacactcgtctgagaactaatgaaatggtaggaaaaatttgaaaatagagaccttgtcatgctttaggaaaaggatattccttttgttgttgttggttttttccgactctcgagctcgtggatgctaacagtgttcccgagggctctgttgcttcccgctcactcggtctaggacccttatggttacaaacttcaatatgcttgtatttccttttccttttcttgtggtcccgatcttttatctgggggttatgttcattggggaactgacttcaagatccaaggtctagtggaacctctctaagcagttttcggggagagttctcgtgtacccttaccgtttgatctgtttgggtactggctgtttggcttctttctttttcatctctcaccatggccgaagaaaataaggacgtggagcgccttcataacgatggagatgcgaagcaaaaccagcaagagaaaggcagcccaacactagaggaatgcataaattctccttaggagatggaccatattactaataagtttcagaattactgaatgctgcaggatctggaaaaggaatgcgaacttcaaagtacctcttgtctgttctggaccaggctcttcttgaaggtgaaaaggctagctgtaacaccctaactaacttaggcgaattacgtgatttttaaacgtaataaaccatattacaaaagactcggatacccgattataaaaaatatttacaaaaagtttaaactg

SEQ ID NO: 304573 - DNA, 1116 bp, Cannabis indica
agataagagagggagagagagagtgagggtgaagggtttaaggagatgggggcggaggctggagaaactagaggaagaagaaaactctctaaaaggaggaacacggttagggtcttgtaaaacttataaatagtgaggaaaattggcctttgtttattttgtttttatttaagatgacagattcatgggttggcttcgtaaaacgcggttattgtttcagccatcggatataaaacataaaatttaatctgagccgttgatacaaaggcaatgagtcggggttacttacttaaaagagttgcaagcttagctctggggtttatcgctatctttttctggatccgccgccaacattgccacatgccttagagggcttcctccttattgttatgtttggcttcgcccttcatttcaaatgatattttttttaaaaaaaaaaacaaatacaattttgtctaattttattttaatttttttattgatttttttgacgtcatcgaatgatctcctgtccaatcgagagagcgagttaattctttttcttttttattatttttactgcggtgaatttggtgattcctaggactgggagtacctaaatcagtaaagacgtgtgaatgagtggattatgagaaatagtgataagaatgagttgcttgcagccttgcaggttgtacttatctatatgttcatcaccgtcatttcattttgagggtattttttttggtcacaacaattttatagtggattgaaaaacttattatttatcgtaatgcaatgaataattatatgttttatgtataattaatagaaactagtaaataatttgctgtggatatttaaaaaaatttaaatataaataaaataaagatatttttacactaaaaatacaaaatacacactttattacatatatatcttcacacggttaaaccaacatttatactcattaactttattttattacacttttaccacttgcacacacaatccatgcagccacacacgtcattgattgatgacttatatcaatcacaccttacatcattcccttatctttctttctctcttttttttttttttattattattttcaattttttttcagtttttttt

SEQ ID NO: 304574 - DNA, 957 bp, Cannabis indica
caaaaataaaaaagaaaaataaaaaacaagattgattattcttttttttaacactttatgtactttagaaactacttaatctatatagctaattaaatactagagacaaatagaaagaaacaattattagtagtaattttagaaaagttgaaagtggtaactaaaaaaataaatgaatttcaacttctttttcaactctactaatgcaaaatggttcatttttctcaccctaatactacttgttttcttagatcttaatatcttattaatattattatatctttgttagaagacttttaagtatgattgaatgtgactacctggccaaatctagtatttggcatatatagaataaatgttagcaatggcgcggactcgagaataaacttgagggaaggcgtgatttttattttttttaaaaaaaataatatgataagtaggaaaaattattagaagttttcgagtatgaatttgaactatatatataatctcgtgaacatatagaaataagcttaatcattgaattaaaactaattctttgataatatttatcattttttcgagagaacgaatgcctaaccaagactctatgtggatccgcccctagagttagtgtggtgtgattggaaaaggtatcatggatagagatgatacgagtagtagtacacatggattggattttgcgagctttgagttgttagattcaggttttacatagttggatttgaaaaaaatgagataatagggtttttattcaaattttatgagtttcagacaaatttaagcgtttcatctaaaataataatatagaaagatagtttatgcaaaacacagggccggccttgggcataggcggactaggcctgtgcctagggcccacttagtccaggggccccaaaaaaaatttgcctttttaaaattacacaattttttgttgattttgaaaaataccatttt

SEQ ID NO: 304575 - DNA, 2075 bp, Cannabis indica
tttgccaccaaaaataaagataagggggtttcgccgcaaattgctaaaaaaaaaacatctatatgcctttctcttttttttcttttttcttttaaaataaaaatcttactattatacttaaaaaaaaatataattattattttattattattagatggaatttattgcagtttcctcttcgattttaagaaagatatttgttagatgagagtatttatggcaaaagtcagagtgatatatatattggaggttgagtcataattgtctgctatgtatatatatcttattagggttttgttgtcctccatggatggaccacttgtgtgtgtgaatgattttatagaataatagagagagaagcccttgtccaattttcttcaaatttttatttttattttttatctcaacgaggtcctttgaagcaatgtcggtcgatgatctttctctttcttttcaaaatagatatttaatctcaaatttctatgaaaaaaaaatgtattatatattttcaaagtatttttttataatggggatttccaaagcttctaattttattttttttttttttaataattagagaaccttaagtctctctatattcataaatatcatatttatatcatttatggtgcgcaaaatgatatatatagttgaaatatataattagtaatcacactgactaatcaaaataaaaaataaatatgatttattagtgatcacagttagaatcaatagcattaatagtaatgtatttatttctaataaataaattatatagacaaaaaccttgttctataaataataaaaaaaaaatcaaatttataatgacaatttaccatgattaatccacaatgtacaaatgaattattattgaaggttattattctgacatgttagttttgaatttgattttgttgattttttattgtgttttaggaatgttaatgtttttttttattattaaagcgcttatatcataaccttccacacacatactcttttacgcctcttatgatcacttaaattaatcttaaatagttgtcaaatatgtagtgttcaagctctagtcaactgtgcttaaataaaaattactgctaataatgtttggtggcttaactttaaaattgactatcccaaattttgtacaactttcttaatcacaatttcttttattttttatttttaataaataaataaataatgaccatcacatgattggtcttaccatagtacttttacttggtatttcaaacaaaagttaaagttattttactttatatttgtaaatatgcatatttaaaagtattaaatacaatattaattttattaatttctaatttaagaattatgaattgtgctgttaaatgagttgaataataaaataaatccccaagcatgtgacataatgcctacctaatatcaagcatattgtctgatcatcctctgtccaaacttagatgtctctcttaattatagtttaagaaattcacatttttttttaagtctaaagtttgaatttctcaaccaatgtcaaaaaaaaatatagattctaatttcacattctcttaatgtaaaacttttacatttttttgtgcctaactttcgacattactttaaactaatctcaaaatttaagtgagaacttgtgtgaggtagaaggtgaagtgccaaagtgccttccattcatatctagtggataatggagtacttgggttcctctattgccataaattgctctttgccttattttggtaattttatttatgttttatagatttgatttttctgttattttatgtagattttgtccttattttatttggattgtatttttgtttttccttcatggaatgttcttttgggtaaaattagttttcttttgagattggattgatgtaaagtactctaaatttaggtggtgtttggtttactggaatataattgtaatggtaatagtaatagtaatggaatgtaatagtaatattaatgagattactattaccatgtttgtcaatatattaatagtaatcaattttttttatttggtttagtgtaaaaataaaattaaataatta

SEQ ID NO: 304576 - DNA, 1966 bp, Cannabis indica
tactcatttctacatatagctttttgtcagacaacaactacgtgtaatgcagagctaatgagaaggacactaacagtgtgttacaacttctaaatatgttcaaaaaagcttctggtcaagtcgtgaattttgataaatctttcgtgttttttagctcaaataccagtgcttacaatagaaacagagtttgcagcttgatgaacataaaggaagttgatgaaacaagcctctatctaggtttccatgtatggttggtagaaataaaattgccattttgaagtatatcaaagataagctcaaaaaagaatttttaattgggaaagtagatttctttcaaaagctagtaaggagattatgctcaaaacagctgctcaagctcttccaagctttgcaatgtcagtctttcttctccctataggaacttgtcatggcctagaaagtataatgagtggctactggtggtaatctaagtcaaaaacaaagtcagggtatcagttggatgagttggaaaaggttgtgcagacacaaacattcaggtggtattagctttcgggatctcagaaattataaccttgccatgcttggcaagcaatcttggaggttgttggttaacaattcttcacttgttagcaatatttataaagctcgttattattcaaatggttcttttttgactgcaagtttaggagccaatcaaagtttcatttggaaaagcttaattgaaacacaagatcttattaaagctggtgcaagaaaatacttcggtaatggcctcaacatcagtatcctcagagatctgtggttgcctgatgaccttaacccctttgtgatgacttcgaatccaggtttagaggataaaatggcagcaagtctgctgcgtgtgaaacaaagatgatgggacactgaggtggtgtctgatatatttactacctgagatagctccttgattctacagattcttattagttcagttgtgtgtgatgactgctggagttgaaagatggaggcctctaggctatactcggtgaaaagagcatacaatttcctcatttttgcaactgttacaattgacctgcatgaaatagcagcaagtggaagaagttttggcagattcatactcctcccaaggttctccattttggttggagggccctatctaattgtcttctaactaatacacagctgcaatcaaagcatataatggcgaacctcctctgtccattctgcaatggagaagcaaaaataatttgtcatgtcctagtagattgtccttttgcaaagttgtgttggaatagatcaagtgtggaattaggaggtacatctgagacaagcttcacggtctggttctagaatatgggtgatgtaaattctgattctagtgtggaagaggctttaatgatcaattgggctatatggaatgcttgtaatgacctgttatggaatcaaaaagcatcgacagccgcgacagttgttctttcagcatgatcaaaccttaatgaatagaagtgtgctcaacaaaagagaatggaaattctttttattctttggacaaggtatggaggatgagcgttggatcaaacccgtgttcaatactattaaggtaaatgttgatggagttatcttccaagcttcgaattcttttggttgtggtttcttagctaggaattgtgatggtacccttattgaagtccgaactttactcaatcatggttgtgtctctcctaaagtggctgaaatgattggtattaaggaggctctaagctggattaagtttcaaggttggcacttggttacagttgaaatagattgtctagttgcaatccaagcaatgcatagttatgtgtacttaccatcctactttggcctcctggtttccgattgcaagtaactgcttggtgatttatctttgttttttttttttttttgagtagatggtgatttatcttttgtttctttgaattttgtt

SEQ ID NO: 304577 - DNA, 2104 bp, Cannabis indica
agaaaggccaactcatcctatttaaacacatatttcaatccccaaatttgccaccactaaaccaccaaagaaaacacatcttcatgagtttctgcaccaatttcttcttcataataacataggcgtttccccttcttcatgcatttataaatgtagattgttctcttactttcacaaaagatcaaaatcgaaaaaccaccctagtgtgttgagtacagttttctagcactttctgcagttaaacctataaatctttccatttttatgattcacaccaaaacctctccaaataaaaagatatacagttcaacatattataatacgtactagcaattatatatatatatagtcaaatggatgcctttgatccttcaatcaccctacctttccttactcattcactacagctatcagcaacagaagtagtgaaacgagcagtagcgcaaattccaacagtgttctcaacattgttacttccacctggatggacggcaggatttggagcagactccctcagaggcttctcgaccgcgtgatagctttccttccagcaccagcatttttcagagctcgctgcgtctgcaagagatggtacgccctcttgttcaccccatcctttctcgaactctacctacaagtcttaccacgccgccattgtttcattttcttcaagaaaaaaaataacctcaataattatgtctacaaatcaaaccgtgacaataataacggagatcatccccaaaacgacaaaccatcatcccaaacagccgcctgcgagggttacctcttcgaaccttatgagctttcatggtacagaatctctttccccagcctacttccttctgggttctctccagcttcttcttcaggcggtttgatctgttgggtatcttacgattctggtcctaaaacgttactcctctgcaacccaatggtaggctcgttaacgccgttacctccaacgttaagatctcgtctattcccatccgttggccttgcggttactcccacctcagtagatgttactatagccggggacgacctgatctctccgtacgccgttaaaaacttaacggcggaaagcttccacatagacggaggagggttttactccatatggggcacttcctcttctcttccaaggctgtgtagttttgaatctggtaacatggttcacgtggaagggaaattttactgcatgaactacagcccttacagtattctggctcacgacatttcttcaaacagttggtggaagattcaagctcctatgagaaggtttctgaggtctccaaacttggttgagagcagaggaaagcttcttctgattgcggccgtggagaaaagtcaactgaatgtgccgaagagcttgagagtttggggattacagtcgtgcgggaccacgtgggtggagatggagagaatgccacagccactttacttgcagtttgctgaggttgagaatggtaatgggtttcattgcgttggaaatggagagttcatagcgatcatgattttgggaacagatcagaaaatggtgttgtttgatatgatgaggaagagatgggagtggattccttcgtgtccatatgtccctattggaggaggtgatcagttgcatggcttcgcttatgagcccagacttgccacgccggtcactggccttcttgatcagctcactcttcagtcttacaacctaaatggctagctaataataattaagtagcgtaatttaatctatatattcaataatatagtatcaatttctgtgttaagtaggaatgtacgtggctgctgagacgtaataccaccgcgttttaaattaattaacatttaggttaggaggaagtactttataatgtaatcatatatgctgccatgaatatttggttatgtcgaatgtgctgattaatattagtccaatattgttgtgctaagagcatctccaggatatatcaatttttagtgttacactatcacccaatttgatgtcaaaaagtatttttactctaaccacaaaactaaaaattacactaaaaaaatatttcttattattatattaattttttaataaaataaaaaaattaatatcatcttaattaac

SEQ ID NO: 304578 - DNA, 4347 bp, Cannabis indica
attggtataatttaatatcgagtttttacttttttttattcccctaatgatattgatgcctaaggctaactccaataaaactacttgtatattaatatttatcggtcaagtggagtcaaatagagtcataaaataatattttatagcatatatcaaaaatagattacaactagtcctaacactacttaaattatctttatattattattaatataattcagtatcacttttcacatttgttttttatgtcatgaatgatattagtgaattttattaaattttattggcgaagtagagtcaaataaggtcataaaatattttattttatagtagaggttacagccactcgagttgctctaataccacttaaaatgttatattattattgaaataatttaatgacagtattcatatttactttttgtgcctatgataaactgattttatatacaacctcgaaaattataaatccatgagaaaagaaaggatatcatctaagcacacaagttctctattcattttaagagcattttgaactagtctatctccattattattagttgaacgacgagtttgaactaagaattatagaaaactagacaacaaatttgcagttcttttaacaaagattcaagatcatcaaaaaaaaatgaattacgcttaaaaagacaaatattaacaaccgctaaacaattaaactcaaattataaataaaacccaataattagagctcaatccattcacattatgttactcaatagctattatagaatggccaacaagctacaacataaaaacatccacatcataataatattctcacttaataattattataaaaaattactaactactcaataaaaaatatactaacttacttcataaataatgatataatcttacacaatacttaatgtaacaatgttagacaatacttaataacaatcatcccatatcatctaaacatcatactatcacatctatacatataagatgatatttatcctaaagagaaatgctaaagtgtaattataatatatatttaatttatatatattaattattttaaaaaaaatcaataacctatatgtctaatacactcaatattttgtccaaaaactaattcacaaaagtgacacacaaaagtatctaatgtcacataataacattagaaaaatatctattattttcattctttattattttaaaagaaattattaatttaatattgtagcaatataataataaaaactagggcagagtaaacatgggagtcccacaaagtataagatatgtaaataattcacatggaaaaacgacaaacggattaaaacatcattggagtttggatatggaatcctagggctcaatacacctaatatatcatactaaatcaagaataatcaaaaaaaaaaaaaaagaaataaatcaacatctaatattattttattattagaaaattaactaaaaaaatattattggtatctagcaactactcagtattatactgcaattaaatatcgagtcttatataacttaagaaaataatttttaaaaaatattattaattaatcacgaaacgttacctataaaatatcttgaatatcattggtgcttaataacaatactaacaatacttaccattatatcactacttgagtatttgcaaaaacaacatacccaaatgaatcaattaatgaaatctcatgttatgggaatttattattgtttgcttttgcaacaatgcacttgaatttcaataaataagaaacttgttccaaattataatttaaaatagtgtagtgcaaactttttttttatctgaagaaggggattgggtggtgcagatctcttcctcatcctttcagtcattttggcaatctcgaggaccacgtgttagcaatagaggtcttatacctcaacctttcttaattgggtcatcgataatcacctcaaaaattcccatcacacgaatgacatcaccgctaacaaggaccaagcctttcttaaattcctttcaagaagggctatggtagatttcgaacccttaacccaagtaagagaggatgccagtaaagacagtccctaccactacactacacaactcgcaattagtgtagtgcaaacttgtggtctcctttttgtcatataataatataatcaaacttttgaatagttaaagaataaatgattggaaatttatatagtacatcttcttaaagggtgttatggtagattcgagtaagtgtaattatttaagaccactttaataacttgtagtatcaaaaataatttataagtattttaaataactaaaatgaacattttcacacaaataactaaactaaaaaactcttgtacttgttgaaacggataataatttgtttataactaattaaaaatagtaatatactacacaataatttttttaaggccgatcttagactaaaacagatattaaaaaatctcaacaaaagcaagatcgacgatttaatccttctcactattaaacataaaccctaatactcatcccgaccaagataagtctctcgaagaatctttttgagagactatctaaatcgggatgaaaaatatttttaaataattatccttttttttcccacacaagaaacaaaaagaaaaatctacataaaatttcttagtagaagttgaagaagtacaatgcaagaaaggcaagagtgaaaaaaagaaaaaagtgggttcagattcagaaatcacagactgaccaaatctttcccaaattcccaaattgaccttcactttcataattatttacatttaaacccccacatccaaaaaaccacactaaactccggtaacagtttttccccaccggaaaactcatacatacatacatatatatatacacacacaattatatgtatatatataaatataatcatcatagaaatataaaacattccaatgaaactaatgggttatcaagtgactcatctgtattattattattagtattattagttcttgttgtggttctcgggtcaacgagactcgacttgacccgacccggtgatctgcaggctcttccggccgattggctccgacccacgttcggtctggtagttgccggagacctcgacctccgtggagctgacacttcaccggaatattcccttctccggtaatgtggcagaggaggcggtggaggcccacgccacaggctgttgtggttgtctctgacccgacccgacccgaacccggacccatttcttcgacccggcgactggttggatctgactactcctcttcccaaatctccagaaaacgatcggtgataattcttcaacggagaagagtgtctgtaaaccctagctccggtgacttcgtcgtcttcgtctctggtcagagtcgtggtggctgagacgctctcgctctcctcctcttcttctccgaccgagatctcttcttcttcttcttcctcgtggtaaaacggcggcgttttgtggatcttgattttgtcttcgtctgttaatttaacaatgggtaagggtttgggattagggatgttgttgttgttgttcttctttagttcttgttcttgttctatgagttttggtttggggtttggggtttcggagaggacttctttgacggtttcttccggtggtggtggtggtggctctgttgatcggtcgtcgggatttggaatctgaggtgatgagtcgccatttttcccggttgtactagcacagcaacccattagaacggtgtcgtttttggtttgaaaggttaaaagagcatttgtgttatgagtaaaacggtgtcgttttttagggaacggtgtcgtttttgtggtggaggaattagtaatggaacgagagaaagaagagagtgagtgagtgaggtttctcttttggttatgaagagagagtagtgagtcaatgtgtgtgtatatatataaatatttatatatatatatatgcatttattattgtatttattattatagcatttttttacatctcacaactactcatggtcacggctatgaacaaatatataacctatacatatacccctatagaaatactaagaggcacattaaatttgacataattatcacctataattataaagtgtattttaatataataatatatataaaagaaaattactaaattgtgttgttagtgtctagtatttttttgagtaatttgcggcaaaacccccttaactatcaatttacttgcaaaaaaccatccaacctcatattttggtggggaaaaccctccaaaagtactaattctgtttacattttaagatgccgtctgtccagctcataatttttcccacgtggcaatgaca

SEQ ID NO: 304579 - DNA, 954 bp, Cannabis indica
agtgtatgttacagcagcttgaaatgaagtactgccaaaaacgtcaccaaacttgaaataaacgtcttactagagagcagagacttgttttgccttggatcaaaatgtttctgtcagccccattaactaatgagtttaataactttttccattactaaatatattgggtaactatttttcttcaaagaaaaaatagttcaatactagtccacacaaatctataaacagaatatgtctgagaatcatctttgtcggcgatgaagactttcccacaattgcagatacaatcgttcattgttggacgactctgtccgttgaccggaatattattgttattaatgccttggatgttaatccggtgatgatgatgattgcttcgacagtgacgtgaattaagattaacatttctgtatcagatgccatactaatgcgctctttaatcataaaaaagtaataataaataacactccattcacttgcaataatttctttttccaaaatagagagccgtagtttaaatcaaatgtcatgaaatagctatctaaatataggaagcttcttaaggttttgctgtaaaagaattctcttaatagaaagagatcatgattgaaatataatagctaatttaactaaaatttaataaaatactaagagagtaagttgctcttaccgagaaagtttttggataatttacatgtacatacgttttttgtctttcattatcaataataacttaatctatcacaatattaattttaacgttaatttctaacgctttttaaattattatactgttttacattttataacttaactaacagtgattttttcatttgttttttatttaaaagacaaacttacataattaaaaaaattaaataactatacataaaaagaataaaataaaataaatatttctttctctcttctctccaacttcaaaaaaaaaaaaaa

SEQ ID NO: 304580 - DNA, 1630 bp, Cannabis indica
ccaaaaaattaacaatattttaagtgctaaaaataaaatttcgataaaagcacaaatagtacccacaaccatattttcttttaatacattaatattaacatgtgtttttatggtgcacccctaaaaaatgagtgcacatatacactcttcctattttcgatttctaaatagttataatcttaatttatttatatgatattatagatcataattgtttaaggcatcataaaattttcgaaaaatctaaatgaatttacaatacaaaaagtatgattcaaataatgtattccacatgcttataaaataaaaacgacaggcaatatttttttcacaataaactattctaaaagtttctaaaatttataggaatgtcttaaaactcagacatacactatgatactaaaaattgagattataagtaacccttcaatcattcacttcttcaatgaaactgacactaatcctatccctatacatatataccgaaatagataaagttacattacattagtttctcttaattagagcaacttggtgataataataactacttataattaattaaccagaggtataattttaacttttaatttttgataataaccagagaataagtacaaaacttaatttgcaatagtgtagaaaaatcgaaaatctaaaagaaaaacgttaatgaaaatacattactaaaacttttttctttcatttctttttgagtgtcactaagtcaaacttgactgcagagtgcatactaacagtaacatattagtaaagttaattagaacttagatgtatatatagaatttaaagaattgaagaattcttcagaaaattgtatatacaaattgtaaattatataatcatcaatttgatatttatataattgagattaattgcgtacctttcgaggtggagaaggatgaggactactatatgcggttactgttcccaggtcccttctgttatccatgccaattaccttgtgtttgagttttgaggaaggaagaggaggacgacgagaggtggcgttcttctgaagaaggggctccgacgcagtagcacgcccactggtgaataactgggaatcatcaccatcaccatgaggcatattgtcggagaaaaaacaccaaccatcatcagcaaggtgtttccacaactcatcatgatcagaattattagctgccttatttggatcgtgatgatctgtagtcactggatcatcagcgaagaagctagttggagagaagtgatcgaagctcaccggaggaggtggaggtggaggagtgctccctgctgatgatgaatccccaatttccctcatcactgtaaacgatcgaaagagagagaaagaaggtggagtgaaattatttagtttagatctacacatttaagtcaacgtcgtctgatatttattattattcatgataagaatttttagaaatgagtgtaggacctcttttgataaagtcaagctgattatttagaacatctctaatcgagagcgtctattgctattttctaaaatattttgttaaaatatagtgcatgtttggtatcataactaaaaaattgttttttgaaaataatttaatttgtttggccttgtttttttaaaatagttttcagaaaa

SEQ ID NO: 304581 - DNA, 1155 bp, Cannabis indica
aaataaaaatttaaagaataataaaatatattttttttctattttaaaaaacaattcacttttagtcaatattatttttagaaaacactaaccaaacgcgacttgtgttttaaaagcttcaaaaactattgttgttcttattttttaaaacacttttttgaaaataaaaaatttaaaacaataccaaacatactctaagtctttcactatattgttcttgatattctttttcttaagtttgtactaatttaagattagaacaattggaaaaaaagaaatttaattagtctctctcttttgagtgagttttccttttgtgactttgttctgtttagtattggatcacttttgtcatcttctgttgggtctacatcttttggatttgttttgtcctctattgttcttttttattttctgttttgttctatctacataatggcttctagtggtacgcctgatgcgggtataacaaaatcgtgggctgatttatgtatcgaggaagaggaagaacttgaggcagtttttgatgaagaggaagacaatgagcctgattttgatgacatatggtgtttagttgggaagctcttaacagggaaaatctccaattatcaaatatttcaaaacatcatggctgatttatggaagctaggaaaaggaatgtatgtcaaaattcttaggcagaatcggtttctctttcaatttttccatgaaattgatattcaaagggtcctaaatggcagcccttggacgttcgaccgcaaacaactcatcattgaatgattcaaaccaggaatgaacccgaagaacacagctctgaatacacttgacatgtgagttcaaatccatgaccttcaaccaggcttcaaaactgagaaagcaattctagaggcaggacgttttattggtgaattcattgaatcagatcccaacaatttctcaggggtgtggcgtgattactttcgcatctgggtccgtattaacattactttaccccttaaaagaagaatgaaattcaagaggaggggtgaatcatctttcttttatgccaatttcaaatatgaaaaagtagtaaccttttgctatatgtgtggtgttatgggacactccgagcgattttgtgcaaaactatatgatacactgttggaaattatttta

SEQ ID NO: 304582 - DNA, 2310 bp, Cannabis indica
tcttactctctgaagaaaagaaaaggcctattatgatgtgattcttttgtaatataacagttaaaaagtctgtggactacacattatagggtatgtttgttaatcaccatttcctatggctatggtagcaaatgaagttgttgcaaagattcgagatgtaagttgaaactcaacggtgtagtagttcttcccgtctatgcttttctgcatgtataaaatttaggctcagtttgtaaagagttttcaatattttgtaaaccaaaaaaaaaaaaaaaaccgaaaggtgaaatatttccatttgaaaatgatgaaaattgataaattacctcctgcatgtcaaatattgtggctacttgactaggtgcagcatatctatgtttcaccaaatcaggaatgacctacttgattcaatggagagaaagaaagctactcagtgacataactatacttgtttgagaaaaagattgaacaagccatattattaatctttgtttggattttagattttataaaacaaaaattttgtgtgtaaaagatgaaggaaagcattttcttaaaattctaatttttaatgttccatctttatgaataaatttatagttgttctaaacattaagatactaaaattctatgaaattccatttcccccaactagagagttagtaactacttacctcttccattggacccatgtcatggatatctttcttatctgttggtaggaatcttactctaacattttggagctgtagatatctgtccttaaaagcagaatcatgtgccatgaagtcaaagtcctgaacaatcaagaaactatagatggttatcatcttatgattgaaaatgtattattaaatccaattaatccaaaattttaccattttgaatttattgtcttaccctccaatccgaagggtaataataagaatacccatctgaagagtcaacaaaagctcgataatttgctggtatctctgcaaaagaataaaccaatgtttagacttttgacaatttttttaaaaaaaatgctatctaagatgtttttaacataagcaagtagattgttttcccttaatgatagctatatcaacaatgatcaataccttgggcaaagagtggacttgcttgaaaaagacttgaggttagtgctcctactcccaacagtagtgtcctcctcttggtacggtctaaatttgattcaagtcataagcattagaaacattacaaaacccatgaatttaaagcaagcatgcttatgcacctataaatttgccattaataattgcattttgagacaaaacccatttctaacataatgggtgattctagagccgaattctcaagaatctggtctgggtttatgccatattgggtcttattttaataaacctagaaaatctgcaaggaaattaagttactttcttgttaccttcttcattggaagttggatcttttgagcatgaaatgttgttacacgaaaataatgaagaattaggccgtggtaactcgttgtaatgggcggaattcaactacaagcagcgttaaattgatattgataagttttgagaatacatacttgagttgatggtgtggtaatgataaagaaatagggtgaataatctatgtaccttgttatagagaggagtggagacccaggtcaatgagagtgatgaaactgccatggttgagttgatttgatgattacagtaggaatatgaatatatggtggatttcagaattgggaagattggagtttggctttagtgtcagtcatagttggacttggatatgttatgtatgtttttcgttcgaagaaatttggattagataattcaccaagtttgttttcgtgacatgtcttcgagacctctctcacgagataggcacgtgactttcttacaaactaatgtaccaatttgggaacagagagcttgtcaactaaaaaatattcaagatgaaatcaaacataatgaacataaaggcaaactatctatacatgaatctcagagcttcaaaaatgtgtttttatattacttgaataagtgtagagttacataattttccaattcccctcaaatatgagaatgggctatttataagttgggttttatttgcttgtttacaagatgattcgctagtggtccccaagtgacagaggaaggacgtcttgcccttacaggtacaagttgcaggaggtggttttgcgctatgtattgatgtcgggtgtcaggtggtcccaaggggtaggagtagtggctgcaacgtactctttgtcgggatgttaggccttgcaggtgaggcgcttccact

SEQ ID NO: 304583 - DNA, 7690 bp, Cannabis indica
ccatgtatgctttctgcgtgtttgttagtttgtgccagctgtactttgctagttggttagttattctgtttttattatctttaggatataaattctgttatgtctgttgttctaactaactctcttcggttagaatcattttcttgattcttgctctgctagggcacaatatctctttgtttttgttttgttgtttgcagagagagattccagagatcttcctgaggttgaagatggagttcgaatctgcttgatctgaagggagttcagattactttgctgaaggtggttcagctgtgtgtatgctaagtgttcttgtgtacagagatctaaatgagtttagatctcaaagcttgaggttgttcaagtgttaggtaactttgtataaaagtcaatttagattacattgtttgatttgaagaatcagaactggaatttgtaattgaattgattttatagtggaagttactgtacccggttcaagggaacccaagcactactcggttggaatgcgtttccaatgcagaggaagcttgtaaattctgtgttctttgattttaaattctgttcataacatagaattaatctgttgagaattatcaattagaacttgtagtaattaggactttcaacattgaattgagttttatttgtaacataaaattaacacttcttccaactagggctgtacacgggtcgggttttcggattttggggtagttgggttcgggttttcagatttcgggtgttgaaaatgtacaaacgaacctgattttcgggtggtcgataatacatatatatagttatagttaattaatatatatatatataactgatagtatacaatagcagcagttgtatctcgagaccaagagtttattggtttgacttatgcttggtactttgcatgtgcatctctatgcacgtttggaaactttgaactgtacagtgtacacataaaaattaagtatctcgagaagtaaaacattaacatgtgcaattaatagccattagtattatatatattatatttattataatagtatagagagaagcaaaataattaatagcggctattgaatagccattagtattatatatactatatctattataatagtatagagtgaagacagtacaaagaagagaaaagccattcctctccgagccaaagagcctcttcagttctcaacagtcaacatgtcctccctcttttcaccgccataagactcctatgactccggttggtccctccgccgccatcggattctccacatcagcgatggtttgggttcaacatggtcattttggagggattggaatacgaaattgaaattgatatgatgagtcatgagtgtattaagtcgtttttgttactgtgatcgggttacgggttagaacccgaccaataaataaccaatttttgatacacgaacgcgaaacctgtatggggtattttcgggttagacccgacccgaccacacgggtttctaatttttcgattttttggcagcgggtcggggcgggtgatcgggttttctgagtctgcgggtctaaatgttcagccctactcccaacaacacctcgtcaatggacaagaaacaaaacagtgaaaaatagtttttgccccaacctcacattgaggacaaagcatagaaagctaaacctttttcatttgcaactgatgatttgtcgataagcaaccagtcaccgctctccaaacaagatttttaacgtttggcagaactttcaaatgccagatctgactgcaaatgggtaacacaccaacctcatcaacattctcacaatctcctcttgccaatttttaagctgattttacagaataagaaccagaattctcctatagcaaaaattaagcgtctctaatagccctgtcagaaaaaggaatactcgaaattatttttagtaaattaataatctaaaaatgagagactcaatctaaattgaagcgcgagctgctagccttcctctctatggccctcattttgcaagcttagcactaggtttgctcatgtctctttaatttcctccctaaattgtgaacacctttagcaaagtactacattgcttgtaaatttataatcattcatttttttcaagcacaacagaaagaggggttgatgacaggaaaatatcgttactcaaatggtattagccaaaatagaattcctgatatacaaggggtattagaccacgaaacagtactagatggagtcaaaagaacatatttagctaagaaatagactaccacattaactgttctaagataatacaaaatttcaactcacaacctcattaaaaacataatatagataaaatatagaacaagaactaaatatgaatcaactttatttgctacaagaagaatgcctaataaggtagaaattacattatatacccattttatttatttgttttcatttttactttcattttcatattttttaaactataactactttataaataatgtccttactatacccctcaattaatataaattatgtgacaaaggtatattaggcaacctattcataaaagtgaataaattttaataaaatataatacgagagtattttttattaatggatacaagttactcatttgttttacaagtttagacaaatatagacaagtaaggattcattggttgttttacggagacataataggtgaaattgtttgataacacaagcaaatgatatggaagattcactttgagctatggtgtgatcaaagttcaagtcaaagtcaaacacatatatctctaatgaatagaaaataatggacaggccaaaacaagtcaataaaggagaagtttaaagtctttcttcagccaattgtttggatatcaccgcaaactaatcaccttaacgtagtacttcacatatcgaattttgcgtctgcgttgaattctttgaattttttcgtaatgatttccaagaaaatatctcctgcaataacaataattagaagaagaagaaataaacttttagatattatacaagtacaattacagcttacacatacatggtagcttctttttcatacttgacagtagtaccaccattcttcagtctagaatatgtgagcctgatgtctcttacatggccaagctccatacctgaaaataacttaaaatatattataccattcttttaagtaattaaaaataagaattatttttactaaaataattacataccacatatccccacttctaagaccatgggaatgtttcccgcaccatgctgaaattgaaccacatcgctgaaaaatcttgattttcgagaatcataatccaccgctacaccaataatgcgtgcattcacctgaaacagtaactagtattatcaattttgttgaattccctactcattgtgatcctaacaagaaaaaaaaagaaatatctaaaattgtcacttaagtcttcccaaaagataccggactttgagactgagactttatttatggacaaagagatacacccaaattaacaacttaacatttgtttaacagaaataacaaacttattaaacagaataaaggaatacagctgtcaaacaagaactaattaacaactgattaaatttctagtttatcaaaaaaaaatgctactctatatataaatagctattagacgaaaaaatcttggtttaacaggctttgttatatatatttatgtgaaagttaagaagttttgccatgttaaatcttagattaagatcacacatttataagaaaatttgttatgtttcaaatcattttgattatgaatcacaattttggtcgttctcttcctgatctttgtaaacattttatgtatcgtttatatcttcattctgtggtaatttttgtccaggctatttgaaagaggagagttatcggtgcatgatagaggctaagaaaagagcagttcatatgaatttgtgagacctgatggttgctattattttagtttttcaaacatttagttagtcatgatattgtagggccatcatttcctatggcaagtggggttctttgttgtcattttggtttacaggtgtatataatattatatggaactccaacactacattttcatttgtaaatcttctggtgtaattttggcagatatacaccgatgcacaatgcgtctacaataaggttatttgactaggatgaccataggtgaaacgaccaaagttctggcactgagcatgaaacaaagctatgatgttgatgcaaaataactgagagtccttcggataggactacattctgacagaacattttttgtttgtggaatctttcactaaaatatattattttctgaattttaggaagggttttccatgatttactgatacaattagaagaggggtattatcttatattgagtccaacccatcatgtactgctaacaaatgagagaaaaatactgaaaggatgaacgtggtaggccaccaattacatacgggtattccaagagagagaaaactgccagggcagcaagggagagtgacaaggcacctggttggttagctgagtaagtgtagcgtgtaggaactacgaagttaaatacaacagcagataaaaagaataaagtaagagagattagtctaaagtgtgtggagaactattgattgagttgtaaatccttgggagagaattcaggctctcaaacatcctgattattatcaatacagttgctattaagattttccctcttctacttctctgtctattttcctaaattgcagaaatgaccaattggtattcagagacgtacgatcctgatggccaaagaatgggaagcagtggttgaaggtttgggaagagtcctaaaacgggattttcagcaagagattctgaccttgattgggaactgtcagatctgatatggagactttgaaggaaggggttttctcatatgcctatggagaaggctcttgccttactggtcaccagcatgtttcaatgagaatgtaaggaggctggttttgggcgaggctatcatcctcgggtggaattacccttggtttttaggagacaatccagacggctgtatcgacagagcttgaaggtattttctcctaccttttttccaaaaaacgggaacctgtcagagaaccgtgtgactcatccaccagaattggtttcctatctccttagaactcaaggaaacagaggtacgagcctatagaacagatcttgttcaagtatggtcgtggtattttctcctatttaagatgactaaagaagtcatgttagaaacaactattatagctttggagggggatgccctagtctggtttcaatgagagaataagcagaaggataactatgtgggcacaagagacctccgtgtgagactatcatctcttgtgagaagctctggcgtcttgtattcctgatgtaccagaacatgttctaaaggaaaactttgttaaggggcttagggatgaaattaactttctcaaagcctacctaatggcttttcttttccaaaagtcttcaatgctttgcttggagttcctcaaagtttttattttacttaagagttttcaggaagtaactggcatgaaagaggattaagggatattcctctcaaaattgcacatataaggtattaagacttaagttttgtttggatcaattaagatttgatagtgtggcgggtctgctgcatttgggctaaatcatgttcttgctaggtatcactatactatatattatgactgcaagtgttcaataaaaatacatatattatgctttctacacaatattctagtttaattactgctcatcttctgtattctgtatttatttatttctactatataaagtaaataaactataacaaaaaatttattcatgaggaaattgtttaatctttaaaaatttgttactaactaatttttatgatagtatttcaaacaaactctcatatcatcatgcaaatacatttttttcgatactctaattatacattattaattaatcaatttattacatattagaacatcctaaataagacaaacctgtttgccaggataggcagctacagctaagcgagctcgaatatgcactaaaccttccaaacaagtatgatacacctcaagatgcttcctgagatccagttacacatcaaatattaaaatcttattttgttacaaataaagtaaaaatgtataaattataatataattgttagaatatgtatgcttacttcttccgatgagaatagtatttgcgaaaacccccatggggaattatgctcttcatgaaaaatctcatagtgtgctatgctgaacatgaaaaacttatatcagaaaaatggaaaaccctaacaaatgcaacacaaccataaattgagtaaacaatacaaaccaaaacaaaattcagaatataaaagtattccaaacgcagattagtgagcactacaaagtagtccaaaagcaagggaaaattattttcctattttctcaattaagggaggacaataagctaaaacaagtgacccacaaccagaaatctcaaaacaaggaaagacggcggctcgtccaaatcaccaacatttaaaatgaatcagtacacaaaatgacgactgaatccgaaaagcaaatcaactattaagcttttagttcaaccacagattttattctcaactactaaaagcatataacattgttagatgtcaaacaaatggtatctaaatcaggtagatcctaagacattcaaccattgcttaataattttgcgatttaacattgttgaagatccaacaacatgaaatcgtcattttaatcagattcacttaaccctgaatcctccaaaggcagatcacgcacctttcgcctaatgaggttgatcttgaagcatccagaagtttatgcccaaatgagatataaatgctggtggttttatttagcgtttttcttagaataagatatacaagttgtagaaataacacaataagtaaaacattttcatttttccttttgtttaaaaagtaaaaataaaagtaaaacacatctaaaatataataatgaaaaattctaaaaatgcggctccttaaaaaaagttgtagagatgcatttttaactgttttggtatttgagagaatactttacttaattattttttatgattgtatatattgttatttaaaacattcttacgaaaaattcaaataaatttaacattttattttatacacgtatcaaaccaactatttgaacattccttttatattgtaaattatatcgagtttcataaaattttaccaagtgaggcgtaagcctcgaggctgaagtcgcgaaggatgcaatgaaaccaaatgaattcacatgttgcatttgccatagctcgatagtctgctttgattgaagatcgtgacactatttgttgtttcttggatttccagaagataagagattgtctaaagaaaatgcaatagcctgatattgaacgttttgtatccaagcaatgagttttaagtgtctagaaaaaaaaaaattaatagaacaattattttatagttactattttatttacgtgcattttttatggaatatattataaatttattcttgattatagtttttttttttttattgtgtgttgctttgtacatataaatacatatatttagtttattgacacatttttttaaaatacaatg

SEQ ID NO: 304584 - DNA, 2326 bp, Cannabis indica
aaaataattaattatattgatgattatataaaaattattattttatatttttttattatttaaataatggtaatatagtaaataaagaatgtaaaatttagtaaaaattaataaataataataattagtggtactataataagtagaaatgtattataacacactttttagaataaaaaagtagtttttaagtgttaaaatatactaatacactatctttttgacactctattgaagatgcacttatacccaaaaaccattcaagagagtcttttattattattattttatatgttggtatatattataattatttatgattatttataaattttaaattttttttaaataatttatagaatcgaaaatatgttttaaatattttattgctcgtacaactgtttattttaaatgacgtagtaagtaataattttaaacttatttttggcactacaaactttttaaattttttaaaaatttataactaaccctaaataactatgatatatacataatgataaaaaaaaaagtctcttaaaacgctaaggctgcgtaaagcaaatgcataacaatagtccttccaattaaaacattcttttatctgtttgccaaacgggactcttgtttcaacaacttccaaacatcatttttttaggctccaaacataaaagtaggattaaaagttacaagacatcttttatttaattttatatctttttcctaagtgtaaaaattaggataaaaaatcccttttattatagttactcatcctcaacgcccaaaaaataaaaaacagatatagaaaaatgtaccaaaatacttcttttaaagggtgtttatagactagcccattaaagaaaaaatattagaaatttttgtggccgtagaccttcttaaaaattcgttttggtagattctttatttgtttcagtatcaaaaaaaaattagtgtaataattttttttcatgatcacatgtattgtagctatttatgaccacgtgtaaatttttataaaattctgaatagtttccaattctaaaaataatgtttaaacagttactaacattccgtataagaaaaatcgacgtacatacaacaaaatatataaattttattttcggtattgtaaactatttagaatttttagaaaatttacaggtgatcttaaataattataacatacacgatcataaaactaatttttttttttaaagtgtcgaaacaaatagaagttctaccaaaataaacttacccaaaaatatttagtgaaattgccaattttattcactctttcattttgtttgttttgtctaatattggtacaatttgaaaagcaagacacacatacaaatgttaggtgccactatgcatcttagcaattttctacctctttgataataatgtgtggagtagaaagagacttctcctttttagttgaaaaatcaagggagttaggctagtggaagataataataatatccacttatgcatataatttcataattgcatgattttaagtcttggactgggattcttttgcattttaacttcaagtgcaaacctttcaattccagtgtgtggtttttacacgttgttgaacgagtcttgttttttattcttatttaatgcaagttgtaacggttatgaaatttattataaataaataagagcacccatagtggaaggggtataataggcaatagttaaaaatgagtattgttattgggtatcaatagtgcttaacactttctcaatgtgtcgccttgcgattgattagcgatactccttaaaagttattatattaaactatatgaaatctattatagctcaaaaatttaggggaagtactactattgagtaaataccattttagaaattgtattttacaaaaattaccgattggatcgtctattttgttaaatgaaaaaatagatcttgtatcttctacaatggtaaatataagaccatgagcttaatttttgaaactttttttttttaatataaccaacttaaagataattcctaacacaaataaatagagaaaatatatatatttttgtcataatacttttagatttaattattattaaattttattttcacacaaaatcaattcaaggtcttgtattattttaaaagggaaatttgattttctatacttagaaaatcaaaaaatttgattcctaaaccaataattaaaccctaaaaaaactataccttttttttcaaaacccaaaaatacccccaaactctcacagcatctctctttctctctctatctcggccggtcccaagaatcccacacccaaggtccgaccatcggacc

SEQ ID NO: 304585 - DNA, 2046 bp, Cannabis indica
cctcacgatcagactcacgcaatccttgatctggcgcactcttatcttgcggagtaccaagattcccaggcgactccagtgcaaatttcaagagcgcggaacaatccggtctcctggtctcctccggcgacaggactcctcaagttaaatgtggatgctgcaatctcaaagatcagcaggaaagtgggttttggtgggattatcagaaatagcgatggtttggtagtagcagcccttgctcaaccttatattgggggaggagctgtcgctactctcgaagcaaaatccctcctttcgactttacggtggtgcatagacgagcatttcttggttcaagaaattgaaacggactgtaaagccattactgatgcactagctaataacaaggaagacgtttcgatttttggagatcttatctgccaaattaaggaagccttatctcttatccctaatgctcggctctcccatgtcaatcgtgaggccaacgctcttgctgataagctggcacatcgagccttggggttagatgaggttgcgatttggataggcgatgacccctgcgaccttcttgagttcctttctgtttagtgggcaccctttctttcaaaaaaaaaaaaaagtccaattagcagtttcaaaaagaaaaaaaaaagtccaattagttagttggtacagtgagtcgaaaagatattatacatttatatttgtgtatgatatgatacgagacattattgagacctttaaaaggtgttttattaattataaatgtataattgttattgtaattaaataacttatgatcttatatccgttatatgaaatgaacttttaggtagcccaacatacacccatttttaagtggcattttgctcaaaatttggactgacccttaaatctccagctagctcttaaagtcagtactagttaaaaaggagattatttataagtggttcattgagatatatggttaattaaactaaataaaaaatacagttaaaaacataatttatatttgttagaatttttgctatgttaaccacacaaagtcaaagactctaagcaagtgaagacgattgtcttttgttgcagagcagctagcatttaggtatggtgcaaccaataatatgtttgacatgctttacacgcaaaaagcttgtataatatatatatatatatatttatatatatatagatacattattatttgcttgaccttatttgctatattgattaattattgctttttttacatatacaagataatttattattatttgcggatcttggtcaatgcatggaatgctaattgcactcgtagccatgcaaattacttaacttattataatatccataaaaataaacttattatattactaactttaatttatttattttttgttttatatagacttttacttcattgtttcctaattattttgttttttctaaatacaaacacaagccaggtgacaaattatttttgctttgctttatattataatattaatataagagaggccatttttttttttggacgtatatcagaaaataaattttgatatatatatcttcttcttttttatggctaaaattaaaaaaagtgccactgcttttaaagaactaatggttaaattggtggcttgctctttcaattgtgctgaaatttctttggtattttagccttacaataaattcttttaccattatctttttattattgttttctttttctttttacaaaacttaatttcaaacaagtcaaaaaatcaaataattcgcaatattttaatcatatggaaaattatttaatctttataccaaatttgaaatcaattcatacacgatagtgtaacaagttaggctatcttcgttcttttctttactatatttcaatgatcataataatttgaaatcatttgaaataatgtaattatatctcaagtaagtcgttggatttttatatttttttttctaaggatataatccttgaaaactactatctgatgaaatggatgaaactagctctttaatcaaaaaaaaaaaaaa

SEQ ID NO: 304586 - DNA, 2205 bp, Cannabis indica
gccatggaaaacatagtaaaggccaaaaggaaactattacgtctttggaattggaaatgagtatcatcttagtttcaagtttaccgttgccttgctcatccactgtgattccttctctctacaactcaactccttcgaacccatcactcttttccaccacagctcgattttgtcttcgtcttcctctattttctcgccatttcagagttcctaccgcagccaaaccatcggccatggaagccgtctccaccgagcatagtggagccgccgataaccaaagtgactctccattgatgaagctcctcttcgtcgagatgggtgttggctacgaccagcatgggtgagtcttcagattatagatttcatcgcttttcactttaaaagtatcgatctttaattaaaattaggtgaaacagccaaaatattacttcggctgcaatgcgtgcttgtagagatgccatttcttccaattcgatccctgcttttcgaagaggtattttttcgtcaatgcccgatttgggtttcttcattataatgtagcatttgataaatcttgttgtcattcccgggatgtaaagtgattgagatatatggttcttttgtgggttataattaaatacattttgggtagcttaggtagttcttctgctagaatttaagcagacattgatgttaattctgagattctcttgattacaaacaagatggatacaagaatgaagacgaagcttaaaactgaaacatgatatatttctatgtagtttggaatcaagaaaaaaatgttttatccaaggcaaggcctagttcaaaccaatattatatgaagcaggaatagacctagtacaaaacaaggttctgaaaatcctcattgtgctcaaatattgtcccatcctttacaaggacttattgacatgtattcctaagtgtaggtcagagtcgaagaaagccagttagttatacacttggctgctgtccaagtaaatcctaattattaaaaccaacacaattgactataactgatatgtaccaaagtagagtcatctacttcatgggtcttgtgaaggttcttggcattgataggagtgctttgagatttgagtttgatgattagtatcatgttatgatgcgacagtcaatgaagaattgtttgaggataatcacaccataaaattttagttcaacgttccgaaatttcactgaattgatggtttttggtctggtttaagattttaagtcttgttaagctgttgttttaatgttttttttattggaaattatttcactgctaattatacagtataaatgcagggtccatacctggtgtttcatttgatcaaatgaaattacagatcaagctgggagtgccgcatcctctccaacaatctttggatattgaaaaagttaaatcagtttttccatagtgagtatctttatatttctataacctggatgcagtagtttccttacctaaactattaggaagttattttgatcattcctacgtaatcactcaatcaaagaggatgaatatctttcaaattttcattaaattgccttagcatttttattttcattaatttgtagaggattaggctttagaatttgttgaaccaaattaaaaatataattggaacgaattaccaaatgtatttttgtggctgagtcgcggactaagtcgctctctttaagacgtttcgcggttctgcccgaagtgtgcacggtagtctagcaaccatagtgtctccaggataaaacaacctctgtatgtatataattcattctgcaccgaacgatatcgctctgaaacaccccaaaaatatttgctctgagaaatcataaagagattgaacagaaaggaattttttgtgttgaaaagttgtattttgctgtaagtcaggtgcgacttaaatagatgttaagtcgatcaaattagaacggttagaagaacgttatttcaatcgtggttcatgggtcattagcagttaaaacgtatcacgtttactgcttctataaacgcgtttaaagaaaataattaattaataaataaaaatatttattaattaaataatttttttttctgtaaaaaataaagtgacatcacaactcgtgcgccagctcagctcgacacggtacggtcggaccgcggtagcggcgcacgcgtgtgatggtccggtgtgtgagtcctcacccattcgcacaaaattg

SEQ ID NO: 304587 - DNA, 1301 bp, Cannabis indica
aattgtaaattgtaaatgttaaaaaagtatattatattatatagccatatatatttaaaataacatagaaaaataagaaaaatatgtgttgtaaatttaaatttgaattatataatattttttaaaaaaataacactttcaattatatatagctatatatatttgaactctaaaagaagtagagaaaactagtctctatatcattagttaaacttaaggacaacatatataaataataattatgtttattcatataaaataattttaattcaagtacaaaaacatggatcccaaattattaaatcgtattatagccatataattttttataaaaaaactccgtaccacagtaattagtcgaccagctttataaatgcatgcatggtttctccatattaattaacacagacattagttatagatatattatgatcctaaaaatgttattatttcaatttaaaaacatgaatttcctatatatgtatatatatatataaaaaggcaaagttggtcaaattgtgatgtaagtaaagtattaataaaaaagagaaagatctatatgaaatatatttacatatacaaattcagtccacctaattaattataattatttattagtttatatgacgtatatatatgagataagatatttttttttagggaagaagagataagatgagataaaacatgaattttgctgttatatatcattacttgataatatctattaattgttaatgtaactcatttggacagcctttaatttctttatattatttcatagtgtgaacaattcatgttcaacatattcaaaataagtatgattaaaaattgatatatttatgtttatatgtaactatcacatgagtgactcatcaagtgcttacgcaaatgatcaagtgattatatattgaaaaattcagtactagctattacaactagcgctgcaaccattttagaaacccaaaccgtaaatttgaaaaaaaaactaaaaaatagtatatggggtaattctcccgaaaaatatatatctcttatattaaacgtaattgttgaatgcatagaattatcgtgataattatgacatgtatactatttatttgatgaacatgatcataactagcttgtattctaacgttattatattttcaataaatttatttattgctttaaaaaaaaaaaaagaaactggttaaatgtatatatatatatatatattttgttaaatttagacaggttaaaattaataagtgttaatcaatcaattaattaattatttaaaaaactagtttaaatattaa

SEQ ID NO: 304588 - DNA, 4157 bp, Cannabis indica
ccctaaattcatgggatagattcacaataacaaagaagaaatgaaacctacctagtttcccatttggcttgttttaattatagaaagtaagtagtttctcattttatttcttattagttttgggaaaccaattggctgtaattcttccttataaatagtgtagtcatctcactatttagggacacaaaattcagacagattacacgataaattttagcaaagaattataaattcaagagtgaaacactcaaagatcattataagagctttcgacagagattaatcccttcttgcttctctactcacaagttaatacaaactaaaggggagtaggttattaccgttatcaaggggccaaacctctataataattctggtaatttctttacttattcttgttatttaattaatcttaatcattttaatttgactcactgttgttagttaaaagcgagatcaatattttggtgctttcattaagagcaaagaaacacaaatctttattttaagactttttaggacacaagatggatgtacaaacatagaggaaaaattagaccaaaactattgatatgatggcaacagatcctaatgtgcaaacacctgcaaattaaagagatcgagtcaggatagatcccgacccaactattcttcagccaccaacaagccctcaaacaacaaagcatagagtgaccacccctgtaacgtcctgtcctacaaggatgtcacgtgtgtacttttataaatttatttataatctaatttattaatttaagaaaagtacagtagaattaaaaacttttaattaaagataaaatataaccactgtcaagtacagggatcccctctgtaaaaattttacactatgtttcaaaatcagtattacaacatagggttacaattcaaaatacagccaaaagggtggatcctgtccactggaagccaaggcactgcagtcgatatgtacatcactgaaagacctctgactcatggttagtcgactttaccattccctttacctgcactacgaagcacccgtgagtcacagagacttagtaagaaaagctattaaaattcaaacagtgttcaatacaaataatcacaacatgccataccacacaaatacattaattcaaagcataatcaagcattgcataaacagttatacgtcttataagacataccaattttgatgcctcttaaagcacccttaccacttgttatccacgagcaacatatgtcactatcgttgtctgataaagcaaataagtaagaaatctatctggggtttaaagtgagtaattattcataacggtaatgactgtatctatccctcgattataatcgagtcacaacattaataatcattacctcgatcataatcgaggaaccaacgattatagtcgtttcttatctaacatgcttggcaatacttttcttaccccagtctagtaatcaggtgtgcgtgccgacctgaatggaaataaagctcgacgatcccgggtcctatgtcacgacaacaaaatccagtgaataccttaaccaatttctcgacacaaaccttaataccaaaactggacaaaccctaccttccactagctccaaaataggttatacaacacctaaacaacctaaactaggtactggaaatcaccccgagctaaaagccaacctcgaagaaaattggaaatttcccctgcaaaccaactggttgaccggtttttctataccagaacccaccagtcgatcggttctggcaggtaagaaatcttgggttttcttcccccaaaaccgatccaaaacttcttcaaacctacctaattgctccagaacagtttaataacataaaaacaaggtattcaaatcatcaattcacaacaattcaacacaatacttaattcaccatgttagaactaaaaattaggttcttaaaccaaaatttctaactccaaaccatacagccatgaatttcaaccaattagaacctaaacaatccctaaatcagacctaaaaacataatctaaactcaatttagcacctcagacccgaaagcctaaaaccctaagcaaaactcaatctaagctacaaaaatcaagtagggaaggatagagaacttacctcacaacttagggaacttctatccttgatcaaacctgctaaaaactagttgaaatagaaggagaaaagtgtttgattcctgttgctcccaggacttcgaaggatagagggagaaagggaatgaactgtgctatttttcttaagtttaatctcttaattttcctaaataaataatatatctaatataagtaaattgataatcaaactatcattcagcccatactcactagaaaaatcataaaaaaaaacaaattagggtaaaatgactattttacccctccccttaaaacttaagatatggaataacctaggggcattttggttattttctaacttttttgattaacctacttctaaacattttaacctattccggtataattctaatacgacaacttaattatcgtgacacttccaaccactccgtcgagtttccaaagtcgccgaactcgaaaatattttatttcaaaagtagtatcaactatatctacataatccgataaaatcttcgtaatttataaattacgttttatttaatcatttattagatgtaccttaataatcacacaattagcttatgtaaaatcattatcttactccaatatcaatataacatatttaataaaatatacccaattagattttataatattttctgggatattacaacccctctagctgggttcattctaggtgtccaagaaactaaaaccaccaatttttggaccaaactattagggtttatgctcttaagatcctataaagatatttctgattattaataaaaagttgaacattttaatatatgcatgagtgtaccataaccttgtgtgtggtggatcaatttggaagactacgatgtgagtttctaatcaacccaaaaggattcaacttacgaaaagtttcaagaatatcttgatagtcatcaagaagtatattaacttttttcatgcattttatgttttgatttgatgtttacatctggagatctattgggctatggtacaattataattagatatatgaatttttctactacgtacctaatttagtaccataaaactaacagttccctactgtcctggggcttaggcttcctctggggaagcctattccgttgcatgtggtcagagtgtacccttttgggatcagggtttactttgtcctccctaggtacttcaatgggatttgccttagcattgggaggcactccagtagggtaccctatgaaactcggtacatgttctttctgttttttggttgtggtcaagaggggaaacctctggcattgttaggcaagtttcgaatggtggcagagtatatgtgaagcccggtgatggccaagacctgttttaaggcgacaagagcctcttgaattattttgttagcttcttgctactttgccaactcatcattgtgtttgtggcccactgtcatagggagatgagttttgaattgtcctacttgttctcttcttagccttcaagataactctctaccctgtaatcttggtcattgacatcgtctttttcagggtcaactcgagaagccacatcttcgtcacggtgtcctagaaggtcaggttgagaaggaggtttttgatttttcttaattatcaccatgacagcaagagaatcaactggtgaaagattcctacaactcttaatgaaagtaccaaaatattgactgaaatttttgacaactacttaaattaatgaatatttatactaatatattttagagagtgtgtttttacgtggttaggggcactaataagccttaatccacgagccacttgtatgtaagcgttgaaaaaaaaattacaacaatagttgatttttgcatgaataattttgtataatttttcttaagttctcaaattctcgatcccctttacaatggatttagaaccttatttatagaaaaataaatgggcttttagagagaacttaggctcgttccctgtgacagtcagtagtcccgtgatccgtaaggagaaatatcgggtaagttgtgcaatcccacatcgcctggggaag

SEQ ID NO: 304589 - DNA, 1536 bp, Cannabis indica
gataaattcgatcaatgtcaatgattttgataaccaaaaaaaatatatatatataattttcatagtgtaacaaccgacaatatactgctatataggttgttgggtcgaacaaaatacaactccatatatgtccttaatattttctttaattaaattatttaaaaaatataatttataaagatttattgtattttagtaaaattttattgtaaagatctacgatttatgttttagctcgacatagcattaaagcaacttcaattggaaggaaagtggcttaaggagtacttgatgagatgggcacttttttgactaatttttaatagttgcttaccattagaattgatgaaatcacttgttctcttagtaatattttgtctatttaattttgcagcgataaagaaaattaatatatattttgttgtaggaagaaatacaagcataataataatataatttgctatatttggtgtttgaaatttgaaaaccgagataattgaagccaagccaatcaaacattatctagtctctaccatctacactaaacactagtgctgctccatctgtctcatttggcagtgtctgtacacatagacccaacacttgaatatgtagtagaaaaggaagaagagctcttaaattatttaatttgatagaccaaaacacttgaatgtgtagtagaaaaaacatagagcttattaacccacaaaaaataaaataggtcaaagctaggtgtggggtgggctatacccactacacaactatttttagagtcttcactcacgtttatcacgatcgactacatcaacccatatgttgtttgctagtctaataaagtccacatatactataattatatatttgagtgtatgtgaatcactattcatatctttatgtatcttaatattagttactcattctagtattattgttttaatggccatgagaaatggatctcaaaggtttgatcattaggggctaccaaaaacgaaatcttagtgatatgctataactgttgttatactaaatcaaattatttgaactcgatacttaattgtaccaataataatatgacatattaagtgatactgagcacttttagtgccttatatggttcttttttctagaactctcacttatcacattgcagttcacccagttcagctaaattcactcctttcttagactagctaggccttgaatagtagtatataactaccctcctttcttagactagctttttcggagtgaaatttactatagttgtatcaagtggtattagagcagctccaatgctctacatattcacgttgctcatcagtcttttgtcaatccaagaacaacaatcaagattacttaaccactaacgaggattgtgtgggttgctataattgctactgtcaagcaacgtgagtgaattattttttttataattttcctatcaataagatgtattaatataatatttaaaatattaaaaataatttaataatatattaaataataaagtgtgggttcattctcatgacttttaaa

SEQ ID NO: 304590 - DNA, 4080 bp, Cannabis indica
ttattaaaaaaatatgtatatttcttgaaagtatttttttatttgagctcagtgggccttaagcgcggacctatagcccgcttatacctggagccgactttgaatataacaacaaaatgaatgaataccccacatgctctattattataaccatatgagcagtttttattaatgattttaatattgaatttcgtatatttaatttaataaataatataatttaccattaactaattttgtatagtgttgaacacctttaattacaaataagaatgctattacaatataactttatcctacctaagcaattctcataactccattaataaaagaacaaatactaataataaacattattggtgctgttgactgaatttttagacaactaacgcggagtcgtaataaatgagatttaaatcaaaatcacagtaataaatacagttaataatactgaaacttgaaataaatgtaaataaaaaataccggaatttaaagaggttcgaccccagatgttggtaatagcctactccccttgtgttttattgatctgagttgtaaaagtcaagaactggctcttgattgcaaaaagaatgataaaatgtttatttttctaagtgttcaaaattatggatccccctcctaggtcatggatgaccccttatatagaggaaagggtcggtgcttcttgcttcaggagacgcgaccgacgcggagctaccacaacttctctttcattttcggaggtagttgaagtctgatttttatgataatatcctgctatttgggttgacaactgtctttgagcattttgtgggttttgtacatttgaacgagttactgacgacgagggtcttttatgggtgtgacatggttatcaaccacctttggggatgaagcccatactttggggcaacacaacttgagggggtgacaatcgtcattgttgggtgattccccgagacctaacttgagggggttgaaaagcgtcatcgttgggtgacccccggtgactcaacttgagggggttgacaagcgtcatcgttgggtgaccccccgtgacccaacttgaggggggtgacaaccgccatcgttgggtaaccccccatgacccaacttgaggggggtggcaaccatcatcgttgggtgacttcccgtgaccgaacttgaggggagtgacaaccgtcatcgttgggtgaccctccggaacccaaccacaactgtcaccgttgggtgacccccggaacccaacttgagggggtgacaactttcaccgttgtgtgaccccgcccctaggacccaacttgagggagtgacaaccgtcgccgttgggcgaccccgcattcgttgtgagtagttgtggtgcaatgtggatgtccccgtatacctttgagaatgtcattgtgtatatggtaaaatgcatgacttataccataagggtgtagggggtaggggtaaacccctagactaaccctctaggggatacccctagactaaaccccatatagatcattgcaactgaggtaggggtagtatcatataccccctacactggtttgactcccgtagatgtgggtggtcattgttcattctgcttacgaaggtgttagcccatcgttttttctttttggagacgtctactttactcaagctaagggtaaatgtgaccgtctgacttccactctaattgtcataactacctttcatagttgacggtcatcccaacagtcatgactttacatattttcattaatttagtcccattatttttgtgtcttgtgttgctactcttgacatgtcatcattcttaaaatttagataaacagttgctaacactggttaatgatttttcatatgacaattattaaattatacaaacaaggacataactctgaaatagaaattatcttaatgaaatgaatgaataccccacatgctccattataaccccaataataaaagaatggataaaccccacatgctccattaaactctctgaattatcttaatcaaagatatgaacttttgggccggaaccagctaggaagtacaccaaccaatacaaaaatacagaatattagaattaacgtaaatacaataatggagcgcctttctaaaagaatacaaaatcatcatcaacactagaaacaatacgacaaaagattttaccttggaattagagccgtaggattgatctaaaattattcaaaggcaaatacaatccaacggtattggagccttcaaagattatgatgcttcctcttactaacgacattgtgatactcacgttgaaagtcttcccttttcatctttagccgaattttaaaagcttttcccatctataaatacatgtccactctcaccttctactctcaaccaattcaataaacttctttctctctctcaagaacaacttttcaaattagcaaaacgaaaattgtttcagacatggcaccaataaacgatgtatcaaagcttgaatacatcaagcaacatctgcttggtgatctttctccaattaatgggctttcaatttttgatcaaaatgaattatggagttcagaaatgaataccgatttctccacctcgaaatctgattctctctgctccaaaacctcgagctctgactccaccattgaaattgcagactacttgaatcagaacgaagtcttcgagttcagttcaaatccaaacgattttttcgattttgaattgaaacccgaaattcttgatctcaaaacccctaaatgggccaaatcccatactacgctaacctctcaatcgagtattggttcgtttgaattcgaatctaaacctgaaatcatcgatctcggagtttccacctctgaatcgaacagcttttcgttcaaattcgaatctaaacctcagatagtccgccaaacgaaccgaaagccatctttgacgatctcccttcctgcgaaaacagaaatgattcaattcggagctcctaaggctcaagactccgtacaagtgaaatcgatcgagaaggagaagaagcactaccgaggtgtcaggcaaaggccgtggggaaagttcgcgtcggagatccgagatctgagtcgaaaggctcacgggtttggttgggtaccttcaacaccgccattgaagccgctcaagcttacgaccgagccgcattcaagcttcgcggctccaaagccatactcaactttccattggaagccgggaactataagaacagtgacgtaatcgataagaaacgacgtcgtcaggaggaagaagtaatagaagaagtggtggtggtaaagaaagagaagttaacggagtttgatgaggccgttaactatttgaagaatatgccgttgacgccgtctgattggtcggccgtttgggagtcggatgggaacggggtttacaatatgccgcttctttcgccgttatctccacatccaacgttgggttattcacagttaatggttgtataaatggaattttaatttgactttttgtctctttaagtcctcagttattttgtatatttgggcttcgatattcgtttattctttttaaagaaaatagagagaatttgatttcatttgtgttgtcaccttttgattttgatttacttttacattagaaatcagaatatttttcttacagcactatttatttgttataattatagtattatttttttaaatttttgaaaaaatttcaaacttattttggataaagtaaattataagcttaactttttgaataaaaaatagtgtgacatgtgttttaaagcacatagacataaggagattggtagtagtacacatttgaaacttgagacttgagagttataattaatttttttttttcaaaagttatcataggcaaaataattataatgacgattttttttttttttttttgaattgtaatgaaactttcatagcttaaaaatacagaaagacaaaggccaggggcggagccagaactaaatagttggggggccaatatcggacaacgcagtatataacaaatttaaattttggtgactaaaatatcttttaaggatgtatgtcaattgtggaaaatattatgatttttaaattt

SEQ ID NO: 304591 - DNA, 2411 bp, Cannabis indica
aatgctatgtttacttaaacaaatctagattttctcaaaaaaaaaaaaaaaaaaacgactcaaacttattcccgtaaaaattatttttttacaaaaattaaaattttaaaatattttttttacatctaaatgcattttcttaataataaataaataatttttaaatcgcttaattagttttaaaatttaatttaattattcaaaataattttttttttaagttctaaattaattttttaagatttactgaaaaaaaaaaattaatccttctcatttttattttgaaagagtacgatttgatagttgtccaattttgaaaagcaaaattactaaatataaagacaccttagcatataaacaaaataatgagacaaaaactaacataagaattaaatttctataaatataaaaattcagaaagatttttaatctatagatttaatatattttcttatttctaataacatatatcatttgaattccatcttcaattagatatttatatatctatctatctaaatttgcatcaaatacttgcttaattcttttatttattttttttattttatattctctctttaattatctcatttttttattctatcaactttctccttaattctcttttttttaactttaaattctctccttattaattctctcattttttttttaattttttcatttatttaattaaagatcattatataattaaaaattaaaaaaaaacctacaaaatatatatacaataactaataaataattacatatattaaaaaaaaataatctacaaatacagttgtgtagagagagaacacatacaattaatattaactaatcatccaaaaatacatagaaaataatttattttatatatagagaacttactgaaaataatattaatgagactataagtaagataccttgatgatcatatcaactttaaatataatggtgaatacaagtgagatacggggttaacggttgtttagaaattatatgatatattttaaatagatttataattttttttatagatttctatttttatgagaattgtttaatatatttgaagatattttttttatataaatttattattttttaaaaaattatcactaaataaatacaatcacacacaaagtgcgacctttaactagtttataataatttatgaactaacataattccaacacatctatatgtctttctaaaaagaaaataaacatacataattggcgagatagtttgggaaacacatctagacaaaataaaataatagtttgtgtaggtgttatattgttggatagattgttaaaatatatattggataattagttaattgaaaaacacgatatctaaaagtattaaatatatatcattttgcaataagagtaaaaaacacttttttaaattttctttgcaaacacatctggataaacatattacttgccgtattaatgagtggtctctttatttaagttgagtcaattacttctactgacagacttttcttcgaaatacataaatcaaaattacactccatcattgtatgcaattattgtgtatttagaattaattatataaaaaaataacaaataaaatatataaataatattgttgagcctaaatatattggtccactaattcttactgttatttaattttcagatgagtggcaaagatagaaaaaaacaattcaaagtgattaccgattaagtttccttaattacagaaggttctcgaatgattatgtaagcatgagaaaggtctaactcgagagaggtagagagattcgccaagtggcaaatgactaccaaggacttggaatcctcaccatccctccaggtctcgaagaagatcgactaacttgagtatacaggcaagtgtcgaagagccatgcgaagagtccaagtcagatggctttattgacggttattcttttctgacacacgatcagatcttgtcccctgcatcagactatagtagtacaggtacctctgagtgtttagttcactaagtgcagacctttgctcgacacgtgccatgaacaagcaatggtcctcattgtacgaatcactcgcctcgcgagaaagaaccatcttgggggccaatagtcagatatttatgtcttttaccccaatagagggtggacttttttcaaaaatcttagacgggtcatgggtatgttcatgctcgtactttagcctataaatacccctttatttctacacaaaagaggggataaaaaaaaaagagatagtcgaagctttgccaaattctctctaagctttcttcttcttcaagaaaaaacaacaaaacggagttagggttttactgtaaacaccatatgtaatacatttactagtcttcaagaccaatatgctgactcgtggactatggataattaa

SEQ ID NO: 304592 - DNA, 2613 bp, Cannabis indica
cggaacgcaacggaggaggaactgaaaaaggcatatcggaggtcggctatgaagtggcatcctgacaagaaccaggtgaacaataaggaagcggaggccaagttcaagctcatctccgaagcctatgacgtccttgctgatcctcaaagacgtcagatctatgatgtctatggcgccgaagctcttaaatcggttgacttcaattcttcatcaccttcttcttctcctagctctttcggtcacggaatgagaattaatagcaatggtggctctcggttccggttcaatcctcgtgatccggatgatatttttgcagaattttttggcggatctgatgatggtaatggacatagtcgggagcagaagattaatagtactaactctaccagaaaagcacaaccagttgaggaaaagttgccgtgtagcttggaggatctctttaaaggaactagaaagaaaatgacaatttctagaacagttatcgatgattttgggtaactcaatgtcatttttctctttattaatttatttaatttctctgtccactgattttattaactcggttagcttgaaaattcgtgcaaattactatatttcttaattaactaatttattcgttccaacagcccatcatagaaatttttattgtctttgaatacatccaacctattgggagtactagctagtcataatcttttcaagacttttcccaggaaatgataacacagatacccaaaactctgttttaaattgattaaagctgcacattgtgcaggctttaaatggcattacacagaagaaataaaaaaccagtgctaatttagatcttgagcagctaactgactatgacatattttaaccacaataaattatgaatcatttttatatacattataatgggtatttcatcttaagcttgaagcattgcatttttattgttcatattcaattttggccttattatatatcaacgattatttttgttgcagtaagtcaaagaccattgatgaaattttaaagattgacattaaacctggctggaaaaagggtaccaaaatcactttcccagagaaaggtaaccaagaacctggaatcactgcgtcagatcttatcttcgtaattgaagagaaacctcatggtattttccggagagatgggaatgatcttgtggttaagcaacgaatatctttattagaggctctaacagggaaaactctgaatgtaacaagcttggacggagggtacttagtatctcagtcacagatatagttaagcctggtcatgaagtagtaattcagaacgagggaatgcccatttcaaaagatcccagcaaaagaggtaatctcagaatcaaattcgatgtgatgtttccatcgaagcttaattctgaacagaaatctgatttgagaagggttctgggttgagctgataactagtcaagactgaattgggtgttgatgacactgattgataacattaagatcagtaaacatgtaaatacataacactttcccatgtttaagagaaagtattgatgtgcatatagtaggaaaagagtttgaacgagtgaagtcaagggtgttaatttatgtaacgtaactggcaggtcacaactttggtatcttttcttttcagaggagtagcgacttttttttttcttttatctttttttaatttttttttcaatgtagatatttaatgcatgttctgtgtggaataaccataatctcgttcttcaatttggtaaagatcaaatttatttagtgtaatgactgatcacagctacatttgctttttaatttttatttttttttatttttttttatttattttttttttttttcgtttggttcacggaaatgtataatgaacattgtaatcaattttttatttagtttggtataaaaataaaattaaataataaatatattgactaaaatatctttacatttggtaaaaagataagatagagaagagtagaaaactttttgtaatatattggtaattataattctcattttataattagttaaaaaactcaatcaaatattgtaattgtattattcattccatttaatcttaattacaccaaagcagacatgtttgtttttttatccaaattttacagatgttgagttgtctcttgagcttatacattttctgtttttttgttgctcagagaacttaaaagtttggatggagtgtttctcgtctgccttgagtgttggatttgattggttttctttgttctaaactaaatgtttgtaacaatgtcggcaaccaattgactaattttgccctatttcttagtagcgaaaagaataggaaaattgattttactatatttttaactaagaatgggacttatcacaagattattatttttagtagggtgatagctttgaaaagacaaatttcccacaatgaaaatggctcattctttagtgagattacatgaacaaatgtcgcaaccaaaatatgttattggtgtgggagcctatacaataacaaggggggatgtttagtaccaacatttgctttagtctctgtttgtggtgacataagtccctccctataactcatgaattaagaattctcgcaataacaaagtct

SEQ ID NO: 304593 - DNA, 786 bp, Cannabis indica
gcagccagagtgacgtactcgtgtataagagtcattcatttcgtgggtgtaatggaagcttgaagcggggacgttacatgccactggtactcgtcttagtattgtgttgtgcaaaaaagcctgatacaaatgtacaaatttacatacggttaattagggtccctaatttagttttttttaaagttcgagttctcgtagtgacattaatcctaagccttaaaagtgatactcatttgtgaataactaagtgtatgtgtgtcttttgggtaggccatagctttcttctgagagagtttcagttggtaatcatcttaaaaattgtttataagcttcaatttatctttcaatggtctccaaaaccactattcaattaaaggagctagaaataagatgggcactatatgatctcactttaagtaataataataataataatttagaagagcttgagacgttgctttgttggcaaaggaaaaattgaagaatgcgtagtggcaagcatttatattgcattaaactactattaagtttatattaaatacaatttatgcttagtgatctaagttagttaataaacactccaattatatacatgtggctctaatactataaatacggctttattttttgtcttcacactaaattgatatgagttcgagaaacacaaatattgaaacgatacaatattaaaaaatatgaaatttgaaagcagatgatgttgttggattaaaaatgctatgtgggcacatatgtataatgtatatgctattataaagtgtgatacaa

SEQ ID NO: 304594 - DNA, 1806 bp, Cannabis indica
atatatatttacatatatacatataataaaaacatatatagaagaaaataagtcatgattgatagtacacacatatgaggtgaaattgagctatagctagttgagaaagagagtgagtgagagaaatatatagtgaaaagcatagagaaagagatgagatgagtcttttaccaaagtggtgaaatatatagcaaggcaaaggcccttcctcacactgatattttcaaagaaataaataaaataagaaaaagagaaattgtttttatttgggagatggtaagacttttggtaaatcatccacgtttagtgtcatttgtttatagttcgaattgttttgagcaatgtggcatttagggcggttctcaaggtaaatccatgtcataatcacttatggcttatatgctaagtaattaatagagggggatattgtttgccatatcaagctctctacaatcatgttttttatttcaaaagtagaaagctaattaccacacaattaattattattattattatttagaagaataagaagggagttacatttccattccaccattaacacataataggagtaataatatgtgtatacataaattatacacaaatttaatcaattatttttatatagataagtctcacttgttaaaagtaattttttcaataatgatatgtataaacatcccgtaatagggcgagcgaaatggagcagcctaaattgcgaaattaataaagtgtgggagagcaatacaagtgtcaggttgctaggcaaaacggtaaaatactgcaccctaaatggcgagagttcggtagtcataaacttgacacacgcttatgtgagaagtgacatataatgtacttgtttaatttacaagtaagaaaagaaaagaaaattaaaaaaaaaaaggaaagaaacaaaaagggtaaattgggtataaccaaaaaagaaatgctaaaaggtaccactagtgtctagtacattgtaagtgtcatatcgatattagtacaattaaatatcgtgttctatataatttaatgtaaaaaattttaaaacctatcactaattaatcataaaatgttacctctaaaagtagttaagtactattaatacccaataataatacccaaaccaaaatggtgataaagcaagttttctttttccatttgacttttagttgatttttgcatggcctctcaaaacggttaaatagtaattatgactagcaaaagagaaacagctttttttgcatggaaatatatttagccgttttaatattgaaacttcaaacttcaaagagtcttacatacatgaatactagctggctcatgtgttgccgtaggattttctttttgagtaatgatatatacaacaaaaaatatgcatcaaaatatgagacaatttaaataaataaaattaattgaaagaaaaagaacacatcactatgtgtaatattgttgagtacattgatttttattagcttattaatatactccatacacataatttaaaatattatatttaattttgtaattttatgcttacaaaaaaatatatagagatatcaaatactataatattatttttgtaaatcataacacttttaaattataatttatcaaacatagagcaagcttgtgctcttttaacaattttttctcatttctggttacatgagcgctacattgtaaaactataattacggtagtattgtataatttaacttcaagttttaatttgttttcttatgtgaaatttaagttctcatttttagtatctcatacaagtgtaataatggtcatataaaagtt

SEQ ID NO: 304595 - DNA, 3024 bp, Cannabis indica
aactgtcaataatcaacctggagttttgtactgggtccttcttgcaggttgccacagatgttgcatctcgtggtttggatgtctcaggagttgctcatgttatcaatctagatcttccaaaggtacatttggctaataaagcttctttgttgagttattctcaaaattcactaaactaaaccgactcagaaaggtttgctagaaaacttgggtactcacctcattttgtggagtgcactctatcaatattatcaattacacaaatttgctatgcaaacctaaccttgtggccataaaatttctcccttaacataagttagcacctcattagcctggtattttcagtctctattaatttcaatgtgaatagaaattctgaagcttcagttgtggctgcctcaattatagagcatggaagattatgtacaccgaattggaaggacaggcagagcaggatcaatgggtcaagctacttcattttacactgatcgtgatatggtacttctttatcttttatgctgttatgttattcttatgcttactatctttcaacatctgaccatacatttgtcctttggttatgttatgcttagttccttgttgcacaaataaagaaagcaatagcagaagtcgaatctggaaactattgttacatttgcgacagggaaggtacaaatttatactgttaatgagtacttgcatgacatacatgtcgggacgcacacattctttttactgaacgcttggtggtgttaactattaggttgctagaaggaaagagaaagaagctgcagtggctcaaaaagaagctaggatggctctttctaagctctcaatgatgggacccaattcattaaacatcgaggacaagtataggttcatgattgcttcatcgaatatcaaaagagagggatcagctgatagtgcttgggatgattagtaaaatctgccttgttgcctattaagttcaaatgatgagccagagttcgaactcaaagcttcaaaggttggaaatagcttgtgcatcgagtgaaatttatgtatctgcatattttagagacttgccaccaattgtttctgaagctgttattttcttcgtctatccctttcttactgcaccttgctctttttcatgattagtaattctgtcgatggaaataaatggtccaggcacaccgcttccttgttgggcttgaagtgcaaaatgaactggagatgatgagtttttctgtaagttgtcttcgtatctgttctgttgcttttacatgttgatgtaactagtcaccgtagcagggactaactggtctatctcattagaaaagcttgtaggttatgcattgtgtagtgtacatctcaaagtgaagtttactgttttactggagaacagaatttggtagtattgaaatgaaatttcttgaagatattaagttttattaaaaggttattcattgatttatatattaaaataggcaaatatatatgggttaacttcacaccttactaaaccattagaagatttagttggaaagtgttttgttttaaaagaaaagttggaatggtaatttggtatgtgtgtataagatagaactatgatctcttactcgttatcatgtgcttttatattagagagaaaagataatgcttggggtcctgtcatttgttgacattttagttcataaattgaatcataatatatgcagcagcatttttagttctttcttaagattttctcttttttcgggctgaaatgtattgaagatccttattctttttttgccagaaaaattgtattgaagaattgaatagttgtaatgtttctatttttagagaagcatcaattgcagcaaagtgatgaaagattgagaaagtcgggacttaattttttttatttaaatgttgggtttggaagttggattttggtggaaaaaaataaataaggaaaatgtagaagaaaaaagtgcggaaaattagggaaaaataaaagtggcttttggtaacagttttgtttttaaatttttaattataaaaataaaagtaaaaattttgtttttggaaaacaaaaaatgtgtcttacaattatttttattttttaattttaaaaataaaaaataaaaatgtgcagtaaattttatttttatttttatttgttaattttatttaagttgggggttctaggtttgggttggggttggggttgggggttctaaagtctaagttgaagtgagtcaaaatattgataaaaaaattgtttaaaaaaaatttaaaagtgttttttttgtttttaaaattttaatttttaatataatataaaaattaaaaagtaaaacagttttatagaatattggaaagtatttttatttttctattttaaaaataaaaaaaaataattaaaaagtgttcaaaagatattaatttttatgttcaatatagaaattttgagttgaattgaatttttttcgtacaattcttttcatatcaaacatggtaaattgatttttttttttttaattattttgtctcattttccttctttctctactaatatttaatttccaattattggacaattttgaaacttcacgccccagataataatataataataccttttttttttattaaaaaaaaacaattgatgcattagaatattaaaaaattaaaaacatcaatttaacaacaataataaaatagtgtaacgtttaagactaggggtgttcgtctaatttaatttatattattttactcatagttcatttaatctccactaacaaaatgtttggtagaggagggagagggatagaaggattgatgatttctcttgtttagcaaagagagagaagggaagggagaggatttatggagggataccctttctcttcaaatacacaatttcttatctttccaaaaatgaggaaattgaagaaagagatgaaaagttaggaaaattttatttatacctcaaaattttttaaagacactcaattttaataatttttattttatataaaatgtatatctttaatt

SEQ ID NO: 304596 - DNA, 1387 bp, Cannabis indica
gtatccaataatatactaatatagcacattgctagtactaagtagttagcgatttcttattagttacccaaatttttagtaactaataacaaaaaatatatgaactgagaaaaaaattaataaatagatacaaaatttttttatgtggttaggacattaatgagtgttagttcacgatagcattactaatgtattgtgtacacttttagcaatgtattctctctgtaaaatcaaatttttttgaacccctttaatggtgaatatctttccatattataaggcaattaaatggaccggactaggctgaactgaatttgtggatggttcacagtttcaagcccattagtagtgtgattaaatcttattagagttagggccttagggtagaggctcaatgccaaaattattaggtgtgaaacactatagtattatgcaacactaatgtctcaagtcgcacatggtcctattttttatgggaaaataactatgtccaagtattggacattttaattcctagagtgttcttttttttttttttgtccaaacctcttctcaaacaagaaaaaagagatattatttagatttggtgtgattctgtcaggaatatgccatagaggatatgctccctggatggaggtgagtgcctaagaaattgcttcattcttgaccactttgttagtgaatgtaggaggagagttgtattttaaatttccttgctcctgggctggggctcgggactttggtctcaagtcggctccttatccatctcgcttgttcgtgagagattgatcatgttgctttatcccccaagggacagttccagactctatcgcccatccattttatcttcctggtcaagaccggaagatagttccttcaatcccgaccttacctattctagggcgtcctaggtgggcatgggcccacatcctttcttgggcctatgatggtagattttggtcctcagatcaatccacgtgaatgacacatgtcacactaagagaaaatagagataacatttactccccaagtttcttccacgctggagaaaggaggggcttgtcttcgcgtctgtgtttaatcatgttccttttttacttcctagcctaggaatagtaaggagggagaccacccttcgtgggttgtctttccatcttccaaataccttttacgtgcgggtcatagatgtgtagtgacttttatgctccttgtatggtcaagtgaaacttataataaatgggtatggcgactaacataatttttacccatatgaatcgtttctataattgtgaaggagaagttgcatgttccaacacgagtaattatgcattccttgttaaataaattaacaattaacccaagatctatttgtatataacatagaaca

SEQ ID NO: 304597 - DNA, 1461 bp, Cannabis indica
tgacgaaaaaccgcgtcaacaggtaggttttagtcttttatatgtctaaataaatcttcatatatgtattagttgtaatctagctcaagtttaatacctttcggattagtgttgtcaaatgaaatgtgttttgtagtcctacaaattttgcaaaccaaaattatctttgatttgggaaatacaaattatatataaatatatattaagtttggtttttttctttctgattttggtgggtgcactccaaaactcaagtcttagggatatattctatattttctgaacagagggctggaatggatgtggaatttcattacaactgatgaggaaataagtgcattttccaataattctctgtattggtgcttaagcaattaatataatttgttttcttttgtattatcatgtagaacaagatttattttcttttaagatgtaagtagaatagggatttaattagaataattcaagtacaaaaatgttctttgtaagtaaaaagaattacaattgccatgtagtaaagttactttgcctttacaattgtagaagacactgaatcaaatgcaggataatttgtagtttctcttgttttttatagcttgaaaggttctacatgaattgtatttaaagacataaaacttaaggtctagcaaagtttgctgttgttaactagaaagattaacctgaattctctactttcaactcaaattggtggtgaaactgataagaaactaggagtttgtaaaattgtaataacttctctcttgatgtattataatctgattagcttacctatatcagataattggtttctttgatagaagttaactacctttgtaatttactgatttgataacctctctcaaccattattttgacttaacaaagaaaaaatatttattatatgcagagattaaactgacacaagtaaataagatgggaaggattatgcatttgggtgatcttccatttgaacttttaatacatacttcctctaacaacaccagagatattgctataaaaactgtaccttctgcttctaaggtactaacttttcgtcacattcacaaagtaaattacatagagaaatttaaatttctatgcattttataagggataattggttaggagaaccaataattagagtaattttaaaaataggacacttttacaaaaacccctaaaatactctcctcataatttctaaccctttctctctcatctcaaccaaatctctccatccttgcgctcccgcttcgcacgaaccgaacggcgcaccccacctcccacctccgaccgagaccagtccgacggagacccacagcagcccactccgatcgacacgccgacggagacccaaaacaccatccacgaaccgaacccacaatgtccaaggtaggtttttaatttttaatttttttttttttgtgagaaagtattaaagattgagtttgtttgtga

SEQ ID NO: 304598 - DNA, 977 bp, Cannabis indica
tgttataatataataatttgttttttttttatttttacaaaaatcatccaataatttttcataaaaattcttatataaccacattttatattgaccagatatatttatatatctaggatttgtattatatgagtctttcacatctaataaataatttaatttgttctgatatgcatgcaatacatcatatatagccaaaaatggctctctttttcttagagctatctctttgtctctctcattaattcaaataataattaaaaccctttcatatatataatatatatacatgataatatatatacatattacatatatggtgcgacccacgtgcagctttctttgagtctctatctgtcacgtgcacctcatacatgtctcctctcgtagttgttttcccttattattttgctcattaatatgtctctttcatcattagtattattcaaatatgtatgaaatatatacatacatataacacttattcacatgagacatgacccatatatctatatgtatatatatatattgccctagctaataaacttcattaagcctatccatattaatttgatatatatagttcattccctacttgaaaacaatggctagctcatacaatggatcatattcatattcttacatatatatatatatatttatatatataggttcatattatcattatcatcatttatcataattcccccaagacgaaggacacttctaaattcatatataatatatatttatttaaatataatggagtgtggctttgttcctttcattgactctcttgtcacattttcctttaacaaagctatttaaattgattttgacttttattaaaaaagaaaaaaaaaattcttttattatgtacattgtatcaaattcataaaatattatatataggtgccgtttggtaaaccttttatttttgaattttttaatcacaaataaaagtaatatttttgttt

SEQ ID NO: 304599 - DNA, 1166 bp, Cannabis indica
aaaaaataataatatttattaaaaataaaataataccattgacaatattttattttatttttgtcaacagtattattttattttgttgaagatgaaaatttgaaagatacatttatcattatttttattatttttgacttaatatttattcaagccctcactcaactaaatttctggcttcgtcactgcccgtactgtgaacacttaaaatatttttttatttagaagaactaaactacaaaatctctaacatacattaattttaaataattttttatttattaatattttgtcgatgtatatatatttatatatatatatatgaaatgacataaatcatagaaaaggagaagaaacaccaatggaagacatctatgattgtatatacagacaaatcaattgaaagatcgatggagtgattcttactatatataacaaaattattgtgatagcatctagctgctatacataataatatagctcactttatttatttattttgaatttttgaaaggaaaaaataaaagtatggaaatgtgtggatatataaacttagaggcccaaattcctttcaagaaagtaaaaaaaaaaaatgaaaaatttagaggacaaattaattttgcaaacaagacaaaagtccatccccatttcccacctttgctttacttatttatgaagtatatgtagctagctagcaacataaaccggttagagaaaaggtacaaaagaaaattagtcagtccacaatcgatcgagatcggctttgtactattcatcagtacttgtttttaagagattatatatatgtatatatgttttgaacattcactttaaaaatagaaaaaaaaaaaaaaaaaacccaataattaataaggtactacatgaatataaaagttcttataggatcatccaaatgtaatggttccaaagtttggaattaatcaaaatttgtttatgtttggattagaattctagcttattacaatgtttcacattattaatatatttacatgactattaaattattaatgtcttatttaattttacatttatttacatttattatttacatccaagaagtaagacactgtagttgttcttaaaataaaaatcgagaaaaaaatgtatatatattttaattagttacgacatatatttataataaa

SEQ ID NO: 304600 - DNA, 1353 bp, Cannabis indica
taaaatatttccaacactttcaacttcagccctgctcccttcagactaataccctcattgcaaggaatcaactcgcgttgaaaagaagcagtagaaaaacaattttcaggtgcgtcatccaccttcaatcacggcccctacatatgcaccgtcaggccttgcgcagggtttacccataccgtcagagccacacactccttgtttgtatgagccagctttccacaattaaaacacaaataagggagtttttcatacttaaattgtatccaagactccgatatcgatcccgattagaggaaaaaacttgctggtatcggatggctaatccagacatcaacccagcacctgagaaaactatggcgaacactctcctctttactttatttgccatcagttttaactagttgcccgaccttttttgcgagaattggaatgttagattctgaaagactccgagtaggaagcccatgaaactccacccagaactgagtagtgtcaaacttcgacatacgaacttccccttcgattggccaaagttttagatttaacaaaacaccgttaacctgccacgacctcttgttcataacagtggtgcagtctacttaagagtcaaaagagaacccaagcactccttcctcaaactttttcatgcgccaattttgctccaggttccaaacactcaaaataatttttttgaccacagaggcaaccatgttcttgcaacccataactctacctatttaccacaatatcctcaagagaggtcctaaaaaaaaactcaccatttctatttccatctcactatcttgttccatgatcttctcagcattcaaatcaactgagtccacttccaccgtaacgacatcacaacccatctcctttattgtgaccatgtctactccaacttcacgaggccaggacatacacggcgaaaaccaaacaaggggacgaagggaagaaaaaccaagatttttaagaagagagctaaatcagccaggccaagcaccaaagacttaggacaaaacctagaacgtctactaagagactggacccatcaaggagccaacatttcgacgataagtaaatgacttgagagagccgaagaatgtggtgtagctttaagaaaatttaaggtgtcgaatttaaattgacgtaacatgtatgaacggtctcgtattatgggcgcgtcccataaaggtatttcaagataccttatctcccgcagcctatagaagacgttgaataccaattggtttaatagcaatgctatattattattacgggtttttacaaaaatattgaattttgagtaaaagtttacaattttaccgtcacacgaatttttttacaaaa

SEQ ID NO: 304601 - DNA, 1709 bp, Cannabis indica
tttaaggagctgatattattggtaaaaaacacaactaaagctaagttaaacaaggatatagccatagcagatgatttgattttgaagaaagaagacttacattaggtgtcttccctggaaatccatacgattacaattgccaaaagagtaagaaacaaagtgtcagactctttcgaaatgggaaaggaaaggaactaaaaaacataataaacatcaccatcatgtatgagtagaaaagataaatcagaatctcacctcctttaactctcctaaagcctgggattggctgagcttgagcaaccatcttgtcgaaaacttgatcgaaaatctcttgagttttggtaccagaaacttctatgcttatctgcttaaacatatttttgtggtgattaaacatatataatcaaccatatgggcaagttaaaaacatcttcattttctcaaacaaattgttatcacacctttaattctccaggctcggtatcatcagaagcagtagtaactgatatatcattcaactcggaatgagaagaagaagaagaaacctcaacatctttggcgcctattttaagtattgacagaacagaacagaagaacattagttttgcttaaaatgtaatacctaattgggataaagggaaataaataaacctcaacctgataacacagcagaaatggaaggaaaacatttgtgacttgtcctgtaacataaaagggaagtgttaaggaaaaccatacaaacattgttagtgctctttgaatagagatttagaaaggaaaagaaaaaagtcttgccttgggtataattttcctgcaaaatttccaagtcttacttcatgataacttgaggaggaggaggaggtgcatgcctttctgcaattgagattcggggcatttaccgttcgatgagtggaacttgttatctgtaaaatttcaagtatgatgttttatgacataaaacaaagtagaaatcaaaaaagattataatgaactttaccttaggcttagaaccgaagaagaaagtgttaacggctatttgcattattcctccttcttcttcttaaaatgcttacaatccactaccctgaatgtttatccaatagtcttctcagataacaaaaatcttttgctaaaaacacatcagaaagacaataaaaaccacttttcttcttcttgttgttcttttaatatgcttagaacaaaattcctatttattttcatttcataaaactcaaaacttttcctatcaaaatcccaataagaataaatgaactccctatttcttttcctcctatatcacaattttctcaatggttctatcaaatcaagctcttgtttccatttacccatgtcataaaaaatcaattaaagcatggtacttgatgaaacatcagcatttcaatccactaccctgaatgtttattcaatagtcttcttagataacaaaaaacttttgctaaaaacacaacagaaagaaagacaataaataccactttttttttgcttttcactaattgcatcataattaaaaccaaagtttttgtaagtgtaaccaatcacatagtgtaataatttgattattatacaaccaattatgttgttaaaaccaatatacaaagaaatagtcttaataaactgattgaaaatcttacataacccattaaaacttggtagctacacattcatatcgaaaaggacaaaacagaaag

SEQ ID NO: 304602 - DNA, 3378 bp, Cannabis indica
ttggtagcatcaacaaaagagtacatgtgatgataaccggatagaatagtggatgttgctgcaatgtattttaaatttttagaatattcatttatgagatttctttctgtttgcagtgagaaacttgcataatcaatcttcttgtttcaaatatgagtggccgcttttctcgcactatttatgtcggcaacctgccctcagatataagagagtgggaaattgaagatctgttctataaggtttgttttaaacttatttactgcaaagtgcaaacttttggtgttgctgagttagatcaaaaatttattaattcattagcaaaagttatgaagggtctaatgatttcacgaagtgattcaattatccacaagctaacaaactttactgctgtctttgcagtatggtcgtatagtggatgttgaactgaagataccacctcgtcctccatgctattgttttgttgaggtatgcttctagtcatagtttggatgcatttagagttaaagctgatttattttccatgtggcttatcttgtttgtgttttggttttagtttgagagttctcgagatgcagaagatgcaatcaggggccgagatgggtataactttgatggttgccgcttaagggtaagatagtattcttgctttggctattctgatttttttttggtagttatttcttaatttatttctccataatgcaggttgagcttgcccatggtggcagtggtagagggccatcttctagtgatcgtcgaggtggctttggtggcggtggtggtagtagtggcggtggcggtgggactgggcgctttggtgtctctcggcattctgagtttcgaggtacttatctcatcaaatctcatcaatgacaaaatactatttcatgtaataggaaagtatgtttgatcctgagctgacaattgattctagtcttgcttggttgttattcattgtttgattcatgtgtattttgctgcagttattgtgcggggacttccttcttctgcgtcatggcaagatttgaaggtatggtattaatacttcaactctacagaaaacttggtattgatattttatatatttgttgccgtgggttatatttctggtgtattggtttcaggatcatatgcgcaaagctggtgatgtatgttttgccgaggtttctcgtgatggtgatggtataactcttatttggtttctcttgcagtttaaacattttaatttgtctgcttcagcagtttattttatttgtgaaatgtaacgttcgtgttcctgtttaattgagcttttaatggcatgttcaaatatactcaacttgctttctaataattgaatttttttctgccagacatgttaatatgatcatatgaaatgaaatgaatactcacctcttggaattgctgtatattttcagggactttcggtctagtggattatactaattatgatgacatgaaatatgctgtaagtatgtgggagatagtagttcatatgcattttggcagcctttttataaattttaacattcattttcttttccagattcggaaacttgatgataccgaatttagaaatccatgggcaagagcttatatcagggtatgtattttccttacaaaatgattcaacctttctatcagctttagacaatttcttcatctgatatttgacattgactttgctccttttgaaggcatcctcaccttctttcatccattttttattgttcaaaacttcaaattagaaactgttagatcgagcaaaaaaaagtacaaactgttagcttagcattaattcacttcagcagaaaccaaacagaaagaaaagaagcttagctttaagtcttttgtgatgcttcaaattgatttgccaattatagcaatggttcattggtatatcttatattcatgtaaagcttgtgttgtctgcttccaggtcaggaaatttgaagccagtccttccaggagcgtaagtagaagccgcagcaggagcagaagtccaaaaaggaaccgcaggtactaacctttctcatttcgcatcccttgtttctcttcgtcaattgttgtgtataatataatggggaagtcatgcctccttttctttgctggcagtaaatctgtggaccggtcatcagtatcaaggtctagatcgaggtcaaggtcaaggtcaaggtcgatgtctaggtctagatctagatcgccttctcccgtcaaatcttcgaggtgggtatttttggtcgctcaagagacatttaagattatgtataattctgcatcgtatatcattctgctatcctaattgtgacttgaataaacactcgttttttattctaggccaagatcaagaacaaaatcaagatcgagatcaatgtcaaggtcaagatcaagatcgaggtcaggatctcctcgtccggtaagtgatgattttacctttagaacaaactttacttgaaaagaatgtcagaattcataaatgcaaccattttgctttacaaatgagattgtttaattcttctattgttgcttaatctcgattccattttcaggcgcggtctggcagcgcttgatcctttatcgagcaagaatatgcagtggagttggcgctagtagagaaagaattattaaaaatatatatgagtgtggtctcttttgttataaatttctttaggagaacccttattattgagtatgagtttgtatgatttacaactacacacagggctttgcttggctgttggttgatattggatttgactatcttattttagtgtattttatagtaactgattatattagctgtgactatgagtttgatggaaatttgtgaaactttgtatcctagatttttttttaaggattttcaaaccttttttttttaaccttttattggattattgaaatgtttaagccttacaaaatgctatttagccttatgctacaaaattacaacttagaattcaatcattttacctaatttaatcagtcattgatcatttttacccaatacttttgaggaaaaaatgtttatgatatctcatgataaattgattagagtagcgatgcaagggattatttgttgatgggagaaaattttctaattctttagtagagatcatgggtctgttgatatcttatagcttgttctattttgattaataaaattatcttttgattaaaaaataattcttattaattttttaaattgataaaataaaatggtatttaatacaaaaaaaaaatcctaaattatatttattgttaaaaataattaagtatcatagatctattatgtataaaataaatgacttaaatattatttattataatataatttaggctaatttagatttttagttccttaatttgacacatact

SEQ ID NO: 304603 - DNA, 2621 bp, Cannabis indica
ttatcaaaatattctcattaattctatcaattaagcctgttatgacatttctagcccccgatcgagtctccaaggttgtcaaacctgaaaatatttttattccacatatagttcatattacattcacacatactatataaatctccgtaatttaaaaatcacgcttatttatccacttatagcaaatttaaaattttatgttgaactaaattagttggattatcatcccactcattacctggttaactcataatataaatataaaccctaattattaattattaagcttattgggatattacaaaagtggtctttcctgtgtgccatgataaagaaactaggagttcatgagaggtggatttaggtaatttctaaatgcatctcttcctgtacctattcttttattgtgaatagggaggtgtggtgacgtgattcctacccgaggccttagataaggggaatccaagtgccttttcctctttcttatttgtgttgagaggttgtcttctatggttcataaagctagtattgagaaaacccgagaaaacacgagaaaagcttaatataaaggtcacccatatttttattcttaattttagtttcaagcaaactaactaagccaaccctttttgagcaaatcaattacttgatttctctatgtttgagttgactattaatcccccgaacattccaaacgagtattctatccattaaatgagtattaatcctccttctctcattgatccacttctaaaattgagaattggtttgatatagctgcatcctgattccctgcaattgcagagtttttgttgatgctcttttgaagttttttctttttccccacaagctagaaaccttcctcatcaatggttgatccccttgtttttacttccattcttgcgttaggaacccatacttgcttcgtttgggctttgtttctacataaactcgtttcatgtcccataccagaacaattcttgcatacaataggcatctattcatacttcacatctagctcaatgtcatgatcaaattcatctgtaaatgatatcttcataggaaactcttgtgctaaactgacttcaattagaattctcgagcaaagtaatctctctcggtgtttagtgatatcatcaatctaaattggtttcccaatctgccaaaaattttgaagagtgaaaattccccccaatacattatgtcaagacctctaatctgtacccatgcgggaactgaatcaatatttctttggtgaaatcgtccacagtgttccaaggcctcataattatcaaagaagataaaacctccatctaaaaccttgtccccctgttccaggttcctgaatcttatgataacaactccatgtgagagcatacccactttgactacctcctccttccacattctccttccgaaatcatccaatatgttcagtggtggattaactccagccacatatcccacaatcaaaggtttccaatagctcacttcttctgctatatcagctaattcaatctgcattttctccttatcctgtttcactgattcatttgctttaaaaggtacaaaggaggtcttaagattccatactagatgttaagatcgtaacactagcggcctcaacatcttctcccccaattctacatctcgtgccgttttgttcgcaatgtccagctagtcgagaagtcatctttaaaaaaatatttgaagcatatttcgagtagtttaaaaaaatactttttaggagataatttttatatccatatttcgagtagtaatatggtgttgacacgtataatatatctagaatatgaaccagcctgagttacgcaataataaatgcattcagacaacttgcctcgaaaagtacagttggaaaaaatatttgaactcaccctcctaaagataatggcaagagacaaataataactaccgattgatgagaccaacgagccgaatagaggaagtccatctcgggatatatagaatgcactacaaaattttgtagaaagggtaggtaatgagttatgcaatgagctcacagctcattgacccacatacacatgagtatattgaaagactaaacataacaccttcagtgtgattcacctcacaattatcatgctacgataagcgtctcacgtatgcctcactcaatattaatagaagagcgcgaggaatactatgacatatacttagacgatgacttacaataaagtatctagaacagtattattgcattgtgagaatgatgaaacatagttagcataactacctgtagataatgttaaaagtgcggttatggaaagttatttataattatctaatgtgcgtaaatatgaaacgtggagattattcacgtttcacgaacggttactagtgatatgatcacaagagaataactgtcatcctagactcctataaatagggacagaactcagggaataaaggatgactaatttgggaaagaaagagaattacatctgtcattcattctgtaaaacaaattattgtattatgtatacaatttatcaaccccaaaataagatggactcgtggacaatgaagaattgacttcaaaactacgttaaaaatcctcttgccatttattattatta

SEQ ID NO: 304604 - DNA, 3157 bp, Cannabis indica
gaattgagaattacgctttggctgagacactgcgcagggtaattgaacgaggagagcttagatctgcaaaaatcaatgtcgaagcaattttctgagttgtttacaatcgaagatggaggattcggtttgattttaaccggaacgacgctatcggttatggagctagagtgaatcgtgtttgagtaatcaaaatcaagaaacgaatccatttcagagaaaaacaaattatcagtactcgatttcacaacaacattaggttcttcctcctcctccgccgccgttgccgccaccatgagcttagaatcaaaattaggattagaaatcatccaaggcaaagaagcttcatcgttacgacacgcgccaccaccggtctcgtcagagcacgcgccactagcaggtacggcgaagaaattaagtgcggcagaggagcggacgatagagtcggttgagtcgtagaacggctccacgggaactcgctcgtggcgctgagctaacggattagccgagtggatatcggcgtcgcatgaaacgcatagcgaagccgcgtcagctttgcaggtaacggcggctggagcttgctcgcagacttcgcagacccaaactcgctcgtggcgcgacgccagcttgttggcgcagtggatcttggtgtcgcagcttagacacaagaaagccgagtcagctcggcaaaatacggcggctgaagccgccgatttgcacgagtcacaaggcttccctacgataccccaacctccaccgccgttaccaattaatcccatattcttctcttttattttttaaactattttaattttccgtcaccgttaccgtaaaacgccgtcgttttataatttcgacgagaatagaaagagagagtttcttcttattacttctcaaatgaaatgaaatgattttgagttattattattagagaaagcaaagcagagtagagagtagtgtttatctattaagtcagagacgaagaaaatctttgggctagcgaataggaatggtacacgtggacaattcctgtccatgaaaaaatgttttgttttagataaattttattaagtttttttttttttactgttttaacttttttattatttacccaatggagcaatttcataaaaacttttaatatttatttcggattcgttgctgtcaaacgtctgtgccgacgcgggtcccacacgtgtgccatttagacatggataagtgcgactggggagtggggatcgatccaattcaatgataaattaccgatttaattacaatttatcgtcaaatattaaatatccaattaaatagaattaaatgttggatgtagtatttaaaaattcaatacattttatatctgaactaattaatgtttttatttaatttgcataagtaattaaattttatgttgttatatatataatataaatgtatatattaaaattaacattaaaattttactttaaattttctttttttgaattggatggatctaatccaatccaatacatagtgaatctaaaatatttgatgaattcgatccgatctaaaaaaaaaatattatgtttaaaatattagataaatgtgaatggatagaaccaatccaatctaatatttaattgatgttagatcgattagataattgaaattaataaatcagatcggatggtaaaattaaacattcaatatatatattgactggatctaaataaatttaaaaatattgaatgtggtccaataaaatgagaattgagaaaaatgagtcttaattttaatttattttttataagtaaaaattgtattgaattttattacttttttttttggctgaattggtatcaaaaattgtttattcttaatattttggataatttttataataattataagagggaaatttgttacatttttgttttttatgttgtaatttgttgctttaagtaactaagttatggttccttccaaaaaaaaataataagtactaagttatggatgaataaataggtggccattcgtatgtggggattgttttagtgtagtgtgaagattttaaatgtaaaatttaaattaatccgacttatatttgtaaaatctaaatttatttgacctatattaattgtgttgaaattaaaattcaattcaacccatttaatttgtttatataaaaaattatttttaactttgttaacagttcattaatatgttataataaatgttgagaattatggggttccatctcaaaaccaattggcaatgactggagtagaccatgttcttatatatggctcaattctctaccatttattccatgtgggacattgtccacaataataagtttaacatgtttatgatgcttttgtgatacatttataagcaattttgacatatttatgtcttatttaacttaaaaagttatttacatgtaataaatataatgtggtataattcctctaaaataaaagatctccgaaaaaaaatcttgtggaaagctagatatcgtccgaaaagagtatggaagtctagcttgtccacttcgaaagttattcatttatggaaagttagatgtcatttagaaggacgttctcgaaagtctaacttgtccatctggaaagttagtcttccttcgaaaagaagttttgtataactagttgttcccttctggaagggagtctcagatagtccactccaactgtcgctattcttatccagcaagtcccttcagcgtacgcttcggttcatcttccaggaagcatccagataagcatttcatcttccaggaagcatacaactcatccaaaagcattttaacttgagttgacgtggaagcattttaaaattgatttcttaattttaccacaaataagaattattatttattctaccaataaataataattgattaattctcattaatctcttatttcacaaggcttaaaataaataaaataaatattattctctaaaattatatatatatctctctttaatattattatttagtaataatattatatttaactaattaataaatttttatccaataaaactaaatagttaaaatactattaactatacaattcataatcgccataattaatcaaaacaataatttcacaaattattattttggccttaagaatttattttccatagaaattaa

SEQ ID NO: 304605 - DNA, 4490 bp, Cannabis indica
taattaaaaaaattatttttaatttttaaaaacaaaaattatttttcgaaaataatttggcttgcttggctgttttcaaaaaacaaagttacaaaaaacaaaaaatttgtaaagaacaaaatattgttttctgttttaaaccaattcacttttggtcaatattgtttttaaaatacactaaccaaacatgacttgtgttttaaaaacttcaaaaattattttttctctcatttctaaaaataattttttaaagataaaaaatagaaaataatacaaaacatgctctaagagttttgataactgtgcttgttttcaaatcacaaacaactaatttgtggaagccaaccttcaagagaatctgattactagtcttgcaatatttcaaaggtacaacactgaggtgataatcataaagtttaggcctaattaagaacaacatgctccaattacagctacaaatttctttattatgatctttcatcacccatatctcataacaccatggaccatgaatagttttgactacacaaacgaagccttcaaattccacagctccaaacacataacccttactttgaaatggcaaaagtactgtgtttttcagtcttaagatcaaaggcaaaaataatgaagtttacaccactttttgacctcctcctcactacccaatacaaacaattatcaacaaagccactattactcaactcataaccatagttttccaaaaaagcattgtgacaatcaagctttttcaaagtcttagccttaacataatacaagtggtactcactgttggaactttgatgaatattttaacaaaatataaaagtgtctaaaagtctcacatgtaatatgaatacttgtttacaaggtatagggtgcaactttggcacttgagtttgggctccaagtaatacccagttttttgcgaatgatgaggactcacacacttgatccaccacatacgcgcgtcgttcgtactctctttttttcctaatatttaagttaattgtcctatttcaaagagataaaatatttaaaaatatttaaatctatacttctccccaatctgtttgtaagacttttaacttggtacctaattgtagttcactctcagctttaatgttttgaaagactttgaaagcatcaaacttatttttaagtacaacaaaatgaatttagagtacacatccataaaataaatataatatttatagccattaagtgaaagggtgtgtgagggtcctcacaagtcagatacaacaagttgaagaggagaagtattcagtttcaaacattttgggaaaagggagtttatgaatctttcaaaggcaacaagcattgcaatttttattattgtcaaggttatttatagacacattacaataattcagtttcagatattttgggaaaagggagtttatgaatctttccaaggcaacaagcagtgcaatttttattactgtcaatgttatttatagacacattacaatgattaagaatagtctgaacaaccctaaaggaagggtgtcctaacctgtgccaaatggaaaattcaaaaaaaaattgttaatattacaattggaacaagtatttgccacaaacttgacaccattgtttgaaattgaatgaggaaagctttgaggtatagattgataagactgtggagaatgaaattgcaagtattgggaggcatcaaacgaatacaagtcattctgatgtgtccccatcaataaaatagaacgagtcaccttgtcctaaacaaaacaaaagtaatcatgaaatttaaagaaaatcttgctatctttagtaaatttaggcacacttaatatattctttgtaatatcaaaaacatgcaaaaggttatttaacatgaatgacttagatgaatttggtgtagaaaagaaataatgaccaatatgttgtattggtaaacctgcaccattacctacaaacagttttttagcaccatcatatcctgctccatgaataaggtgatgattgtcaagagtgcaatggtttgtggccccttgattcaggataccaattattgtcctgactagaaatggtggaggtgagatttgcttgggttgagtttgatgaactagcttgattgttaacagttccattgaaactcttatcaaacctgtagaaataatcttgaacagtataactaaatttaaaacataactggcactgaagcttgtttccaggattgctcgatctgtcttcacctctgccataattggattgagcttttttgccaaatgatcctcttgaaaggaattagagttgttgttaccaccaccttgagtgtatcctcctctgaaaactccatgatttgtaggatagaactgagtgggttattgaatcttggatacgaaggttactgtctgtaattaccaaaattgtgattgaaattaacaagattggcctctggatgattaatgtcttttactctgagcactgatctcaacttcacgatatattttctctattctcgattctaaagcaagaaagtagagatttgattagtgcaacagaataggtttccaatctagtatttgttgagatgacaaaagtatcatactcactcaagagctctttgaatataatagcaacatgatctttagagtgtacatttctccaacggatgcaagaagatcaaccagatgtttaactttcaacaggtactgagatagtgttaaggatcctttcttcaagttttggagtttagttcgaaactcaagaccttctgcagacacttgcaaagtaaagtattgctctaatattgtctagatttctctcaaagtctcacatccaaccatgcacgtaagtaaactatctgtcttggaagaaagaagccatgacatgagtaattgatcttgcacttcctaatcaagatacaccaaattaaaagttccagcaacacaatctgcttcagacagaaattaagctggtggttcacccttgatgtaggatgttaatttgtttccacgaattgcagctcaaacttgttgtttccatagcaaaaaattatgatcattcaaccaaattgagagactgagtgagaaccacctgtattgcttccatttctagtgttgtcttttgatccagagtgaccagttcttccaaaaactacattagccattaaagggagtaattgctctgataccatagtgttgaatgctatttttttttctttcttcttttatttattattaaaataataaaaataataataataaaaatgagaaagaatcattcaattgaaaaaaaaatgattaattaataattcatctccacttttctctccactaactcataactacccaccactcacctctccactatcagataacatatatcgtaaaaaatgagtttaaaaggagagagaaagaaatcagagaagggaggaaaaaagagtaaaatatatacacgattaagagcaaccgaatgcaataatagaaattagttaggccaactgaattgagttgaaaaaacgattaactaattaactgaagttaattagagctaaactaacgaaaaattagttagtagttgctatagcaactgtcttcacaggatattaatgaaaaaatttaatttaaatttataaaaaatatatatattattacattaatactatagttatatgtaaaattttggtggctatatatataacatcaattagtacgaattaggctttttaaatatatacaaaattaaattatgaaaaagcttataggtatattcgagagaattataacctaccttccacttttgcactactcattagtaataatatttcatataaatacattgtggaaatcctaatttcagatcccatgagagagagcagttcccaaccaaaaattataatttattatgtattgagaaatgaaaatactaaaaatattataaatagtaataaaacataattgttacccaacaaccttttatacacgataatataaagctccaaattagacccaagtttattatttgaccctacagatctttatatatataatatatatagattggtttggattgttagccatttggcaaagaaaatctgcactataaatatattgattcctagctaataacctaaccttgctttttgcaaatataaaaaagcaatctatcaatctttttcatcaatttctcccaccgtccatctgcaatgctatcatcaattcttatacttactacgtacaaattttgattatgatttttctgtcctttatattatatatatacatatttatttcatatactagcaaaaaactacgtgaaactacgtactaaattttatgctaggttttttctatgttatttgaaagtgagattattattaaatactgaatgcaatatattagtgtttaagaaagcttaatgattcaaatatgttcttaagttaatccaaaaataaattaaaaatattatagtgtttaagaaagcttagtgtttgcaatatattagta

SEQ ID NO: 304606 - DNA, 4774 bp, Cannabis indica
tgcttgtatataaacaatggttcctatcataaagattgagcttttcatttttcttttccctgctctgttcttcatgctctgtaattctacacatacaaaaaccaattgatttgatttggatatacaatagagaaggctagctcttattataaatacaaaaagagatatcttaatggtagacttaaaaccatgtttaaaataaagcctaaaagaaaataagaacaacacacatataaagtaatacaggatgaaactatgaacataatccataatacatgatcgcttaaccaagagaatgcaaagacttaataatcgaacaaaagacttacccggattcttttttacaacacactatcgaccttcttctatagtgtaacttatttcggtgttcgctgtttcaggcttactagaagaagctgtgttacttgatcctcttctaaggacaaaagctggttgtttgacagatggaagagttgcagaatcactatcaagcatggttacaatgtttgacatgtttggccgatcaactgggtcttcttgcacgcataagagcccaatatttacacacttaatcaattgaccttctttgcaactttcctgtagactctggtccattaactccaacaccttgttttctgtccaaagtttccatgcctgaggaaaatgttgatatcccatttggttaaactgaaagaggaatataacttgattgaaaaagaaatacatatagagctacttacataacccaggagggtcaagggtggatctgaatcaacaaatagtgtgctctttttcccacttactatctcaagtagaaccacaccaaaactaaatacatcggatttgacagagaaaagtccttcaagagcgtattccggagacatgtaaccactgtaatattattatttaatgaattaaaagttatttgtcagtattctttcttaccacttttgacaacttttatggaattgaagcattctttgaaatgattcatgaatccaattcataaattattatgtcaagatgaaaaaacttactacgttccaacaactctacttgtgttgtcctctgtttttttgcctccaaccatcctcgccaggccaaagtcagatattttgggagtcatatcacagtctagaaggatattactggtcttcaaatctctgtgaatgatccttaatctagagtcttgatgaagataaagaagtccgcgagctatccccataataatgtcaaagcgtatctcccaattcaataagcccctttttgtgtcatcttgcaaatgatgcaattttcccaaaacaataaattattacgttcaatggtatacacggacaaaatggagaatatatagtagaaatagataccaaatatgaaggcgtctaagcttttgttaggcatgtactcgtagagtaaaatcatctcctctttctctatgcaatatccccgaagtctaacaaggtttcgatgctgaagttttgctattaaaatcacttcattcttgaattcatgtatcccttgtcttgaaacacttgacagcgtctttactgcaatttcttggcctcctggaaatttcccctgatgtgcacagtaacatattttgatcagggaaaattatgtaatttttcaattttttaagcacatatagtacaaaatttgctcaaaaaaggaaaagtgtgacatcattgttattgtgcttaatcttagaaacagtattaatgacaaagcaatacaaactatttaacttcgtttggaagaaactcattgctgcaaagtgtaaataggttcctgatgaggttgttttataactttcatacctatattgaaataaatattaaaatatacaagcgaatttattaaagctcatttttgggttcttatcaatgagtatatataagtttcttcatagactgtatcaatattaaaataaggagcacatgcaggatttttaacaattacaggctgactagaacccacataaacaaataacctaaactagccacttttctattattttaatgtaaccaataattactttggtctctgacttattctatcaaattattaaacaataacagattaacattagagacaaaaaaaaaaattactgaagctatatatgtaccttgtaaacaggcccgtaacccccttgtccgagtttgttttccacagagaagttatttgttgcggtgagtatactttccaaagtaaaaaatggtacatctatgcctttctcaccttcctccttgatttcgctagagttcatcaattcttggatgtgtctctcagtgtctaacttgttaagtgttctgttttgttggttagacaattgtctgctctctgaattcaaaagaaaatcaaacatcatgcatgcaacaaagtgataacaactctgacaccataggatctcaagagtcacttagattggtataggatcccaagaatcacttagattggtaacaactcagaccaattcacagatcacacgctggaactcaatcacttaagttcaggaactagcagcaagtaatttgtatgtaatgaaaattgaaatggaatggaatggaaacatgaattactaaaattagttagcgattagtgcatactgtttataccacactgcaccgactacatatgtggtgcgcttcaaaaaaatttggtcaaaaaaccgctctacccgtaccacgaatacctctaattatgagagctaagattatttataaactaaatgaccttgactctaaaaatacaaaactaacgggtttaactaactactctaaactgctaaaacacgaaaaataactgtcctggcaaaaataattagtacgcaaactaatatgacataatacttcgcatcttctgatttgaataactaacctcgcatttttgtctgcttttttctccatatgataagcgaaataaaaatgattgacagaacaattacgcttgtaactgtaagcgaaacaatcagatataacgatgttcttctcgttacggctttacaattgatgaatttgaagtttcatcatctggaaaaagacacaaaaagcatacacacaaggtctaatttattgtcgacctgtaagtaagactaaaaattaaaagagagactatatacgtacttaaatcggataaggtaactcgcacaaagaaggtgtgaacgccatctctagtaatattttcctcttgaagatcgtttagattttcagaccatgtccaacaactcaaattagttggtgttgaatcccctctcttcaaactattctgatgagtctcaagtgaataagcctggcatttgcaatcatcaaggcaagtcttctcacattcagccacattgttaacttgtatgcttgttgttgagtctcgtcttcccactttcatcatcttcaacttcaagaatgtgtcattttcgcagagttttgattctctggtacagacatctgagtaatctccagaataccactcctcctccaccaggcttgacttaaatcccggcaaacatctgcacggcctcatctgctcattagtgttacagatcccgaaatcgccacaaatgtttagctcatcgcatctatcacttggtacagaccatgccacttcccaattttgatcatcccaagtcacgtactcaagttttccattagagtagatcactaacctactatactttgatatttcttgtccaactttataataagtggtatttctaggttttggctcacttttattttctaagaggtctgttatcatagtcggcatctgatttgggcttaagaacatactgatttcaacacttctccagagagtactcgttttgttacggatgatgaacgagttagttccctcacccttagtaaacgatatgtcaccaacgttagggtcaaactggtctttccatgaagtcaacgttaagctctcatcctcatccatcttcataccaggaagaaatgtatcagttgggtttttgaagctctcccataatcttataccgttatactctgttagcaccagatttccagtatccaaaagggttaatgtcctgtttgaagatgaggaagattcgagatttgaagaccaaaatgaccttcctttaccagcagaataatcaaaaagttgaaggttaccatcttctgcaataccaaaggttcctcctcttgttcttgaagtggtgactagtggattttttcggttggcgacccaaacaaccgtccttggactgagcttgtagtaccatatcccaacatatcgtttctcactaggactgccctcgggagtgaagaatccgagctcaaaaatttctttggctgaaacaagcgtaattgtcttctctttactattgactttgtctctgatccagtcaccatatatcatggtatctctagcagagcaaaaaagactggaatagcaccacaagaaagttattacatatttgtgattgtgaacaaggaatgggcgtttgttcttatccatttaattcttttttgatggcaattaactagaaacttttcttgaaaactctgtacagacgaacatatcatccatgtcctcccatctttgcgatttttggttcacgtttgttaaaactctaagtgcccagttgtgtcagcacatgctcgtatctttcactaaattattattattattattattattattattattgttatagctgctcaactttaacatatcaaagtattcttgtttaacttaccgacatttttcttttttcttttttcgtaatataaattttaggatttttacactatatgtcaaa

SEQ ID NO: 304607 - DNA, 3123 bp, Cannabis indica
ccgacttcgcccgaaccccagccgcctcacacaacaacgaaccgaaccgaacccccaccgccccgcccaccacgagtcgagccccacctccgaccgacaccagtccgacggagacccacagccgcaccatctcgaccgaaccgaaccatccacgaaccgaacccacgcccattggtggtaaaatgatatatgatcatcttaactttgaacttagaaattatatcatgtatatcattttaccaaatgtgcaattatgggaattggataggccgttgatgttttctgatatgagaaagttggtttcgggttccgcatttggtgtatatattgtttgattaaatgattgtgtgaatatagttttttttgttgaaaaatttatttgtatagttaaatagtcatcaagataccttataagcattcatggaatgcattataggtcattagagaattgtgttttgtgctttgtattttgcttataactaatgtttgtggattaatcattgtagatattattagttgttgattttgatcacattcttttatgcttttcacctattagaagcatgtgacattttggatattaagagtaaaaaatgcttcacatacgaactaattggttttaagtagttttattattccgggagaatgttgtcaacagaaatgttcaaagtactcttctgtctttttatctgcgatgcattgaaatttatgataatttattgtgttgttattagtacatcatctagtgattctgcaaccataataacagttttcctgtcttattcaacttctctgcttgtgaaaaaaggtgggatttcattctgatagtttaactaatggggaatgaatattctgatagtttaactagtggggaatgaatgtatgtattgcattgtataaatataagttatggttccaaaatttcattttatgaactaatcttgttttctccataggtatttgtaggaccttggaagtgcttgagagaaacaagttgatcttgtcttgctaatctaaaaatatatggccatggctgctgcatgttctctgtttacattttcatttcaagagggcatctgctctcagaaaacaaagacatgctctaagaaattcatgcacaattacctaaatcttacgcgcaatcaactgggttgctccatgtcaatgtatctcaaacatgcaagatcattgcacagtgagaagtccttgatattggaagaaactgaaagattatcaaaacagaatagaattctctgccgtgcactagaaattgaaaattcgtcttcttttacattgggaaataagtttcaactcgatgatgtgattgaagctcaacaatttgatagagatattcttaatgctatatttgaagttgctcgagatatggaaaagattgaaaagaaatcaccaggaagccaaatcctcaaaggctatctaatggctaccctcttttatgaaccctctactaggactaggctttcctttgagtctgccatgaaacggttaggtggggaagttttaacgactgaaaatgctcgggagttttcctctgcagcaaaaggagaaacacttgaaggtaatctctcatatttgctatattgagtcccttgatgtgattttccctgaattgcttgtgatattgatcttgattttcagattctataagaactgttgaaagttactcagatataattgtaatgaggcactttgaaagtggtgctgctaaaagagctgctgccattgctggcatccctattatcaatgcaggagatggtcctggacaacatccgactcaagtatgcaaaaaattatcctttcattggactagtgaactagaagacttaacacttaagccaccataacataatcataacattacaatttagtaattggccacttttagatcatatcctgattgtttttcatcttttgttaatgtcctctgattttttgtatgaacaggctcttttagatgtctataccattgaaagagagataggaaaactcgatggcattaaagttgggcttgttggggatcttgctaatggaaggacagtgaggtcacttgcttacttacttgcaaagtatgaagacgtaaagatctactttgtctctcctgatgtggtgaagatgaaggtgctactagaattattgactatgtttttgttagtttgaagctgatttgagagtgaacaatttatgatcctttaacattttcattaaccttatatatttcaggatgatataaaagattatttgacatctatgaatatcaaatgggaagaaagtgctgatttaatggaagtagcttccaaatgtgatgttgtttatcaaactcgcattcaacgggaacgatttggggagagaactgatctctatgaggaagctcgaggcaagtacattgtggatcgtcgtgtgttggaggcaatgccaaaacatgctgtagtcatgcaccctctaccgaggcttgatgaagtaagtacatgaatctatgatacttttgagtgaaatgtatagctgctgaaaaaaatcctgctagtgttaaaatgccaacgtaacaccagttgagctgtctatatttgaatgttaacatggtcaaataattggcaaccaactgaacatgtgttttttagctgtgtaaggggactttagcttagcattttatgttactgttttactgacattacaatttggtctttcttttccaatcattaacaatttcagattactgttgatgttgattcggatccaagggctgcttattttcgacaagcaaagaatggcctctatatcagaatggctctccttaaactcttgctagttgggtggtgaggcaaagcgttgtcgtttgaacctgttttgttaaactgtgagtttttgctcaagtcaaagtgatgctaaatgattaataaatttaagctttttgatactttaaactattaaccataagaagcaataaaaaatatcattctatagaagctatcttttagtatcatgagagcatgtgcatatgcataaagaaaaaaattgcataccaaaactattgtttgttcataattaacaaaatatgtaactaaaaaacatataaatatattagtgtatgtttcgcatcataactaaaaa

SEQ ID NO: 304608 - DNA, 6475 bp, Cannabis indica
ctctctctctctctctctacatccccatcaaccaactccttcccctttctgttatatccaaaattcgattaacacatcagaggaaaacacgtgtcaagctaggaaaaatacaaaccaaggcacgtaattataattacatttgaggtggaataactcattaaaagcataattaacatagtatatttacaactcagctgactgaatagtcttatgcgagataaatatatacaaattgttgccttgcacatcaacgagaaaccatgtaacttaaggtgtataagacaaggcactaacctcgattaggttgatgagatatactgactgtgaagacacttagcgtataatatcaaactaagtataacagtcgggcaaacctgaacaactaatagcgaggcgccaatctcgttataggaaggcatgctcctgtttctttcacctatcaacttcagacgtctttcagtgagacttacagtcttgacgagttagaagctgacattcgaatgatgactattgaagtattcttttcatcattaagaattgtgattgtcaaagtgaagtgttatgccttcaaacgaagaaacaacgaggcgtacatcatcaatctcaaaaagataggggaaaaaactccagctcgcgatcaaggtcattgatactgagttcctaccgagacatcccagaacgctatgatttaagacgtgtttaaatacacgatcatttttgtccagtgccccataccagagcagcattggaaccaagaaaaacaaattctgatggattttaggtagtaactaaaggcaggaaggttaaagaacaagaacaagttactgaaacaaagattgacaatgcttttcaagttttaatcaaggtttctgatgagaatgaagaaaatgaggagcaggatctggttcaaagtgcattgaataacacaagagaggggggaggggccctctcttggttatggataaatttctatgttggaatgtctgaggagctaataatcagcaaaaacagagcctaattaactaattcattcgatcccaagatgttggtttgattggcttcctcgagattagggtcaaggtctagaaactagggaccttgtacctaaatgtatttcatggttggtgtttttcaactaatatagcatggcaccatagaggaagaatagcaatagcttggagccctttaagatacattgttgatattatcaaatgtacgggtcagcttgtgcatttgaaagtttcagcaatggatggtcactacagtagcttccttactatagtatatgcttttaatgatagaattggaaggaaagaattacggaaggatttatgtggattggcatcctatgagaaaatggctattaatgggggatttcaatgccatattagctaaagaagagagaattggtcataaggtgaaatatcatgttgatgcagattttattgactatgttacccgctatcaagttgaagatgttaaagcaagtgggaatttctatacctggaccaataaacaacaagggaatgacagaatattctcaaaaattgataggatcatggctaaccagtcttggattgatcaatttcctaatgctaaagtaatattcttgaatgaggggctctttgaccactcccctgggatgctaactctatatcctggtaggtcaagtggaaagaagcctttcaaatacttcaggatgtggaaaactcatcctaagtatgatacaaaactatctaaattctggacacaagaggtaaagggttccagaatgtttcagtttattagcaaactgaaagctctcaagttagtcttcaaggagataaataggaagggtttctcttatctacaaacaaccactattcaggccaagttgagctagaagaggtacaagtgaagatccagcaagatcacttaaaccctgattatcatgatgcagagttagtagctaggaataaccttttagaggctcaaagaatttaccagtcctttttgcaacaaaaagcgaaggcagcatggatttagaatggtgacaacaacacgtcattattccatgcaagtatcaagcaaaggattaggcaaaacaaaatgttctcaattgagaagtaggatgagagtagggtgaatgaaccatctcaggtaactgaagccttcatttcttattataagttcttattgggttctccatggaagataggagaaggatttttcccaaggtgattgatagagggccaatgttgacaccaacacaagctgaaatgctgactaaggaatttactaaagaggaagtgaaacaagctctctgggatacctgggaacaaagccctagggcctgatggattttgagttacttcttccaagacaattgggagctaatgggggagtatttaaatagagcagtcacttttttcttaggaataggtaaaatcctaagagagagattaattccacaattcttgcacttgtgcctaaggtcaattgccccaatatagttaaagattttaggccaattgcttgttgcaatgtcatttataagattgcaactaagttattgtgttctagaatcaaaattatccttcttgatttggtttccaagaatcaaggagattttacccaagggaggttcataggacacaacattatgatatgccaagaccttgttaggaattatgggaggaaatccaacaaagctagttgcatgatcaagcttgatttggaaaaaattttatgataccacagagtgggattttttggaggagatgctttatggtctatattttcccattgcattcattaaactagtgatgaattgtgtgagaacccctaaattctcttatatttaatggatcccttcatggattctttgaagctaagaagggcctaagacaaggggattcaatgtcccctttgctatttatcttacacatggaatacttatataggattttgggaaaaattggagctaaggaggattttcactttcatgataggtgtactgagctcaaagcttaaccatcttgcttttgcaaatggtgttttattgttttgcaggggtgatttcagaagtgtgtattacttgttacagggtctcaaattggtctcaatgatttcaggcctgcaacttaacccacacaaagatgaaatttattgcagtaacatgccaaaggaagatgtaaattgaaacctagaggccgtctggttttacctagcaagaaatgccattcacttatttgggggtccccatctttgcaaagaaaatatctgggaaagaatgtgctataattgctaagaaaatgatagcaagaatcagaacctggagctccaggaatctatcttttacagctagagtagtgttaaacaattcagtgttgatgaccatacatgcttactagtgccaggtgatgattttacccaagaaagtgattaggaatattgagtctatttgcagagcattcttatagaagggacaagcattatttaatgggctaggttctattgcttgggattctatatgtcaagcaaaagctacgcgtggtataggttttaaaaaagttttggaatggaacaaggctggaatggggaattacatatgggcaataacataagagaaagacaatttgtggctaaggtggatacacagtgtgtttgtcatagaggaagactggtggagttacaaagctccactccaggggagctggtattggggatgtcttataactctaaaggatcatttcaaaaatttgctagatggacaacatgtactgcagtaaaagtatagtgtgtctaatggatataaaatgctttgtccaggccttaataaagttcattggagtcaacaagtgtgaggagactcaacacaccaaagcatagctttgtgatatggctggctatacaatagaagctgaaaactaaggataggcttaaaaggatggggattgcagttgaagagcaatttttgtgtgcaaccagcagaatgaaacatcttctcatctattcttggagtgccctgttgctgtgcactgtctatagtggaaagcagcaaccatatctctgcctaaaaataattcattgaataggagatcaaaggtgagaaaattcaggaagcaggtcttagctactgcattagctagtcttgtctataacttatggtgatatagaaacatcaggatatgggaaggcattctccaggaaccagacatgataccaaaggagtcaaagaatggtgtaattcaaagagttgatctatgttggcctaagaatgttggagaggataaagtatggttttatactctgtagcaggtcaaggaaaattaaaaagaaggaaaaagaggaatagaagttaacgagaataattgtatagattgtatagttgattattttaggcccttaaatgggtgctaataggatgtatacatttgttttgagcaatacaaatttttgattcatcaaaaacaatattgacctgattaaagttatataattcttaaatcactctattaatagttaaaaaaaattaaacatatgataaaaaagtcaaaccttataatatttggcgtgtaagtgtcgttctttccatttagagtactcattgcttgcaattttttttacattgtctgccatttgttgattttaacgagttagttaccattaaagtctcactgtccaagctcaaaggtagtcaagatagctattcttccaccttatatccaaccaagtgagaaagaattatccaactttagtaatgaattattaatatctcaaagaacacaagtatctccagctcgaacatcaaaaattttaagggtattatgttggctaatcccatacaagataaatgaaccagatgggacatgacaatgaaaagacattaggatattgctataactataaagatcattggtatgtatgtatgatgacaaaaagacaccatcattacagtcctaggttgaaaactaaaactagttgtgtaaataattacaattctatgaggtttggtatcagaaataattctcctcttcactctaacatcctgccagattagtgaaggaagatttttctttctggcacatatctctttgacactttcaaaaccatactatgaaataatgtctgtgttcaataggttgcaacttggggaagcgaaatcgacaatcgtgactttgtagctagctaatcgttcattggcttatctaagggggagtaattgaagatgtccttgtcaagtagataagtttatttttttagctgatttttatagttcttgacatggaagaggatagaaatattcccattatccttgggagactcttcttggcaaacagccaagctttgatagatgctcaagcctcatcatgaccaaattagggggaacttggatcacttggaagaaggctttcaaacgccagaacccactggcattgcatctcaaagtatttatgtaaaaggtggccaagaagatcgggtgataaattgaaagttgttttaaaagtaacccttgttgcgtggtgtgtatggagtggtagcattagcatgttagctatgaggtcagacatttaatctattactagttgtatggatttcctagactactggattttttactagacatttaatgcttcctttgaaagtggagtaggaagatagcaactggaaatgagagaaaaacataatagagttaatttctatgcctcctacagtggctagtagtagcccttttgaatcgaaagtcaagcggtttggtttggtatatcgttggaattggacaattaatactgtgccttcaattgtgcagggctaagttttacttggcggtttctaatttataagttttacattactcctcatttggattttcatatttaatttgtgattatctctgttatgtcacttacatatccaatgaatacgaatcgtatttttataacactggggatttattaatttctcctaatcacagaaatttctagtgcagctattttagtttgaaatgcaatatttcttttgactacattgaaaaatctcggaaaattttgaatgatgaaattgaccgttaaaactaatgctacacatcatcatatcatgcggagcggagcggatcactaaagtagagtttgagtgttctctttttattttaaaaacacacacacacacacatagggttttagagggctttgagtgaaaataatgaccgtgttgaattaattttattattttggatgttaatgtttacgattggattggcggtgttacttataatactattttgcgatctgcgaatagtattgtccacacattaattatttctattaataatacaagagaatatatttagactaataataataaataacattgtccacttctgcaggtcgataccagaatcatcagatttacgcaggaaaaaatataaaggagtgttactattaatttttttttacaacctcttagttaatttttacgcccgaaaatatatgtc

SEQ ID NO: 304609 - DNA, 716 bp, Cannabis indica
aaccatgcaacataaaatgttatttctgatctttattaataagtaaatatgattatattgaaatgggttttatttagggcacaaaacccaacagttccgtcttttgcaatggagagagacattagctcgtggatctttctcgcatggcccgcactcgggaagtcttctctcgcggagacttgttcttcgaggttaatgttgttatcttctcagagtgcaaagtgaggcacttcaaaaatttaacgactcattgaccttctttaattagtatccacgtgtcgtcatggcaaaaatgcaaataatatttacccccaagctttcgggacataccatggtccgggaacttgcagtatcttctcttgagagatctttcacgcccagggaatttatgataagtcttttaatgcattgcatcattagtcgtcaaaccgaagtgtcattattaggaaggcgtaatatcttctgttttcttatcgggatcttaaatgctgacttttgggtttctacgcatgtgccgagcgcgtgttctttgggaagctcaaaatggcagtgattagacttaggcagtcttctcatttgctgagtgttctttacgatgcatgcaatgatgggagccgtccattgggaggtgaggtatattgggttttgtgccctaaataaaacccaccacaatctgattagttatcaatttagaattttgaagtgaattatgatta

SEQ ID NO: 304610 - DNA, 1612 bp, Cannabis indica
tatgccactaaaaaaaattattgaatttatgtcgcttacaaactcaaaattttaggtacttatgccactgtttagccttaatttaaatatcaaacttccaaaactttttttcaaatttaaaatctaacaacatttttgttcttctattttgattcgaatacagagtatggatacatgatgaaaataacagagaagagcgatgtttatagctatggagttgttgtgttagagattctaacaggaaaacaaccaattgatccaacaataccagaaggactccacattgtagattgggtcaaacaaagaagaggatccgaaatcgaagtacttgacccgagtgtccgagcccgacccgaacccgagatcgaggagatgttgcagaccttaggtgtggctctactttgtgtgaaccctgggccggatgaccggcccacaatgaaagatgtggctgcaatggtgaaagaaataaggcaagaaagagaagagtatgtgaaagttgatagtaatcataaacaacaaaacattgttaagaagattaagggttcttctagtttggttggtccatcatcaacaactatggctagtttctctagatcatcttcttctttgatgtactcttcttcttcttcttccattgccaagtgattattgttattatcatttgttattagtgaaaaaaacaaaaacaaaaagttgttattgttttttttgttggaataagtctaataattattataagtgcttaatccagattgatttttagttttttttttggaaagaaaatttcatttttaatggatcaaatcaagtgttaaatttcaatagctttatattatcaaataacaatcaatacctacaaaaaccatctaagatcaattatttaagtttagagcattgcatttacaatgaaaaaacatacaaatatttggatattgaatatttaagagcaatgcacctatcatccatacttctaaatattgtacacttttctatctacacaccaaaaacaagacaagaatgcaagcaattttgatgaacactactcttgtccatgtagagtggacatagacccctaacatattagtactgccatctttatccaaagtagtgccaacatatatatggtagaaattacacaatatacatcacatatattttggggataaattgaaaaaatatcttttttttatccattaatcaagagtactcttatattatattttattaaaatatagcaatctttttgagtgggttacccaatatatcctcactctctacttaagtctagtatataatttacattaactaaagatctaataaagaccatcatctataaagttggtatattttaaaagatataaaaataaacgtaaaaattaaaacaaataaaataaagtggatatacaatataattttctcttctcatgtatttctgccttagtatgtatattgggcctattgggctcataatattagggaaatttataaaaatattggaatttagattaacatttacaaaaatactgtcacacgaattttttttcaaaaatactgtgtttttataaaacacttgtaaagtacaaagcagaacaacttaaaacaatagtagaac

SEQ ID NO: 304611 - DNA, 1267 bp, Cannabis indica
attaaataataaagaatatatatgtaatcaatcgtataaaagctgcatttaaatttaaatatatcaggctcctcaaacattcatatttacaaaatcatactttcaggtgtactaaattacttctctttaattttcatcctttccttactaatacttattatacaataaattcaatcattagaaactcataaaataaaaaagcaaagatttgattacttaccctttttagataatctttctatgatctgtcgttatttcttcaatctttctcaccaattaaacctaatataaagtataaacgatttagaggagaaacataatggatttggctagaaatatataggtattatatatataggtttatatttctcaaagacttgacaaaaagtttttttgttaaacaaaaccctagacttattaggattaactttaatttgaatgttaaatttagatttctttcatttataaattaattaaataataaagaatatatatatatatataatcaatcgtataaaaactgcattaattaaaattaaatattttatatatataactattattttttaaaaatgattaattaaattcttagttaaattaactatttataatttgaactttaatttacagttatttattaatttgaacactaatcaattatatataattaattatcttccttagttttcgaaaattatcttttatatcctttatatatatcatacatatctacaaatatttaccaaaattgacaattaattttttttaaagaaaatatgggaacttcattaaaaggcattaagccaaaaaaattggaattacaaacgatagacaaatttaaacagctaaatcaggggaaactcggccacctaaatctaccgctcgttttgctaaagaatgagcaacatggttcttagaccgattacaatgcgacagggatatgttactgaaagaattccgaataatatcattaagaacaataccaaattcattgagacaaggagcttttctattgacagctaaaactacccactgacaattggagaaaacagcaatcactgtataccccatctgcacgcagcaagaaagcccatggagcagagctttggcttcggcaacgtgagattccaacaatctcacccaaggatcagccgcactcaagaataggacatgccccatacgattagaaaccaaagccccatccctatttttcgattctcaacacaaacccaagcatccacaaaaagattgaactcaccaagaacca

SEQ ID NO: 304612 - DNA, 1196 bp, Cannabis indica
tttaattttttgttttttttttcttttactacggttttcctcagtcacaagtgaggttcttcaataaaaaataaatttgagtggagatagaactcttactctttttcaaatcattatgataataattcatatttatgtatttttgctgacacaaaccatatttcgttaagtgagttcatgaatagggctcttgactagttagttattaacatagaaacaaaaatatcacatgccatttttagttggaaaaaaattaccattctgatatatcttaactttgataaatattgttgaaattcatgatgctgcaggctgcaatcattggatcataaatcctttcaatgagatgcattagatcctggaatgttataagcactaagcatggaagactcatgttcagttagtagtcctagaagaattgtcagtctatcgaagaggaggcaggcaagcgtgtcctttgatgaccctgatgataaatcgtccaggtttgggcagcctggtgaacacggtccaaaaccttccgaagtttatggatttgtaggttccatcacaaccgttgtagctacaggtataacttgttcattacagtttttttttttgcacaacttagactttgtcttagtctaatccaagtaatctacctatttggcttcattacatcctacactgttttgacaaacttttgaggtatggatcatgtgagaaaaaacttggagttgtgtatattttcatacaaatttttatggaaatgtgttgtttaattctatgtcctgctggtaatattgaaaaatgtggatcgtatacatgaaacatagatccacctaaaatgaagatgtatcttcataaagtagtgatcttttcagatcccaaaatcttcttcagtacatgtgatatttctagattggttaacattattttctcgttcctgcaaacagcggttttcttgatatgggcatatgttcctgagtcttggctacattctattggaatcttctactatcctagcaggtttgattaatttctttactgtctaatttctcatattttaatattcttctctgcattctattttggttggaaatagagaactttagctagctgagatttggagtccgttttggtcagacttagataagatgaaaattaatgaatgttttattggagaagtgaaaaatatggtggcgtttggtaacact

SEQ ID NO: 304613 - DNA, 1604 bp, Cannabis indica
aaaaaaaaaacatacaatgacactctgtaagagtatctaatactttacaatctaacaaagtctgactctaaaaacttatagtgacacgcgatgagtgactttgaaagagtttagtgacccaccttgaagtgtcacgaaatactatctttccagtcactcacattagtgacacgcagtgaagtgtcactaaaactcattttggtagtagtggttttaaaaagaatggaaaagatgatggcccactttcaagcgagactcgatgacctagaaaaagattctgaagaggacacttcaatactattagttgacgaagatgatagagcgagccctgttgacgttggaccctctactcctacaaaggacaaggggaaggggaaggtgggtgagcttcagaacaaaatttctccctcacctcctagaaaaggcatgaatctaaccaaccagcccttgcagatgcagaaggccaccgatgactctgggcttggacacccttttgctccaaaaggccaagttgcgccaaagaggcctggtacaaaagtacctaagcctaagggaagaaaaaactgccctagcgattctgttaatcaggatgttaggatagaagaacagttctccaaagatagctggtctactgtgaaccttcgaaggcatcttgacgccaagtataaaaaggctaaaggagagaaggtgatgccacgtggaaacgacctaaggaatcacttaaatgataaggtttgcagacgcgaccttccagatagtgacacaaaaagattagaagagcaaattgctactttaactaagcatgtccagaacaaagtgggaccctctcagagtcggaagatgaggacccaaaactttttgttaggcagatcacagaagccccactagctgagaatttctaaatgccacaaatagagttgtatgatggtcgtacgaatcctaggacacatctgtccaaatacaataagatgatgcaagtggcgagaggaaaaataaattcacgttgttttaaataccctatatcttaaggacaacaagggtattcgggaaggccgcccctaaaatttcttggagaggtgccttcttgatccatcactcagaagcgtcttcctcacaggacattgcctttgaatatcaggtcgagaacccacaaaaaatcacagagtagcgagaaactaagaaataatccaattcaaatcctaggtgactccaaatggataaactgagattgacctaaacttcacaaaaattacccctacaaggttccagctttcgaaccaatttattcaaaaaatgcaaccacacttatggcaagataatctcattcctaatcagctctacaactgctaatctcccatacactcttcctaacagtcacatgcatagtcaatttagaacacaacttgaacataaaatttataccctagtgcgaaaacaaaaaagttaaaaagggtttgaaaacttacttgtatcatggttcaaagaagggagatgggttgttgtgacaatcaattatcccgtgatctgtaaggagaaataccgagttagctgagcaatcccacattgcctggggaaggtcaagtgtgatgattctgagactgtgt

SEQ ID NO: 304614 - DNA, 1955 bp, Cannabis indica
attttttcttctgtgtgtgggctgtaacaacagtagttgttttgatatgcttgtttcactgccttatgaaaaacacacatgcttacctttatcttatgtctttacaggctgcagaggtcgcacactccctcttttgcatgtgttacaaattcaatctacaagtggaaaatgcaactactcttcttttacttgctgaaattcacaaggtacaatagtttaacatataatatatactttgcctagagtattaaaataacctcccaccttgctactactttctcccgacatgcccacaggcgtaaacatgtaatgtaagaaaaaccaaacagaaaatgaaataagcaaaaccattctgcacactgtatagttgtcttttcattttccttgcttaagttcactttattgtaaacgtaaaattaaggtctggttttgtttatttatttttccagagatcaggaaatcctgttttaggtctcccttatgcattggcgagcctttccttctgccaatcatttaacttggatcttctaagagcatcagccgtactgacattggcggaattgtggctttcacttggatcaaaccatgcaaaaagggcattgtctcttatacatggggtccttccaacaatacttggtcatggaggtttggagctccgtgcacgggcctatattgtagaagcaaaatgctatctgtctgatccaaacttttcaagtacttcctaactccttaagcaatttttaaagttgaaacttaacactatctttataattatgaatcataaatatcatgttcttattcttgaaaagttttgttagagttgatagcatttatcagtcataaatatcttggttcttattcttgaaattttttgatggattacaatacaagccatctgataacattgacctcataatgtacttattttcctatcttgaattcctctccagtttctgaaaatgccgagattgtgctcgatcctttgagtcaagcttctgacgaacttcaagtactagaggtaagtgcatttctgtattccttgtgttacaattacaacatgcaataaacgaaaggcacgataattttcttataacttatggtttactgctgcattcgattctagtctaggacaacattcaattctctccagtctcctgtatctctacctttcatccaaaatgtgtcattatttcccttttatgatatatatctataatatacctcagataattggccctcttaactctttagttttcacttgtgctgcataaacacaccttaggtgtcgatattttttattcttaaaggcggagttttagtgctgtcataatacgaatcattatgattatgattttgcagtatcatgagttggcagcagaagctttttatttgaaggcaattgtatatgacaaactggggaagttagaggacagggaagaagccgcgacttctttcaaaaaacacaccatggctctcgaaaatccccacgaggatgaagattcccttatcaatatgttgtaaaacaaatatctcatatcatattatgtgaacactgcatttgaaattttcatggttatagaaagatgtatatacatgcagagattagtcacagacagctctcacgagaaagaaaaacaaactatagttgaagcaaaggcccaatcatcaaaaattagtccaaagaaagtgattattgctcttattataaccgattactacattgaaataggaatgtagaatgtgctaaagaccgagagataatagtagtgttgtgtaattgaacttgagctttagactcagtccttgagttagatttgagctttgagttagattgtatatggggtttctaaagaggttcaattgttgacctgcaatgaaagttggtcttagagggtgcataacataaagtgttgagatgtaaaatgactttaaatttaaaaactaaattagtaaat

SEQ ID NO: 304615 - DNA, 2802 bp, Cannabis indica
ttttttttttttgtaaaaactcttataaaagaattatttatgttcctttatgtcttaattaattcacaatgaaataaatttatgggtatagtttttctttaaagaatgggtgggtctatttgtactcattttttctttatctttctctttttacacttttaaatataaaatttgggtgaattaataaatatgttatgtcacaattttgaaaaaaaaaggaaagattggtgaatgtttatttatttaaaatatttaaattatacacaacttgacagtattgatgccacacaaaagatttaaactaaccatctttatgtaagatggttatgatgtaatgtatatcatctttttatatataatttatatgtctacttgtcattactcttattttatgagttatttcatttcttattatttgattttgagatgaaatttaattacatctcaccatatatatcactctattatattttctcaaccaacttctataattttaacaattaagagtggcaagttttttctttttttttttaaagcaataaatcatccaaattgaacttttgtacttattcactaatgggtaatctatacaaaatgtaataatatttagacaaattgatatttgcagagcaaaataaaattaaaaaatgtaactaattttattttagctttatatataatagtaaatagtaattaaactacgtaatttgtatcgtataaatcattagatgaaaaagagctatttatggtcacaatagtgtgaacaaaaattaaactagattgctctcaatagaattttcttcagcttcatcgtcaatatttgcattttccatagcctggtattaaaaataagtaacaaaaataaataaatataacaaaaatactttaaaattatatgataccaaaaaaacatacgtacttggatcaacgtgtgagattgctccagttttctcgaaatcacaagcatagccgttcgttcccattacttggtaatacaagttcatggcataagctgcatgggctctgactgaatcaggtagaaagcacggcccaccttgttggattgggccacagtccaggcccagcccacatacataatcaatattcttctgcaaggcttctgaatcagccgccattttgggtagacaccaaccttttcctctccctcttctctccgcatgcggtggtggtgacgccactggtccatcatttgggcctgggcctgggcttgggcttgggcctatgtacggacgatccccaacaggtacggacgatcgagcctgtcatacaatagacaaggcgaaaaaccaatcaagcaaaatgaccaaaacgacgacgattatcaaagatatttttgggtggtttttatcaacaacagcagcgtctactacaactccgtgggccgtttccaatgtcgtagactggcgtaaaatcgggcctgaaaagcccaaagtttctctcgcaagttgggccgggcttgagattcattaaagagaccaaatatgtaagtctcgaaagtccgattcggcatgagaggcgtgcctgaaccagaggtcacgtgacgtaagagattcccgttgtactccgccgccgttgccggatcaactccgatttggggcaaatctccgtcggatggccaacccgtttcggcgatcacaatatcaagatctggaaaccccaaaattttcatggctgaatacaccgcgtccagctgagcatccaacatgttgttgtatttgagctctgtgttctggtcaacgacgccggcgttgactcggaacagagcgtaatcgatcgttagcggtgaagacccaaaaaatgggtatgggttcaccatgaaaggggaatcggtggagttgagaaaatcgagtaagggtttaagcacatggatgtcgtagccttgccggaactttcctgtcgacggcggactggaagaggcgagaatgccgagggaatgaggagtggagactttgattttgcggtcgagtcctgcgtcggcgagggcggcgtggagggtttccatggcggggacgagggaggcgattaggagtttgtttgcggtggctaatacttcgttgcccattaaaattcggacaatgtcggtggccggaaggtaaggttggaggttggttttgagccattgttgagctgaagcgagcttagtgagatgtgggatttgatcgttggggatagtaatggtgagtgagattccagtatgagcaaaagctttgatgatttctgggtttgtatcgaatagtctaattttgttgataatggtggatttaacaaggaatttggccacttgagttggtggtggaagatcatctgctacagttccatagttaaccccaataccttctcctccaactcctacttagcagaaaagcaaaccattaatactagtatatataaatatatatatatgtaatttgtaaatgtattgatatatagtgttgtatttgtacctgaatggagagaagagatggtgagaagaagcaaaagagcaaatcgaagaggagtttccatgacagattacagtgaagaagattacaatgtcagtggtggtagaagaagccattggtgaagaagaagaagaagaagatatgctttgctttggaaatgggggattttgatatcttgttggtaagggtttagtataatacacgattattaatttggcagagattcaatcactttgagtattacgtgatcttttccttcgaatattgttagttataattttatatgattgaaatttgatgatttgggttgcattgcatcaagttattttttttttttttt

SEQ ID NO: 304616 - DNA, 2773 bp, Cannabis indica
ctaaatgaaggaatcctagctgaactcgctatcctccggaaggatacaactaaagttttccaaaggcaaaaaggggatgattcagagtctaattgtgaagattgagagccttgcgctagaaacatccttgtagcgaacctcccaaaattttttaaaaagcctgaaatgacgatgtccgtaggagacatagaccctactgaccacttgtctcggttaaattatgtattgacagccatgagagtcagcaacgacacaaactgtttgcgtttccggttgatgttaggagggttcgctgaggagttgtttaagaagttagaaccagggtccatagatttttgaaacaaactgcaagtcaatttttgaaggcaattcatggcggctaggaagataaactttgaagttagcgctttgacaaacatcaagtaattacaggtcgagaccctaagaaaattcataaaaagattcaaggaagaagcttccaaaactaaaaaagtggacaatggacaacaactggcgttacttcaggccagaatcagggaaggaactcttttctagaatgagctccaacaagaaagggctacaagtctttaagacttttagaagatggctcagaagtacatcaacttagaagaagcacagataacagctttcaagggatattacccaatcagtggactagggtacatgccaggaatgcaattttcgggagttattcttccattgtacctcaaacaagtggggtacaatttttagtaacaccgggatacacttacaaacttgctcttactcttgctcagcctagttttggggcaataaggggtaacccagttcgcagagtgagttcacaatatcctaccaagttcgtgcctccggcagcaagtgcggggatgctccacaaacctcccaaagcaagagatctttaaaaggaagcatgcaaactaaaaataagaggcaaaagaaaggttatacctctcagtatacacaatatattaatttagtggacacccaggaacaagtatacttggccataaggcaaaacatccattatcatagatctactcctctatacccagacagctcccgaagagaccctaacaaaaggtgtgaatatcacaataatgacgttggtcacacaaccaatgagtgtagaacttgaaagaccaaattgagagcctaattacgctaggtcacttgtatgaatggatcaaagataggtcaccacacatgaatggtggacaagttggaactccagtgcctctaggagcaccagctcaggtcctagatgtacaagtacctccgaaagttcttccctatcacccgacacctagacagcccccaagaccaaacagaagagtagccttgatcttaggaggaccgcacatcagaggttgcaggtgttataggctggaagtgggtgtacacgcacaaagatggaattctaggggtagaaaaagctagatttaaagcaagactagttgcaaatgggttttgtcaaagagaagaattagactacaatgaaatcttttctccagtggtaaaacacagattcataaggctaatgctaagcattgtagcaatcaatgacctggagttagagcaactagatgttaaagtagccttcctacatggaggcttagaagaaaacatctgaataaaccaaccaaagggtatgaagtcaaaggaaaagaagatcatatatgtcagctaaagagatccttatatggattgaaataattaccaaggaaatggtacaaaagatttgatgagtttgtacttagaattggtttcaaaaggagctcttatgatatttgtgtatatatcaagaaaaataatcactacttatctcatatcatatgttgatgacatgcttatagcatgcaaagacatcctaaatataaacaaaatttaagctatgttgaacatgaaatttaaaatgaaagaccttggtttagcaaagaggattttaggtattgacatcattagagatagatgaaagagaactctcaaactgtctcaaagtggttacacatctaaaatctttgacaggtttagtttcaaccaagtaaaacctgtcaaaactccctacactttactattcaaactgtctaaaacacgggcctatatagatgatgaagaagtcaactatatggacaaggtgctttattctagtgttagtgttgtggggagtcttatgtatctaatgattttcacgagaccggatattagctatggtgtaagtatggtgagtagctaggtttatgggacaacctagcaaggaacattggaatgtagtaaaatagatcatgagatatctacaaggcacaaaacaacttggattggcttatggattaagctaaaattttatcaacatagcaagttttgtggattctgactattcaggggacctagacactagaagtgttgggttttgtaccctatctagccgaccactaattaataaatagttataactagtggggcctatctatatggacgaccacttagttctaatttttctattattttatcatttttaattccatataatttaaattctaaccctaggtgtaatagtataaaaggaataggatggtctcattctcatccaatccctcatatagcctagtttacattttttcagacaactagagttcttgagacttccttcttccttcttttatttcgaaatctcattcattgttcttcattaaacactactacaaaaaaaggctttttatcccggtttttaagggcattttatcccggttttcgc

SEQ ID NO: 304617 - DNA, 10002 bp, Cannabis indica
agaataaagaactatactggtttgttttggccaatacccttcaaaatttagatatgtactttcattcttaacttaccccttgttcattcaattctgtacaactttctcaaacacatcacttgctcgagatggtaatactaaagcttaggagactgattatatgcttctgggagaggcataacaaaacgggactgaagatatactctgtccttcttaacttatccaatagaaaccacttcggaatccaattctgtacaactttctcaaacttcctcacgtactttctgactgaatgccactcttaaaaagaggaaaaaaaatggttatataagagagggagggggttggcactcggtagagctgcctacgtaccctttttagggatcaagcccaaatgtaattttgtctctctgcatgagtgaatatttgctagaagtagtgcgtggagaagagtaaacaaaataaatgtaaatagaatagaacagtagtttggagttttaagggcgatactgcttaagatgaacaatgttccggctgttgttgatgtcacgcccttcattcgtttggagtttgtatgttctattaccaactacctaagtgatcaggttggaatactcttcaaaatacctagtctcccaccttgaatgatcgagtgctagcgtgcttattgttgctaaacctatgagtttattctctgagtactctaattctctaaacctcaaatctgtccaaagtattcttacattttaaacctcaaatttgttacgatatactttacattttaaacctcaaatctgtacaaaatattcttacattttaaacctcaaatctgtaagtattcttacattttaaacctcaaatagatctgtactaagcaatcttactctctaaacctcaaatctgtactaagtactgttactttctaaaccttaaatctatactaaatattcttactttcaaaaccgcaaatccattcaatgtattcttactttctaaaccaaatctgtactaagtaatcttactttctaaactcgaattagtaccaaagtattcttactttcgaaacctcgaatctataccaactattcttactttctgaacctcaaatctgcaataagtaatcttactctccaaacctcagatacatagcctgctctctaatttatgtccaagattaaaacctaagtagtgaacttcatcggtatttatagttgtttcccgaggcactagtaaagctttggagacgacttaatgtgtgaagtccttttccaatttatacaaatccattgaaaccacttaatagtgttgctatgaggattacacacaatataggttaacaaataaggccgaaaagatgaaacttcaaactcacgaggaaatagtgcatcaaaataatcaaatagcacatgcactaaagaataaagttagtcttggaaagatcacaaaataagatgtatgaagatactgataagcaatgtcatgactaaacaaaacacaaagctgacaaaaaaataccaaaaaagtgaaacatatatgaataagaagaaacctgaccacaagctattagacacataaaccgatcgaatttcccaacctattccccttgtaatatatcctaatcatagaaaccactataccaaagctagtcgcttaaggagtaattcaaccacaaattaggtagccttcttagcaggaaagagtggtgtgtgtgattgtgcctcatgggagccacaacggccccctccctccaatttctttttccactctcaactcatttattgatttcacgaggaacccttcaccctttgttcttatgatttttaatgtcgtagggttagaaaggttagctttttaaactattttgatatttaattttgtacgggaagctttcactcatcgatgcacggtagccatcttaacaagttggtgcattgtgtgattgtgcctcaagggagcaacattggccccctctctcaatatttttttctctcaaatcctccccattacagctttcactctaactgtggtgcccaactcagctttcactctaactgtggctatgcaaataataattacttagggaatagagaaagaaatactctcagtaaatcatccaaataactagtaatcaggtctttctatagaaaatagaatcacagcttcagcagtgaatgatagtcagccaagtgtcttaaatataaataacataaaccgatcataagattcatagaatgtgataagtgatactaaccataacattgagctaaaattatgcagatactaacgactttttctttgcacaaaaccaagtgaatttaaagttttgattcaataaaacttgtttgtgcttcagaatggtgtgttagttataatgattagcaaacaaccgtctcagtagccaatgcattgttctctttgacttgcaacatattaatgtctggtgctgcagtgtgatttgatcattagaacttaataagtatgagataaataattaaaaaagtgaagagactaaccttcattaggcaccaactcaggaaacactaaagacatagttgtgtttggttggatagtgaagtttggaattggtaaagagttgggggtggtgagtttgagtaggaaggtccaacccaaagctcaagaaaaggtaacacttttacttttttagttaagtatttcttgttgttgttgttggaaactctagtgctcatttttctattagttgaatgaacacaattgaaggtatttcaggagatgaaatcctttaggtacagattcacagttaggcatctatggagatggaagcttaccagccttgattcctccaaagcctttggaccattgtcttttggtaaccactccattgcaaggctgaaaataaatgtactcttttggttcaaatcttctctaacaggttttaattggtaactaatcaatgaattgaaattcatgtgggataaaatttgaaacaatacatctctccaatcaacaacaacatcaaaacattgtttctcgatgtcatcaaatcttctctaacaggttataattggttactaatcaatgaattaaaatgtgggataaaatttgaaacaatacatggtactcaaaaaattccaattcaaattgcctagaaataccataaattaggatttattctaattccaattcgaatacaccaaaatataggagtatcccaaacttattcccacacagtacatgaaaaaaaaaaaaaatctcagaaccataaattaaaatggcataaatgaaatgaatgaatcaagaaacaatgaatttggtacctcaaagaaaccaatacaaaaaaagcgtgtctattttctgtttttttggtaccaataaatcttacctgtccataaacccttcattatatacatacacaacactagtatggatgcgtgcaagccaggcgtgaaaattttatattaatttaaaagagctgttataatattttaaatcaaacaataatatatacttaaaacttaaggattatttacaaatacataaaaataaccaaaaaaaaaaatttataaaaatacggttgtatagaatttttaatattttaacgatttttatgttttttttttttttactagaaatatgatatttttatgttgtactcttattaattgattgttaatttctattatttgtaagttatcttttgttgttgttttaatgttatttttctgttacttttatataggatttttgttgtttctataaaaaatcgtaaaaatatatataaaaaattataattttttacataaatgtaatttcctaaacatacctaataatattacattctacaaaaatttgacacaccaattaatcataacaatttttatatttttttggtaaattttacactattaacactttaaaatggtaatttattttctttacggtatttttttttattttttacattttttacgattttcttattataattttttacttgtttttttacaaaaaatgttacttttatttgttttccggcaacaacaacaactcactaggaattgaaattagatgtaattggagataattacacaatttagtgtatttgtctggccacgtaattatacagtaattgtataacgggagataattgagaggtctcaattactctctcctattctcatacctccatgagaattgaatataattatactatgtaattacatactaaaaagaactttaattatttaattaatataataattatttaatatgatttagtctttttttattttcttgtctcctatacataatttaattttttattctgatgctattttataatatatttttttagtgtgcttttttttttttgttattatttgaaaataataataaaaaaacaaaaaactaatatagaaatatatgatatatgattttcttagtatcatttttgagttgtcttttgaattagatatctaatagcttattcatgatttggcataaattttaattaataaaatacttaaatttgtccttttattaatttttaattgagaatgacaaatactcaaatttttaaattggaaaaccacacaataaatagaatagctcaagacatatggagcaagggcaattagatagtcctaatagattataattattttaaatatttgttacaaaattattatgaaatttaagtttatttaggaagaaatttttatttattttaaatattattaaaagataaaatttattttaaatacttgttatgataataattattatataatataatattaatttattgtataagtaccaactgtcttgacaaacatgacaatataaattcacatgtaatttccacttgactaaagctgtacattcgagcggcccaactcgttttataaaagcccattttttatgtaggctcggcccgacccatattataaaacgtgtcgggctgagcttggcccatatttttgaagcaagcccattctggcccataaacacatattacttatattgggtcggacccgtgttgggccaatctatttttttttatgaaatgattgactcatatttattaaatggcccctaaactaaataagcttatggaaaattgcttttttttttttttgtacttttcaaattaatttttaattctaaagtacaaataaattattttaattaaaatgagcttcaaaatcacaaaaaaaccataattacaattacatatttaataacgaaaattatatcaccttcatagtagtccattaataaattttcacataaagttgtcaataatatttaacataatctgttttagcaaaaaaagaaatgttgaacatataaaaatatatcaactattatcactgattcataaaaatgtgccaacataatttagaactttcgcctcgcaaaggatatattaaaataatttaacattttagaaaatatatataatattgaaatatataaataaagtatttttatatgaaagagtagatgagttattaaattaaaaaattattttatgaattttaattattttttattttgtgcttacatgttgtgctttcgtgttaagaaattcgtattttcttgccgcgttttcgtgcttgttgtattgtgttgtgttcaagcccatattttttgtgtcgtgtctgggcccatatttattcgtgttgtgttgggcccaagctcatattttttgtgtcgtgtcgtacttgtatcacccgtgctcgtgccagtctcatgccgtgtcaaaaagcccgaccctagtctacaactttacacttgacatccaaacacaccatgtattttaaaatacagtataactactgtgcattataattattaccctatagatagtaattacacagttgcttccaaaacgcacttttatggtgcattttgaaaagccaagaaggaattagaattatgtataattgaagataattacataattttgtatatttttactattgtatttctttttatatcattgatttaatcttttattcttttagttatatttttatatgaataaaatttcactccattgaaataaactattgaaaaattttaataatctacttcttttctttatcctctttttcataataattttataacatttatttattaaatattatttttattaacacaaatattttttaaattatacgttcatggtagaaaaagtatgtatactttatttaattttgtaatgcatcaaacatgtatagtactaatataattcagttcaattcaattcaagagattcagtcaaacatttattaacatgtatttgtgctcttttcttttcttctttcggtaaggttgtgctcctaaatctttgatacatttttcatttaaaaaaatgaaaaatccttgaatatcattcataatttataccattgaaacgataattgatcctaaaaaaattagttgttactaaaaaatagtaagtgaaaacaaattgtcaatagtttgtcacaatttgccaaaaaaatataaatatagactaataaaaattgttgcgattaagtaaattatatttaagaattataatttttgtcactaaatacttttagcacaattattttttgaacacattaatattgatactgattatttaacagcagatctaataaaaagctccatacataatacagttctttctaaaaggccaaaatataaggcaatgtaatatatatcaaatgttaataatggattagtagaaggcacacatatataagatgacaataaactataacttcattgaaggaaaatcactgtaatttcacacattccaaacaaaaacaataaaataccccaacagaagtttaagacatttgattaaagaaaaactaaaactcatgactaagatgacacataaaaaacccaagttcaaaatcaaaacaaaaccatctaaaccaacaaacacatttcctaatcaccataagcaacagtgtccatgatattagcaagaacattcttacagtcctgcaacttcttcagacttccagtgagctttgagcgctttgtagcaaccgaaggcgattcctccataagcctctcaatgccgccgccatgaggggtcatcagctcagtcactatctcaatttccaaatccttgttgacaaggttaaaaacagaatgctgcaagtgaagagccattgaatccaccaatctcctcaacacaatcttccaataagctatcattctcatcttcaaatcaaatgcttgatgtagaagatgaggatacttccttaagtgctccacttcaatctcaccaaagccatccaaattcaccttaaagggtctcttttcatcatgcaaaatgctatgaatgaatccatctttctgcaacattagcttattccattctgtaagaaaatcaggattacaagtgtaatctgtcaacttctccatctcaaccacttccatcatccaattcaaagacctttccttcattttcgcgatcaaattatgaccggctcgctttgcagacagctgaagctgatagtaatcctcaacatgatacatgaagactgtgatcaaaacttcacctacataatcccataacttgtcaacaaaaccaagaggaatgctagaaattccattcaccttaccttgtagaatagtaagaaaagagcctcgaggcaagaaattcggaagtgaaatctcttttgcttcctccaaattccttatctcatccattagaaaatctctcatgtgatcactttcagtacaattatgaagctcatcattgtactggtttaacatctcaaccaatctagcagtacaatgcattctcttgttattgggatactcatcaaactcacctctcaaaagaatcttcctaagagattctttcacaaaaccaatgattctcataaaagcagtcatggcttcagcaacagaagacatatgtttaggcaacttgtgaagctcagccaaattaaaattcaccttatcattaatcttcttaacaatctcaggcaagtttcttgctatacttgaagcttgaatatgaaccaatttctgagccaaaaccggtacaccaacaatcgatttatcaatcttcgaaagcaaaggatgccctgcaaacagcctagcttcctccttccttgcctcctcataagactcatcaccaatcctgttcctaacacagacataaccaagtccaatattaacatcatcagctgtaactttctcaagaagcccttcgggggccttatcggctttggtaaccacagctagagtcctctccccagttttgtccacactctgagacatcctaatagactcacaagtaggaaaatcaacagtagcagataacacattgagtactatactagcttcaggttgtatatactccataattatatctctaatctgatcataaatattctcaggttgaccatgaacaggtactctagttataccaggaagatcaaccattgttaaatcaggaacacctttctttttcacaactaaagtcagtggagcattggatataccttttccactacctgcaatctcatcagttgctatgttaatggcttcagagatgttattttcatcagttgttaccactttcccattgaactccaagaacagttccggctcgggattcgaatggtgttgcagcctcataatgagagggactctcgtgcatattccttggccacgagggagacttatgccagcaagggactcaagcacactagacttgcctgaggactgatctcccaccacaacaatggtggggagttcgatcccttcatccataaccatgaggtttctgagcttgtccactgcgtctagcaagggacgaattctgtcgttgtatgaagaaacgattggtgcgttgattggctcacttgggtcgatttgaactagtgccagtgatgatgattcttcttcatactgtgcctgagatgatgatgatgacttcttcttcattgtcaatgcctttgttattgaaaacagagaaaacagaggagagagtgttttaaggattgagtgtgaagagatggaatggagaagggatttatatttatagagagactatacaaaaaaaattattgaaaggttggaagttgataaggctctctcttcattgaatgtttaacgttgggaattttgaaggatatgataattttgtaaaattggaattgttaatttattattgttattagtattaacaattaataatgtgatttatagttaagtttgcttttattgagtatttaattgatacattttctaatatcgaagtagagtagaagagtccctacttaactacgggtgttaataatataagagtgttgttattggatattaatgttgcttaatacatttcagatgggttaacgatacttttaaaaatattacattaaattatataaaatcttctatttaattagaaattaaactcttcaacttttgtaatcttcttatatgttctttttgtacttattgagttatatataatctaaaatataatatttttatgtatatgtattataaacaaaataatagtattaaaattagaatggtaatttgctattttaaaaatatatagaaagatagtaatattatttgtgacaaatactaaaaatagtgaaattaacatataaattacttctatgttcgcatcttggcttcaacaatgtggaggtcgaatcagattgtcaacgtgttatccatatcctgctgcagaagagaaacttcttctgggctgagtttggcctaatttttaaagatatttataatatttgtaaccgtgttaatatttctaagtttctcttttgtaatcgttctgcgaactttttagctaacaatctttttaaacttgcattgtctttggatatggtaagagtgtggtggccgagtttaccgggtattctttgataattggtgttgaaatccctttatattttaattttatacgcttaatccctgatcttttttgggtggaaaaaccctcttaactttacttttttttttttt

SEQ ID NO: 304618 - DNA, 1019 bp, Cannabis indica
aaccagcccctgaaggttttgcctgtactctgatcaccttccgtttgagttttccaatctcattggctcgttgaagttgcattgggatatcctccttgatgagtccctttcctttgtcctttcccctatcttccttgacaggagttatagatctgttcaccggcggtcgaataggtcttgtatcttctctgaaaaaaacttgagttgatttccttgtattgaaacaactaatgactgctgactccgccctaatccacggtccgaaagctggaactgccgcaccctccagaggaaaggcataagctgtttctctaaaacaagcatttttgtcatgacctatgaacccacaattgtagcagaatttcggcagtcggaaatactggaactgaatccactcttttcttcccctgtaaatatcaaggaagaaaccaggtgacacttgatgcttggttgataattccacttggaactttagaaagcctcttcttgctaaagctctttgatccacaatatcgcagcccttgtattcccctgcctttgcagcaattctcggcgtgttcatggcattgaggtatggggtaggaagccctttagctttaccccaaaaaaccgctttgctcatgtccacatttaaccaatcaccctgttcaggccattcatgaattattaggagtttcccatttatcaaccatggcctcttctccagaatagacacacagtcttcctccttatcaaagaaaatcccccatactcctggttgtagcgttttgaactttcactgtccattaagcttccatttctgctccaaaatccctttcaaacttgttcttgaaaccccttttccttcgaaaaaacttgccaaaatccctgttctagcaatctcagcatttatctcaaagtccggttctaggtccaatgtcatggactctagaaagtcctgtcgcaaatgctcaacatcttcattccttgtgcctcttctggtgctgcattaactacaggacttgtagattcatttaatg

SEQ ID NO: 304619 - DNA, 2247 bp, Cannabis indica
cttttgctggtgcaaaatgtcaccggcaaaatacttttttcgtgtagtgatatatattaatgctagaaaatctacattttggatgttgattactttggacatggagtagtagtttttggagaagtttagaaacttatccggattctctaactctaccagtgagatcgaatcttaaagtagctccgaaggctactagacaattatttagcctaagaaaagttttgaatggaatgaatcatattatttttgctacaactaatgtaaagtttcttatacttttacatgtttatttattactttaagattattcatatttaggatgttaaattataaactataatcaacatacatgtttagtaaatgtagattctagtaaaataagttccaacaccatcgccttctgatcctgcatcttcctctacaccctccatttcccatcctgctgccccagtttgctctaccaatgttcaccctatgacaacaagggggaaggaagataactataaaccaaagatatacatcagctccaaagaacccttgactcttattgatgctcttgctaatcccaagtagaaatgcaaccatgaacacttaagtgtatgcttttaaaaagaatagagtttggacacttgtcaagttaaaagtcattggatgtaaatgggtttaaggatcaaggagagccctgatggaacaatttttaaatacaaagcccgattggttggaaaaggctttcataaacattatggccttagcttccaagaaacatttagcaatgtagtcaagtcacctactatcagaatcgtactcactgttgctctctcaaaacagcggccaattaaacaacttgaaattaacaatgactttctaaatggcacatcaaatgaaaaacactttatgaaacaatccctatctttaagcatgaagataccaccttggtctgctaattacataaagtcttatatggcttgaatctagctcctcgagcttggttttgtcaactcagagaaatactttctcaattgggtttcaacagctttagggaagacacctatctttttgtaagaatcctccctagtcatacaacattcattatagtgtatgtggatgatattcttgtcactggaagtgactttgctatgatctcaagacttgtcactcaattgaattctcaatttgccctcaaagaccttggtaacatcaactatttccttagaattcaggagacacatactgcaacatgcttacatctctatacaaaatatatcatagatgttctagcaaagccaagctttaattttccaatagtttgccaactccaatgtatggggggagaagctatctaccattgggagtgatccagttaaagaccctcaatactacagatgccttgtgggaactctataatatgctaccacaacaagacttgagatttcctttgttgttaataaagtgtgccaattcatgcactcaccattagagtcccattggaaaactatgaaccgcattctgagatacctgacagggacacttgactatggtcttacactccaaaaatcaaattcccttgatcttgtaggattccgtgatgatgattgggcatcagatatggatgactgaagttcacatgattctatgtatactttggcttcaattgggttagctggatatccaagaaacaacagacaatttcctgatcaagcactgaggctgagtataggagtctaaccaatgtcacaactgaactcattggatctagtcactacaatctgaactcagcatatctattccaaggccaccaatagtgtggtgtaataactttagcactattttgatgtctgcaaatcctcttctccatctaagaataaaagacatagaacatgacctatactttgtaagggagaaggtcctaggtaaaactctgatggttaagcatattctgcatatgatcaaacaagtgacatcctcacaaaagcactgtccaatgaaaggtttataataaacaaacttagagtagaatccctgtctactctaactttgagggggagtgttaagagtaataatgtttagtggctattgtaattaactctgttaattagatggttagtatataggtaagggtagtttagtctttttgggatttctcttataatcttctactttaatggttgtaataattaattttcaaatgaatgataaccattattttcaaagggaaatttgattttatacttaaaaaattaaaaaaaa

SEQ ID NO: 304620 - DNA, 2304 bp, Cannabis indica
aaaaatatgatatatataatctagttcaatatactacaatacaatacgatacgacgttccaaacgagccatttcaatactaaatttttttctaattctaatcacaacaataaaaattatattatttattactatattattttattaaattatctcacactatgtatataaatataaaaatttaataaatatattattctaattagcctttttataattcttaaaataaaacgaaaaatgatttttaaaaaaaaaaacgaaaaaggaaaagaataaaacgacagcgtatggagtcggaggaggcccccctacaaaaaaaaaaaaaaagtatatgggctaaaagcttttccagcctcaaatcgaatcgactgagtctctctcttctttgtttagtagcagtagggcataataatcgcctacttcgcagcccaaacctgctcctaagatctccatctccgactccacctccccggcgatatgtctcaggtacctcctcttcgcttttttttctccagtctctttgatctatatttttttcagattatattgtggaactaatcttaatttcaattcgtttgagaatttgttagcattttgaggaatttgttcttttcattcgatgccgggagtccaatattaaaattgagccgccattaaaacacaaataattagggtcttacgagctggaattagttgatttatttggacttgtttatttctctattcttttttttttccaggtcgataacagaaattcttcagctgcaaagcgtgctcgaactgatggtatgctatataattttacatatgtactgtatgtatatatttatgaatatatggtggtgctgtttttgttgcgaaagttttatattctacggaaacaatgtattggatttctttctgtattactggtttattagagttattgaaactgaatggaggaaataggtagaaaattttatgtgatctctgattttgagaaccagttcaatttcaagttatgacttgttttgctctatatctgttttatgtaaacttgcaattttaatctttcaggtagtcgaagggaagatgattggacctgccctagctgtggaaatgtcaacttttcatttaggacaacttgcaatatgcgtaattgcactcagccaaggccagccgatcataattcggtaagtttgaactagtatgaatgccaatattttctttcgtaggaggcattgataaaacagtaggatatttgaaggtgatacaccagggtttttagagacaatgtcttttgaaagaatatatatctaatacactaaaaaaaatatattaattaaaagagaaagatgtacaaattcagaataatcatatacaggagtgttaaatgatgatcactgcagaattctctttgaatctttgtatacattgttatatatctcttaacccacctcatttaaaaaaagggtcaagtgaaaataccttctgggtccatccccaatttaataaggccaacatgtacgttttctttctttcacagtgtctatcccactgtaaatatgatgagagcgctattgatgttttttcttgttagagagaaagacatgcaagtgggaaactataattattgcgaaataccatgtattatgttaaattgctaaaacctagtgtacatgcaagttgttctggttgacaatggtattgcccttgttgtagactagaagtcctttttgcatatgtctttctctatttgattactctactttccttttgcttgtttttatgctattcttgttccaatttgtgtgcataatattcatataagtttgtatttcctagaaatctgctgccaagcctatccaagccccacaaggttactcctcatctgcaccttatatgggttctggtgctccatcatcgatgtatcttggtgtcccaccctatggtccatctctctttaatggttcatctattcctccttatgatgttccattttccgggggatcagcttatcattacaactacaacaaccgattatctacaggcagcccttatagacctttgcatttatctggaccgacaccttattcaagtggttcaatgatgggtaatggtaatgatgtgtgtatgtgtgtgtgtgattaaggactacagtccctgtgttaactaatgcatttcttttttgctagagtatatattactttataaccttcatatggaatagcataactctgtcagctcattatatcgtccaaccttatctaatatctatgattttctgagttgagtgatcacgtacttggtgtcaattaaatctcag

SEQ ID NO: 304621 - DNA, 1838 bp, Cannabis indica
gtatgaaacttataaaaaaatacagtaaaaaagtaaaaaaataccgcctgacagtatttttgtaaaaaaatagtaaaaattagtataccatataaatttctctaaaattattaagtataaaaatacaaaattatgaaaatatatatatttcttatatttaccgtaagaaaaagaaattgatatattagtgggcatattatgattaatagttgcaataaaattattattatgacattaacaaagaaaaaaaaattaccattggcatttggatgtttggggggcatagtaaacggcttcaagttgttgtgtgaaaaatcttttaactaaaaatgaaaataaaagcattgaaagaatggtgtaagatgttttaatcgtaaaaatttagttacatttgaaataaaaagtaattttgtgatataattatattaatattagtttttattattgtacttaaataattgtaaatcttaatacaaaattttatattattgttcacttaataatttattaaaaaaatataaaataataataataataatacaaagataaatattaaatttaataataataatataaatcatttaatacaaaagaatattttattaaaatctaataataaaatattaaacataacataatggtaaatataaaagcatactgtttattgtgatataaatttatcatgatataaatttaaattacttttattatgacatatttgcatcataatttgttacattattgaaatagacttttaactaaataagttatattttgtattttcataacttatttgcttaacaaaatgcttctaaaattgttgattatatgatttgacagtgcatgcataaatctttggttcttagtgtgcatttggtcaaggtagtgaaactggaaaaactcgattatcatttcactcttttaattggggtattattccactaaagttctatttgaagatacaagtgaagatggttccaatgtcaaattgattttttattttgttcatataatgtagattaaatttagtttattttttatttttgtatttttatttctctcaacaaaagcatacttgtaatgtttttaatttttttttctctttttatttacagcgaaaacatgaccaatattacgaaaaaattagaagcaattgcagagaaactttgtcaaattttgttggagaatggcagagatgaccaagtaaaccatgagaaaataatgtttgaggaaaaagagtgtgttgtttacttgtgcaaacataatcaccaacaacaaaactcccaaataactttaaacaataatgagaatattgaaacccaattgtgtttgaggcttcaacttttcattgaccattctcaaatctatgttcaatcagagggaggtgatcatttctactttgatgcaggtccagacacattacttgtcactattggaaaacaacttcaggtaactaataaccttatttaaataataatgatctccattgtgttgaattttatagacaataggtataactacaaaactttctcaaaacattagtcaagatttatcccaatacaagccaagagcgggtcgggcctagactatgaggattaggtttgcacttaaggcccaacaagcgcaggagccaaaaagttattttctttttaagaattagaaaactataaattactacaaaaaattactacttttattgacaacattttagtcacaatataatcttttttgtgactaaatatgacttttagtcacaaacaaaatgttacttgtaactaaaacaatagtctctagatacaagttgtcactaatttagttttagtcacaacaagtattgt

SEQ ID NO: 304622 - DNA, 1073 bp, Cannabis indica
atgatatattcaagattgcttatatttataagaaaattacaacagaaaaggaaaacacagtgccataaaaacaaacataattaaagctcttccattgtaagcaatatacatatcattcctctctcaaaattgatttttaatcaactacggcaggaaccattttatccattttattagtaaatctcatctgatatacgttgtatttgccatattatatatcagagattattttaaaaaatttcccatttttcaaatgtagtatatatatgggatacatgtcacgagaaacatttctaaagtcagtattgctttcattaatgcattattggcctttataatatgctccttattttgttgttattttgctttttctttttttcgctccttttttttttcataatttttttttttgtttttgtacacatgattggaaatatacaattatatatatagatagacacgaaaaagcatacagctggtcaccaattcacttctacacccatgcataagtactcacacttgctaatggaattattattattattattattattattattattattattaattgttgttgttgctattatattatatataatttgtattacttataaaagaaatagatcttaatatgtccataaccacaataatattgttttcataagatatatatctttttgtgtacatgtgtcctatataaatattattcaattaaagataaataagaaattaaacaagagtaataataataacatatatgtcagggtctggtttataccataatcattcctttctgttgtattcattcttttacaagaacatgtgaatataagttcaaaagagagtgcctacaatagaatctgctaaatcaaaatctccaactttttggaaaccaaaacctgaaatacgaagagagcttaaactttctctgtgtgtgtacttattaatatatatatatatatatttattataagttgcagttctttttttctaagtgttggtttttttattggagaataatacatatgaattaatggatatgaatcataaaacatatataaatatatata

SEQ ID NO: 304623 - DNA, 1250 bp, Cannabis indica
cagagttagaaaaagcaaatcacatgactattggcacaagaagcagcaaaatttatacacataaacaaataaaattaaaaaagaaaagacaaaataaagtgcaatatgtttcagcttaagttactaaacttttgattccgtacaaagaagaatcaacctaagagaagctaaatcagacgacatggcaactactatacatatcaaaatagtgggaaaaaataaatattataaataagaaatcttcatctagaatatactatcaaatgaaagccgaaaaaacaggaaaaatattgtttgattaatcttaacccagatccgatatttcacatgcaaccccattataatataatctaaggaaaaagaaatggcaaacgacaagaggcaagaatcatatatatacaagaaacaaaaaaattgtatatagagaaagactaaaaggtagaccttggtgaagaaaaatagatcgtcagccatggtctcgaagcttaaaaaggacaccaacgaaaaggcattgggcagctcagattcttcttcttccttccttctttctctttctttttctcgtacttcttttttttttattatttttttttgttgttgttgttggctttagtttttctctctactgcactaatccataaaattcaaacccaaaatatgaagaaaaagaaaaatgaaaagagaaatagtgagggagagaaactttatttgatgggtttttcccttttactatttttatatatttactatttttctattgaggaaaaaaagaaaaaacaaatgaaaaggaacagaatgattagatgcttccatcgaccgttgcacgcctttctttgagtttataatatataatggtttcatctgagattcttcgcaatccaagcgaaaaggaatccacacgaacgagaaagacgaagtaggactttgccaatgatacaagccgtcgttttctggttttcccaacaatatttacgacgttatccttgacaatttgccacacaatttttgccaaaatcccataatttttcagaaaaaaaataaaaagaaactttcaaagatataaatttttggtcctttattttattgaagaaattatactgtattcaagctttattttactacaatcttcttttaaaagaaattttactaaaattgatgttacctgaaaatatacgtatatattaatttttttaattaggttgtgatgttaaatgcaatacatatatgtttaatttttttaattaagtaat

SEQ ID NO: 304624 - DNA, 2315 bp, Cannabis indica
tccacaggcatttgagaacctcacagagaatgatatttacagcggttccttgagacttataatggaggtaaattagcctatagctagtgattttgagcacccttttctttaatttgatttaataagaataagaccaaaccaatgcatgtatatgatgaccccaaggttgatcttcgaggatttgactctaatggagggccttgctatattggtaccgggtgctttcatagaagggaatctctttctggtaagaaatacgaggcaagtaataaagtattactcgaatggaaaagaaagaatgaagataagggaattagtgcagaagctctcgaagaaacatgtaaacttcttgctagttgtacctacgaagaaaacactagttggggaaaagaggttgttgcacttacattaattctcatattctctcctttaattgtgtcaaataataagatttctttaacgatttcacattagtatgaatagttatactgccttttgtatttgtgcttactgatatgcagatgggtgtgatgtatgggtgtgcagtggaagatattttaacaggacttgtgatacaatgtagaggatggaaatcagtttattataatcccattagaaaggcctttctaggagttgctcctataacacttcaacaaacacttgtgcaacacaagagatggggtgaagggaatcttcaaatctttctctcaaaatactgtcccttaacgtacggctacaaaaagattcccctacgacttcaactttcctactttatcagcttgctctggtctctaaactgcttcgcttcactctactatgtcattgtgccatcactttttcttctcaaaggaatctccttatttcctcaggtaattagtaaccaaattaataatcttaatcccagtagtttttgaactctgaaatgttatcttacgatctcatgacagatttccaacatatggggtttatcatttctctacgtcttctttggcaaccgggtgtacagccttggagaacttttgatgtgtggagggacatatcgggaatggttgaactaccaaagaatgtggttgtttaaaaggaccacttcttatttctttagcggcttggaccacgtcattaggctattgggattcactgatgcaacctttatcttaactgcaaagtggttgatgatgatgtttctgagagatacgagcgagagttgatagaatttggtactacttcgccaatgttcaccattttgaccacccttgcattgcttaatgccttgggcttgatttggggtttgaagaggttggtcttcactgaccaaagtttggttctgaacccatttgtattgcaggctagtctttgtgctctgctggttttcatcaacatgccaatttaccaagctatctttttaagaaaggataagggtagactccccaagtcagtgatttatcaatcgattatgctcactctagtagcatgttcgattgttgtttgttagaatatttggcgaaacatgttttaacttaagagcagttgtacttggtcaagccaaattgaactactttgctcaatctatatgtaataatgtaattgtatataagctctatctttatgatatgtttttgggttaatcagattttacttgactaaattaatgagattttgtattagtaaactgaaagatagcaaccagtaagcatttaaagaatggcatgaaaggagtatgatgaaacaaaaaaagatcttagctatatttacaaaagggcattgagaaaaaaagaagtgcaagattacagttataatagctgaagcaaaattttggtttttaaaattatatttttgtttgtttcagcatagctaccaaaaaaaaaaaaaagtgcaactttacaaatctgaacttcttcaaaagtcttctcattttttttggtccaaacactactctttcatttcaactgaaaaaaaaaaaaaattattatccaaacggataaccactgtagaaaaaaataatatacttttttttttaactcaaattattttagttccacttctcaaaatctcctatatatatacttgttaaatttgtgaactgataaataaaaactaatgagtagaagaatatggataaaaatcatgatgatgatggttatcttcctcttttcgaaacaaagtcagccaagagccgtacacaatttaggttgttcgtagtatccatgttagcggggatatgttctatttttgtgtacagattaaggtatatgccattcccaacaaaagaagaagaaggtgcagtagtcatcttattggtttggattggattgttt

SEQ ID NO: 304625 - DNA, 608 bp, Cannabis indica
tatttttcaaaattagtaaaaaacaaagtataattttaaaaagaatttttttttgcctttgaattaagtgggcttatctaacccgtctatgctcaaaaccaaaataagttattaatttttttcttaccttcaatactatatactaaaaatattggtgattaatttataggtttgttaaaatttcttttcatctctatatagtgatgaatataatttacttagtggaaaatttgttttttttttttgtacattttttcagggggttatttgttacattttgatttagtgatttatgagtcatgaattgattttagcatgtcttttaaaatttaacaattaataaagttaattaatttgatttaagaaatcttttcatcactttacaatgtccatattctttaaaagaaaaatggtgatatgtatatattcaattcttgatattggttgaattcataattgtctcatttcatgcaaacatatatgtgaaatgatataattagaaattcaaaatgaatatttttttagttcatgtatgtgtgtatatatataataacatacaagtacagtacaatattactatattaattaagatatatatatatataaaa

SEQ ID NO: 304626 - DNA, 2282 bp, Cannabis indica
taaattatatgtatttttttttataattttagttattttaatataattttcaataatactttatatataattaatcattcaaaaaattcattgaatatttattagtatatacataagtattattattattataagaatgtttgtcgatgttccacgggtaaagttactaatgagttagctaggcaatcattaaattcaatatatactttaaataattattaattcactattacacaaaaaaaaaaatgtattcttgtcagtgaaaatgttgaatatttttaggataacgctaatgaaaatgagcgttttttttaaaaatcgacgctataaatcgaccctaagcattagcatcggtaataaaccgacgctaaagggcaaaaacataaacctagttaaaaccctaattaacctaaatatgtaatttatatataacattaattttgctattaaatttgttttgatgatctttactttcactgcaagaaaagtgagtattaggggtgacttttgtcgctcttaaaaacccaaaaaaatatcgtccatatagtctattaggagtgacatcgtcgtccccaaaatatactcacccctaatacttcgacactaatactcctttttaagggcgacaatttttgtcgacctctaaaattagcaattagaagcgatatttgtcgcccctaataatatattaaatctagacaaaaagcaacaatttttttaaaataaaataaataatataatggactattagggacaacttttgcaataaatgtcgcccctaatagtgtctttcaaataaataaaaaatgattaattaaaaacaataaaactacattactaaaattaataattttacaattgactctaaagaagatcactaaaacagtagtaatatatttattctctaaaaaaaatttacatgtagcaatatacaaaactaacaaccccaaatgtcaaattagtaaattgtacaattaaatcacaactcaagaaaaaaaaaatagaagattaagaactctcattactggtctttgacaaattcatcaactcttctctgttcattgacagttttttgttccagatcatgaagcctttgtctatgagcattgtgtagcttatacagaacatacccatttcctaaaagccaagctgaaacaaaagcattcctcaaagccttcttcaaaagtccctattttcacagtggtcaaccatattcaatgggcagacattaacaatagaatccagaagaaaaaaaaatataaaacagtacaaaccccatcaagaagtgaagcttagaaaattaatccattaagttatcaattataaagagtcttatgaaaagctaccaattattaaccagacacacatatatatatcactatataatattgctttctctctttgaggagaatgacatgatagttctaaagtcattatgatttaatttctttgtaataaaaattgaagcacatgtaacaaattcaccatcaaatatctcatgtatgtatacatatttattaaagtagtatatataagtgcagtcaaatttatttgttgcttaatcagtaacatatacctctagcgtatttttcttgcttgacaaaaaattcctctaatttttgagattctctcctttaagtattcactttcattgatgaacttttttcctgtgcaaataattaatgttattagtttaaagttctagcaaacaatgattaaaggatttaagaatctaagcagagaacgatccactctgtaacaagttgtagcaatattagatttatatctaatattgatacaacttgtttatcaaaaagataatagtactctgtagtaaaaattaatatataagattatttcaatagcataaagttttaaaacaactagtagtcgtaataactggataatacacaggacactgaaacataataaacaatgtttcgacagtggttagaatttttcctttcatgatttgcttaatcaacaatgtctttgtatttgaccataaattaaatagtttcaacagtatgaaataacatgtgattgaaacattttgttttattcatgattcaccatgtcttattaaaatctaagcaaaaaatttagtccgaatgcaatagattgatactaaaagatgtgttatgaatgatttttatacattatggcaccaaaaattaggatatttctcaattgatagaattaaaaagttagtaaaacacgggatactcaatgccttaattttaccgattttgatacttgtgtggattgcattaagggaaagc

SEQ ID NO: 304627 - DNA, 1584 bp, Cannabis indica
tgtctaaacaacatacttgtgagtagatctaagattctggtaaaataatttccaatagttatcttctagcagcttcttttctttctttaggcatttgagctaaacttttgcttctgaaagtttggcaagaagggccctattggcaacatgtagctcacaattctcagcattggtttgctcaagctccacgacaaaagcgcctactttctcaacggctctttctgccagcaaagctacgggttgtaataaagaaaaatgagaagcccatgtacaatggtgggaacaaagatggaaaatgtagaaacttaccccaaccgcttattttttggcggcatgggataaagaaaaggcgtcaacactacttcaagttccccatgtctccaagggcagcttggacgcactactacccactttgtccaaaagtttctctgccaaaggtgtagcttccctccctactctggctgccagacgcttggcccaactaggattgagttaaagaggccctgcgaagtctcagccctcttcacagccgaaagcacattggccctcctgcacagaaaccacctttcttcgtcaaggtattctttcaaggcaatttctatttccctcgctctctacatagcagtaaggtgagggggacgatcttcatggaaaatgtgaaacccaaagaaggaatttttagaagagaagaaaagggttggctttgaaggggctgactttgcagttgaaattgatggtgttgttgggggtattgtttgcgagattgttgggcagatgatgatgcattgggagacccaatgtggaaaatgttgtcttgtctcttcgtcttcaatttgggactacttccactaccgagttttgaggaaccggcttccttacttaagctcaaaattttagaccacgaactacttgcaataatagttagtgcgggctaagtgagacaactcagaataattaagtaataaaagtaaattgtcaagcacgcaacagtcgacactcaagagtgtgcgaggggataggtcagtctctccactcagatgagcggccccacgatgcaccatcaccaagtcaaaccgccacatttctcttttcacaatagtaggaaagttgaaccagcttgatgaccagtcgaggtttcactcgaccaagcttaactacaagctcagagttgtgtcagcgtgcacaaatgcttcgaaggggcaaaacagttctcattagtttgttctgataaaatcaacgctaaagagtgcaaagacttgcgcatgggtcaacattaacgatttacttctacgaaaaacattgtcgatccaacataaaatatgcactagaccaagctcaaactcagtatttctaccttaaacatgaggttgcatacaactaacaagggcagtaaggtacttactgagtggtgacgagtgataattaatgacattgtgcgagatgactcgacggtgccgtgtctggtcacatacgcgatcgagaccagtgtgactaacggagtttcatttaacaaagagtaagtttaattgaaatggaagactatttatttaataattataattaattgtcaaatcaaattgtcat

SEQ ID NO: 304628 - DNA, 2937 bp, Cannabis indica
ttcttactagtttcttatttttaattctttctttatttttatttaactaaatagaagtaaaagtttaattttaacgtacttaaatacactccctgtgggatcgacctcactcctcgtgagttttactacttgaaacgatacgtacacttgcgtgtgcaaaatatcgcaacatcgatccccttcacaaccaaaggtcaccaagaataagccagaatggtattctgaaaaggtaaatggaaggcgagcaacccaagcgtctttcatagctttacaaatccagtcaagcttgaccgatttagggaacaggattttaacaacaaggcagtatgactcaggttattgggactcggagtttataaatacatggtcaaaatcatggaccaaagcttcattcgcagtgagttggagagaatgggaaaggttttctgggttggtagacattgttgagtgcatgggaggtgggtaatacctgggctgacttagggcttgaacgaacaagagataaaaaaacaacctcagaaaatatccttaaatagacagaggggctgagataatacctggagaagatcgactctggaagagggagagatgctacagagatcctagcttctcgtagcccatatcttctgcagactagtttcatgatgattctcaacctcctgaggacagtgacggttaataaatgaagtggtagaggccagggaggaggagaaccaagggttctctgatacatcattaaatgggggtttctgcctgatagtgttgcagaaaataataaatgtaaggtaatgattaattggggaagatgaatagaatggagaagagggaaattagaggatggcatcacgatggatgagcatgagagactggagagaccaaatgaacgagagggactggagagaccagagaaacctaaaggattccatagcattttttttaagattatttgttgttattttaatcagctgctgtcttgtttatgattgtttctttaagagaaaagtagtttactttatcttagttgtttttttttctattattagactttcaatatggtatcatcttcataataatcggattgtttatgtgtatttttgctattgaatagcttagttgcttgcttaaaacataaaatgctcacaggttttgttccacgcatttaaaaaacatgaaagcacacatgtataatcttttacaagctaaatgagaaagcaaatgaattattcaatggtgtatctatgttagtatatatatatatataaatatatatatatatatttatggtgttataatgagctttatttgtgatttagagaggtgctattttgctttttttcacttttattatcttcatttcttgcctgactgctgaaagttaataactttcatatctttgattttttgctatgatattctataagcatgaaatttggatttaataattcaatctttgtagaatcatgataaattcttatttaggtttctataagcttattggccttgaagcttttagccattttcaatgcatattgttgtgtttaatttgttttagtcataatttgttttggttcattctgcatgatattttttaattagctaaggagttgaattcttgtaagttgtgtattgtcacctctcttcatgtgacactgattttctcattaatttgttgtggttcattcttaaagtttctgcccacaaggaaccattcccattggaagaatacaaaagaaaaaagacttattgatatcattaaacagtaataatctccatctctatctctaactccaatggtttgggtaaaagaatccttatcttgagtcgagtacgagtacgagtaccatacgaaaagctcatcatgtggttttctgaaacgacaccacattcaatcaagaacctatagtcaatccttctgtaaaataacacacacacacatctcacaatattaattaattttgtatcatgtacctgttataatattaacattagttataattattattaattatgtacatataacaaacatgcggctatgctagtgacacttgggtacaattatatgggagctcaagcaaatttgaatttacggaatccttttgttttaaattagtcttgagtaagttacatctttgatatttggtgttggtttcaaattagtcttgataggcaaattgggttgacttttcatagtctattcattacaaaaattagctaaggcaaagacatttttactagtaacatgagctaaataaaacaatttataatatgacttttaataaatttaaattaattgggtggcttctttctaaggtgggttggttaatttcttttattgataattaattgtttattttttagcttatttttgtttagaagttgctttgactgtgaatgaaattattttttctgggcataataattgacatcaagagtggtataatgcaatagagttgtgttctacaatttggcttattatgtatgctacctaattgaaaattgttaggccattttactaataagtttgttagaaagaaatttcacgttgcatgtttacaataaagtttggatagaaaacttgaaagagttttgatttttagttagtagactgaagaaaattggtttctcattttgaacttgttaacggttgaagtgtagaaatattctttgataaaatagcattttttttttttttgcttttctagtattggtatgtttgacataataatgcaaatagaagttactgatgtcaaaccagtacagcctacatttctgcaacaaactcaagatatgagaatgatggtgatgataatgcatccatattaatttttattatgacatataggataaacatcattacttttagttatattaattttaagggtaaataccattttggaccctctgttttgcaaaagttaccaattggaccctgtgttt

SEQ ID NO: 304629 - DNA, 1607 bp, Cannabis indica
ttacaaaaatgatattgtaagtataacgaatatcgctatgaaattttttttaaaaaattattctagcgtgtaaatttggacataaaaattaaccaaaaattacaataagaatttataatatgaatttataattaacactccataattaatgagccagttttatgaaaagagtttcaatcaatgaacaatccaagaactactcaattatcaaagtaatattagattatcacttctaaataaggatgaccaaaagtgtacttaacggcaacttcaaccctaaaaattaaatttaaagttaaattaatactaaaaagtataattttagcattaatttttttttatttgagtcacaataatactaaaatttacactaaaaattattctctattgttatactattttattaaactatttcacattataatatataaaattataaaagttcaatcataaatacattattttaatattaaaaaataaaaaaaaaacaaaaaataagtgtaatctaatatagtgggacactatatagacgaccagcatttacatttagaattttatttgaacaattttgtgtctaaattctattatttttgagattttagtataccattgagaaatcctaactcttatttttataggatttcctatttttttcatattgttttattaacaaaaaattttgtacatttttcaaatggtttaaatttcataagattttattagactatttaagatccaaaggttaaaagaaaaagttttgagtaggttgtatcagaaaaaagattttgggcagattgttatatattgtgacaaataaattagtaaatagaaatttgagtagtattgggttgggttcggctttttgggattttctgtcgcaaaaaaagatgtgttatgtaatcgatgaggatacatgtaaccccactttgcctgctgcatttgctatttatgataatcacacgaagaaaactagctaggccacaatgtcaatgtcaatgtcttgttatatatacgtgtatcgatctttcctacctatctatatatatatattatattatgtagtacctacctggtatgtacgttctcactgtacccccactttttcttttcttaattctatcatcataattgtgtttaaccatacattgatttttattagtaatcaaatttattttgtgtaagtttgatataatttatatgagatttaggaaccaaaaagtattgtttataatcttgattgagtcgagcctttctagttatagtgacacttttgaactggtcaggatgactacaaaggttgatgcacatgctcagccttgtaggccttccgactgttctgaatgtgtcatttgactctggagacttgaatagaagccattggagtaaagaatttgaaagaggaaatttgttaaagctatcattaaaagatattctattttttaagagaaaaggttactcttgaaaaaactggagggtatcatctcaagtcccatatcaaaagaataagcaagagttgttttagatataagtgtttcacttactctattagtatgtagaccttttgagaaggagcccaaaaacaaaagcgtgaggacttatgcccaaaa

SEQ ID NO: 304630 - DNA, 1422 bp, Cannabis indica
acaccacaccacaccacaaaaaagaagaaaataaataaagtagtagtttttatgaaacttagtcacaaagactgtgaacccaaaagacaaaagtgtgtttttaaggaaaatttggatctgggtggtgttgtaatgaagatctgtttaaggagttttggatagatctaaagttgatttatttaatacatattttgacgtaggacaatatgaataatatatatttatatatattattatcaatgtgggaagtgacataataatatcatattgtatatattatagtatagtgtatataattcaacgtcacagctgggtttggtgtgtcatgctcgtgcaagagtgcatgaacgtccaaaccttattatttacaaccgcgtttggtgctgttctcttctctctttttactcttatttattttttattttttattttttatttttataaaatatataaatgagtgtgtttttattcattctgttttttgggtttttgagaaacgcgttactgaaatatttggtgtttgttcttttttgtggttttgggttagggaagaaaactttgaggaagtggtcaacgcttgcaatgagtataacattaacacaataacaatgtctatctaagacaatttcagcgttgttgaaattaaggtttgaactttattttggaagctgatgttcacactagtagctagggcttttcaattcaataaggctagagttattttattgagtaaaaatttagtatatttaaagaaaactgttgaacagtccgtgcttatttgacttttccttttcatttacaaacaatgataacaatagtgctatttatatatatatattagctacaatagtattatttgtagttttaaagtgtcaaacatagcatcttatcttaaaacttcatgttgcttagtgaaagaaaaatcagttgtagagaacagaaaaaacacttctttttaatagttggaagagcagattattttgtacatcatttcctatattattttactttttgagtgggattcaattttaattttaaattctttttgttcaatgcggtactcaagtagaatcctagaaaaaagagacaaatatctttacaaacaaacaaccgacaaatgccaaataaaacgaggtaaaataaacccacattttggaatgactcacttgatgcatattgcagtgcaaaccccaccaagaacaaatgaccaattgattggattgtacagcacatttttgactaatcaagtacaaggtctctcaagcaaaaatggttagtacgaagaaatgcagacagtagcacatgatgatataatgtcaactataataactatatagaacacacttcagaaaacttaaaccagtgcaaaaaaaagtagttttcacaactttggaagataatcacaagcacatgaagtacttg

SEQ ID NO: 304631 - DNA, 2076 bp, Cannabis indica
atttttcagataagaacatccacagaataatgcacatcaatcactcaaaagaacgcccacaaaagctacaaatcattagattaatttgtagaatataggaaaggggaaaaaacaagtttccaaggaaaacaaaaaaaaaaacacacacacacacacacacaaagaaaaagatctgataaatgtagtgcatatgcatatagcaacatcagaattctcagaaatcaacctagtccaactccctgtaagtagaaaattctaattgaaagatgacagatgacgagaacagaaaaatagaatattcaacgtagatcatcagaagacagcatacactgcatttataaattactgaaggcacatagttttataaaactttaatttatagagcctgaggagaaaacacattcagtagtttaccataaaaaatacagaacataacacgatacagccaaagtccatgcaatgtcatacatgtaaatgatgttgaagttataagaaaggatattactatcgaccttggtattgtcttttaggtaactctttcctctaatcataaatcccatcccacttggtgaagtccaacaatttgtgtctttttcatccttttccttatgcaaggagccattgaattggcttggatcaatttcagtaaaagttgcatttgtatctagttccttctttgtagctgaaaagaagaaaatagaaggtaaacatgcagaactttaagagatagggaaatgtgcggtgtgtgaggtttaagcgctgtgttaattggtcggggcttgctaatgagatgtaaacttcaaaagcatgtggggcttaagcagctaagcctcactgattcaacattggctttttaatcaaaatgttgtttgttttattttagaatcgtgttccaggcaaccacatttctattacaatgagacacaaatagtgcaatgcaacacagaacattgaaatgcctaattaaaaccacaaagcaatggcagacctgaagctcgctttttagttaagcttgtaatggcccatgaaacattcctcagtttcacatttccatcctgaaaatttaggggcaggaaaaaaatgtcagactttttttcaccatctttcttcattaaatatgatgtatggagcaatgcattctagttcaaatgacaaaagactggaaaaccttatggtcaacttcttcatcatcatcactttcttcttctgatgatgatgatgagtctcctgcaattgcgtcatagaattcttcatgtgcttgtgtctcctcttcatgtccattttctccgtttgaaatagacacttgggtgaatttagagtggacaactgtagtggttgattcatatttgacagcaggatttgcactaatatattccttaagacctgaaaatttttcatttaaagagtcaaaaaccaaaaaacattagataattaccaaaactgaaggtccatacatcaaaatagattttgcaattgaaaaagtactaatatatcaaggtattctcactcagattgtactgtatctagcatagttgaatagttgctaagagaaagaagaaaatgtaagggcatcaggagataatggattttagaaatttaaaagaatagaaaagtgatggattaaatttaaggaaaggcagaaggtcaaaaaaataaagcattcgatagaaatgtaatagactgcaaggagatgtgggttttaatggttaattaggtttcatcaagaccaacactttgatcacttccttccagtgcaaggcaaattagaaagtgataatcggatcaattagggctgttcatataaaccgaaaaactgcaatttaaatccggaccacgacaatccgaaccactgtaaaccgtaaccagagaaaccattttaggtggtttggtcaatccggaccgtttacggcgtaatagttcggttgcggttcgtaataaataattaacggttaaaccggaccggactgtttataataaataataaatttatatatatatatattttatatatgattatatgtctaattttgaacttttttgtgtgtcaagttttttattgcatgaatttggaatttt

SEQ ID NO: 304632 - DNA, 1461 bp, Cannabis indica
gccgcccattacatatgtatgctaaaaagggataagggagcaacaagacaggtcaacttaaaagagtgatgtggcacaagttgttagagtaagactaatgcactagagtattatgataaagtaaaaaagtagcgagggtgtggagagatttgtgtgagttgtaatactccttttggagagaattcaggctctcgaattcctgattatttttaacaaagaaattcaggctctcgaattcagctcagtttttctatcagctactgtttgtatttctttgtaccaatctgcaggattaccctataataatgttacacattttcaagttgatcatggtgtaatgcaattctctcaaggttctatggatgatggaggtttgcaattctcacaacttgaaggatcaaatgcaatgattttaatagcaaaatgaataccttgatgcctccaagattcattgtatcatctgcacgaccatgtgcatgatagtagcctttggatgtaagctcaaacatgtccccgtgcctccttaaaacttttccattcagcgaaggcattctcttaaaatagacatcatagtgatcagcattcagcaatgtcttggaagctccaaacatgagaggaccaagcgctaattcaccaatccctggtttgtgtttaggctgcaataaaagacaaatacattaggttgagtaaaatgttattaaaaggaattagtaaatacatgaattcaaccacttctaaaagtaaaagtgggaaattaattgtgatagcattttctatttttgggctttataaaacaaaattaagaactgcaacaaaatgattaagtaaaataaagaagctgactagtctttgtttactacaattcagagattggttgatgcttactatgggataaccatcactgccaagtatgaacaaactacatcccatagctggtgtgctaaaagcagctaatgactgagcctgtaataaggacccagttacaaatccccccccaatctcagtgcctccacaatattcaataacaggcttgtagtacgctctccccatcaaccacaagtattcatctatattagatgcttccccagtagagctaaagcaactaaaagacattgaagggggaaatagttaaagcgtaaaagaatcaactatgatcctgaaatcaataatggatttaaaacataactaaaatacaagacaaccatcatgatacaaatgaaaatattttaccaacgaaaggcaagcaatatactataattatttaccgaatggtggaccaatcatagccagcaacacaatttgtagatttccatgttcggacaatacttgggattacacctagcattgttactttggcatcctacgcatattagaaaagtttcagctgatttatagggattatttcacaaaaacataaaaacaacaaaaaattacaaaaatacagtttcacggaattttaaa

SEQ ID NO: 304633 - DNA, 1281 bp, Cannabis indica
aaaaagaaaattaagtgtaaaaatcaaaccataaaaaaatttcaccaaaaataacccttaaatgcgtatatattttgtatatttatatagaactaaagttcaattaataaactaattaagcttgattaactctaacaataattagcttcagtactatatatatacctaataaaacagtactacttatatgacatatatatgaatgaaagacaagaccaggcaaggcaactatgcctcagcgtatcgaagtacctaatccatccgattatccaaacgagttaatcacagccattcattatccactacccaaaacaaaagtaaacatataatacgtacgtacatacattaatatagttacgactcatatacatatataaaatacagctcagaaaaaagaataattatatatattacattcttggttagactacaacccaactttctaactcccatttctctatatagaaacccttttggtttaaaaccattataatcttcttcatcttgaaaccctagatctatctatctgtaaccatgatgagtggttataaatctgagccaaacaacaatattgatcaagacactcatcatcaatatcattatcatcatcatcatgatcatcatgaggaagaagaagaagaagatgatcatcatgatgaaaacagcagcaataagcaacaaaaaataggaaggggaaagactcagataaagttcatagagaaccaaacaaacagacaagtgaccttttcaaaacgaagaaatgggattttcaaaaaggctggtgaactctctgttctttgtgatgctaaggtctctcttattattgtccctaacaataataaactccatgaattcattactcctggagccaagtaagaatatttttttatatatataatattagaaaagtttattagatctttattaattaatttctgatatatgtgttatcttttcatggaatcagtactaaggaaatgattgatctgtatcaaagaaccaaaggtgttgatctgtggaagtcacagtacgaggttattaattatttttttttattaaaaaaaatctgaaagtttggttttttttattgattattttttatttattttattttttggttgtaggcaatgcaacaaaccttgcgccaactcaaagctaaaaactttgaactgaggacacagataaggtattttttttataatattgtttttcctatatatataaaaaaggaaataagagagaaaaaaaagtgacacataaatgattttttattttattttt

SEQ ID NO: 304634 - DNA, 3431 bp, Cannabis indica
taattttaaaaaaaaataacttttaaaaaataccaataaaaaatcgtgaaacatcatctatagaaagtgtaggacactactaatatctaataagaatactatttgtaaataacgtgaattgtgtgccatttaaagaaacgaatgtgaaaagtgtaccatttcaaataaaactaatgttgtgtgtgtggaaacaaccattattgattgctcatttattaatccaatttaagattccattaggtaaggtagcattaactagctagctagtacgatttaaagaggacttattttactaaaagattaaatactgtacaatcatgcatgggtttgggattggtgagtcaatcaccaggaagctgaacttagcttgttaattatgaggtcctagctatacgtagagacgtagagttgtataaatacgaaaatacaaattatattgtatcgggccataaaatatgaatcgtactctaacatgacaataattttataaagtatataaccttagcatatggactgtaatttcagtattttgtgttgtattcggatttgaatcgtacttatgttgacttatttttcttgaatgaaaatcagttcgtattttaatactgacaaaaatttattttctaatttttttttacaattaataagaaattatagaattactaaactatgtgtattctttactacttttatataactttttaataataataactgcacaattatatgaaaaataattataattattaaaatttaaatattttgctaatcatttcatcttttttataattgacaattgataaataaatgtgttattatattaacttaatttatttatgcttatatgtccaactttcaaagttgttgttttaaattcatattttttcatattatgtggtctcatactaatttataacatcataacgtataacatattcaaacttatattttttttcatatgggtcgggcatgtacttcttgagatcgtgccctaacaatttttaacagcactagctatagctgtatactatatatatagttaggctacaggtaggtatatatacgcacctatgtgcaatattttcactgaaattatcattgggaaacatctcataacaggttcagaagcagcgttaaataagctttaaatgcttactattacgtttaatatttatagtgtgagatgcccagtcaattgattgagacttcacatgcaacttgttaattggctcacttttctatctttagtactactcgagtcttgaggtcatggctaataaattcagttccaataattattatggctcaaacattaaatggaataacacatttgatatttgtaattaagctacatttgtattctcagtcttctccatatgttctcgttaacaggctgtatatataagtttgccctataaagcttacaattattacctaatactacttctgatatatgtttagaattattaattttatcttaaaattaattagtgataaataaaataaattatgttcttacatataacgtaatactctgccattagacaatatcgatccagaatattaatacatactaaaatatatcatataaaaattaattaagaaatgctaaaaggatttattaattgagaaatattaaaagatacttatgcttagcaggtgtaatattgctacgctattggtacaataaatttttatatctcacttattttatttaaataaaattataaagaaacgttaattaattatacgatcctggtattaattaggtggggcaagagcaacttgagtagcaagcagggttaggtaattaatttccatgcaagcagaaagagggaatctttcttcaaaaaagctttcgactatttccaaggacaggagcattttactctttttttttaagtgttgcttgattattgcttttcattatgttgggtttatattaaatttattttacgaatataatagataatttttaacaatatatatcccctataaaatatgcataagctaaaatgcatgtgtttggtaaaattcacctaaaatttggagatgtttgggagagtactgtctgaatttccaagttatagttagttagatataacttcaatgaatgtgatcatatatataggttaacttttctctgtgtggtgtggcctgtccagcggccagtgtcactatatataattcatgcacgatcgactgaatcaagacagtgttaatagttaaattgctacttattatgtcgtctgattttgtttgttaggcgcagctgactattttcttcttctaaattatgatcctcaatagatgtcccatgccagtttgcagctcatgaggttgtgaggtaggctctatctgtccctctctccctattaaagatggccacttcattttaattagggtattaaatcatgtttcttgaacttttctgagcgttaaaaattctccctgaactatttaaattgttatatttaaggattttatttaatttcattcaattttactatttcactgattgtttatatactaaactatgctccctaaactttgatatctaataaatcgtgtcccttgaactttgacatatactaaatcattaaataaaaaatcctaatcagcctataaactcttggacacataactactatttgtgtttctaaacaacagttccagctttattattaggtcgaccaactaccaagattagagataagtcgatttttggtacttataacttaaatcaaatttggacgcacaataagtacttcatatcaatcactcatccattgggtacaaatttacaattaaaattagggaatatactcatttagtactttgtatatttgtaaaaaaacatatttagtactttgtatttttaataatattcaattgattatatttttagtacatctttagtactttatattaaaattttattaatttaattaaacaaattatatatgtaatcaaataactaaatttgaatttaaaatttataaagatttagaaaatttgattgtactgacaaaatttcatcaaaaaaaaaaaattaatttcgaatattaaatgtgtaattttaaaatacatggtattaaattgtatgatgatacaattttatcacccataaaattatagttacgtacttgatatatttatatatatatgggtgtactcttaatagattttacttatgaatggataaaattaaaaaaaaaaaaaaaacgttttaattgtttaattttttttattctaattataaaaatctctcacttttatatcgtaagggctgagattgttctatcggttcaaaaaattaaaaaaagttttaagttaaaaaaaatagtaaaaattaaaattagtacttgcatattttggatatagtgtcaaaagagatatttttttaatttttttaatttaagtcagttaaa

SEQ ID NO: 304635 - DNA, 2615 bp, Cannabis indica
taaaatattaaataaaactaacactacgtggcttggcacgtaacaatcacctagtaaagatatatatgtatacatctcatgcccctttaaccctaaagggttatttactaattgggcttaagtggtccaataatggtatactataatttaatgggccaattatagttttaagggtgctctcatgtgcctctaacataatatatgattattaaccatcccattatggtagtgaacaaatattgggcacatagttaatgattgtgtttatggtattaagctcatgataatattagtccaccataataattctaacaactgcttcatcttcaaaggatgtcaaattgtttggaggagagattaaatagtctaatcccactttccgagtgaaattggcggtgtctggttctcgggtgcaggtatgatttgttacagattaataaatcattttataattgaatgtctcttttgaacaacaaaaagtttccaacatttcaatatggtcatatgtttttatatgtttcatcaattacttaattatgcatatgggattctgtatactcattataattttgatatttacatattattagaatgtaattctggctgagaaagtagaataggttgaaatgtatggtaagatgagaataatgaggttttatttcaaaaccgatattgatattgacaatgagtggagtaggttgctagctagcatatgatcttataaatagtattaataagttttcacttattattaatgtgaaactacacatgaatatttttcagcagcgcattccaatccgtttttcaaggcagttttttaaggaaaacccgaaagttgtaagacttaaggtggggaagaactgttgggatgttaacttggcacggtggagtggttttatgtggtggatggcctgcatttgctaaagacaacagattggttcctggagattctttaatcttcaaactgataaccaaccaagtcaatcatactttgctagaatatcatttcccattgtattggcaattagtaaatatctattttaattcatctatgctctaactaactaactattatgagtgtttgtttttatttaaaagttatttttgaaagagtttggatgaatttttcgtatgaattcatctctgtttactttgattgagttgtaatcagaattggatattgtatcttgattgatttcataggatttcatagtgaaagttacttacccgattcaatggaactcaaacaatagtcacctagaatgtgtttctaaggtcagatgaagtttgtaaatctagtgttcttgatttgccttttgttttgggattatttcacaaaaacataaaaacaataaaaaaattacaaaaatacggtttcaccgaattttaaatatttgtacgatttttttgattttatttacataaaatacggtctttttatgttgtaattttattaatttgttgttgattttttgttatatgtatgttattttttgttgttattttgatgttattttcatgttacttttatgtagtttttttgttaattttatgttgttttcgtattattttttagaaaatcgtaaaaatgtaaaataaaatattctttgaacgtaaaaatataaatattttacaaaaaattgtgtctaatgtaattattcctttggttttatattcaagttacaaatctagatccaatcaattagcattcagataaaattgatttttcatctgttaaaaatctacagctttccaacacaactaggatgcaaagattaatacaaagaaattgtggtattttcaaaattttacatcagattatgcctccataaaaagatgttgatgttattaaaactcatacattcaaacaggcccaacttgtttcaaaaccgagcccaacaagcaagccaactacactcaaaggaacctaagtgttcgacctaacaaagaccagcccaaatgcaatgaaaccctacactaaataaaaccctaatataaaatggttacacacaaaaaaatctgtgtagtagtaaaattgtaaactttgatccaaaatctagtagtatttttgtaaaaatctcaaaataaaaccacttaaaccatggttagggttttaatattttcaagttcttcttccttcttacaaggattttaggttttaggggtttactctcatctcaaaaacacagccacacaaacctagttctatgatcgacttaacgaattccacctctataatcgatgatagttgatgatattctgagagtttaagcttgaatgaccactaagatcagtttcctttgtcaatcccttcatgcaatgtttaaacttagctaggttaccatttaggtccaatgtttatcatgaaagacagattctacacatttacaaaatactcttccctttaagtctaagaacataaatccatgtcccatttattgtttcgtttatcatatgggatctgacttaacatcatctataacaaaaacaaataaatttagatttaatatttctcttttcttcttcctatttaatccgcactaaggaggcgtttggttgggaggaatgaaaatataggaataggaatggaaatgagaataagaataggaatggaa

SEQ ID NO: 304636 - DNA, 3048 bp, Cannabis indica
gccaccattttgagtttgagctctcaagcttttcctcgaataatgaagagcatttcagtaactggatcaccttcacgtacattgaagttccttgagacttaagcaggagaccaagcgctcacatatggcatctagtagctgatcgccattcagggcgaaaaagggtacctgaagagaaagaagagaagagaattttgactctttttcttgttaaatggaatcaattagcttcaagaacagaacaaaaggaaggaaggaaggaaggaacttacacgtctaaccaggtccaagcaaagatggcgttggatatctcgacggagatctgttggtaggccattcaagattgattcttcatctactccacgagttgccaaccacttatactgaacgaatctcctaacacgcacttgaagatttttagggagttgacgatgtttcatccactcttcagtatctctacgctttagcctccattcttcaagcctcactgtgatcgattgcaaatatgtctgcacaaaccaaatctttcttataaaggaacttttctagtttaccaaggaaggttggttgtttggtttggtacagtacttgagtttgatacattatttaggcacaaaagaactttagacataatgaaatgaagccaaaaaggtttgaaagttcgactctttgggtgtattgcatacatacctgcatgtttccgatcaagtgtgcaaacagaaccagacccaagatggcaataagaatggcaaaacaagtctcacctacaaatgtggttgtgctcagactttggccgtaggagctgagaagtttcaaagcgacagcaaatttaatcaagattttcaaatgaacaaacaagcctttttgacattgtccaaggctagttttccattgcagatataaaaacctgagtcaaataatgaattgtatagtgcacacattacatatatgagcatacctcaagttttgtaaaccccaccaaagacaatataaatacttctcgagaaactgtgaggacagaacgttattagttactgcattttcaaatattccatatttgaaagtatttatttcagggtcgcaggtgttgaaaaccatagtgctgttcatccaattctggcgattatcatcgtccaaagcatcacaatccaagtacttgagaaggcatctaactgggacaatttcgtttttgcaggatgatttccagcacattgcatacctttcaaacgacaacaaataccatgatgctcctaagatctacaacaatagaaatttgatagaattgagtcaatcccatgatgtatcaaccaacaagtgtaatgagttttagatttaaaaaaagtaagttacatgactagctagcatatagagaaggagattgtatgcagcccctgcccaagctgtctttgtaacaacgccagtcgttttgataatctgagcacttagtggaaatatcagatacaatctaggaacatattggaggagaacaatcagtacaaccgcattgttggtatgatcagaatgagagcttctgcttgctggtatgataaaccatatcacaatctgccaaaaacaagtaaaaacaatttcaagcatttatttatccgaacacaaaatctgcactgtctgagttacacaataaaaaggtacctgaggaagaggcaaggcagctatgagatctatgaagaaatcaagtttcagatacctccttgcaatcatctttggatccataacaagttcacctttcccaaaaactcttgaacttggagaaacataggctgtcctaaactttaagatcatttgcagcaagtagaatacatcggcgagggtgcgaaaaaaggtaagaacaattcctaaattcaaatcagtggccatacatgaagagttaccatgaattagaaccgtgggaaggtagaagaagagtggatcaacaaaaagtgctaccaagcaaaagaagagaaaaactctgttccattgcaggaaaatatcacttccagggtcaagaatcttcttcctccatggattctcattttctgggaaaactttaaaccttccaaattttggaatataaattctgtttctactactactacttctacctccttctgcctcaaacaaaggctctgctgctgctactttgaacactggtaacggcttctctaagttactatctttattgttttcttcatggtaaaatctacaattggagaaaatgaaaaaccccagttaagcatgcatgattgtaaaagaaagataatgaagtaaaggagttcacctgacaaacttgtctttcttcaactccatttccttggtttggtgcacaaacagcagttgaagaagcaagtatagtaaaaagactaagagttcgtgtatgaattgagctcaaacattagaagggaatagttgaatttcccatttttattttcctgaggtgcaatggaaacagtggttgaaagggtatgcaggaaaagaagaaaagaaagcaaagaacagaacagtttctcgaagaaaaagaggaaaaatgagtgagtgaggcttgaaagttgaaacttgggtgataattgaattgaaacaacgtgacttgtctttgtgtttttgacttttcattaaaaaagctcactcacctcattcctcaacctcaactaaatttattttcaaggaaagtaagaaagaaacacagctcagatggtcggttatatttttatgaggtgaatttaagaaagcaatgaaaaaataaacgtggagaccatgtaggagggaaggaaactattaaaaggtgtggttcgtttttttgggatacaccaaatttaatgttatttattttgttttgttaggagggagggaggcacgtcgtttgggtccgtggaactgggaatgggacccaaatcacacatacatacacctaccaccacaattaagtaattgggcaatgtcttgtccaccaaagatatacactagaataacatcactaaatcatatccacacatttggatttcgatgaaaatttggctaatttttcttattattattaatcatgaataatttttt

SEQ ID NO: 304637 - DNA, 1476 bp, Cannabis indica
gtagtagtaatgcattgggaaacccatctacgaaataagtccagagccttaaaactactgagaacatggtctataaagctctagttgagtttatcataagctttcaccagatcaatcttgatggcgaaaaatccttcttttcctttcttacgcttaaacgagtggataatctcctcgaccaaaacattattgtcattgatgcttcgtcctggcacaaaggccgcttgagtagggaaaatcagtatgggcagaatcggcctaaatctatttgcaatgattttcgaaatgaccttgtaaaacacgttacagagagagataggcctaaactgtgagactttcttagggttagccaccttaggaatgaggattacatttgtagaattaatgcctctgtgcatggaaccagacagaaagaaatcttccacagcctcgcagaaatcactgccaaccgaattccaataatgcttgaagaacagcacagacatcccatctggccccggggctttcaggctgcccatgtagaagagagtttgtctaatttcctcagggttcagaatgataaccaaatcattctgctcctgggtggtaagatggtccgaaaccaagtgatccaagcactccaacggcccataggtcacttgtttaaaaatgcttcctagaaactccgagaattcgttaccaatatctcttctatcattcagccacactccatccttattcaaaattgtcccgatctcatttcttctatttttaattgtggtggttgaatatatataataattattacgtatatacaataattaaaaactatagttattcataataaatttattaatataagactattttttttttacaatttaaattatttatattacaaaatatatataaaaaaatatttttaaggagtcttactattctaataacatatcatatattattagagttttaattattttatgtaaatatatcgtatcttcaatatctatatatctatatatttatataaaaaaaaataatgtattattccatatcatcttttttcatattttttctacaattttaattttattttaaaaatgtggtaatttgactccttagtaaaaataatcccacatggtttagtattgcccaattagttatagtttttattaaaaaaaaatacaagaaatatatttttacattttttttatttgggttgtatatttgtttatttggccaactcgaagtatttttgtaatattgtcacttttttttttggttaaaattaaaaaaaagcccttttttaatatataatttaatctaattttaaatttatttataaaataatatatctagctaattttatttaacaataaaataaataaataaatttagatattttaaacaataaaacaaataaaattgttatataaagtatgattaattaattgaattaacgtctaattcaaattaaaaaaagatttatataaaaaa

SEQ ID NO: 304638 - DNA, 5476 bp, Cannabis indica
gctatttaatatagtagtttttttacagagggtgtttacaccattttttctgaccccttcttcaaaatacagttagggtatttatagcctcataaataagaaaaaaatgttactattgtcgcaagtgtggaagcattacttgcacaagttcccagatttagataatagggtatgtatgtctgtctggtaggttgtataggcttttcctaggtgtttggtgagataagcccctaaccttccttgattgatgcgacaattcattatgcagccatcataagattcataaatcagagtgtaatcgtggaataatagatttaatgcatctaacacatcttttcgaaaccatccgtagatgtttttcccatgctgcatttaatgcgcccatatcaaatcaggttcgggatctaacgaccggactcgaatgttttatctagctctttgaggtgggcataattcttaacttagcatgacgctcctagaggggcttcccgaacatgaccatttggtctcagactgttgtcttaagatgtttactttaattactcttgatttaggctttcctcccacctgaccgactctgggattgccatgtgtattagaaaaaatcaggggtaacatttacccccaagtctcattttgcacatttgtaaaatgagacttgctacttgcctcagggagtgacgccatcaaatatcatcctgcacgcgcatgaaataatccacaacaactattgcatatttgactccgcattttcccgttgggagagatcctataaggtcaatgccccataccgcgaagggccaagggcttgtcatcaatgtgatttcatttggtggggcccttgggatgtttgcaaacctttgacattgatcacactgtaggacatagtctatgcaatctttcttcatagtgggccgagagtagccttgtcttaaaaccttcttagagaggctcggacccccagtataatttccacaaaatccttcatgaatctcctgtacaatctatttagcttcggagtccaagacacaccttaggtatggcatgcttagacctttccggtaaaggataccttctttcatgagataatggggggattgttattgtatccttctggaagctgcctgatcttgaggcaattccccctttgtcaaatagttaatgatcagatttatccaacttgatacatgttcattcgttgtaatctcaaccttagacgcaatacttggcgccaagaggtactcgacaggaattactcccagtttttccatttcccgatttggtgctaacttagttaagcggtctgcatgagcatccttttctcgaggaatttattcaattttatagctcttgaattcttggagcaactccttcgcgactgagacataggcatccatcttttcacctcgggtttgatattctcccagcacttggttaaaaactagttgagaatcactaaaaacttctaccttgtgggctcccacgactttggctagtctcaaccctgccaacaaggcttcatactcagcttcattgttagaagctgaaaatttaaaccttaacgcgacttggagcttcgacccctctagagatatcattgctattcctgccccagatccgttctcatttgatgcaccatcaacgtataccctccaagtgggaataacaaggtctggtaagtcagtcgctgcttccgtttcattgcattcaaccataaagtctgcaaggacttgccctttaatcgaaatgcaagaaacatactgtatgtcaaactgaataagctccatcgcccatttgagaagcctcccagaggcttctagtttctgaaggacttgctggagcagatggtttgtgaatactttaattgtatgcgcctgaaagtatgactgcaacttccttgatgcaatcaaaaggccgaaagctaacttctcaattaaacggtatgggattttggcccttatcactcgcttactgacgtaatatactgggtgcgaaacttttccttcctcatagactagggatgcactgactacattctcagagatggctaggtataagtatagatcctccccgtgtactggtttggataggattggctgcttagccatatgttgttttaatttcttgaatacttcttcgcattccctggtccactcgaacttttgactcttcttcaggatgatgaaaaatgggatacacttgtcagtagattaggagatgaactggctcaaagctgctatttttcctgttaagctttgtacatccttatgtttcttaggcgaaggcatatctagcaaggcttgtattttctctgggtttgcttctatccctcgttagcttactataaatctcagaaattttccagacttgacaccaaaagtgcatttcttgggattgagcttcatcacgtacttccttactacttcaaaacactctttgagagtatccgagtgacctttactcattttagatttgagcagcatgtcatcgacatatacctccatatttcttcttaacaaatttttgaacatccgactcaccatgagctaatatgtggctcctgcatttttggtccaaaaggcatgactagatagcaatatacctctttgtcattttaaaatctggtatattcctgatctgccacatgcgttttaatctggttgtacccaaagtacgcatccatgaaggacaatagctcaaacccaaaggtggtgtccaccatttgatcaattctaggtaacgggaagcaatcctttggataggccttattcaaatccgtgaagtcaatgcatatttgccatgttccgttcgatttggtactagaaatgggttagccagccattctaaatagtacacatctttgatgaaggtgttcaatagcatcttatccacctccttttctaaggcttctaactttaccagatccaaatggcgtcttttatgttgtaccagaggcatttccttgttgacgtttaagacatgggtgatcacatgcgggcttattctggtcatatctccatgacaccatgcaaatacgtctgttgattctttgatggtgcttataatttcattccttttgttaggacccaagcctttccctaagcagataactttggttgggtcttgatcacaaattcctacttcctcaatctcttccatatgctccaaaacggtctcagagctaatgtgaggatccaactcatcttgtccttttggcaagattgtgttttcgattccctgaaccatgaaagtagcttgttgggtagccacatataacatttttcttattttcccttgattttctcgaacagttccaaccccctctacttgagtggggaatttgaggcacatgtgcccgatcaaggtaatggctccaaaatccactagggtcgggcgtcccaaaatcacattgtaagctatagggcagtctactacaatgaaagtgcaatacttgaacatgctttggaggggtgtccgagcataaggttacagggagtcttacctttcccatggggacaagggtagttccactgaatcccgtgagtagcgaaccactcagagagaggtcttaatcagtgagtctaatggcaatgaaagcgtcttaaacagaaggtttactgaattcccattgtccaccagaatcttggcaacaattttgttggcaatgggagtttcaatcaccaatgggttatgatgagggaaacacactgtcttggcatcttcttctataaaggtgatgggttgatccatgagtcggggcctttgcgctgggagcatgttaactttccatacttctccttcatgattcggggcttaccataacgcttcctcattttgtgtggttcttccaatatgtggccctcctgagatcattgctacccttccatttggtttaggaggctgtccgggcactggatggtgttggggcagggttcctgaaggaacttgcacgtctacaacttgagctctgggaggcgctggtgctctgacttgtccccattcatgtgcgccaatctgtcctttatccattcatataagtgacctagccttatcaggctctcaatctcatctttcaagtttttccattcattggtagtatgaccaatatcattgtgatatttgcatcttttgttgggatccctccatgaaccatccagtatagaggagacgacctctagtagtgggtgtttttcccaagtacacacgttcttgggtgtccactaaatcaatatagtgagtatactaggaggtgtaacccttctttttccttttgttctcagtctgtgtgcttccttttgataacctcttactttgagaggtcttagtagcttctgctgcacttgctgcaggaggtgtggattaagcgggatgctgtgagctcactctaggagccaaattaccccctagcgctctgaaactagattgagccagggtaagagcaaggtagtgggtatatcttagtgttgttgaaaattgaacgttgggcgttccacttgcctgtggcacaaaaagaaaggtaattcctggaagctgcattttgggagcataccctggatcgttggtagggtaatatcctccgaaagcagttatctacgcttcctctaaattgatatatttttggaccctcttttggaagttctgaagactagcgactccttcttgctgaagttcattccagaaggggttcctgtccggataccagcttgtagcaatgccaattattgtccatcatccacttttttgattttgaaagcttcttcctaaaatttttatcaaaatttttagagtttcaactggtagttgtttaatgttagtcaaagcgctgacttcaaggtttattttcctggctgccacgaactgccttctaaaactaacttgcaattttttctaatagtccatggatccaggctccagctttttaaaccactcctcagcgaatcctcctaatgtcagcaggaaacacaaacactttgcgtcattgctgaatctcttgaacgtcattacgtgattaaatctagataagtgatcactggggatctgagtctctagcgtataaggtcatttcaggaattttgaaattcttagggagttccgcttcaagtatgtttctagcacaaggttcccaatctttacaattagactctgaatcatctcccttttgcctccaggagactttggttatatcttttcagaggatggcgagctcagccaagatgccctcattcaatgcattatctaagactagtataattttattcttttgctcgaagctatttctaagatcaccgtgcttagtattatgtttttacctcatgtcgataggaggatccttgtgactcttccctgactcttggtgcacaaatacgttttttcagtctccctaatcctgaggactagcatttctctttgtaaaatcatattttgtagtttttttatttttttttatttttttgtctatttgtaaaataatttcata

SEQ ID NO: 304639 - DNA, 2278 bp, Cannabis indica
aaaaaaaaaagaaaagaaaagttaccagttgggacatttgaagccaaattagatagagcaataatgactaaagcaagcacagttatcccactaacacggttgatttgtgcaaaaggctctatcagatcccatagtgtgcctggtatccctgtcttgttaaaaccctccaccgtaataaacattccacagaagaatattagaagtgaataagatacctgttcaaaaaaagcataattaaatttaaaaatagaaaaagaaaatatatgtatagattgtgctatgagaaatgctattgctaacacaaaaccttttctaagcagtgttgggcatcttggaaatcaagaacaacaagagccaaagcagcagttattgcagtccaagacatatcgagccccaacagcaaagcaactaacattccaacggtaactaaataaacacaagttttccacaatagccttctccattttggtgacaaaattactcttttgcccttgtttccttctacagatttcaacgaagcctcgttgtcggatagtccatccaccgaggccacccgattcgaatgaacagaatggattgactgaactgaatcctcctttttatgatgaaccgaatggattgactgaactgaatcctcctttttatgatgaatagaatgtagcgaatgaaccgaatggattgaatcgtcctttttgtgatgaatcgacgttacttcgatcgccacctccttattttttggcgtcagagcttccgttacggctccattgatttcgtctcgctcgagctcaatcgcgttctcaggctctgctcggcgccggaactggagccgccggcgttcgcggtcagattcggggagctttgtacgttcagattctccaatttcgagctccagtcttgtgaattcaacgacgaaatgtgagacaaagttgccggagagaatcggtgggagttaacagcctcttccgcggcggctccgacgatcggatcttcttcttgtttcttaatcgataacggtttccagtacatgcagaggaggagtacggcgttaacagagacacctaaaagcgtggccggtaaaaccccgacgagaaattggccgaaggtgattttactgagaacagcgatgacgagattttgggggtttccgattggcgtggcggctgagccgatgttggagctggtggctagggcgagaagaaaggggtgtggcgggagattgtgttgtctggcgactttgaggacaaactcggtcaaaacgacacaagcggtgtcgtttgtgaataaagcacttgaaacggcggaaattaggcaaatacgacaaagtaagtcttttgctcctttgcttttccatgaaagtaatttccctagatacataaacatatctgctctttcaagataaacgcttaccaccattgtaccaaataagagtcccaaaattggaagatcaatagcatggtaagcttcctctggtgttaacaccataaagattaccataagcatagcccctaatagggaccctgcagttctaccaataggtaaacatggcactgaaggaaaaacagccattatccagaaaatcccaaaggctatagaccctaaaactacttttacaggtgaacccaacgccatttttggaactctattttttttttttttttaattgttgggttcttattctaaactcttccagtggtttgtgtatatttatacaagattgatagcttcattaagagagaattagaagtggggtagtgaaagaaaaaacaagttttgttaaagactctgttttaacctttttttttctttgtttcttttttgggaggtaatgtgtgtctgggttagtgtcacaacctgttcatggaaatctcatggatgtaaaatagcttattaaaaaagtatttaacgagtcaaatgggatttggaagaaagtaaactgtgacatgtgttggtagtaataatccaagtgtttggtttttagggattttgataattttattattcattctaaaaaataaataaaataaataaatccaaatgtgatgaaacaaattttattacttggctagcttttttattatttgaatgtgaaaatgtgtggcatgttaggataattttatataaatattttattttattctatttgtaaaatataataaattatttaataattaattaaaatattttaattatagttagatttatttattaattattttaattgcccaattttaaattttttaaattaattgttaaaatattaagggactttttcattttt

SEQ ID NO: 304640 - DNA, 1296 bp, Cannabis indica
aatttaaatttgagttgtaatatgaaattatataattttgctatactaaccactatttaatatactaagagaaacatttgttgagtttaattttgaattgtagttttctttattcctttcttttttttaaaagacgactttctgctataataacatatatatttgaccctcaccataaaattatcttagttccgccacactcaaactcaagccctggatttcttctagtgaaactgcaatgcaaagtttttaataatattgtagtttaattccttaatttgtgctataaaataattaattatttcttactagctagagtacgtatgcgttagtctaaatcaaaaaaattaatgtgaggtaataattacattatatatacaacaagatcttatctcatatagtcaatattataggtaaaaacattacttttttattttatttatttgaaaaaagctttctcattgatcacctatatgtatatatcctcatcatattaatttctgggttttctgacgacaacaaaaaaataaattaattattcacaaaatttatatatatatagcttgtagttgtagagtatctcgattggatttgatcactaattaaagaaattaaacacatgtataaaaagtcatagttgcagtaaatgcatgacaatctcatgatattggtcgtaattaacaaaaagaaaattatgcacatatactattatttatatataagaacaatatatgtccaccaatattgttaatttatagtagatattacaaagtcataatggttgagatcatcatcatcatcaccaaggacgaaacaaaactaggagttgccaactcaaaagttgatgccatatacataatctcatgaacacttggcttggaaagtgccatgtgggtggtgcaaaaacaaaccctaaataaacagaaaggacgaattcccttgtaaaaaaaaacaaataaaatagaagaagatgattcctttaatattgagataatatttacatatgtatacatagtgatattattagtagacttatcattttgttgggtttttgtcaaaccttatcatcatcaattaatatcataaatgcagttcgtacaagaaagatgttattttcatttgctacattaatatatatattatgtgaacaaatggagtataacaacaaaatatgaatcaagatcacctgtccaaatattatatcccatattatgtctaatcaatataataatgacacattatttaatttattttttaaagtttatactctaaaactaacggagcaagtctgttagc

SEQ ID NO: 304641 - DNA, 3915 bp, Cannabis indica
gtagaagtatggctgtcaagagggatagcagatagccgaacttatttgagctaggattatccttccagtcattcggtagacgaactagaaaggacatcacccattttaccaccaaaagtacctccaagggaaccagaaaccacaaacaagcctataagaaatgcagttttctcatgagagaatcctgtaagctccaaccacatgggtgcaaatgcaagagccgaccagggaaaagaaccagtaacaccctgcaacacaataatctgaaatgatgatattttaacaactgccttagcttcttttacaagcaccttgacttctgaacaaaatgaattccgagaaatctcattgctgggttttatttcatttgggaaatggggatcagtagcgtagacacgcactaacaccccaacaatcacactgattatcccaacaatatgaaacgagatcctccaaccagctattcccatgaaagttgttggagctatcaatatagaagagaggccaccaattatagagccaaggttcccagttaattggagccatccaaaagccataccacgattactctcatccgttgaatcagccacaagggactgaattgcaggagccactagagcaaggcctatcccatttaatgctcttgatacggccacctaaatttcaattcaatcagctcctattattatgaatgatacaatgataaaagatacttctttttctaagatgtcatccaatccaatcgggaaagtaatcaatccacaatgcttaattataattaatactaaaactgaaaaggtaccgaaatctttgtttgttctcctctatgtttggaattggaagtaacgtaatgtaagagtaaagtacctgaagaaaagtggaagagaaggcgacaaggaaagtggcagcggcccaaaggaaagcgccgagagcgataacgtgagctcggttatggcgtagggagaagtaaacggcgagtgggtagcacaaggactggaccatagacctgaagagagtgaggtaaccaagtccagttgggtcggtgtggagggcggcgccaacttctttgtacacacccggtaacagggactcgtcggctctctccatgatcccggccaggttgaccagaaccagagtcaccgtctcttgcttcattttcaaattcattttttttaaaaaaaataaattaattgaattgaattttacaagatatcttacaattattatagaaagatatcttacaataaaatggattaagccccccaactaacccaactaagtgtagacttttgtcctgaatttttttctattgtgaaatttcttttatgaactataatttttttttttttttgtaaatatctctctatagttatattttgcttattttttaaactatttattgatataacattaacataatattattgtgaataaatgaaaaatatatacatacaaaataatataataataaattatgaagatatgtgtgtacttttagagctaatgtttatatgtttaatatctattgtaattctctacaacacaaactcaacacacacaaacacacgaagcaatgcatacaaaccagatatcaaaccagaaaaataaaccaaaccagtaatgaacacaattaaagcataaaacagagaaaaagtaaaagaatgagacaaagaatttatcttggtttggatctcaatgtgagtcctactccaactctcccctaaggagttcttccactatgtaaggttatttacaaacaccaattcagagtaatacaaatttagaattatatagagataaattagctctcaaaacactatggttgagctgctcgagacaccatgaatgccatggttcttcatcttcaacaatcttcctctcatcactcaatctctctcatatttctctcttgctctcttaatctctattgtcttgtctcaattaagattacaattcactatttatataggttagttaagctcacaacccgagctaactaacacctaaaacaaagttcaactaactattgactaactttctaatcaactttctaagaatagaaagttaattccaaaactggttttctatggattactaactacaaattccaccttaattcatagaaaactagtaaaaaacataaacttggggagtgaacttgagattctaaacaaatccaaggttgagcaattccatggaatgactaaacttgctcactggcaacacttttgttcctgcatcagtagagttctcctctgtgggcactttttccaattcaatctctccagattctatcttgtccctgatccaaaacattcttatatcaatatgtttggatctttcatgataaacagggttcttgctcaaatgaattgttgattggctgtctgaaaacactaagactttcccttttaacatgctgatctcttatagaattcccttgatccatgttgcttctttgaaagcttctgtgattccatagtagataatacaaccacatgttgcaactgtgatttccagtttatgcagcaagaattcaactggaacaataacttgtaatcgattttctggtatccttgttggatgtaaatcagcatccttaaatccttccaatttcagtgtgttgccagtcttctcaaactttgaaccatagttggaagtggtctttaggtatcttagaagcccttttaatcttgtccaatgatcctcaccaggattggatataaatctactcaaagtgctaacagcataggtaatgtcacgccttgtgcttatcattgcatacattacacttccaatagcttttgcatatgggatttcttccatttttctctttgatttatcatcttttggggatcggtctgtagtgaacacaaaatgaccagctaatggcacttgagtctcttttccatctttcatattgaacctttttataaccttttcaatgtatgacctttgtgtaagtaacaacttcttctcttttttatttctttgaatttcaatgcctaggatctttcttgcaactcccatctctttcatttcaaactcactgtttagaacatatttcaatttgcttattttgttttgatcttttcccatgataagcagattgtgagtttaagtttgtgaaatacaaacatgtgtcaaactttgatctgatgtagccaaccattgtaaccacaaaatcattcttcttataccgttgccttggggattacttcagaccatgtggagacctcttcagcagacagactaattctccttctttggattccaccttgaatccttcaggttgttccatggatatagtttcttcaagttttccatttagaaaagttgtttttacatccatttgatgtatgtcccaatcaagttgaacaactatagcaatcatcattcttattgtcttcattttaaaaactagagagaagatttctaagtaatctatcccttcaacttgagtgaatccttttgcaactaatctggccttgtatatctttggttcatcttcagttaatccatctttgactctaaaaatccatttggatcctataaccttctgtccttctggtttgagaaccactatccatgttttgttctttttcagagaagtaatttctgttagacatttatatgtataaactgaaatatatatgtttaagtataaagtgcggaattaatcaaacatatatgcactataatttaaggatcgaaatacctccagccattgattcttgagcttcaaacccacataagctttgatctgcaaaggaaattgactaccatgggtaatcgggcttcctcgctctctcaactctctttagatggaatttgctgttatgaacagaatgagtgaggagctcggggaccgagaccctatatttataggtgagatactccatcagtatctgcgcc

SEQ ID NO: 304642 - DNA, 2236 bp, Cannabis indica
aataataataataatagtaggtataggattaaatattattggaacaaacaagacatactttagcaacaaaaacattaaatattatacagtaataagcacactagctagctggctctaataataaaagccatacatatattataaccactaattaatttatgcattaatgcattactacaaacaagtacgatatcgaactccaattattgattaattaattaatcattcgaatataccagatgaccaagagactgtgaccttgacccgattcccctgttgtccattgatgtagttggaggatgtacccgaggtttgagctgcgaagtttacggtgccatcggcaatgacaagatcttggggtcgcccatggcatctcaaatcttcacaggatgagtcataatcatacaatgttgccttaatattgagagagttttccatcggcactgctaccacagatctcatcaatttaatgtcctgccaaggcaactcatacacatactcatcttttgatttgctaaacaacaaactctcagcaacattacttaacatgtcccaattttggccaccataaaaagcagaaactcgcccatgaagtaacactttacctgatgcttgtttttcttcaagattaattgtgattctagcagccactgcatttctcaacacagcataattcacagttgccccaccgtattttccacctactttttcagatatgagcttgtcatacttattagtattagtataataatcccatgagatttcaccattaactatttcatcatccggagaaataatgtccttgtccgtgagaagcagcttgatattaacactcccagtggctaaaatggcttcacctggtccggtaagccaagcattcgcgtaaggcctaactgtttcgggtctgcttctggtgcggttgtagatgtgctgcgtgtttagcccatcgtccgctatgattgtgccgtaaagctcgcctggatcctctccatcaatgttatctatacgcactgagaacacttccaatagtggtactccttctacaaagcacttgccaccatctcgggggccggggccgctttgcttatcaatacaaaacctcaacaagatccccattatttcaataatatgggcaatcatccttatttcgctgttattgggtggaattcttatctcgttagtccgaagtacgggcagtggggtctcgggattgttgtcgctttgaaacacggcttcagataaggaaccccagttgcgaattagactcaaaagccattcttcaactagtccttctcggtctgcatttcctcctctgatgtaatcaacaggaggaattcgaggacggttctcgaaattctgatcggacacgtagtcctgtaccggcagcagtctgatggactcggagatcatgatgatcacgactaccagacatgctgcccgtacttcacccaccgtactcgtagcgagtcggtttgtggaaattccaatgttgtaaaagccaaccctggtttctctggtattccttttagatgcctttgctaaacttctgtaactgccattgaaattaaggaaggtggaatttggaatgaaatgagtaaggggattggaatcgttttgaaactcgagccattctccagtttccatctggtacccaatcaagtagagattatcaatgcgaaacctgaacctgacggagtgatcagaagtttgaagaaccaaatcgaagaatcttgtgggtggctctgcttgaagcggcagtgtgggacgaccgtgtgtaattctctctgacaatcgcgacgcagatcggcaatcaaattcctgtaaagtgtcctggtcgccgtgtcaaggttgaacaccacttcaaattccaccccataataatctataattatttatttttaccaccttattattaattggaagtgatcttcctcatcttccccttcattatatatatacaaatatattattattaggatttggtgcttaacgtcctgtgattagttaaaagttataaggcaccttatgtgttgctttactattggttaacaacattcaataaaagctattattttaatgagaaatactaaaagacatgttagtacattcctatgcattaatatttttaaaaaattctttaatgcacttcatattgatgcaccctatctgttttagcatccgaattaattttttagttaaatttttcctcatgctcatgtaaattatatttatttaa

SEQ ID NO: 304643 - DNA, 1558 bp, Cannabis indica
ttttttagttataatgtcaaacatgcactaagcctctaaaagatacaagacttagtgacaaagcctttgtatatagtgagagagtcttacaactgctcaaagaaaaaatagaaatgaataaaggctgtaactaacttgtaacagaaaaatagttacaaaatagctaactaattagcatttgaaagactaactttatcatcctccctcaaataaaagggtgtggaacagacattgagtttggttttcaggtaagcaaatctgtctttgctaagtggtttggtgagaatatcagtggtttgatcaatagaaagaacatatctcacttcaatctctttggctatgatttggtcccgaataaaatggaagtctatttcgatgtgtttagactgtgcatgaaatagagggttagcagctagagaggtagctccttggttgtcagcccaaataattggcggtgttggtagagacacgttcaactcaaaaagaacagaatacaaccattgaacttcaactgttgtattagctaaagaactgaattcactctctgtgctacttctagcaataacatttttcttttttagagaccatgatatgagatttccaccaaagaaaacaatatagcctccggtagactttctgtcttcaggacaactgccccagtcatcatctgtgtatgcttgcaaacacggtcttaagcttgttctgatatgtaagccttcatggattgtcccctttaaatatttgaataacctcttgtaagcctcccagtgtattatggtaggtgcatgtatgaattggctgatcttgtttactatgaaagcaacattaggcctaattaatgcgagatattgcaaagctcccaaggtacttctatatagagtgtgatctgagaatagttcttcgatatcaagagctaaggtgtgtgttgaagtagttgggcttagacttggtttagccccttccatattgagtttggtaagcatatttgaaatgtacttggattctgagaggtacatacctgtgtggtttctaagtactttaactctaacgaaataatgaaggcaacaaagattttttagtgagaagtcaatattcagtgatgagattaattcagtgataaggtttttgttgggaccagtcactaggatatcattaacatagaccaatagtatgattagtgagcctccttcaacatgaataaatttagaagaatctgaccttgatggcttgaaccccttgttgaaaagtgtaaatttcagcttatcattccaagatctaggtgcttgtttcaagccatagatggctttatgtaatttgcatacacgatgagggtgtatggggtctttgttaggttataataaacctatatttcgggtctttaaagttagcattatctcgtctattggtgtcttttggagcagttttacgcttgattttcattatttcaggttcccggggtgttaaagttcgaattcagtcaaatggcgaaaaactgggataaacttggaaaaattggaaaattcggttccagaagtgtcagtagtcgcgacctccagag

SEQ ID NO: 304644 - DNA, 2522 bp, Cannabis indica
taattgttttgtaacttcttttggttgatgtataccaactggcacatgcagacaaagaaggcaaatcaagccacctaacagatttggctttgctgacatagttcactatgcacttattattgcagaaaataggagagatgagcctttcacctatgaataagcaatgagttcagctaatatagatgaatggaatcatgctatggatgaggaattagactctcttagaagaaacataacttggattctagttattaaataacctgaacaaagaataataagttgcaaatagcttttcaggcacaaaaagggaattataggaatagaaaaggctagattcaaggcaaaatttgtagctatatggggcctattgagaaagaaggagtaaattacaatgagattttctctcgagtggttaagcatacttcaataaaaatgcttctaagtttggtaactacaaaaaaccatgaactagaacaactaaatgttaaagctgactttctacatggggaattggaagaagagatcttcatgaaacaaccaaatggttatgaagaaaaaggaaaataagattaggtgtgcttattgaaaaggtctctctatggtttaaagcagccactaaggaaatggtacaagaactttgatgagtttgtcatcaaaattgggtttaagagaattcacatatggcatttatgtctatgttaagaactcaaagacaatattatacttgctattgtatgtggatgacatgcttacagctagcgaccttggtgaaattgaaaaagttaagaagcttctaaacaaagaattggagataaaggaccttagacctgccaagaagatacttggggtggaaatcctcagagacagaccaagaagaagtttgaaattgtctcaagaaagctacatctgcaaaatcttggacatatttggattctcaaatgttagacctatatgcactctaattggacagtagttcgattgtctcagactcaagcacctgttatagaacaagacaaagatttttatgatgaaaattctatatactagtgtggttggaagcataatctacatcatggtctgcaccaaactagacttatgccatgttgtaagtatagtgagaagattcatgagcaatccagggatagagcactaatgcgcaatcaaatggatcatgaaatacttaaggggaacatctaatattgtggaatcattggatatgtggactttgattatgtaggggacattgattcaagaagatcacaaacaaattttgtgttcaagctcaataactgcaccatcagttggaaaacttatctacaagttgtggtagcactctcaacaactgagtacacataacttgtacaaaagctataaaagaagctctttggctcaaaagaatcacaagaacttgttttagatcaaaaatcaattccaattatgtgtgatagccaaagtgctctttacttgagcaaaaatcatttcatgaaagaactaaacacatagatgtgactacactttattagagacatcattgtagaaggcaagttcaaactccataaagtgttcactgaagaaaacccatctaacatgctcaccaaagtttttccaactgtaaagttcagacactgtcttgagttgttacaggtcaattacttttgagagtgtgtttattgtttagctttaattgtattaacaatcaaggtggagaatgttagtctatgcctaggtgtcatttaatatggttaatcatcaagttagttttcaagtagttaagttagttactctaaataactaactcttgtaaatagtttgttggatctagtctatggcatataatagataagttctcatttattttgatctctcactttgaaatgcaattattctcattctaatataaacaaacagagaaattcagcgatataccattaatgtccttgtgtgtttgaagtttgaaagtgttatatgatcattgacttatgaattggcaaattgaatttgttgtaaactctacaaatggtgatcttaaaaatgatggcaacgattaaactattgttatagatactgatgatctcgaggatgaaggcaatcataaatagtgatcttaaaaatgaaggcgacaatcaaactagtgttaaggtcctaaggatactgatgatctcgaggatgaagacaatcataaatagtgattttaaaaatgaaggcgacgatcaaactagtgttaaggatatagcgatatttacatttagctttaatggccctacatttgaaacttaagtgattttggtggtagagggagcttcacaacttggaagtatgattcatgaaagttaagtatacactcaaccttcatagtattaatctacccaaagcaagagcacggaaacatctctaaaatgagttccatgtaaatttgtgagtgaggcttatctaaatttttttatgaacaagaatttgtattattttttttgttaaacaagaatttttatctaactttatttattaatatatatttttttttt

SEQ ID NO: 304645 - DNA, 4372 bp, Cannabis indica
aatacaatacaatacaattcaacctaataaattattggtacgagccaataatgtagaaattcaatcagacacagcaaccatagtggtacaattgtttaacagtcctaagccaaaaatttggatttcgaagaagtgcatacgaaattcagggagctaattatgagcatccaatactgggaattagtgaacattaacaagagttcaactgggcagcccataatgagcacaatggtggctaaaaagacttttggagctccttcacttgacaagatgcagtactttcagccaccaaaagtgaccctggtatcactgtttggtcctgtttacggttttgctttttgtcaaaaaacaaaaacggaaatacccttcaactaaatttatattacttcaagtgattatcagcacaagatgctgaaccctaattactagaaggaacaaaaaaaatctaatcccctaatcttgaaattttactaaaactagatagcaattggtaacctatagaattcactcaaacaaacactagaataaagcttcatttggccggagcatgtttcgccttcgaatgagattgtaaagcaatgtcagagccaaacgatctacaagagttcaaaaataaattaaaactcaaagcacacaagaattaatgattgcagcaacgacaacaataataatataatgacttattatacctgttgcacgttgtgcaagagaaagctttcccaaatatagctgcagttgttttagcttgttttgctgggtgaggagttgctacatgactgcgtactttactgccccctgtttcaccaataaattacccttttaacaccattttacacaagtaatggtgtatgcacacaaaatatgcaccaaaccaaaacactaaactctgtaatgtggcagtatttttttaactgaggatatattttgtgtacacgtgccattactcttattatatataacaaaaccttttgggaagatcttgccaaaagaatccatcactatcaagtatcttccgtatctgatgtatcaacgattcaacccatacaaggcattttttggctaagtttctttaagctgtttttttagcttgtcaattgaaaaggtttttcggttggggtacaaaataaagtgtccatttttcaacaaatatcttttcagattagtaaaattaccctaattttccttaaaaaaagttcttttgtaaattaagataattttataattcttaagttactcataaaaaaagctattatattatagctatccaaatagacaaaataacctaaaaacttttacatgtcttgtgctttgatagaacaatactaaggcctcctgcccaacacctaagacatttaatagcagatcccacgcatttcaattttaaattactttaaattaaaatctttgcaatccgaaatttatttgcaattttgcaccaataataagaaagtataggatggtgggcatcctaggatactctttagcatttctcttttagatataaataaaaaagaaagctttcccaaacaagatccacataggatatcagtgacagaaatttctcttttagatataaataaaagtgaaagctttcccaaacaagatccatacatgatcttagtgactgaattataggaaaatgtttccatacacggacttactaacaaagcgtagtgacactgatgcctagaatcagagacaagaacaatttgattaaattaataataaagggaactcaccactctttgagtcagtcttttcgggggttaccaattttgccttcttaaaagtagccggtgtagcagtttcagcaggtcttttcttgcccatatcaaccttgaaaattcaattcaattcatttaaggaaaaaaaaaaagaaggccaaaacaactttcacaatggaaaatggaaagtgaaaaatgaaaagaaaatcaaaagcatatgaaatgagtgaaggatagggtatgagtgcctttaccttcttctcttcaccttcatcctcttcactgtcatcactttcttcatcctcacttccatcttcatcatcacttccatcctcatcttcactgcttttctcatcatcattgaccttgaggtcatcaatggtatcagtaagccaaagaatataacataaatttgacaattattattgcaaaatattaaccatctacacatagtagctgataaattgaaatgcatactatttattcattcaaacaaataaatatataaaaaaccaaatattatagttgtggccccccatcgaattaaaatgtaatagacaataaactttctagtgtataatgttaatcaacatcttgtactgaaaaacttgaaagatagaaaccgagagagttttaaggagtgaaaacatgtagaggacaaaaagtttcagtgttatgatctgatgtggacattgagatggtcaacaacagagtttatgtaaaaagtttacctgctcttcatcctcaatattataatcatcatcagatgatgaatcgttttcttcatcaccacaaggcccactacttcctctttgaccagaattcaaaactttattcgattttgcaacattttcgtcttctccagactgcaagtttcctacataaacatgtaacaaaaccaaatctatataattacgaggaatttaacatacaagttaaactatcagagcaactcaagatgttcttaccagaaactacaccattatcaatggatataggcacattcttatcctcagaatcagactcagactcagaattggaatctgaaaggaagcatgttgtcagatttgattccttaggaagctacttaatgatttctaaaagaaacatccaaaattgtaggtttaagtgggaaacctcttatctatatatttagcaacaaaaagaaaaaacaaaaattaactacttgcttctgttatgttaagtgatgatagcaacaatttatagacaaacaaaaaaaaagcaagagatgaaaaatcgagttaacgaaaacagtatttactttcaactatatatcctgtgaagtggacactcccatttttacagttatgtgatagctcaaatgacttttcaaatacaagatcaaccgaaagttgaggaatcttttgtgaaagtctcccaataacaaatttctgatcaccaacttttgctgtcagtataacaggttcacttcctgcatctttcttgatctcaccaagacaaacctgcattaaagcagcttttaataaataagcaattactaattatgtgaaggaaaatatagacaaatcactaattacctttgcaatatgcaagaacgatccatcatgttcaaccacttcagacttcccacttttgaccacaagacctaaacaccagaccacaaattttaaagctcaatatcaaaactgaaaccaagacatgcttaaaaccgtactcatgttctatcatgatattctcacacactcatgttcttgttaaccattgcccccaaaaaagatcaaatattacttcaggaaaaactgactctagcaatggatttgaactagaaatgtcaccatctgaccctgtaattttaaaacttagtatcaaaacatgcaaaaccatcatggcattctcacactcatgttcttgttaaccaaatctatgtttcattggccacatttccccccaaaagttccaatttgaatttagaaaaaactctctctagcattggattgaacaagaaacgttggcactgtcaattaccactcttattcaacaaatacaaaaatcttaaatttaacagttttggacaaaattcagaaccaatacaaaattatactgaaggataacatgaattaagccacaaaaataataaaaaccaagtcaaaactaaaatcgaaagatcagtataagaacttgcaatataaaaatagcacttccacattttatcaaaatgaaacaatgcaagtattttacgagtgaactcttatttaacagtaacaagcccaaacatgtctccgccaaaaaaaaaaggctagaaatgtctctggtagtaggttttttgaaggccaaaacagcgagaaagtgtaagaatcgtaaaatctgattactgttgttaaaaattctcttgttttctcggccatcaaacttcaaataatccagatgatatagtgggagagagattaccccagaaccccatggatgaaagggagccgttacgttacgcgaagtgtgttttctgtgtgtggaagatcgtctcaaattccactttccctctctcctctattttttcttacttttccattttatttattgggtgattctacaatttcaaaagattatactgatgtaacttttacttatttcggtatctaaaaaaaaattttgtagcttttttttttttt

SEQ ID NO: 304646 - DNA, 2403 bp, Cannabis indica
gtacgatcctcgggacatcagggcttttgtagttagtcgctgggcgacaaatattttgtaaagaactagtaaacttttgtaaagttttttgtaaatgggatcccgaagtattttgtatgctatgttataagtatttaattaaataagcaaaattttaattattcacgtttttcattaacctcgttggttgacaacgagctgcacagtaccttaaaaatcacgtcaacacgcctatgctagctagggtgttacaagggttcattaacacccgaaccacgtaaaaaatacatgtcttctttaatcttgcatttattatttctaaagctcttatttaattagtttttaaaaatctcgttgaaaattgtggtgctttcattgagagctatagaaagatgtaagcctcagtgtttctaaaaccatggtggctacccaaaataatgttacaaagaagattcctcaaggtagccttgatgctgtcatggaggctgaatatcctatttctctagagcatgccgaactgagcaatgtgagagaaggagatacatctggcgctgacaaccaagaggggtgacccaaataaatggtgtgaagtagtggatgaagaatgagatgctaaagatgaagaggaagacaatgacggataatatcaaagacgggtactacaaggatggattctactgtgagcaagatccagaagtagtttgagtatccaaagagctacatgaaacccatgaaaaattagcatgtcaagagaagctttctcaatggatggaaagaatgatggcacaccttcaaggaaaatttggaggtctagaggaggactccaaagaagacacgtcggtggaagttgtcaatagagaaagccttactaactgtgaaaccttagctcatgcaaaggataaggggaaggcaatggtaggtgatgctcagaacttgacagctcccatacatcctaggaaaaacacgaatccaaccaataggcctgtgtaggcgcagaaggtctctgatgcctctgagattgggtgcccttctactctgaaaggccttgttgcgcaaaaagggactcataaaaaagtactcaagcccagtggaaggaaataacaccgtagtgattctattaaccattatggtgggatcggggatagtactctgatgatagttggttcactatagatctttgaaggcgttgatgccaagtacaaaaaggtcaagggaaagaaggtgtagccatgaggaaattacctcagaaaccatttgaatgataaagcttgcagacttgacctccttaaaagtgacacaaaaagactagaatagcatatttctgtcctgacaaggcttgtccggaagcagagtagggtcctcactaattctgaggatgaggagctaaagccatgtgttagaaggatcatggaagccccactcctgaataacttcaagatgtcccaaattgagttgtacgatgggcgtacaaatcaaaggacccacctggccaaatataataagatgatacaagtggccaagatgagcgatgatgcaaagtgtttgtgtttttctctaacacttactaagtcaaacgaggattgttggaagaggttggctcctaaatcaatcctcagtcggaagttggaaagagctacagttagccttccaaaagcaattcatagttgcctgagattatgttatggaagttgggtcaatctccaatgtcaaacaagagataggagaaagcctaaagaacttcattcagtgaatgaaggaggcagtagccaagacaaaggtgaatgacgatataaaactcggagcctaataatctagactcacggttaggcccatgttgtggggagagatgcagagaaagagggcaaagaccttgtccaaatttatgtaaagggcataaggcttcatcaattcagaagatgcttaccagcaagcattcagagtccctccaactccgacccctactccctctactcttggattcgcctcacatgttgctgcttctagaactcaataaactctggctaattatggaccttcaagattcatgtaagcacctactcaaactaatttttttgggtatggaatagcataaattggatgcagtatcacttctgcacagtcaaagcaacaaaccaaagttctagaaaagaacgtgagccaggcccggagcaagagaggcagaatgaatcaaagtcgaagtgaaacttcaaagaagccaagaaaggaatacgaaccaaagtacaccaagtatgccagcctggtggatactcgggagaatgtgtagaaggcaacctataaattttggaattttatgccctaaataaaacacaattcaatataattattgtaacaccctatctataaggatgtcacatgtgtgattttataaactagtttaatact

SEQ ID NO: 304647 - DNA, 1475 bp, Cannabis indica
tcatgtgaaccatgcaacataaaagcaatttctgatcttatattgattagtaaatctgattatattgaaatgagttttatttagggcacaaaacctaacaagttttaactagatgataaatataactagtttccatgtatcagattcgaacgtgcaacactagtaacaactccaatgtctaatttttgtgacttactcgtgacaacaacacctccaatgatttttttgatgatttttgcaaaacaactttggcgaatattcttattctattttctactttttttcgagtaatattttattttagtgatagtaactgttttgaatagttaatgtccgagaagtttgtatcaaatttttaattttagtattgtgttaaatttgttcgatatcgcatttttcgttttcatttttcacatattattgtcaattaatttttttaatttattttttttatctatggttattttatttattatggttgattttaatggttacttttcactgattaatctcaattacattttttgtagttatttttttgttttggtcatggtcgagattgatttaggaagtagtttttgttgtttttgattatggttgaggtgggtttagtgttgtagttttgcatattgaatttgactattactctattttttgtcttttagtttctttattaattattttggtaaatttctaattagtaattaatatatcataaaaacaagttattaaaattttgcaaatatctcaaatctcattattgcacagtaaccagtttctcaatacatgaaatgtcattatggcaatgtaacctgtttcttaaatctccttacaaaccttgaccttgataataataattatttataaattttgttgtgtgtgcaactaaagttttacattggttaaaaataaaggatcataagtgtataaagatagacaatatcgtattttgaagtgtctaagaacgaaaccataagagtttaggcctaaaatagacacatcagtttttcatgtatttactctgttagaatagaaaatgattagacaacaaattgttggtattgatggtttgttttttcagctgtttacagctttagttagttagaggttgttaggagttagttattaaaatttcttctctttcttttcaacttctctatattttgatctccatttattcagttgagcattattttccatctttcatcttcatctctctctcaccttgctcaagctcaattactgtaaattcagtactcttacttgctctattactgttgataggcacatgaaaagttgtatcaggaccttccaaaaattaataatgattgtacaaataaaactgaaaaaggcagactaatttcaaaaattcttcagaggtcatataagtttttcaactgaaatttggttcatattgtaaagtccttttttggcaagttaggtgacaaaataatttttccttttatggtaagatt

SEQ ID NO: 304648 - DNA, 1888 bp, Cannabis indica
ttgcaattgtaacagcgttcaagtgtgatatgaataggattaagatcagaagtggtccccatatttgctgtcaatggtgggaactgctttgttaccatgtcaaatattttaccataatactaaagagaagaaatgaacaaagagtaaagtagaggaaaggtagaaaaagaagaggattcttcttagagtacaacaataatatttatacaatgtgtaaagttagagtagaattaatacaaccgaaggcataagaaaaaactaactccaattgctaggtgacaattgtcctaacactttatatactccataataatatgcatctctattctctcaatgatatttaggagataattaggattatgtctatctaataatatagatagttatacctagtgtacacatcagaatcacctcaggagccacgtggcaccacaagactggaggcagttttaaagaattcccaacaaatttcatactggcaacttatatgacctcccaactaggctcatgcacacataatagtgtagctataataattaatagttaaattaattagctaagaaataaaaaatgttcgtattaaatatagctattatatctaaaagatttagttgaaagcagtgcttacctacactgcactacatgtagttgaagaaaataatttattaagttataaatattatattaattttcttaatttatttttgtaatatatgtgtaatattattatatatatttatttagtttttaaaaataaatagtatattcataaaataaagaatttttatataatatacagaagttgatgatgtaatgtaaatatagaaaataaaattaaaaaaaattaatgagatattttaaatagtattattatttaatattttaaggtatattgatgtatcattttactattaattagtaatttataatatgatttattaaattcaaatatgtgagattaaatatttaaatgcatgaataatagtttgttatttcttgtaggagttgacaacttaaaagggtacacttatcatttctcaattttataagattgaataaaagaaactgatttgagcgctctcagaagatggtaatttcaatggggaagcaaaacattctagtgtgtatataaatgtgatttggtgggtagtggagagagagaggtccacaacttgaggcaacatttgtcagaacatgcataaccaatgccaacccgtgaccaagtttcttcacgggctatcgttacaatagaagacaatccatctattcaaccacagataccactaaccaactcgctaatggtattgaatattatatctttatgttatatatgatgcctagaaatggatagacccatcttcactatttataggttatttccacaaattaattaataatatacatgaaattaacacctattatacaactactactacctaatctaatttgtagcaaaaacacaccattatttatgggacctcattattcattattagcattgaaagggcttgcgtgttaatttacaaagcatgtgtagcatacgcaattatgatttttttattttttttcttttacaacacttatacttcttttaaaaaaaaaaatcaacaacacgtatattttgtagaagtgatcatccaatatttaatcaaattcagtacaatctatacgatcctatccaatacaattcgtagattacattggattcaaaattttaaatcccgcaggattaatattagtactgttagagatgaagtttccttaatgaaaaggcaaaaagtgtaatattctcgtgtatatcagttacaacaaaatgagataaggacccttagataatagtagaatttacgtggtatatggtttttttaaaccttttatgataaatatg

SEQ ID NO: 304649 - DNA, 679 bp, Cannabis indica
ttcttcttcatgttggagtaatcaaattttatgaattaattactagcgaaataaaaatatttttttttaaataataatggacaagaatatacaaagcacaaggcaattcaaaagattcaattcaaacgacagcgtttcgagctggccatgaagattatttgagaggacaatttagtccaaattaaagttttaacacttagctcaagaatctgactactgtctgttcacactctttgcgatacaacattgtctattctgaccagcttttcttgccttttctctttcaagaacttcttcgactctctctctctcttcgaatcacaataaaatctctctttctctcttgagccatccatctaaattcgaaacccagaaccagaaagtttcatcatattttgaaaatcattactaggaagaagaagaaaaaaatcgaatatttctgtaactagcttcaagttcacccgtttttggtcccatctcgtgttgtttgttttgtctacttagagttagtggtaaagcagggaggggaaaaataaagtaacacaacacaacaaaaacaacggaaggagaaaaccctaaaacccaccgccagtcttaaatagtaggaacaaggacctttttttggagtcaaagtttctggggttccattttcacactgtcaactctctctctctctctc

SEQ ID NO: 304650 - DNA, 1184 bp, Cannabis indica
aatcaataacatttagtaaatttagatcatgtaaaataaatttccaacatcacttcccttagcacattatcagaaagattcataataatggctggtcgagcttactttataacagtttttgcatcacctttcttagatgcatctgagtctttctcaaccttctctatcttttcttttagtgttgaatccagtttatgataaatcaacacaaccatcatcttctcctcacatagactaaagtctccagatcaatcgaatctttcgaaatcgaatctggttgatgatgattccatttcaactgctttcttgaattcttgataacattcaaatcaaatcttcgatctacacaaccaagctctgatattactgtagtaatcctactatagaagacttaacaatttaaaagttaatcaaacataaatcaaagaaaaacacaaactaaaatcaagcaaaatgaaaaaacaaagaagtaagaacaagagaacatagagatttatcctcgttcgatcctcaattcaatgcctactccagctctccctccaaaaaatttctccactataatcaagctgattacaatctccaatagttgtgtagacctcttaaaacaacacataaagaaatcctcaagaactctcacactcgaactcacaaagccatacaatgactattataatttctctctttctctctagtctccgtttcactctcccaaacactacacaatctctatctttgttcttcatctttataatgaccaatgagtatattagaactataaatagagttacaaaaagagctaaccaactgacagtcaaactgataaagctgactaaaactgttaagcttttctaactgctgttggttttcttaggattaaatagtgaaaaaagccgttaaaaaaattgtctatcaatcaaaaactcaaaaaaaaattacgtatagtatcgaaaatcctcttaaacaaatgaggcatgaaggtacgtagtctactaatactattaatagacaggaaacgtttacgttttcgcttcttgtggccccaccccaccttgtccgttgatccaactagcgccccgccatatccaacggctaataattacccacgaaaacttgcatcaccgtgaaatctcataaagaaacactctctcaagtatcaatgttaattccatttttggcatatttaa

SEQ ID NO: 304651 - DNA, 1308 bp, Cannabis indica
actttccatcctcagttacccgcaaaactttggtcgcttccgtcatgaatctgctgatgtatgctcggagtggctcgcctggtcgttgctttacttcgaccaaatctcccaaattcaataggagctgacacgatcttgatatgatcttctagccgagatttaaggagagttaattccttattctgtgcaatttgataaaaagggaaactgtactaggcttccaagaacacgttgtctggcttcctagaaatgcggtactgggaccactttcgggtacatgatgtccttggcaaaagctcgtctgagtgagaaacgaagatgctttccaggaaggtcttgctacacttgggtttggcccaagttatcttctttgggcctactggtggtatttggatgttgaaatggagtccacatgtcccttgccataaatgtagatagcatacctgccaagtttctacaatgttgtgtattgtggaagcttgtcccaatccatatgagtggacatgtgtaggttaaaactaatattcttattgctttacaagtgctagttgattgtggaaggtggacttctgtcttcggctttcggaagcaggtgtagcagtcattttgacggctatttattattggtgcaaaaattaagaaaaaaactttcatcattgatttttgcctccatttcaggggcattaaatgcttgacatgcgtggctgcttgacttccaagctgtaggatgtgtttttgcttttagagaaacgatctggattgttcattttttcttcattttgataaccattttgagtgtaaatactccttaaaactaccatttatcacttttttcctgctttaaattttcattcgcccaagttcaagctttcttgagagcaaagtttagtgagagattctagtagtgaatgaaccaaggatttgacgatctcctccaaatcactcttcatttttgaaatcatctcctaccaaaccatccaccccagtgatcgagtgttttcaaaggagtgaactagtgaatcttgattttaactctgaaatcgattcattgatttccttagacaatcgtcttcgtgaaaggtgtgctcgcttgcacaatccagattcggcgaagatcagttaggagccttcatcttcactaccaggtatgggtctgtttggtttctcgcctttgattgtgtttctgaatccactatagaagttagggtttgcatgttttcctttaagtgaaattatggtttattaggcctgtgaccaatactgctggtagttttaaatgtgatgaactttatgttggaaatattttac

SEQ ID NO: 304652 - DNA, 1564 bp, Cannabis indica
ttaagttttattatgataaaaaaatcagttcaggatcctaaattgaagggaaagtacctccctaaagtcccagctccagaggtatggtacatgaaaactaattccagacacagtaaccctagttcttaaaatcaaaccatatgcatgcaaagtagcaaatttcctcaagcacaaaactatatttcaatcaagttctgaaaaaacagtttaagtgggaggaaataattgtaagacgggtcaaaagtggagacgatggttgttccacttgaattccattgcctgtttggtgacgaggcctatactagatccaataacaagtcgatagtttgggaagatgatgaacatcaaagaaacacaatgatgaagtcgaaagggaaagggttaagcgttggttcagagaggtgagtaggggctaaagtttctgggcaaggagtttgctgagaagagttctcccgcaaagggttgctgctaaaatgggaaaggaaatagttttagtcgccaagacccccatttatatgggtggcaatagttcaaatgtttttgaaatgcacggtccagattgaattaattaggggctacgccatccaaaggttggggatatgaaaggtttgcatttaatgggtctgaagaaaaaagataaagtatttattactcatcatttcgtgagaacatccccaacgtactagaagcatggtgtcacttcaaggccagccgtcatttgcttcccccgagaaacacgcttaagctcagagcgtgagtttcacgactccactgaatgagtacaatgctttagcaaattaccagcaatattgaagaacacaacaaccttttagatgcccaatacaatacggaaagtttttcttccatattccaatgcttggtcaacgaatcagagacgtgagacaagcatctgagagaaagctgcaagattctaacactcctaagtttcagaagcttggggtaaataatatctgtgttcccagatgaagtgtacgtggaatttatggaaggatgccacgtctgattacgcgttgttattgtatgccctccgcttctcgcggttacgtaaggcgttgtagtacctggaggcactctctgctagcagaggcggaaagaactctaggattctcattaataatgctgctaagggaacagaagtcacacatgctccagtaactcaacattatctcttttctaagctcaacatcactaggaacacatactcgagctttaaacaataacatcccattgctagagattgagaagtccttaactttaccagctaacacctcttctcgaaccctgattagtttaggatcttccaattgagccattttgattctttctagtaagtctgattggagcgtcagattatgcagctttccaattataaagtcaatattctccttaaccatatccgaggctaactgaggagaaatcattacgacactgaagacttggtcaggaccctttcggctcaaggcatctgccataacattagccttcccgggatggtataaattttgcaatcatagtctttaactagttctaaccaccgcctttg

SEQ ID NO: 304653 - DNA, 1306 bp, Cannabis indica
acaaattcgtacatacattcttaaatttcatgatgacaagtttatagtcattgtttgatgacaattcaatgataactattctattaattaagttgaccttaaatatatatgcttaaatttattcatacaataaatttttaaggtagaattatgttataatatttttataaagtgtgcatattatattgttatctatttaattaaaaaatttcaaaagtataaaatatataatatttggtaccattaattgttcaagttttattttttgattaaaatgtttatatatacgttatattatataatttggaattcgattctaggactttcacaaacaccttctcatacttcttatgactacttgagctagcctcaagtgattcttgttctaagttattttaatgattatgccaataattaattatttttttgataagtgtaattttcataccttatttcctccctaagtttttttctcttctacaatggcttccttttgattaaagtgaatagaaaacgtgcgtatgtaacatctatttagtgtttcagcaaaaaaaaaatctatttagtgatcttagtaagccataaaaattggatgtaaaaaacaataaattttttagtgtttttataatgtactcctaaaaaaaagatgtacgcaaacatcctttactgttttagtattcaagaaaaagttttagttttttttttcttttttttataattgtgtatgttattgttatttaagacatcttaaatatttttgaaaaattcaaaataatttacgatatagaatataatgttcaaatagttttcacacggataaaataaaagagttacgaatgcaaccaaatatttaaatcttattttcagtgtattcaaaatattgtatgatattttaaataattataatatacaagttaatgaaaaagattaagttaaaaaattaaattaattacgatgcttctaactcttaatccatctcttgtttttccaagaatcacacttacaaatagactaggggtgcacaaaatataagacaaactataacccaactcatttgttatagtaaaatgttatgttaaaagtaggtaatgacaattaagctgaaaagtgattggtcatataattatgggttggttatgggttagacacactctaactctatgtaacccaacctaactcatttattaagtgatgttccaaatttgagacaagttactttcacaaaatatatataaatatacatttcacattttaataaataaaatatattattatgataatcttagaaagtgaattaaccaaaaca

SEQ ID NO: 304654 - DNA, 2155 bp, Cannabis indica
tagtattatataaaaatatgatatataatccaattcaatataatacaatacaatacaatacgacctaatacgacgttccaaacgagcccttaatctccttccaactcaaactcacataacaaacacccaatttttatttttgatgtctgaataattataatatcaaataggtataaagtaaaagagacacactataacaaattgttttaactctattatgttttaaacaattacgatcttaattgtcatatgaaaaattgagaataaaaatagtatgaggttaagaatcccttaatctccatccttcttcactaaagtccaccaactaaaaccttttataccaaaatttgtatataaaactatttttattgctttggagttcttttggagaaggctataatgagaacattcttccttttatgttttgctaagaatttctattcattttcattagatgaatcaataatttagacaaatatctgaaatatttgatcaaaacaaaaaccatatacaagttcctcacaaatatgcaaacaaaatctttgttaaaagatgaagctttttgatgtgaatgttgttgattaattgaagagtcatattacatttactcaattctaatcctaatgcatataacatgttcaagcttccatatgcaaaaccaatggaaatacttacagaataaccaagtatggagctgggctagcaaactaacaacaaatcaagtcgtgacacggctacaccgacaccagaatgcagttcctccactccttcctctagcaacagctatttcttcatcaatgtaaaaccacacaaagaaaggatctttgttactcggttctctgtcatccttttcgccaagactaatctccaatggtttcaaaggtccaatttttatccgaatgctctcaaagatgaaagcaagaattcttgttttccatgaaagtcttccttcaaaagtcaaggctccaattggcccaaggtatactccattctcaattctttttccctggtaattcagtcaaacaatcattagagagagtctctctttaaacttgctccaaattgaaactattaacaacataaagatcaagtctttcatcacaagcataatctaacaacaaaggtgacaagatcttaagtcttactgcagcatcaaacctctgaacagctgttagagggaaatatcgaccgcctttcaattgtttctgcaaatcaagtaaccgaaaagtcaataagattttttttttaaaccctacactatttgagaaccaagtaactataacaattgctatgtagatactcaagagggactcgaaactcagaccttgtgggagcaaaccacatatgcctgaccattcgagttaaacccctcttcggtacaaaaaagaaaaactcaaataaagattgaaccaacaaatgcatgttatgaacacaatgaacataaatgtatgaacctcagcagtaaaaatgagcatccatgttctaccaggagattccgaaccgccaagtgtagcaagaaaattagagggatcgattttcgccttttcaatgacagaaaaagcagataggatctcctcttttggtacttttcttgtttttgcagcttccttaagcacttttacactctcctcaacttccttaattcacaacaagaacaacaaaaactgaatgaaaaaacacaaataccacaatatgaacaaacacatcaatgtgacaatgaactataattctgcttatccttgaaaattttcaacctgttaacttcattaaaagtaagagtcatcataatatcaagtggataaaccaaaaacacaaatcactctactcttctcaattccattaattcatgcgtagatagcggcataattacttaaagttttaagattgcaagcggcataaacccaatatttatttttagcgacataagtactcaatgtttgtaaaactgtaattttgtaagtacaaactccgttttaaatttatgaaaggaacacttagaagtaactggtactatatatttctatctagacccaataatttagaatctatgtggcctatttaagaaaataatagagtttgtactgacgaaattaaaaaaaaaattacagttttacaaatatttggtacttatgttatgccgctaaaaataaacgtt

SEQ ID NO: 304655 - DNA, 2032 bp, Cannabis indica
aagtgattcatcatcacttgttcgaacctcgtaattctgattgtgtttgattctttctccctacattcttgtctataattgctcattaaatctttgttcattttctggtttttcaattactggtttattcattgttgattctctggttttaattctattcgaattgcattgaaaactgttagcattgttctggatcaatctcttgtttttttttttgtgtatgaggtgcatgatcaagcattgatcacattatgaattttgatacttaaatacaccaacaataatataatatatttatgtaatattaagcatcattagtactttttagcaacgttgatataaaattacctgaagaagatctccaatgttgaccattagagttccaagttgagaggaaacatcaatccaactattttcatttagaacttgaataccacctatgtcatcttgaagcaacatagtgaggaagtccatatcagcatgcttggttactctcatagttagttctggttgagggcacggtggatagtaatgacataataacactaatctctctgtaccaagaaatatcacttttgccagtattgcgctggtaaaatagaatttacttgtgatgcgttggcaaaaggggattggcaaatcaatgttggtattagaacttttgccagcataaaatgaaaagcgttggcaaagatgattttttccagcacgtaaatgcgctggtaaaagttaaattttagccactgcacatgtacgctggtaaaactttaacctctttgccagtacagtttgtgaaatgcgctggtaaaagttgctactgcgctggtaaaagttacatttcttgtagtgaatccatatcgtacaagtgatttgaattcaacccaagagcctcaaagatcaactcgaattgagaaattcctacttttattagttgatttgagtactgcagaagtatgtctcttcattggagagaaatcaaaataaccaccatattagtttcttgaaaactactagtatgtgcacaaatctatgtaccaagttacttttaacaagtatgatccatcttaaataacgacaatttgttaatttttttttacaacatataagtgtgtgccaaatatttttgtataatttatatgtgcacacataatttatctttgtagcaccatacgattaatagaaataaataataatacagaaagtataaatttacactaagagaattatatttgatataatttatgggaccacattcagagaatgaaatcaattaataaaatataaaaaattacaaatgccattgacttatacaaagttggattcctctaaatatttctcacaaccttttgtaatccactttactaatctgatctgtgaaacacatcaggttggtgaaatcctttcaacccgtgtgctcacttcttcctgaaatgaattttaaaaaaaatcttctcctaaaaatatatactcacttccttctaaaataagacttaattaggaaactcttcttcctaaaatccacgcttgttcaaaatttctattcaaactattctataaacaataagaaaataataacaaagataaaccatgtaagaagacttaattggtaaaaaaaataataatcttttgagtagagctacactccatctttaatttctttcataacaatttttgaaatgttatggttaaaaattttaaaaaactctccattttcacaagcatttcacaatctagggatcttttatggcttgaggtcaactttttagataggtatgtaattaagatttgtatttatttaattaaggttgatcaaattttcagaaacttggtaattaagacaagattattataataaaatgaatatatatattttacttaagattattaagctcatatggcttagcacatggcaaagttgttctctttaagatcattaagctgttatagcacagcacatgatagacttattattattattattattattattattattattattactattttggatcctgtgttttgcaaaagt

SEQ ID NO: 304656 - DNA, 2601 bp, Cannabis indica
ttatatataagcagttttctttcacttgtataactatttgatttagttcatctgttcgaataatgatgttccaagctgtgctctgtgttcagattgttatatggtcttgttgcaggaattatcaaagaatttcccacaattatgtttccttttcttctacttagcaatattgtgattgttcaatccatttttgcatattctgtatttaggtattgccaggcacattgctgcagctggatatgctgtatatgctatggaccatccaggctttggtctctctgaagggttacacggctacattcatagcttcgacgaattagccgataatgtcaccgatatctacagaaagattaaacgtgagactttcataatttcaatcatgtattgccgcctatcaatattcaaaaaaacaaagctcttgttgattatctttcattgttgaaatttggcagaaagacctgaattgaaaggtttaccccattttatattgggacaatccatggggggctgttactcttaaagttcatctcaaggtaccaaatgaatgggatggagtaatcttgtggcccctatgtgtaaagtaagctatcataattaactgtccctcataatatttgttctttttaatgatttcttcaactaaaaagttctgatcttgggttgttgtaagattgcagaagacatgaaacctccactacctattttgaagattctaacacttatgtcaagagttatgccaaaagcaaagcttattccagcaaaggatttagctgagcttgcctttcgggatgagaggaaagggaaatggtttgtctttcgtttcgtgttcatttcatattctttgcttaattgtagttattgacagtgtagacttaaggttgtgttcggtttgagtttattaaatggaaaagaatcaattttgattccattcctgtagttttattccttccaaccgaacgtagcctgagttcacctaaaagactcgctagaactacctgaattgctgttttgagcttttttttttttcgagtcttctaactcaaattgtttaaacctcctatttaggccgtctacaatgtgatatgttacagcgaccgaacaagactaagaacagcagtggaattacttgacgctactagtgaaatcgaaagacgtcttgaagaggtgagctttttcatttcattttgttagccttaattaatttatgagaatcaaacaatagaatcaaaaattagcagaaacgtacaagagtccatagcatcaaccttagaatggtatgatctttcaactttgcagtgaaatttttttctagaaccttagtctcttgatgatgaggattcaagaataaaaagatacaacattgcaaactggggaccattacctatgatcaactcccaaaacagttcgtaatatttattgactatttttatttggtccatcatcaaattagaaattgttcttatagtatccacatattaaaattatgacaatcatgcccttaagtcataaattttattctaaaatagaccacataactttgactttttatatgatgacctaacacacattttatatatacaattatagccctaaataaataaattcccaacaaatacttcataacattttcgcatctaagtattacaattttttgcgttgttgcaggtgtcatctccattgctaattcttcatggagctaaagatagagttacagatcctcaagtgagccaatttttgtatgagaaagcctctagcaaagacaaaactcttaaactatatgaagaaggctatcattgcatacttgaaggagaacctgatgagagaattcttactgtccttaaagatattaccacttggctggattttaggagttcctctaaacaaaactaaattattaaacttctttggctattcattcatgtttagctattctttctctttctcttttctctttaagttgttattcaagtttgaaaaaaaccaagttgtaatatggattccaagaagttgtaatggtgtagcccacaacatggtgaggtgggctaattttggtgaccaatcaacatggtgttatagctctggatagcattgataggaatctgaagtttttttttaagttttagtttttgtttctgtactggtgaacgttgcttattaataggcggaggggtcttttcattcaataaaactcaattgtatatgtttaggaagtctacattaaggctaacctaatttatggatcttgtgattgggtgatatagttcggaaattagtagacaataaaattttaatatatgtattgtttttgttaggattgttggacacttatttatttttatattggtatgatattgttcgctttgggttaagttttcacggatttgattttgggtactttctcaaaaagtctcataccaatagagatattgtacatccttatatacatctttctcatttctagccaatgtaggactaggggtgttcactaagtatccgatccgatccaatccgcacgatccaatccaatccaatccgcaaaatgcggatatccgcacttgcgcggattggattggattgaaaaatctaaaatccgcacttgtg

SEQ ID NO: 304657 - DNA, 1308 bp, Cannabis indica
aaatcgtgtccctatgtatatatgaattgtactgacccttttcttgtaggtagaagaactttgcagttttcagatcaatacaatctactagtttatgtactatatgattggactcttctaaagactatttcaatctatgtttttgttcataattttgttttagcttctaagttattcttctttgggcacttgaagtgttatgaaaagagattagactgaccattggcttcattatcacttttattccaatgacaactgatgattagtttgagtaataatattctatattataccccacgttcttaacttttttctcaattacttattattgtagcttaagatttatccacaaaaccttatcaacttatcattatctttatataaatacatattaaatactagttcctatgtgcataaacaaatattgtacattacttttagttttatatacttgtagtctttggcttgatctcatctattatcatcacaccctgttttcttctcttttgctgctgtttttatttttctttattatataattgagaattgatgactacttgaatagtagaattagtccagaaagtgactcaatcttatcttattacatcaaatcaaatacaatttccaattttgtaattatgtttcgtgatattagcacctaacctactactactactaccactactctactactacttttttttaaaaaaaataaagcgtttgatatatatgaaaattagaccactcggtaattacataggatagtatcaggtattgaggaaggttttacaaaacttgagatgttctgggtaaatattagtcacattatgggcggcaaaattataacgacgagaaacaaactactctactactatacttactttttgttggtaatgttatttgtttgagtaatgaaattacaaacaaataatatgatacattggtaagttacttttgatgatccatctttttgtctatgcctccaaaccaaatttaaataatattcttaattttagtaataataataataataattgagaaattaacagtatgtttggtctggaataaggaaaaacaaaattgaataaaaaagaaaaatatttaattatgtttattaatttggttgtagttttataagattacttaatatgaattgtttgtaattttataacatgttctcctgatatgaattatttgtaattttatagcatgtttacctaaaaataacatgaattatttatttagtaattcttactcatttaggtgtcgtttggtaacacttatgttttctaattttttaatcacaaa

SEQ ID NO: 304658 - DNA, 1793 bp, Cannabis indica
tggtaagaaaatcagtaatatttaggctaggaataacaaatgggtcgggtcgggtctgacccgacaggccactaatccagaccgacccgacaagacattgctgatagagatatttataacttttagctatatataattctttcaatattatttggagttcacatgttttcaaaagctgatagagatatgtataacttttattcacaatgttttcatctcattaaacaagttttttcttttttattttaattcgtattatgaaatttaacatttaaacttaaaacaactaaaaaataagtataattttacacaaaatgaatttaattaactaaaacacacttctaaaatactttataatatgcacttaaaactagtttatcattaatgctataagtacacaatatttataaaattataattttcatctaatttcattaatgaagttttcgttttgaatttattaaaagaatatttagcctttcttttataaaattaaaaaataagttaatcaagccatttataaaagaaaaattaaagatactttagtgcacgtttggaaagttaggagaaaaatgaaattgaatgtaattatatttttgcatgtttgtctaaccacataattataatatagctgtataattggaagtatttaagagatttcaattatactctccaacttttatgtttcatgagaattaagtgtaataatattgtataattattaaaaaatttctattttaaatattatgtattaaaaattattttaattttatgtaattgctaattatatatccaaataagaaattaaaaatttataagtaattatcatattatatctaaatccgtattttaatatatagtgtaatggctattttagttattacatagttaaaagcaccatgcaattggaatgagagatggtataagtgatattgttagaaaagtgggtccatataactcaaaaattttgacttttcaatgggtaataaaagtatagttgcttctgttgagcactgatgcttacatattttttatttgttattattttttttatatgattggttagtatattaattatatattaaaataatgaaaataggctccacgtagacagctttggggatgccctaatagatattatgccctaatatatgtatgatcacttcacataccttatgatttctttagacttttgttgttattatgcccctttacctataaaagatttggcttgcatgtgttgtagcatgaacgacttttcattaatattaattacttctaagaaaggtccattaaaatgcaataataataattaaaaaaatcacaaaattgtgtaaattttcttatattagtatattccactatcttccacaagtgtataatattcagtcaattttattttaaatcgtagtgccattcagtgtttctaaaccaaaattaagattagtagttttttttttttttgtgggcagaaaattaaaaaaataaaaaaatatttgcgtaccaaatcccctttgggcaactaattaatattcagtctaaaaattggtttgaacaaattattgtgtccatattaactttttctttttttttaaaaaaaaaaaaataataaagaaatgaaaatcgcccatattaactttcaaatcaataatactaaacaaaattacttttttataataaaaaaatagggattttttatttttacactccaaaatagttttttttttttttttgcattttcacaaaattctacataaaaactcatattgtaactaacgctgcaacctaaattg

SEQ ID NO: 304659 - DNA, 2221 bp, Cannabis indica
cccatcggaccagacgaaaaaaattgctgaacccaggaataatgcagtattcatagacatcaagcatttcaacacacaaaacagcaaaataacaacaacaactcatagatcaagcatcaaaatgagtgaaaaagaaaaaaaaaaaaaaaaaaaactgttctttgtgatggtggagtggtgctcgggtgagaaggaatggtagacagaaagggaaaggaaggtgatgtaaatggggagaatattttggggataataaaaaagtgggcatatgctacaaatattgggtattataagtttagggcaaaaaatttatgctaatgtacgcataattagtcaaattcactctttcaattgtaatactaatccatttttgtaaatgattatatttcgttcatttttgtaatactaataactaatccctaaacccttgcaaattcactctttcaattgcatttcgttcctttttgtaaatgatttggtgatgtaatactaatccatgactaaaaaagtgtaatagtcctctataacgttatgactgaattattatgctatgaaatcctactagttgccaactgcattctcattctcactcacttcacttcacttcacttgcctttcttctcttctaatcccactcaatgaaactcactcctctctttccatttctagacaaagagagcgaattgtggaggaaagaagttgagaagatgcttctcaaaaaatacccaacaccagatgctcgctaatttgggtcctctctcgtcaatgggacggtggctgacactcacaaactcataaactggtttgcttactaggaactttcccaattgtcacttttaacattcttaaaagaaaaacatttcttttttattgttttgctctctgttttcataattattaaccatgattttgatctgtagacttggtaatactaaagatatggcatttatgattttgacttcagattactttaaatcgtgaaatgaattgagctaaatgattggtagatagattagatgaataggaacaaagtaagtaatggcactactactggttgtatgatttgatgatatatatatgcgttatacaagtttgagtgtaagatgtcaatgagaattcaagaatgatgaaattagaaaatgattccatctttggttaccaaaacctctgtttccggggggtgttttcttagggtgtataatgaacaaagagttccattacttcataaagagtgtaaaggagttaagaggttttattggctctgtgagtggaaattcatgcgtttttatagttcttgttagcaatcctcattagatttgttaaagaaagaaaacacttgagcaatctctacttttaagaatttttttcaaggcaaatgtttattgattttacatgaaagcaaacttggaagtgaaaaaaatagattaataggttaactaaaatatacaactataagatttaaaaccactttaactatgattatgttacatactttcataatagttttttctacttagaaatatattagttagtgatttaagcaagattataacctgaagagtagttgctttcttctataattaatttttcttgagcatattgcatcttctctatctaagagagaccatgtggttacatagtctacctttgactataatttttcctgcacagaaaacacagatcaacaagccaatgtgagatttatgaatgtaatgttcaaaaagacaaggcaaagagattagaaaaaaggaataaggaaacatgaacaagagctcaaggaagagagagaaaaaacaagagattcttaactcttcaatgtccaatgtggagctacaatcagattccaatccaaatattcttttgatctgctgaagcttcatactccaggttaggggtgttcataaattatccgatccaatccaatccgcacgatccaatccaatctaatccgcaaaatgcggatatccgcacttgtgcggatttgattgaaaaatctaaaatccgcacttgtgcggattggatgttgtttgacctcaaaaaataaccgatccaatccaatccgcacttaattatatatatttttaaaaaatataatatataatatatattaattaaaaaaaaacacaaacttctaatttcttaatcttttttagtaatatattgagttggtgcattttatttatttcataataaaaacacaagaaaaataattcttattcac

SEQ ID NO: 304660 - DNA, 1158 bp, Cannabis indica
aacttacctgaactaaggcttcgaggagttccccatcaatattaagagcttcgttgcaactgcttaaagcatcctttccccttccaagcttgaccaataccttacacaaacccagatgaagatgtacattatgagcaagatggttagggtccaaggcaagagctgctttgaaatcctcaactgcaaccctcaactttcccttatttgcattatcttctgcctgcacaatatcaataacccgaatttataaaaaaataaaaagtgataaattatccgtgcagaaatatgctgtaaaggtcccctatataccaaaggaaaagagaaaagcaaaattctttctaactatactttcttcggttcactgtagaattgagacttacagcttttgtcttcttgagtaaattttttagtccaaaatatgctttcttcaattcattgtgttctggatcaaggcggagtcccttttggtaatgcctgaaaaagaaacacatattcatccatattactttgattcccacatgtataagtgcactcaaaattaaaaaagatttatgtactagcagtccagcacttcatttaagctgttcttatacataccttatagcaacatcatggtctgctaaatagtagtaggcacgaccgcggagtaataatgaatccagatcatcctcatgttctttaagaatgaatccactctcagagatggcactagaatagtctttatttgatatcaacaatttcaccttgagtagtttggcctgcattaatcaatgttcatagagttactcaatttgaccatctgatgctattagctaagtggccattcatcgtaaaattacaaaggaaagtgcggccaataaagagagaaaataattttaccttcaagcatgctggagagaaaacgagtacaactttgtcaacatattccaaagatttcgaataatcaccggactcaaagagagataaagctgtagcaagtgcactctgagcctggtgcaattgagaaagctccttttctgccgcagaatgtcgaggctttagctccagaacacttttataacttttctctgattcctcatatctacattagccaaaaaccgcctgaatcatataattttccaatcagaaattggagagagagaggagagagagagagag

SEQ ID NO: 304661 - DNA, 1616 bp, Cannabis indica
aatacccctagagtttaataaaatctccaaaattgagaaattataactctaatatttattctaaatattggggtccacaattaaattaattcataaataataataaaataataaaaattagtgctaattgcctttactaattcaaattactagagcggtcattacagaaatgatatgaaatgaaaataattttggagttttttttatttagattgggtatccccaacagtttaaaatcgtcgggtatactatagctaacgattttaaactgtcagctatagtatactcgacggttttaaaccattagggatacccaattaaaaaatcttgtcaatttttaagtgactataataacatgtcaggaatgtctcaccactgtttaaaactgtcgaaaatacctaagtttttctgttggttttatatagtcacataactttattagtgatagtcataaaaaaaactgatttgaagaccgacagaaataaaatcttttgtagtaatgatatcatcatatataattttatgatataaaaattaagatttatctgtgctgctggtcttcattactcatcagtcgtcacacaaaattaaatgttatattaaaggagttttggaagaaaaattacaagtaatactaattagtaaatgtgaaaggagatgagcaatttagtttggtcatcctcaaaaaagaaatgaacggttgctttcttcactcaaccaaatcaaaatgaatactctttctcccattacctaatagtaataagtaaataaatataccatatagtcaacgtgtataatcaacaatggcaagtatgttaccaatgtgtttggaaaactaatttgtcattagatttaggtataattcaaggtaattattaatttaatattttgtttgatcatatgttaactatgtaatccaatgtaattaagaaatccaaattacactctttatttttgtgacctataagaattaagtttaattacaacgtaatcattaaaaaaaaatattttaaatattaattaataaataatattattttttgtataattaattaataactattttgctaaataaacaaactaaaattcatatgtaatatatgtaattattactgcacattcaaatatacttttgtatttaaaatagtataattattactttagtaattacacaacataattaattacaaaataactttcaaacatgctcataaaaatgcatctaatttttttttttttcatttactaccgtatttcgtatataaattaacaatgataaataatgtcaaatttttttaagattgcaaaggagctaatatggtttcaactttcaagtaatcatacatatttggatctatgttaatgttcttcccataatttgttaattttataacaattttcgtacctattttatactatcctcttttgtatttgaaaattattatgtaagtactaaatcgtgtaattattaaggtaataattaataattatatatgctaatttttatattatattttaaaggttaattaggattttcgccgcctgaactttgatatgtaccaaatcatattccctgaacttttaaggtcattaaaaattgtaaagtcctttttggc

SEQ ID NO: 304662 - DNA, 3777 bp, Cannabis indica
tttattaaataaaaataaaaagtcacccatgaatgaatttcagttatataggcacactttatatagaatagatatataatttctttaaatttagtgtaatatatttataattaaaaaagtaatatattaaataataatatgtgagatcataataattataatatttttgaagatagctatattattggagtgtttttagaagtaagagtgcaaaaaatgatgtggaagagagataaaataaaatattatatttttggataatgtggatatttttagggatgctattattggagatgctctaatacccctaaaaattactcctaaaaaagtgtgttaaaaatcaatttttacttttagaggcgacaatgacattgtcgttcttaatacttctaaaagtcactcctaaaaaaacgtgttacaaaccaattttttaccttttagggccatacattaacacatatatatacatacactttatatataaacacataaataaacatatattcttatacaaactcacacacataaatataaatacacatacatttaaatattcacacatatatacccctgtaaaaaaatacacgtatacatatatacctactcatacacataaataaatatagggacacgattttgtcccgtgatatactttcacggaatatattccgtgatacattagatggtctcagggtacgttactatttttttaaccctaattacccctagataaaccccagccctcagatcaaataactccttcatctgacggctgccctacatcacggaatacattctgtgaaaatacatcacagaataaaattatgtccctataaatatataaacttataaaaaataacatatacaaagataaaaaatatcactgtaaatacatatatcaaattctaatataattaaaaatttattatctattttccttttaaataatttttttataaattaattttatcttttaagtgatgtataaatataaattaatcaaattatttataaaataaaaaccaataagattaataataaatttgtttgaaaatgtaataaaaaattatttattaattatattaatctcaacacaataatacaattagtcaattgtaataatacaattatcataaaaaaaaagtgaaagagaatgaaagagatagtacttaactgaaattgagtggaggccaacgttgggtgaatactgaagttgggtggtgtgaacgtcggttagggagatgattttttttctcctttgtattttcaaaaagaatgaaatggagaaaaaaataagaagatgaaattgaaaaaaaatctaaaaataataacaaaccttgttctcggagtcgttaatgactactctctcttcttcctctttttcttatttgtggtctcgaggtcgggatcgttaatggatgctccctcctcttcctcttctatttgttcgtggtcatggggtcaggatcgttaatggagatttttcagatgaaaaaataagaaagggaagagaatgggtcgagggaagaaaataatttaagctttaaaatgcaaaaactattaggggcgaccacttggggcaacaaagtcgtccctaatactttgactgtgtcaaaagtcgctcttaatagtataagcgaatttttttttacctttgggcaattaataattatcaatttatttaggagcaacaaagtcgctcctaatagtaatttatttgcatttaatacttttaggagtccacatttgttacttctaatgttgtaccgattaaaaaaattaaattttacttagaggatactctttgtcacccctaacacctatatattaaggacgattttttgttgctcttaaatttatcgtcccaaatatctcaaattgtttataccaccaattaatttgtccttgcctcaactattttaattctttggatatttcagttcgagctgtaatattaagggttttcaattcaaatcacaataataacttagtggcataccacaattcaatctcacactcacacttttattttatttttatttttttgtcactttcatttttcctcccaatcccatctttttcaccaactttttaactccacaccaaacactcacaattctatctttctattacctacaacctacattattttttctcctaacccttttctctcgatcaaacatatcttgtgatcatttcaccattcaatggtcaaattcaaatgttagaatgtatggtgacaagacataaataatttaattagttgacattgaactacatattaacttattccatattagggtcaaaaaattatattagactggattttctcactttagctagacaaaattaataatggattgaggtcacagagatagttagaaagttaaatgttacaaatattgacaagtactttttaagttttagctttagagcatctttggtttaatggaactagcattacaatgtcattatatcatatatatatatatatattgtaattcacattgtattataaaattaatgcaatgataattagtttgttagaaattgatcttttagttttttttttatttatttttatttaaatgtggtttggtaacatttttgttttttaattttttaatcacaaaataaaagtaatttttttaaaaaaaaaattgtttttgaaaaataaaaatgcattcggtaaccacttttattttttcaattttaaaaacagaaagtaaaagtgtattctgtaaagttaatttttatttttattttttacttttatttaagtctggtttaggtctgaggtcggattcgagttcgggttagaggtcgggttcagcaccaggggtagggggatttgggtcagagtttggtcagaatctaaaatattgattaagaaaaaaaaaaactatttaaaaaaatatagaaagtgattttttcttgtttttaaaattttgattttcaattaaaaaaattgaaaagtaaaaacagttttatataccatgtttttgaaaaatattttcacttttctaattttaaaaacagaaaactgattaaaaaagtattacttaacggcaccttagattttaaatattaaaaataataaaactaatgctatttttatcaatatactattatttactttattttattacaatattattatttattatatgattaaaccaaatattataataccattttcattacaatttttatttaattacattattatatatttatattatcaatagtatgactattacattatattaaagcaaacattaggtgaataagggagtttaagtgatggacttttctctttttagtgtttacttaagcaagtgacacatgtgcccaaagatcatgacttaacgttccccaacctaacaaccaaaaatgtcataatcatcattattatcaaattaatgcaaacaataatcttatattcgtacaaactaaagaaaagaaaatattagttacatattgtgtaactactctaaagtgacatcaggttatttgtttaataggtttattttatgaaaatataatgggtaaataccattttggaccctctgttttacaaaagttacctattggaccctgtgttttgttaaatgataaaatggaccctgtattttctaaaatagtacaaataggaccctgaattgattttttgtcaaaataaagtttaattataatccgatctaaaagtgctatgacaaaactagtttacattttttgttatctgttcgtattaagtcattgtcttcaagttgttgt

SEQ ID NO: 304663 - DNA, 2492 bp, Cannabis indica
atcttattttattcttccattgtaatttctttattatttctaacatagcatgcctactagagtccttgaaaacattagcccttatcaatgcctctttaacaaatgcctaactatcaatttctcaagccttttggttgcatctactaccctcatatgaggtcatactattctcacaaaatcagtttcagatcaaaaccatgtagatttttgggttactcaccaaaccacaaaggctatgtctgtgaaagcactactggcagaaaatacattgcaagaaatgtagtatttaacgagcatcaattctcatttcttacaccaaatgctacagattaggtacttcccaatccttccaactccttacctttagcttagttttcacctaacattgtccaacaatattctaacatagatgcttttgttgtgtctagtgcttctgtccatgaaactactgagcaaattgacttttataacaccaaagttcttgaggtgtctggtgatgcaacacaatcaccatagtctcctagctcctccctgtctcatgtcagccatactactacagttattgaggctattgccactactgatacttcccaacaggattccccttgttgtgacacattttctcagcctctaattcatacacatcccatgcaactagatcttaaaggggcatccacaaacctaaggtctttatggccaccaaatatcaattatcgtcttccttgctcccaactgaactaatttccacaaaggcagcccttagtgaccctaaatggtatgcctctatgaatgatgaatatatttccttgaagaaacaaaatacatggacattggtcccttacgccccaggaatgcaggtgctaaccaacaaaaggatgcacaagatcaaactgaaagaagatggtacaactgatagatttaaatccaaacttattgcaaaaggttttctacaaacacttgacattgattttgaggacacctttagccatgtggtcaatcctgccacagttagaactgtgctcactcttgccgtctcttatgattgggaagttacttaacttgatgtgagcaatacttttctgcatggaactctaaatgaacttgtgtacatgcaaaaaccagctggatttgttgatccaactaagcttacccatgtttgcaaactgaacaaagctctctatgggcttaagcaatccctagagcttggaatgacaagttgaaacaaatacttctgcattgggattcacacaatccaaattagacacctcattatttatttttagttcaggaccaacactcatcttgttattggtgtatgttgatgactttctcctcacaagtccaaataaagctctcatacaacaactgattaaggatctcaatgcccacttctcactaaaagatcttgtccctatccattacttccttggtgtggagattgttcaaaattctattggtattacttgtctcaaacaaaatacattacaaacttattggttaagctccatttggaaggtgtcaaacccagctcaagtccaagaagctcagctcacaaactctctctcacataaggtgaccattttcctaatatgcatctcttttgtagcaccattggagccttgcaatacctcactctcaccaggctagatgtagcttttacaatcaacagacatagtcaattcatacatgctcctactacaactcattgggaggcacctgagcggttaatgagatatttcaaaggcacaattattgaaggcagtctcctcaaaccaacaccttttctctccctatatggttactctgatgttgattgggccagctaccctgatgatacattattaactgggggttatgccatgttccttggagataatctgatatcttggtctgccaaaaagcagccaattgttgcacaacccagtaccaaaagtgaacttcgagccttaattagcgaatgatgcctctaaataaagtggtttgtctcccttctctctgaacttcaagtacaactgcacagaccaccaatcttatgggttgataatcagggagctgctgctcttgtaactaaccttgtttttcatgctcggtgtaagcatatcaaaattaatatgcactgtgtcagggatcagatcattgcaaatcaacttcatgttcattatgtgccatctgttgatcaagttgttgatttactcactaaggccctctctactgactgattacaataccttaaatccaaactcaaagtcaatcctactccctttcgtttgaggtgggaatattagctaatattaactaataaatcgttagttaagtcaattagagttggctatactatttaattagttagattattaacgttcttgttgattaccgactgtaactaattcttttatattttttagggttcgtttggtacattgtattacaccgtattgtattgtatagtattatattaaattgtattttatgtaaaactatatgtggtatta

SEQ ID NO: 304664 - DNA, 1983 bp, Cannabis indica
attagaatttgttgtgactaaatctagttttagtgataatacttgttgtgactaagactaaattagtgacaatttgtatcaaaatactatgttttaatcacaagtagcattttgttgtgactaaaagttatatttaatcacaaaaaattaattacgttgtgactaaacatttgtcaccaaaaatagcaatattcagtcaaaaaaaaatttacattatatatgactaaatggttgtcacaaaaataacagatttttgcagtggaaaaagggcatagtgacggtccactcatctattcatctttttgatcaatggtcccttcattcatcacgagacacttattatttttctaatgtaattttttagattttaatttgactaaatgtatttgcatcatcaaaaacaattattgaaagtagtggatttctgaccgggaaaccagaaagaaatatatcttggcctctgttggtgggtgtcgccgttgtttaatattttttaattatgtattgagtatgacataacacacttcctaggtttcaattcatagacatgcacctaaaatgcacgtgcgtgcacacacatctgaggactatgtccatgtatttttttactaatgcacctctgtttatttatatggggtttactgattcattttttcatgaagcaaggtcattatcatcaatggacaaaatttaggtacccgtaataaagaataaatttttaggccatatcaaaaagtataatttgactagtgaactaactctctagtgacactttcaccaatttactcttgctatctctttggtcccaagtaaaggatgtttaaccaaaagagtgaaaactcacaagtctcacaagagatagtgtttatgaatgagcacatgagagtctcacattaccagctcagatcagatacttgtctttcgtatatgtgttcgttatgcacgtgcactagacacgtgtctgactgcagagtgtgagaagtgtaaccgcaagtaaggattgaagttgccaatatggactgttatggattattatcagaaagggctttgcaagttgatgcagtgtgatgttagaagaagccgatcgaggaggatggccatgctggctggccaatagacaagtggtacatttttgaatgttccacgcttgcacccataaaatttgtgaaactctattattaaggtgccatctgtaccttccattaagctcagtcattgcttctagtactaacatctatacctctcttcattgccattttaacagggtatattatatgtacagtgacgggtaatttttgatctatagagggttttattttaaataaaaattattataatttttaagaatttttttactattttgttatataattatttaattaaaaagatatatttatatatttattgtttttttactggaggctacaacccccacaccatatattaatatccaacattatttgtccttgattataccatttctaaaattgatagtttttgtcatgacgtaaaagtcgaaaaaaatccataaattcaatcagttactcatgaaaagtatgtggatactagtagaccattctaaaattaaaattttaagtaacagtacttttttttttctttttcattgtttagtacgtggtatagatatcatattatattaatattatgtaagaaagaaaattttgtattgtatttattattatcactctaaatttaatataataggaatagtattatttaatacacaataaataatttgtattagtgtgggttccaaatttaatttcatctgattaagataatggaccagtgctagacttaaaatttaaagtgagagagcgtaatttttttttaaagcaataatagaaataaatttataaagaaaaaaaggtactgtcagtgggatttaatcctttaacctctaacgtacgtataatctagttccaaacttattattaatttattatgtctataaatatcatc

SEQ ID NO: 304665 - DNA, 744 bp, Cannabis indica
ttacatattaataactttcacgtggtttaaattaaggtactattaggttcattatccaataataataataaaagactaaagtctaaaggttatgaagataatgcttaaataataatgtataaaattggaatctagtcaacagtctcaacatatcaatctcatctcatgcataatattctatcgttatttctataattgtatattaaatttcattttaataaaaatataaaaaattaataatcactcataatgcattaagcataataaaatacttaatgacaaaatagaaaatttgcggtaaaagttttcaaaaaattcaatttgatacagataagttttcaatctcgaaaaatagctcaaggtcatattttttatttgtccgttagtcctaattttaactgagttgtttactttttaaaattgtcacgtgttaaacatattattggtctaaattattattttaattttaaaaaaaaaaataaataaattattttaaaataatttttttttcttaatagttattttgaaatcttcaattaatcttaatagttaattaaattattttgaaatctttatatcaaacaatcctaaatataatataatcaccctaaattactcatacacatggaatagtttgagatgtttttggtaaacatcaaatatccatttttagggggtggatcatacaatttcccaatattatataggctagttagtaatttttcccccaaactttgacatgta

SEQ ID NO: 304666 - DNA, 2498 bp, Cannabis indica
aggcaatgcaacaaaccttgcgccaactcaaagctaaaaactttgaactgaggcacagataaggtattttttttataatattgtttttcctatatatataaaaaaggaaataagagagaaaaaaaagtgacacataaatgattttttattttattttttgtagtttgatgaaattaatatgttgtttgttttaaacagacagagattgggttatgatttgaatgatctgagttttcatgagctaagtgatcttgagaatagtatgctttcttctgtggaagccatacgccacagaaaggtataatttataaatcattatattttcactaatttttttttaaattatttatttctatgtatatatttaaatcattactattataaatacttaaatttaactcttagttacaaataaatagttaagtttaagtttttagggatcataatacttaagttgtaaggttaagttgtaaggtgtcaaaatttaatgacttggtttgtgattttacatattttgtgtaaattttcaaataaatatatatactgttatctcatctgatcgagtatagtaatagatttcattattatcgatcatatataagataaaacttatagtacagagcgcgcacttgctatttgacacctaaaggtgttcaaaatcatactaatataattttttataattaattagccattcttcgtattatttattgtatatctgagactcaatattaaaatagagtaatagtatatcaactttgacacctttcataaaaaaaaactttgacaccgtgcagctctcttagcatctcttatataataaatcatttgataattaattgaaattaaattagaacgtgcatcgtactaattctcttgttcattatgtttttcagaatcacaagatcaaaactcaggctgaaaccaccaagaaaagggttagaacacacacacacactgcatattaatatcaaccagaatatagtcttttcatttctatttctaattaattttaattagtattaatttatatatgtaatatatatatatatatatgcaccctttaaattgtatatatcaccatacatgtttttttttctaacagaacaagagctgggaggaaagaaactcagtcctcatgcatgaaattgtaagctataatttataaccttataattaggtacatcttattaattatacaatattagacatatatagactattatattatcctaaatatctatataaacattatgtacacagttattttaattaacatatcatatgatttgttataatgaaataacatggaaatataataaatcaatatttattttataatctgttggttgcgtgttttaaagtattagaataatgactattccataattacatcccaattatgcaagataatatatatttcatttccacttctatttttaattaatctaattaatgaggtaattaattaattgtattattattattattagcatgcaaggtgtgaagatccaccatatggtttagtggaggataatgtagaaggaggaggaggaggagggtatgaatcatcagcagttgcattagctaatggagcttccaatctctacgccttccgccaccaccacaacggcggaggaagcttaatcaccaccagtcactccgctcttcacagtggcaccggcggtggtggtagtggcggtgcctatgaatcctttgatctccgcgaccttcgcctggcttgatgaattaatctgcaccctaatcatatattagttctactataattataaacacaatatgtattatgtgagggcttggagtgcatgcaattataactctatcttaagaatattattatgtttagtatgtactacttttggttttaatttgcttgactttggtaatatataccttaagcttctgatgatgatgatttatatattaattatatgttatgatatacttaattaaatgtctctggtttgaatttacttaattatgtatattcctagtttgtctaattttgttttgatatgttccattgatgggaatatggagacttaattatttatgactatttattattgatttgaatttaacaagtgtagtgcatattgcataaatacatagatacacaaactacatgagcctttggtcaagtagccatagaaggtatttggggattgtgtggggttatgtgatcccactacaggaattatgatctttaggggcgataaaagttatccttaagaagtcgctcctaatagtttgcacctaaaaatattataagggacaataaaaaaattatcacccctaaaagtaattgataaacaattaaggtttacttttaagagcgataaatatcatccctaaaactttacaattagttgaaaaagaatattattttctttaggagcaatatcaatatatggcccctagtgattgcccctaaaaattaaagggttaatttcacaaatgcacaaaaacaacaaaaa

SEQ ID NO: 304667 - DNA, 591 bp, Cannabis indica
agttttatagaatatgtttttgaaaaatattttcactttttcaattttaaaaacagaaaactaattaaaaaagtgtttccaaacgacacttatatgtttatgtttttcataatggtcattgtgaagtaattttcacaatgtcttgatatttagacgagggtaattttaaaacgtaaaatatttcaatctccaatttataagcatgaaaaaaaaaattacgaggaaaaaaaatagaaagaacttaggagagaaaacatttctcctaaagtttatttgtatatattttttaattaattatcttattaaatatatatatcttgctttgaagtttataaaattttattaaatttaacacaaattatgttttctaagtttttgtacattccaaactgaagaaaatatttattttttgaaattctttctttttttcttactaaaatttttgtttgctacagctgaactttaatcaacgtcatgttaaataaattaacaattaacccaagatctatttgtatataacatagaacacaatagtagtatatgataattgagtatgtgtacctgattgatccatagcaattatctctgatt

SEQ ID NO: 304668 - DNA, 3033 bp, Cannabis indica
ctattcatccctaacccttttattcaatgattacaaccaagccaatgaaaacatcccaaacgtaataaacccagaaaaattgttaaatttttgtcaaagaatttccaacaaacacataaaagtcccagaagttgcagcaaatttatgactaagcgcttaactgaaatcatataaaagagaataatcccatcagagaacaagatggaaaaactaaaactccagacaagggaaagcccaaaagcgaatgcaccataaattcacagaattgaaaaataatattctaaaaaagatgacttacaaagcgggtatgagtatgacagaggaggaatattcatttcattccttttttttttcttgaaagaagaagctgatcccagattcagtgggttcaattattgaggtacccaaatcagaagagtagcactgggcacgtgaggaggaaatatgtataccattcgcacgtgctagaaaagttcctatatctactcatcttgccttgtaaatagtcaatagcaactgaatttgtcaaacgacaacataaaaataaaaaggaaagaaagtaagtaaaacgacaatcatattgaacttttcatctgaagaatgaaatcactgcaaatgatatgggggaagggaggaggttgtgtcataacactcgtgaaattaagtaacgaaccttatataattaatttttaaaaaataccactaatcaaatcttaaagtaacacctataaaatgtgatagacacttcatttaatgttgtgggaaaaataaagtcaaaaaaggtgtgcctcaaccccactcgttcagtccttttggtcccagtgtcacgtcttattaatgttgttttgtttctactaacagtataacttagtattatcactacatcaaatcttctaaatatttcactgtggaattcttttacaaagttcttatggacacaaaggacacattgctcatcttctagttgaagtgttcaaagtgtcactttcacataatcaattctaaatttattacccttttttggatggggtatgaattgtgaactgttattaatgttagctcagttgctcaaagaactccatggaaaattggtgggttgcagggtatccccaacctcttttgggttttgcttaattctatcaaaagtagaggtctttgtcttcaaattcatatctttacttagacttgattctattatttatctaaaattatagcattttagtttaaaagtgacctcatcataacaaaacatattcatcttacaacctcagctcaacataattatttgcttacatagtagaattacaaagcaacgtttgtaatgtataacaattagatgacaacacaccatgggagctgagctgaaaaccatagaaatacacacatacggagcttaattttcattttaactgtttctcaaacccggcggcacacatcaccttcacaaacaaacccctcctttccattctgagcagcatcatcaccatttttaccctcttcttcaaccttctccaaagcacattttgggtgaagatcaaagtcacattcctcacagtagaaagaccatccctttcccatttcctcacatgcatcgcagcagtatcctgggcgatgagcacgcttaagctcatgttcaggatgaagatgatgtttcaatttctcaggccacccctttgcaatttcttcttcttgttcctccaaatgtttcagctgctcttctgtaaatggataagcctttgccccatgatccattacgagttccacaacatcctttgtcactgttcgaccagatggaccaatggctaccgctgttggaatgccctcgactttgaatgttcggttcaggagtttcttccttgaatctccgaatggaagggctaaccaaggcatgatggagaagtattcctcgaaggaggactggtctgagtcgctagagatgaagattacttcaaatgcatcgtctttctctttgatttcattgtatgtcttgataagcttaggtgtgaatcgacggcatggtggacaccagtgagctgagaaatagagaacaacattctttccaactagttcagaaaccggtacctaacaaacaaaatgagagaaataataataagtacaagcaattcatatagactacaaagaaaagctagaaaataaaaataattgatcgaaccttggaaccattcttgccaattacaaaattatcatctccagaaaccaataacgaccagtgtttgtgattccagtttcgctttctcaatttcagcaagagcagcaatcctctcttgggtaaaggggtaggcatcaatgccatgttcttcaaccagttcagctacattggagttcacagtcttcccatccggacctagtatgactagtgtaggaatggttgaaagatcaaagtaacgcacaagcttctcagtgatcttatccttgtatggcaaagccaaccatggaattgtttccaatcctttcttgaactcatcctcttcataattcagagatattaagacaacttcaaacttctcacctttatccttgagcttattgtaaacctcaacaagtgtattagtaaattcaatacaaggttcatgagaactcagagtccaactgttttaccttcaagctcagagacaggaacctgtcaatacataaatttgaatcattattaacaatctgtcatgtatacatgaaaatgaaacaacaaagtaaagctagcacaagaatttagccatgaaaatttacctgattcccatctttcgaaagcaggtagttccgggagctagataccagaattgaactcaagctttggttcctcttagcttcttcttcttgctctttcaaaaggtcaattctttcgcgagagaaagggtatgcatcaacaccatattccaacacaaccgcggtcccattctcagtcgaaaccttcccatttgaatcaataatgacgagcttaggaatccccctgacactaaaagactccttcaatcgttttatggtgtcaggatcggaaaaggggatagccagccatgg

SEQ ID NO: 304669 - DNA, 3656 bp, Cannabis indica
tgattttattttttaaaaaaattatcattaatatcactaattcataagaaaaaattattagaatttgtaatacatatttgttaataactaactctgtctagttagttaaattgttctaattagttttctactatttggattagttttctatttgagttagttaacttattttatttgttaatttagtttgttaggttagcagttagtttcaatttttgaatttctattaacctttataccgatcatactctataaataaacatcttgatacacattctggtcaagtttttcactaccaattcaatgacgttttctttaagatttcttgaaactgtataattcttcatggtatcaaagccattttgaccatgtcaatggacttgttttcttctgatccaccaacaactgtagctctagtagaggctcctgcccctccgacaaccagcaaaaattagctatggaatcccttctcaaaatctctcacttaatcttttgctatcgaacttgatcgagtaaacttcctagaaatcccaagttgttttgattataactgggcatgatctcgatgagatcttgtttagcaaagtatctcctcctaaaaaattaatcaatggtcagattaatcctctcttctcacaatggaaacgttatgatcatcaactccttttgtcttagcttcgatcatccatgattgaaggaattcttggttctgttgttgcatattctagttcctatgatgtttggagagatcttgaatgaaaattcgcaaggcaatcaaaggcaaggattcttcaattgaagagtcaactcaccaacatccaaaaaggtaacatgtccatttcaaattatgttgataaaataaaatatctctgtgataatcttgttgtagctagatgtatcatcagtgatcaagatatggaattacaactgttgaatggacttggatctaaatgtgatccagttgtgtctgatattacttccagtcttgaatcaaattcttcagaaaacactctcatcgctatctattccatgttctataaagcaattaaaattttgtggtacttgccaaaaagagaaaagccataaacaatattttcctctctcaaacaatcatgctactcaacccttaaaactccatcacatagtgtgtggggaccttctcatacaccttccatagatggctttaggtactattttcattttgtagatgactttagtatgttctcttgtatttttccttcacacctcaagtttgaatcttgtatgtgtttttaaaattcaagtgcctagttgagaaataatttcctttacctatgaaattttgcaatttgattggggaggagagtatatagtgtttgatcattttttgaagggtcaaggtattcagttccaacattctttccctcactctcatgagaaaatggaaggactgatagaaaatacaggcacataacataaactggtttaacttcttgcacattctagtttggacttatcttattggtggcatgctttttaatgtactccctaaacagacttccaattaggattcttgacaatattagtccataatgcttatttggaaaaacaactagactatgcatctttaaagccttttattgtatttgctatcctcacttgaagccatgtaattctcacaagttggatattaggtctcaaccttacatatttttgggctaatctcttaatcataaaggatacatttgtcaaattaaaaatggcagaatatatattgctcgaaatatggtctttaatgagataacattctcatttcctacagttatgcaacctgttcaggattctccccaacacaccagtgctttgtcttaagctcaattttaaacaacttcagttggtacctcaactgctactaatccaactccacctgtggaagatgaccaacctctcccttccactactgagctttgttccactgtagttcatgacattggttcacctctatcaaaatctatagatgcaaatttgtgctcccctgtgccaaatgaaccataaacattaattgttcccactaaaactactattgttagaactaattctatgacaactctatcacaaagaggaattttcaaaactaaggtctatatgtccactaaacatccattgcttgaagcactacttctcactgaacctatcactacaaaggttgctttaaaggatcctaggtggtatggttaatgtaggatgagtttgcttctttgaaaaagaaagacatggactttggtaccctactcacttaatatgtaagtcattacaaataaatgggtccacgtggttaagtcaagtgaatatggtactctagataggtgtgaatctagactagttgctagggggttcctccaaaaaccaaagattgactttgcagaaacatttagtccagtagtcaagcctgcgcctgctattgtcataacagttctttgcatttttatctcacatgattaggttgtaaagaaacaaaatgctagtaatgcctttctcaatgacaccctaaatgaagtggtatacatgcaacaaacaatagggtttgtggatccctcaaagctagatcatgtttgcaaactaaacaaatcaatctatggtttaaaataggctcccagggcctggagtgataaactcaagcacacattgtttcaatgggattttcaacaatcaaaacctgatacatccatatttatttttggcactgggataaaccttatattgcttctagtttatgttgacgatttcctcatcactcggcaaaactccaacctaattcaaagactaatatctaacctgaactcagatttctccctaaaagaccgtggtgacattcactatttccttgggcattgaagtttgtagaaagtagatatgtatgtacctttcctaaactaagtacataattgatcttctactcaaacttcatctagaaggagacaaaccctgctctagtcctacaagttcagctcacaaactcagtttgtcatcttgggaaccacttgaagacatcaatttatatggaagtattgttggagcctaatagtatctcatacttataagacctaatattgcctatatcatcaaaaactaagtcaatttattcatgctctcactatagtttactgggatgccacaaaaaggttactttggtatcacaaaggcgctattttataaggcttgttgctcaaaccagctttacgattgtctctctacggttactcacactactactaaaaccactattcctgtcggtcctaagaatgattttttttggggggggggcggggggatcgctgctaaaaacattatgtgagcattaaaaccgttggaaaaaattaggtatcattgtcaattttgaattttaagaaggtatcctcgacagtttaaacccgttagttttaaataatggactttagtatgccgacggtttaaaatcgttggctatactaatgcccacactttaaaattttcgacaaaacaaatttaacaaaacaaagcccacttagaagcccaactgcccattttataaatattacaaatatatatatattatttagggttacatatatattatatttataaatattacaaaaagcccaactgtcgtccctcttcatcattctctctctctctct

SEQ ID NO: 304670 - DNA, 3023 bp, Cannabis indica
ctcataatatcaatcctatagcaacatcccaacatgcaccatcaacagatgctcccatactcaactcttattaaatgtatactagggccaaatatggtgtccataagccaaaggtttttcttttaaccatgaattctacctctgttaaataggctctgcaagacgctgtttggtcaaaggtaatggatatagaaatttatgccttgaaaagaaatggcacctatgttcttgtgcctctccctctaagaagaacaactatagggtgtaaatgggtgtaccaaatcaaagaaaatgttgatggcattgtgaacaagttcaagactcgattggttgccaaggggtttcatcaacaactaggattcgactcattgagacattaaaggttggttaattaagcaactagacgtaaacaatactttcttgaatgggaatctttaagaagaagtttacatagctcaacaacctgactataaagatcctcaaaatcctcatctggtgtgcaaaattaaaaaaggccaatctatgaccttaaacaggacccaagagcctggtttgaaaaacttcacacccctcatttcacttggcttcatatcatccaagtcagaccatagtctattcattctacatactcccacttcaatcatcatattgttggtgtatgtggatgatataataatcacagtaagtgatccccaactggtttcatatttgattcaggccttgaatgttcagttttcattaaaaggtcttggttctctctcttacttccttggatttgaagtcaatcactcgaaacaaggtcttcatctttctcaaagaaaatataccaaggatcttctcaatagagcaaaaatggatggtattaaaccctctcttacccctatgaccacttgtttaaggttgttagcctatgaaggtgatccatttgaagacccccaactctatcgatccattgttggtgcccttaaatacttggtcatcactagaccagatttatcattgattgttaacaaggtttgctaattcatggctagccctctctgctcttactggaatgttgttaagaggatccctcgatacttggcaggaaccattgactatggtatgcatcttcacaaaccagaaacctttgaagttgtagccctcaatgatgctatttgggccactgatgtggatgatcgaagaagaacatctggttttgccatctattttgttcccaacttagttacctgacagtgtaaaaaacaataaacactctctcaatcgaatattaaagtaaaatataggagtttagctcaagcaatctctgaaattacatggctccactcactttttgctgaacttcacatatctttgccatgctcattacttggtgtgacaacctcagcaaaattctcctcattgccaacccaatttttcatgctcgaacgaaacacattgagctggacctatactttattcatgaaaagatcctacagaacttggttcatgttaaacatattcctgctttagactaagttgctgatggttttactaaacctatctcgtgccctcaattcactagtttcaggttaaaacttactattgtgcctagttcacattgtaagtttgaagggtgtattagggaatctcaaatgttagttttttgttatgacagttaatgagttgtcactcagtttgttacacaattttttagcttattagttgtattggttctatataatctgtaacaaattctctaatcaatgtaataagattgttcatccccatttcatctctttatccttctttctctctgtatttctttccctctttctcttcatcttctatctcgattatctttactatacttttttctaatgtcaacgagatcgattcaacaactctaacacttcattattatccttattgaattgctctataaaaataacacgaaaacaacaagaaaactacataaaagtaatgttggaaattttttgtttgaccaacactttttaaataaacaattaatacaatagtgcaaattggtatttttgaaaaataacaaatttacacctttgttgcagcccaatgtcaaaaacatcacaagaagcccatttacatcaaaggaaccacaaggttcggcccaatatagaatgagcccaagagagactttctctctccaatcaacactttgcaacctatgcttttctatctattcggtcaaagaaagagtcaaacaatgactcttaattcccttcaaatttcggcccagcaagagagacttttcactgaattaatggtccagcccaagaagaccaataaaccctaaatgtcttaaccctagatatataaagaaatgaaggtaatgtctttaaccctaaaactttctacacacttcggctgccactccttttccctcaaaaatttaaaatttttcaaacactcttcttcttcctcacataagcagccgcacaaataaactagggttagggtttctttagtttttcttcttcttcttttcttcttttacagctgcaccttgatagggttttctagggttcttaaatgttctatttttcttcaagcttcttcctcttctctactctaatggcagcaacaaaatgggtaaggtttttctatttcttcttcttctgcttacaacagctaagattttatggttcttctaatatttttcttttctttcttgctacaggttctaaggttagggttctttaaaatatttctctgcttctttacagcctctattcgaacaaagaacaacccaaaaaaccacaaagcttctacccgaaactaaacctagaaaactcactcactcaaaaccgaaccccaaaaaaacctctcagaatctctttggccgaaacacatcaaatccgaaaagcaagaacataaacacatacacaaatacataccagaaaaataataagagtgagatgagagaatgcaaacagtgattaaagtagatgacaccaaaactttgatctcggagttcgctcaaaacaaccggctacttctccgtcaag

SEQ ID NO: 304671 - DNA, 2651 bp, Cannabis indica
cattgttgttcagcaaaccataatttcctcaaaatttctaatctatacgtaatgaaggaagggtgaaaaaaaaaagaagagaaagagaataaaatgaagaaaaagaattaaataaaaatcctaaagctacaaagaaacccacaagagattgaaaaagaaaacattacacagagggtgcatcggcaaagacctcattgagcatgtcgtcctcaacatttccaccaccaaaaagttctgcatctttttcttcttcattggaaagatcccttctttcgagcttggcatgagctgctacaaatatcatcttctgggctttttctacacctatctttgagtgtctatgcacacaaatccattttgtaaaagaccaactgcacttaaatccacatgaggttgcttgaagaaaaataagcctcactgcaaccttacctaaagtcttaaactcgcttaagcaagtttcccatacaagtctactgctttgtggattggcaactttcatctttccagtgatggggtctctttgttttacttgaactgcttgagcataaagggggtccagtccttctgacctccatttcataagctccatcaatgcaatatgagcttcttctctgctaaccaacctggttatgagcttatctacatccttttgttgctcatgagtcaagcacttgaatggtggaagatatttcccacttgtgtccctgatcaagttaagagggtcaagtataaaagcagcagcccaagctgggtggtacattttcttgaaccgattttctattattttgtcaactggtgcttcggcaatgctgcatttagcacaccattccttcacttttgctcttaactcctcccaaagaggtaagcattgcccaactaatggcctctcaacctcaatctcctgaaccatccctctgatcagcttcacaagagaataaactgaatccaattcattccaaaagccttcactctgaatcatcctaacaacctctcgcccagttggatcctctacaagaaccaccttacaggaatcatccatcacaaccatttggagtacccgggaacaactcaacacatcctccaacattgcaagaactggtccaaagttctttgaagtatcaaatttcgaagaaggaactcgaagcaaccctgcacaatcaagctcctgtgtcttgtacttgaggaaaacattcctaacctgactctctgtatttacaaaattcgcaagctttttgcaattctcagtgacaactctgaaaagtggaaactctttgttgaaatccttaatcaaactaacgaagccctgaagctgacaagagagattcaccatccaatggttctgaacctccaaattcttcaaagccttggctttatacttatctgaaactatccccacgcaacgctgttcggaccctccacatatcccactaacagtatcccacaaaatctcctcagcgtactttgatggcaacgcgcctccagtaaaaacggccttttgaaaaacactagtccggttaggaagattaacagtgaacttgaccaaattttcatctccacaaggaaagtcacacacattcttgctcttccaaccactagaagcaacttgaaaaaacatggcatcttctattctagcttcagactccactttggcctcctcaaacttcgcgtcgagccgagcacccaaaaactcgcgtcgagacaaggaaggcaaccccacatggttaaggaaagccctgaacttgggatgctcgaggctcgataacgagaccgacccacatgactcgtagaaccactcggcaagtaactcgaccgccgagtcaatttgttccttactaaaagtcgacccggtgaggctttaggactcttaagcttcttcacactgttttctaacattgctaaagcacccaaatcgtctttcccacctgataacatcgaatggtggttatataatcctgtattattactactattattattattattattattattagcaccaccgccggcgttctgcggcggcaagtacccgaactcgccgcagtacctggtcgactcaaccattgctaaagaatgaacctctaaagcagtagggggagcgtgatgaggagttggaggactcatacagctttgggagcttcgctttctgtggttgtgtgaagaaggagaaggcaacgtcgtcaacggcaatggcgaaaccgaggaattgggtctcagtacggagcttatatttgggcaagtaccccttttcagatgctcggtggcagttctcgacgggttcgaagccgagaaaactgagtcgcaaagagagcatttaagcttcactgcttttgggttattagtactgggatttcgaatcaaaataggctccaaatgagcccagtaccaagcaccttttcctttaatggcctttgttcgaacagttacaaggccctcatagcgtttgttgacagccttggcagctaagtcgtctgcggaggggaatgggtcagaaggggttgaatttgtggaagccattgatggtggaagaagagaagagtgaaaagtagtaatggggtttcgtccattaacattggtcgtacgtgttggttggctttaagggtggtatgctagactttttattgggaaatttacatgggaattttttacttttt

SEQ ID NO: 304672 - DNA, 3071 bp, Cannabis indica
tttctgctgactccttaaacgagtacaaatagtccagaccaaagttgtaagacctaaagtataaacttgatttcctcaagagtatataacagacattgaagctctggtcacctttcttaccatccactttctccaagaaacatttgaaatgtgcctgcttgaagaagaaaattaataaatatgtaaggatatactaaactaacatgctaacaaaagacattacaccttttttcaatcaaagagattaaggggactaataatcatctgtcttggagcaactttgagctcaatttacatctttgttcacatcaagaacttagctttcttctctgcaggcttaagaatctggaaagagcacattaagttttcatcaacaatcatcattgcaccagcattgtcaaattcaccacagtagtttggagctgaaaatattgttacaagttgcctgtcagcaaaaaattcatacccatcctccacaacctaaaacaaggcatttgatcagcatctgaaataagtgaaatctgagactggagttataaaaggaaaattgaagaaaatcaacaacctgatgagcacgacagacaaggtccaaatcatgctgctgtaagaattctcccaccttatctgagccaaaggtgtatgaaactcctctgtcattcattccccatcccttaacatctctaccgggatccgaccaaagcaagtcacaaagcaagccagtgtcaggaatagcagttggtcgagttaagctccttatctgatctaaatgtgtcaaatcaggggacagacccccatgcatgcataatatcttgtcgtcaataagagctgccactggaagacagttgaaacagtcagtgaacgccttccagagtctcacattaaatcgacgcttacactcatcataaaatccatatatccgattaatagaagcacactcatggtttcctctaagaagaaaaaagttctctggatacttaatcttaaaagcaagcaaaaggcatattgtttccaaactctgcttgccacgatcaacatagtcacctagaaatagataattggcatttggaggaaaacccccatactcaaaaagccttaacagatcactgtactgaccatggatgtcacctgaatatgtaaatgaaacaataatgggtcagagatgtgctgattccaagatgagatttactgtaataaaatcaaatttttaaccaattaccagcgtgcaaaatgtagacaagaacagtcacaaagaaacagcttgaaatactaaaatcagcatagttcctatcactcacccaaaactagaatataaggatctggtatgtcctatgagagagtctttctggttcacattttataagtcaatggagccaagtttatcttatatccttcctgaccctaaacagcaatctaaagtttagagatccttgcaagctaaagaaacattttgaaattactctcatgacattgtgtctactccgatacataacattaatgcacctacatttcaagtgcctatattttgaacaacaccatacacggtttatcaaggatgccaaggaatccatattctgactgaacagtcgttttacagagaaagccagaacagttaacattacaaatgcactaactattatagttctactccaacattctttaccaattgaacagagccaaaaaatactaagtttaattataatgtgagactgatgcaagaaacaaataaccaatatgtaacagcatcaatagcaagtaagaatccgtccacccagtaaaaacaaagatgggaaattattaattattgacttgcatactttttcttcatcctttctcattttctaacaatgtaatatcgaacaacccattcttggactatgttaatattcctgaacaaccgtaggaacaaaataaagataaacagatagacatttttcttatcaaatccgaaaataattaaatcccaaatacccagcatttccacaaccttccaaaaatttatatttcatatcaaccatccaaaacaacagaacccagaatgaaataattaaataaacattccccattagaaatttcacaacagccatgtcaaataacagaacctagataacaaaagaaccacctttcttatccggtagccatattttggtttttttgaacgatgatcattttcatagaaaaaattccaatagccatattttaatataaaaggaatataataaagtcaagcaaaataaataaatatataaaatcaatatacaggtatacgaacaataccgcaaattttgataggggcttcaagctcaagcaaattaggctggcggaggaaaatttctctagatgcaacagaaagttgcttgatttcggactcggaaagttgaacctgcttaccgggtctagctgatcgaacctccgttagccgtttgattatatcgtcgaggacggcagggtccatccccgactgcacttgcgaggacattactataactattataagaagatatgttgagaataaaaaaccctagaaatataaaaatcaaagatgataaagattcaaaggggttttctttcttttcttattcctgtagattgttattgaggctttgccatgtttggagctacataggccgaaagacaacgtcgattatatatattttattttctagggaaaataagtaattatattttctcgggagaaaaaatggtgggaaagggaattattagttttattttgataaaggaaggaagaagaacttgttggattggagagagaggaagtcggagaggagacggccgcaaagtcctatgtccctaaactcatttgtgacgaggcgacgtcgttagcaacacgtgtatttctagagtccattttgaaatggcctcaattttcactattaatttggcccaaattaatttgctacaaccaaacaatgggctttttacaccaatcacaaaaggataagggaaatttataaaaatactcgaatttgggttaatttttacaaaaatactgttacacagaaatcttttcaaaaatattgtgtttttataaaacaccagtaaaacacaaagta

SEQ ID NO: 304673 - DNA, 1483 bp, Cannabis indica
ttcaggcaatcaaagaagcaactttgaagtcttcaaccattccaaaaggctattttgcggtctatgttggagaagatcagaataagcgacatgtagtacctctttcgtacctaaatgagccttcatttcaagacttgctaagtatggctgaagaagaattcggatatgagcatccaatgggtggactcacaattccttgcagtgaagacttctttaatgatatcacatctcaattgaactgatgatgttatttttagtactaacatagattcatagaaaacaattttgtagatcatatacttttaccctttatcttagaaaagaaagggaaatttttttagtagttgagaaactaatatatagaaattactcatttgattaacacttgttgtgtttttggtggttgaattccatgtttcttgctgctatttctttttctaaccattgtgtctggcctttgtttgagaaaattttaggaatcaactaagacaataatattacaaatatcactaataatgacttgatatatactaactcaagtatctatacatatcaccattgacatatacaactatttagttaaagtttcataagtagaatgtaataagccctaaagaaacaaatcacaaggcagagaagcagcttgtaccaaaaataaagagacaactttgtcaaagagtgaaccaaaatttgttctctgtttagtccaaatgatctgatgatataataacttctaaaccatacaaaagaaatgtggaccaagagcatggacaagttcaatttaggagagaaaaaagtgttccaatccaataaaattcatggaaagaaatttgctatatatttctttggaatcattcttgggaacatagtgtaatatttcaaggtctacatatactcatgattaagcacaaggtcggttctgggctaaggcgtgctaggtcagtgcctagaggctaaggtcgatgaaagcatcttctttgcatggaattgttagagctcccattgaatgatcaaaaccaaattcttcttcagcttgactcaacaattcttggatggaaggctggttcaagtatgatgacataggaatattttgtacttaaaaagattttttaatgaaagctaaatacatgggatggtagtagtgaaagtgatcctataacttcccaattctgagatgtgccattgtatatgatcacatctctctattttgcttattctccaaggatgaagcattatgccacatgagcaaactttaaggaaaaaaaaaaaagttaaccaagttcaacgacaatcccaataattgtgggatatttttctataagtgtgagatcttttcttagatttttatttatttacatttattattcattattttttaatgagaaatactattttggaccctctgttttacaaaagttactaattgaaccatgtgttttgttaaatgacaaaatggaccctgtattttctaaaatagtacaaa

SEQ ID NO: 304674 - DNA, 809 bp, Cannabis indica
tattgttttttgtttttcgtttactttttttattcactatttcctacaataattttttgttgttgttgtttttggatatttacacaatccttattgaattggactcctttgattcactattttaactgataacatttagactataaatatgccaagacatgagccataaaataagaaaaatgatttgtcagaaaaataccatatttttatttttctttacaaaaataccataataaataaatgaaactaaaaaaatcaaaattggtcaaattgagaagtaaagcgtcggttattatgacatgctaagctgcggcattgatttactcggcacatatccaataaaagaagaaaattatttctttcaaaaatgataaactttaccttattttacaaaaagacaagattttggcacaaaaaagaaaaaaagaaaaagagaataagtaaaggagatggtgagatgttaatgtgtggatgattttctttaaaagtttccagcactggatgaatgcacgttgtaattagcccagccacttggatggcaacacttattgggtattgatcctcaaactttgggtccttacacatcacttctgggcatataatttacagaaatgtgaaaaggtatggttgtggcttaacatcctttaatttgtcatatcatttattgatacaactagtaaacaatccgcgcttcacaacgattatttttaaattttctcatataatttttttctttgtcctttagtttacataattagttagaaaaatattttttttagataattataaaatatattttgtattttttt

SEQ ID NO: 304675 - DNA, 1981 bp, Cannabis indica
attattgaatcacatattaaaaatatacatttttttaaagataattatatataaaaaaaattatttaatatggatctaataatatatcaccacatatttattaattaattagaatgttagagcacttaaaaatatgattacaacaaaaataaaaaaaaaaataagtacactacgacaaaatgttaaacattataaacaaatcaatggcgtcgcccgggttcgaaccggagaccttcagtgtgttagactgacgtgataaccaactacaccacgacaccacgtttgttttaatggtacttatatatatataagattactattaataaatgattcatcacaaaacggcaccgttttaccttataattacttctagagctaaaagtagaagcttgacttaactcccaagcccattagtcacggcccatcaattcaatcgcaaaatataaacgttgttttttttttttttctgaaaaagttttctttaaatgatatttatttgttcgataaataatttaaaaaatctgtatttaatatttgaaaatgtgttttcttaaaacataattaattggttgcactgttatattgttatggagtttttaaaaataaatctttttattctttttttttatttattatttcatatactaatacaattaggactaatggaattagtatatatatacaatccttcttcaacatttggtatttacttctcgtgacccttatacaaaaatttaaactttcataaactataaataaaccaaccctaattaattccttcctaatcaaaattaaaatctaaactattaattccttagtttcctatttgaaaatcaatttcatccttcttagtttctaatcgttcataatttttattcttttctttcttaatctctttttcaattcactatggcttcttctcaaattattagcaatccttgttacactatactcccatacaatcctattagaattcaaggtatcaaccctatatttgtaattcacttatttgcaaattttactctgtggtcttcgttgtatactatgcaaggtgaaaatgaagaaacttctactacttgtacatataccacggtgctttcatacgacatgttgataaataacaacaccggtgctaaagaaattttagaagactcgcttgcgaaagttaaccttccttcttctgcgttttttttaagtgatgaaattattagttatggtcaaaaaatgtggagtgatgaacatcttgttttgagtgtggcagtggatattaatgtttttgtcgatgaattacctgttcaacagcatagtagtgacgatgaagatgattatgaagaagaatatgacgatgtatacattgatgacatggatgatatggaaagtattcctatcgatttcgtggcagcaagtaagcaatcgattgagagattggagaaagatcgtattaaggatggtgaagtagtttcatgctcggtatgtttcgagaatattttagctggttatgaagctaccaaattaccttgcaaacacaagtatcatgaagaatgtatagtcaaatggctacaaacaagtaaattttgtcctttgtgtcgatttgaagtagcttaaaggaaattaatacatgtaatagacataatcagtgactatagtttcatattaatggtattatttttatatttgtgtgattacttcaaaattgtattaataatatttataaatcaatcaagtagtttgtttatcttaaattatttttgtttttagcatacaatttatgataatttctattagtcaacaatggcatggttatacttaaaatatgtaacgcccgtactttttcataaattactaatttagttacaagcgttaaaatgcggaaaaattataatgtcgcttttatttataaacataaaatatttcatatttgagctcaatttggacttaaaagacataataattaataaataaaaataactgcgacattaat

SEQ ID NO: 304676 - DNA, 2753 bp, Cannabis indica
aagaattttttagtaaaaaaaaaggaacaatcatttaagaaacttagaacaaatacaaatcatggttacaaacaaaataatttattcttaagtagattgtactacaaaaaaaaaatcttatttttagtcacaataaaagttgtgattaaaagtaaaatattgtgactaattataaatcattattcttgtattgtgactaaaaaatccgtggctaaagatattagtcacaaaaattataatttgttgtgactaaataagtgtatttttagtcacaatatttgttgtgactaaaatttaaataagtgataacttatatctaactactatgttttagtcataactaacattttattgtgaataaaaattacatttagtcacaataaattcatgttgtgactaagaacttgtcattaaatgtagcttttatttgtagtgttggtttggtttagtttcctttaacttagtttaaggtccaaccaactaatttacaaagatataaatatataattttatttatacacacattttataagaatttttctttaggttgggccatggctgcctcttagagcagctctaacgcggagcttacagacgttgcttcgtgtaacgtgcgtgctatagatggcacgttacaagttaagtgatgcaaaggtgagcccgtgacactttgcagggtgtcagttggtggttgatcagccatgggtgcttcaacattaaagatgtaggagaaggtttttacgaatgctactgccaagcaatggtaagttggttatttttttttttctaaattaaaagtgtaataatttattatttaaataaagtatgtggatatactgataatttttagaggtgcttaatataaaaataattttagaaataaagtggcttaaaataatgcagatgaaagagaagatacaatattatattattttagaatgatatagagattgttggctctttttaaatggagcattgctattaggcatcttaaagtacctagcattataccgatcgatatgacgtattgtgagtggttattagttttctatgttattttttaaatcaaaatgtgtttgacccgatattaaattgcactaatagcgacatatcacctcttgtggtacacatgcaactgccctagccctaaccaaattacaccatgtgacatgacagtgttttgaagtcaattacatttgattaagaagaaatccacagttaaaaaatattgttatatcactagctaggtgtaatgttttgttgtacagtttgtgtgtgcacttactattatgcgcttaaaatgcagaagcttaacattggttactcttgataatatatttacaaataattaattgggagggaaaaaccttcttaaataacagttggatttggttttcaatttaaaatcatttaattctaactcttttcttgtgttgttcataacagttccatataggactaatttttatgaagagttccttggcaaggaaaattaatcccaaatctagctaagataaaagcttcagtatttttcgttctttcctctttttctctctctataaatatatatatttatattcatgaaaattatataagttataacaactttgttccaaagggatgttagacacacactagctaggctatagcctcatcatctaattatcaaagtattcaactaataagttcaaatgagtcactaataaaccagaaacatcactcaaagctagacaaagattaatattaactacaaccaattaatgttaagataatgctcgaagtttattcttgaaaacccagctgatacacttggaccaatgtaggaccagatatctctaccgtattctacttggaaaactaacaaatatatagaaaccaaaaagcgtgcaacttaaagtagaattaaaccacgtttttggaatatattgtgactcaaagtttaagacctcgtacttcccagaactttgattcttcgctaacctaaatctaaatgttacttatttggattcaaaaacataagactatgtatagatattcacttaacaaacttatataataaataactttcttggctatatcacttcaattatatctatagtttttggctcatcaagtacttgtactatagataatagataccacaacaaacaatatgcaactgaaaattcatgttcgtggacaacttaaataatacgtttctacttaatgatttcatacagtcaaacataacaaaataccatattatataatctatactataataacagctcaatttagacatcattgtcatctttggcacataatataaaataacttcttttaaggagaggtaaggtagattggtagagttttccatgaaaatagctataaccatacaaagatagtaattcatgttttataactttgtgagtttgtgagtgtacaatggcaaagcattacaacagaggagtttaaagttgggataaatatataatacttatttaattttttgagatgaatcctcaagaagctatatcatacttcacatgcatgttagtctatgtatacacatataacactataaaaaactgctacttttagtgataacattttagtcacaacataatttttttgtgattaaatgtgtcttttagtcacagcaaaatgttacttatgactaaaacatagtatttagttataagttgtcactaatttagttttagtcacaacaagtattgtgactaaaaaaacatttagtcacaacaaattataat

SEQ ID NO: 304677 - DNA, 3721 bp, Cannabis indica
ttttgggatcccatttaaaatttacaactgatttcaaaatatattttctacaaaagttattgcctagcaactatcaaaatgtgatcctaaagtgtcttgaagacccaaacactctaggtctaaccgtcttgaaacgtagaatctttatcaagctctaagctcattctagttcaatcctggatctttcctttgcatgcaaaataataattatgagtcgcattctactgttactagacataaaacgtgaactttgtaaaaatattaaaattcacatatagcataaataatatacctataattcaaatgtatctctataattgagaaattatttttatatggcctaattctaacaataaaccctagtttctactaagaagcacataataataaattaataattaaatctttaattatctgctaattcccatgatttaactatgcggttattacacccaggttggtctttattgtcgttgatcttacctagaagacttagattatgctcacctatactaaataaaaggtatttcagacctaatcaacgatccgatctccgccaaagatcttccaagatcaataattccactaatcgacagtgttctttgtgtcttcattagtgaaaaggctcaaattgatcttgatagccattaaactcactaaagagacgtgttttttctaaccttgaataaatacaatgtattttggacctaatctacagtttgatcaccataaagatgttctaagatccataatttcactaattgacagtgttctttgcgactttactagtaaaaaggctcacattagtcttcatcactgttgatttcaccaagaatatgcatataataatcaccttaactaaataaatgatatttcatacctaatcaacagaccaatcgccaccaaagatcttccaaggtcaacaattgcactaatcaacagtagtattcgtgactttattagtgaaaaggctcaaattggtcttaatcaccattgatctcaccaagaagacatatattattttgaccttaaatagaaacaaagtattttaaacctaatatgcggttcgatcgcccccaaagatattctaagatccataatttcactaatcgacaatgttctttgtggctttactattcaaaaggctcacattggtcttgatcgtcattgatctcaccgagaagatgtatattatcatcaccttgattaaatacaagatatttcagacctaatcaacaatctaatcgccatcaaagatcttccaagatcagcaattgcactaatatacatatttcttaccagcaaccgttcattaaagatttcttagtttaatatgttgctggctattttattcatagctcatgagcttaattctctcgttggaaaaatgtgtagtacacctccaggttatttcgatagacacccctatctatttcgacattcatgagagctttttaatgtattttttttatgtcatgtacgttgtagctatttaatatcacttataaacttttagaaaattctaaataatttatagtgcagaaataaagtttaaataattgtttactatacttataagaaataatagtcacgcttgcaataaaatatttaatattttatttctgacaatgtaaactcttcaaaattttctaaaaatttaatgatagtcctaaataattacaatgtacatgatcatttattctatatatagggtacatccatttaaaaatggatatggtataccccttatctacttcagcacatataaaagtctattttttttcaagatcgtatgtgttttagttatttagaaccatctgtaaatttttaatttttttttaatagtatacaatatcaaaaataaggttcaagtattttgttgctcaagtgactgtttttcttatatgtgtagtaagcaactgcttaaactttatttttaacaatgtaaattattcaaaattttctaaaaatttacatggtaccccaaataactataacgtacacgttcatgaaaaaaatagattaaaaaaactctcctagataccgtaacagataagaagtttatagtttttaagaatttcatgttaaagtatacatgccgtttggtaatacttttctcttctaattttttaatcacgaaattgaaagtaaaatttttgtttttaaaatattgtttttaaaaaaaaaaaatgcattctataattacttttgtttttcaattttaaaaacagaatacaaaagtatgttatgtaaattttattttcatatttattttattattttatttaattccggtctaactctcaggtcgagtccgggtctgggttcggtgccagggccgggcaggagtttgggtttggtccgggggtagtcagagtccagagtattgattaaaaaactgtttgaaaaatattgaaagtgatttttttttgttttcaagatttttaaaattttgattatcaattaaaaaattaaaaagtgaaaacaattttatagaacatgatttaaaaaaatattttcactttattaaaggttattaggattctattattttctgttatattagttattcattaggtcggttagttagttgcaactaacctcttgtacctaacacactatataagctcttgtaccaatttactattcgaataacacaatatgatttcttcttccctattttactctgttttcttgttcattaatatggtatcagttgctataatccaagaacagtaatcttcaccaagcttccatttcctgcaacaatggtgcgcacgagagccaattcctctgctacctccactgatctcaacaacaatccagtggatgatgctcctccaaattcttctcctccaacatctcaaaacttgacaattccacctcgagtccttgttcaggccgttactactcaccatgtccatggcgatcgaccagcttatgaggatgtataaagtccctactacctcagcactatagatcacccaggtctagctatcgtcactccgatcttgacagatcgaaactttcaaccttggagtcaagactttaagctttccataggtgcacgtaataaaatgccctttcttgatggcacgcttccaaaaccacctcttaatgatccattatacagttctctgatttgttgtaatcaaatggtccaatcttggatccttcactcaatttttccctgaaattaagagcaatatcatgtatcttgatactactgcaaaaatgtggactgaacttaacaatatgttcaatcaaggtaatggtccacgtattttcgagctaatgaaagccttactttccttcaccaaggagatgacttagtcattacttacttcacaaaaatgactgccatttgggatgaaattcatcaacttcgcccaaagataccttgcacttgtgttgctgctacaagaactcaagaatatcacaatcatgatcaagtgttgcaattcctcaagggtctcaatgagtcttatcatgctgttcgagatcaggtattacttcttgatccttgttcaccattaaataaagttttctctatgattgttcatcaagaacaccaaagaacacttggtaatcgaaatagtacccccttgctgcagctgctttatcatctacaccttctacacccaaccctgatcctattcttgcagccaacttcactaaaaaaaaaaaaaaagatgcgtccaacttgttccaattgccaaaa

SEQ ID NO: 304678 - DNA, 1574 bp, Cannabis indica
cacatatgcgatattccaactggagaattataaggagtgtccaatttcatattgttatcggtgaaactcgtacagttccacccttatgttggatactttaaaatatctaatgcaatgtacttagctcttactatataaagattcacacgcactatttcaagcactataatgtatatggacttttcgttatagaagtctgaattagtgggaaatagaatctgtaatttgatttgatttgacccataaagttaaggtaatgtatgtattaattatgtaaaaggagagaaagcggaagattcttgttccaaacagctcattcaaaaataacaatatatttgattcatttcattcctatgcttacaataataataataatgaggtattatatatatattcatagcgttcgtaattcaaatcaaagaaaaattcttcactgttgttcctccttcttggatgcggtggattcttctctatcctcatttttgtattcctgaaccagacaaaattttgaatataagagattcatatgtataatacgaatttgtttgattagaaagaaaagaaaaaaaaaagatataaattaaattaccgagatcttcgcacgttccttctctctaagagatggaattgaagaaaacctcaaggactgagaatggagctgcttcagcctatacaatcgatcaacttcgttctccatactcttctggatctctcctctcttttctagatccttcatctccgaatccaaaaccgcatccctctcctttagaatcctctccgttctctccccctcctaatctcagccgctccagcctcttcctcatcgcactcagctcctctgccagagacgcatcgaatgatccgatcttcgccggagctataatcatctgctgagcctctttcttcgttggaggaggaggaggcggaggtgaatgttccaccaccaacgctgccgccgaagaagcatccacatggaggcgttcttgttgttttggcttgggcttggcagtactgcattgatctagtagggtcgctgggttttggagaaagttcctcggctggagaggcttccggccactcttggcccggattttatggtttccgatggctggatagtgagccgcgagcatgttgtttggattgtgaggttttgtttttggaagagaaaagaaaagggaattaagaggggatttgtaaagaggtgagcggagagaaaatgggagattttgaatttgaaaatagagaggcggtaacggctactgactgggttagctagctaggtttcttttactttattaaatgagtcgagtcggaagattctccgcaatggcgtgaattaataaaggaagagtgttaggaaatctcttttggtactctcttttatgacaagttaaatttttaaaattatgttaaaaataattacaattatacttttatttagtttacttttttttatttttttaaaactaataattaatttatttattttgactgataattaaaatgtgtgattctatttatttatttgtttatttgtctcacaataaaaaaacttaattaaattatatattttt

SEQ ID NO: 304679 - DNA, 2187 bp, Cannabis indica
taaaatatactcattgttgggcacactgcactccctggccgccaaatcggccattatcttcttcgtatgcttcactctgaaaactctgcttttgccgcatctcctcctcaatgttgacatcatgcagtgttgtctcctcacactcctctatcgtcatatccgaaacttgttgagacaacaatggctttggaggcagaatagtttccaatgccttaacctgttcagagctcatggaatttggaaactccacattaaaatgaatgtacagatttcccttcatgaatggcttcccatacattggcattccctcctcactgattaccttgtacgaatctgccatacacacaatttctgttaaaagcattgctatacataccgacacgaattttatgagttaggatcggaaaaactaaacgcgggtcaaaaagaaatctacatgacttgacacgaaaaacaggtcaaactcgataagactagcttaacacgagtcaaaagatcgacacgcctaacaccaaatgtaaaaaggagtcatccaattatctctatataaatttataaatatgtattgatattacttaccatgcttgacaacttcaccagggttggatttgatgagcaaacgacgaccatccaaatgagtcaatacaaactgaaagccacacaatgcctcagcaagaaccaaagtatgatcatagaaaaggtcaaccccattcctcttaaacttagggtgttccttttgttctatgacaaaaacgacatctcctggttcagtgtcaggctgaaaaaacgactaccaaacaaaccattaatagaattcatcaaaacccaactcaaaaactaataaagaaagaagaaacaaatatacatacagcttcatcagattcaccagagaatgtaatcttctgtccattctgcatgcctatatcaacaatgacttctttaatcttcttttcctgaacaactttttcccctttgcaagtggaacaacggtcctcctcagaaattatttcaccattccctttacaatctttacatacactctgagactgttgtaccacgttgggccccaacagctttgtcatcaccttcattcctctcccttggcacccactacagatgattgaatttcccgatttggaacccttactaaaacacaaacacattgttaattcaagaagttaaaccgaagaattgtttagaaaaattaatagacaaacatacccattacagttggagcatataacattttttgaaatggagattttcttggaagtacccaagtaaagattctccaaagaaactctcagaggcttaacaatatctccacttcgtttctttccacttcttttgttgaatccattaccattaaagaaactgttgaagagatcaaaagggtcagcatcgttcatgaagtcatcatcataacccattccgttcttgagcccatcctcaccatactcatcatacaatgcacgcttctcagggttactcaaaacctcatatgcctgacccacctccttaaactattaattcccaagtaaaaatcagtaatggtattcaaacaaaatgaaatataattagttttttaataataaagaaagaaccttttcaggatcaccacccttgtcggggtggtttttcatggcagcttttttgtatgccttcttcaaatcatcaggggaagcgttgtttgaaactccaagaacgtcatagagacgagtgttgttgtggttactcttctttgaagcatttctgaacattttcggtgaattagagaaaaggaagaaagagtagtctttctttgacttgagcagttactataattggttatattttgttttggttgtccttagaaaagagcacgatgggctttatatatggggcattttctcatttattataaagatcaattgtggttaacttaagagggtcgttaagaatgatctggaataatccagtgacttcccccaactgtgatgtttgttttgatttaaaaatacaaagatttagttcatcaaataaaacacaaagatttagttctagaagcttcccttgctttctcgtataatatgtatatttacagaatgataattcttatacacaaatacgtcactctgtctattttatggactgacgattagctctacaaaccaacacgagtgtttccaacatgttttgtcctcactc

SEQ ID NO: 304680 - DNA, 1046 bp, Cannabis indica
aaaatattttaattttaatttttcaaaataatatataagattcctgtacttaaccaaatagtgtaatttaatttataggaatatgattacatattaatgtacacaaccaaacacaatttacacatttccctataatcttattctctttcataatattccctataatcaaattattttaaacatacctcataccaaatgccccaattatttaaatatatgtattaattaatctactaaatcaaatacaacaaaaaataaaaagaagagtattattgatgaataccttaaattttcttttctttggatgagttcttgtatttggtatttgccaaaaatatcttctgcaactgtgttgattatatatacttcatgtgtaccttacaataaatacatataattatttatacataaatttacttatatacataatttcaataaagaaaaaacaaaatagacgtgatcttcattattgattgacaaacactatataaaatatagttaacattttacttttagttatatgagttatgagcatcattatagacaaaacaattcacaaatattggtgggttctgctatagaaattaactaagggatattgaagagatattttgctataatgaatgagagaaaaaaaaagatagtattagggttatgtttagaaagttgaaaggctttttaattaatagagttagtgtgagatatttattttatttatttattgattaatataaattaaatttagcttgatattttttttggcagagagaagcaaaagcaatataagaaattaatataaattaaatttagcttgatattagttgttagatattataaaattacgtgtataaataattagtattatatatgtttaattaatattagattaaatgattataaatgattaacttatctattctactagtaaaaactacgtgcgaggcacgtatactaaattttatgctagtttatttctatgttatttgaaagtgatacaataaaaaattaaagaaaaaacattattagttattaggtgagattatttg

SEQ ID NO: 304681 - DNA, 2000 bp, Cannabis indica
tgtttatctatagaattgaattttattgctattttatgagtgatatagaaacaaacaaaataacctcttacaaaataatttctttatcaacttttgataatatgtaggctgcgggaggtagacgaatgatgccatttacttcataaggatggagatgtgtcatgatacccaactcttgcaaagctaatctcgattcgtagtgatcttttaacttccctatgcaattcaacaaagtatatattaagttaactttcataaatattcttaacatgcattacattcaagttatgacgaacaagcaaagcctcccaataaggtagattgaaaaaaatagactttttcttccacattttttctccttcatcatcgtggcctctcttttgactctttccaaaactattagtcactttgttcaactattcggtaacttcaataatttatcatcaaaacagaaaaaaattgtaagaattgcagaacaaaagagaaaaagaaaatagagtttgtaattaaagtattgattaaacaaaagagagtatgaaatacgaaaataccaatctagactatcgatcgtcttcgagcgtcgtcctcaaaggaacaattcaattcgtctctgcaatccgatccgataaacctgagctcgaacactgcagattctctaacaatattaatattacattatagaaacattttaaaatatttgaactccaaactgaaactggcactaactgaattacaagtcgcagttaatgaattaagtaatgttcataccaaattactgaaattgtactaaagttttgtgttttgtataatcgcatacaaaagtttaataaaaggaaaaaagaaagaataaaatcctaaaaataaagaatagaaggagatgatgattaggtcgagactgagtacctgcaacgctgatcgcctgtgccgacttctgtcctgtagtcgtctgcttaattgcaacgccgaaggggtgaaagatcggtgaggagagtttgttatttggtaaaagctaacgtgagactttgttagacttttttatttttaatggttgcttgttatctaaagtttcatgttgtgtactgtattaagtttattgttattccacgattgttttttagttgttctactgttgtttttaattgttctattttattgttttacggttgttttatagaaaaacaatatttttgtaaaaaattctgtgtgacagtaaaattaaaaactgttgcccaaaatctagtatttttgtaaaaatccctttttattaatgttatatgtgggtattatagaaagcatattatgttgtggtaacctatggcttcaattatttgctacttcgttattagcaaataactgaagccataaggacttcttttcgcgttcagttttctttgatccctttctctttaacgggaattcccttcagttctgaatttcataaatattgaagttgaaccaccgaaaaaactaactaaagacaaatattacagtagtgaatttatagacatgttacataaaattaaaggacataaatataatttacagaaaatcgacactacctaacacaaattacaatttgatgggtaaccaacctttagcaagagaacaaggaaagagaaactagttcatttcaaatttaggggattgtcattgttaattaaaaagtagtattacaacataccaacatgtcccatttataaaaaaacatactgacaagtcttcaatatggtaatattaaaacgttaaatagagaataagaaaataaaagagaaagttattaaaatagccacaactccaataaggacattattaactcgtcacttgtaactagccttaagtgattgtgtgtctgtgaggggataagttcaaatctctattatatatttatattaattaaaatcatttccataggcagaaggaaaaccaataaatggattgctaaaagtagcctcattgcccggacgtgaaaacacaatctgcaaccaaagaaaataaaaaaa

SEQ ID NO: 304682 - DNA, 1012 bp, Cannabis indica
ttttaaataataatatacacgtgtcatgtgtataagagtgtacacataagcagtccataatgacagttaatcagatgacactttaaatttgctatcagttcagtagtttgaagggttttactgccaaaatttaaactttgagagttaaatgcaagtaaaatgacatttgagagggtctaaccgctaaatattctaaataattaccaagaagtatctatagtcttgagtatagttttacatttgggtcgggtttttcgacacgagactagcatgagcttgggatgcacgggcatgacacgttacgagaaaatatgggcttatacttggcacgatctgaagcaaatatgagttggacatgacacgaaaaatatggacttaaacatagcaaaacaagatacaacaagcacgaaaacatgaatatataaatataaaaatacaaatataaaaaaacacgacttacattcataaatatatattttttataatttaaaaatttatttatatagttaaacaacatataatttttttaagaggattttaattatttttaaatgtgttatttattgaaaaaaaaatacttgtagaaaacattattcgtgtttcagtttgtatagttagcgcttgtttggtaggctacataagagtcgtattgtattaaataataaataacattgtttatccaaacaatgtattgtattaattattacgactaaattttttaatacaatataaattgcattatttaatacataataaatgttctatattagtttgtattacagtatttacaaagaattcaaggtcaaccccaatcttcgacacagatttagcgacctcaattagacctaaaactggacccgtacctaagacccaagactcgaacttgggatcaagacctagacccggactcggtccgtaattggtgttggggttgagttaattgaaaatatattataactttacacaacctattaacataaatcaatgtcaaacattgttggaaattatttta

SEQ ID NO: 304683 - DNA, 1513 bp, Cannabis indica
aaagttgatttattaaactttaattttgattgtgaagtgtaaattgttccatgtgaacataacatgaaagacttctattgtgtaatatgtattggatcaaaggagttgcggtggattttccaaggcatttatgttgtaaaggaaattcaaattacaaagagaataaggagaagcttatatacttataaacgatatacagtatttatattttatacacttgaggtaaaattttatttttaacttgcgaaaatttcagcaccgattaggaaaagttattattcagactctaataacactttgaaattgaataagaaggaataaaataaggtaatgaatagtaaaaactaaggactggccttatttgggtgagcagttctctcaaatttagtttctattttttattgtcaggcaaatcttggtttaacaaaatgatcgggcggtaatgaaatattgaccaatgagaagtggtcaattagttggtttagttgttcagattttaaagcaatacctgctggaaaaataattgtttttaatattatattattttttgagatatttgtttaaaatagattgttatacactttattatctcaactttactacttaattcatgttcaacaatcagccaatatgactgcttataaattagttgtgagtaaatattaaacttaaaaggatggaaaaaattcaaatcttcttcttcttttttttttcttttggtaatgaaaaattaatcttcttgaatgtattacaatttggttatttcaattaaaaatatacattgcgaaaacatacatatattttgacaaccaattggtaacaatagtgtccaaactttgtatcataaaatatgatattttgatacctcataatgttgtgtattttacacaaataaaacaaaattttattaaatgacatgtcaatattgtattgggtgtctgacacaggatttttttttccaagccttataagagaattgtcttatatatatggcaagatttgtgttgattttgtattacgattccttaattattattattattatttttttttagaaaatagtctcaaagaacaagtacaaagagcaactgaagggctagagctaagaaaatcattaatatatggcctcaactaaaataaggttttaaatacaactttatagtcaggccatcaaattaaatttgcaagtaactgttaaactaaatttggtaagagtattagttattacattagtagtttttggataaaaggtaaagctcactatattaaaatgtttacataaatttttaatatcatcatgaattaaattcaaaagggaatctaaaactatagacatattaaggtgccgtttggtaacacttttgtttttttaaattttttaatcacaaaatgaaagtaaaatttttgtttttaaaaattaatttttgaaaaacaaaaatgcgttctgtaactacttttatttttaatttttaaaaacagaaaataaaagtgtgttctgtaaagttcattttta

SEQ ID NO: 304684 - DNA, 1621 bp, Cannabis indica
ataaaatgtgatttttgatctttagtaattagtaaatctgattatattgaaatggattttatttaggacacaaaacccaacagatgagggatctctcattgagattcttctggatgaagttgacaatggtattccaaactctggtttagagctagtggagcagctgcgtgtgtagagctcctgacttcttgcaaatggtgatgccttgattggatccaacgctgtgaacattcaattgcagaagttggttagctctaaacctacacatattattactgaaagattctttaagccactggtatcttttaggtaacaaattttcttgtcttctcttgaactagtttttttttttatttatttatcatcacctgactttgtcttcttattttcaaacttgtgttggttatgcttacactatggataatgaacacaagagggtggtggagcttgctaaaaatctttcacctgcaaaggaatgtgtaaatactgtaaagatttggtgctgacttgaaagaaaccgttggtgcttggagaagagtatggccagtctccaagagctggctgacaatgccaaacgtcgagagagtagcttgaagaagattccaactttttctcgaaagaaaactctagattttaaagattattctcacttgtccttcgatgagatgactttaggtattgcttagcttgaggaccaagttagacatttaagagaaaaactaaccagactggaggagaaagtgctgccgatgtcactttttatcatggtttatgttttgatgccatcaactgttcttggtcacccaatggaggagcataggcattcaactgggcggccttcccttagaccaaagtcccattcattataaggcagtgtgagcagcactttaatgatgatgctcttcaaagatttgactttaacttgaatgatgatgagttcatggtcaaagaggctgcaagggttaaaggctacaacctcgagaatcctgacattcctcctcctattgatgcaccagctacaaggagtgaagaacaagctgaagctgttattgacatagaaagcttcttgacttcataggatattgtcttagtccaattttcatttctgtattagcttttagctttagtatgttagttggttgtcccgagtggcctttcaatgtggctaagccttagtaaaatgttctcagaatagtttgcattaaattagaaattattctaacttagggtgtgtttggaagtaactgtgtaattactaggtagggtaattactagggtagtaattacacagttttgtaattacaatatattttaaaatgcaaggtgtgtttcgatatgaggtggtaattacatatgaattcctgatatcgtgtttggcaaaataattagtaattatatggaaaaataatattttttaatagctaatgtttaatatggaaagtttttagtaattacacaatgtaattacattcaattccatgagaattggagagtgtaattggaacccctcaattgcttcaaattacacagttacagtgtaattacatggtcagacaaacatgccaaattgtctaattacctctaattacacacaaatctaattacattgtggctttccaaa

SEQ ID NO: 304685 - DNA, 2157 bp, Cannabis indica
ttaataaagaaaaaaaaattatatatataataatgtgtgatatcataattatagcatttttaaaatgtattataccattggagtgtttttagaagcaaaagtgccaaaaataatatggaagaaaaataaaataaaatattatattttggatgatgtgaaaatatagagcatcttcaaaaaatgctaccattggagatgctctaacagtccaaagaataaatctattgagtcatgttgaactataacttgttcatcacacaacttgtgttgaacactttgaagcaatgagtgaacgactcgagaatgatattgacttgagtcctcttgtctaatagactcatgtatctttgcctcatgcattagcgcaatcatgtgcaatgcatgagttcttacagaggcactacttagtaaagaaaaatgatgtggttctcacaaacaaacatcatattcagattatatttctatttaaagaaatatacatcattcaatttttcaattgctagtaaagcattaagggagtttcgcatagtagatatttttaaaaataaataaagtaacataatgattatgcatgaataataaatatcaatttagaattattataaacgtgatgcatgagcgcatacaagtaaaactcataaaatcttgcttaagttaatccacgataaaactctttaacaattgatcgccgctttagggccggtatcgagtcaatttcattaagcctatgagacaattttcatctttattttgaaacttaaatatctcatattttcttttccaaatataaagtatcactttttgaccaagttaacaactaacaactagggcctcccctgaggtgagacgaaggaggcgaccgccttaggcccccaccacttagggcccccatttcgaaaaataaaataaaataaagttagtagtaaaataaataataatactcttaatactaagtatgtgttgtagcctagtggtaatttgattagtttaacaattaaaagattgagagttcaaatcccaacaaccttacttttttattgggctccaatttttatttttgcctaaggcccaaattagcaagtaaatcgacatggtgcttaactttaagaagatattcaattaaagaaagtgaacctttcttgagatcttggagtttggttcgaaactccaaagatcttagctgagacttacagagtaagtattgctccagggtattctagatctgtcgagaagaatcacatccgaccatttttacaagaaaactttttgacactgatgaaatgagccaagatacaagaagctgatcctaaacctcccaatccataaatgcaggattctatatcgaagaggcacataaagattatgcttgaactacacgacattatcatcaccaactttggctttattccttacaattgcagcatcgttcaaggttgcttgagtagcattaggattggaagcagtcgctatattcgccgttaacatcaggaagtgctttgataccatggtgaaacattttttttatttgaaagagaagaaaaaaaaaaggatattgcaaagaaagagatttttctcatgaaaatgaatataacaacaatatttatacaatgtataattagttagagctaaaacaatatatctgtagactagttatgacaaaaactaacaatgtttaactaattttaactaaattcaaacagctaaataacaactgtgttaaaaaacacgtagattattcttttgttaaagcttgtgagaatttaattaggttgagagtgtttaggggttctagctaaacatttaattataaatatataataaataaataagtcagggcttataatataatgcgtaataaataattataaacttaatataaatattgtaaataaacgtaattatagcataatatgtatgtaaatgaacgtaattatagcataatatatatatgtaaatgaacgtaattatagcataatatatatatatatattataagcagaaattatatgtatatattgctaaatacgcatataagtataaatatatgtatagaatatgtaacacacaaatttaagtagttcggcagaaaatcatttgcctacgtctacggtagcatttaagctgtattaagttttattaataaaatggagatttaca

SEQ ID NO: 304686 - DNA, 2783 bp, Cannabis indica
ctatataataatatagttctattaagtacgtaattaaattaatttcatcattttacccttctggggtcataattactataatgcccatggctcaccaacggggtcttaacacataattaatcaaataaattctcatatattgaactatataataatataattcctcaattatttataattatctaattagggttttgctcatccacttctaatttctagggtattacaatcacctttttttatccatgttaaatgtaaacctaaagaacacaaaggatacaaagaaagagaaataagaaaatataatagattaacaataatcatatacgagcaataaaatgtaattgccaatccacaccacaaacacacgaaaaaaaaattgccacaacgtgggataaacagttagttcacccactaaaaacacaaataattaaaaatagcaatacaatataacaaaataaagaaaatgataacaaaaataactagttcaaaatcaaaacagaaatcaagcaaaatacaaaaacaataaaaattaacaaaatattaaattataaattaaaaacaacaaatactattagataaaaataaaacttgttttatttaaaaaaaaatatatctacaatgaaaccagttcataaagaataaacaaaaccaaacaaaaaataagcgaacactttgcaaattcatcaaaaataaaataaataaataaataaaaacctaaaaatttcatggtgctataaataatgaagatctgcaaaatccaaacaataaacacaaacttaagacaaaaataaactaaataatacagtgatcaaccaataaactagaaaaaaatgacacagaacacataatcaaaacaccaaaacaagcaaaaatcaccaccgatcattccaaaaacatcataaacaatcaaagatataaacaaaaaacaaaataaaacactctaagctctaaactaaaaaattaccacaaaaacttacaagaaaatattcaaacaccttagttcgaacaacagaaattgctccaacaatccaaaaatacgaacaagtaccaatccgaagaatcagcagctatcgcacggaaggaaaaaaaaattgaagaagctgaagaagaagagacgaaactaaaaatgaaaccttaagataaatgagagaaaaaggaaacaaaaataaagaaaataagatgaaaatggttgatagattgaagggataggaaaatagtggtgaggtggtaggtgcatgctaaaagtaaactattgctactgtagcttactttaaaaataatattaaaaaaataaaaaaacaaaaaaaagataaaatatggaattttgaaaaatatttacaaaatataacaataataaaacccatataattattcatggtggacaggagttggggtcaattgtgccagagcggggaatccgtcaaggagactctttgtccccttatttgtttctaatttgtgctgaaggcttctcctctttgataagaaaatttgagcgggatggaaagattaaaggctgtaaggttgccaatggtgctccgatcatatctcacatgctatttgcggatgatagctatgtttattgtcgtgctaatgagagagaggctttgaatgttttacaattgttacagcctcatgacaacaagttaacttcagcaagtcctctgtcttttttagcactaatgttcctagtgatattcaaaatcggttgtgtggtttgctaagaatgggattggcgtatgaggatagtacttaccttggtcttccttgtgccatgggtagaaacaaagatgatattttaggcttcttaaaagacaaaatgtagaaacgtattcagagttgggaaggccggtttttgtctacaactggtcgaaaaattttgctaaaaattgtggcccaagctttgcctagttttgccatgtctgtgtttatattgcctttgatgacctgctcaatacaccctaattgttaactgatgataatccatgtgttgtttcaacacattttgcattggccaattgtaaaatttcccaacttatgaaacccgattgtagacaatgggacatggagtttgtttcagatttgtttgaaccttgagatattgagcttattaagcaggttcctttgagtactaatgtgctggaagacaattggttttggaacaaggagcctactagtttttattcagttaaaagttcctatcatcatcttcaaaactgtcaatggtaattggagctctaatatggaagttgatttctagaaggtgttgtggaagattaaagtccctcctaaggtgcttcattttgtttagaaagttcattcgggttgcttgccaactcgttctcaactccatcccaaacatgtccctgtggtgcttcattgtgttttctgcaatacaagaaaggaataaggggtgaaaatcgatcggttatggtcggtttttacaattttataatcgaccagtcggttacggtttttattttatgaagaccgtaaccaaccgtttagaaattataaccgtataaaactgatcgtacggtttttggcagttttggacggtttttggtagtttttggcggtttatggcaattttggcagttttttagtttaactattttttattttgaaaatcgaaaccgactgctgtgtcaaaaaaaatcaaaatcgaaaccgacagccgtgtccaaaaaactaaaaccgaaaccgaccgccaaattcagtgatgacgtggaactgaaaatttagttacggtctggtcggtttgatggtcggtttcagtt

SEQ ID NO: 304687 - DNA, 2018 bp, Cannabis indica
tatttcattcgtgcttaattcttaaaattgcttgattactaattatttattttatgattttaatgtaaaatctgaaaagtgagttttaattatgttatagtataatagacatagatttagatattggataagagtacctgtatagtctatgtagcatttaggattttcatgtttaaggaaaattgtatgactaatttatcacaaaagtataggactttaccatacaatttaaattctatatatcctaataagaatatagattgaaatagttaattgactatcacatagaaattggaacaataacttgattgtattagaccatgggagattgatacaaatgaaattaactgtcctaagattgatcattgttattcgttctcgctttaattgtttttttttttaattaagttttcttaatttaaaaaattcttacaaattattgccacgaaataaaattaggttttgaattatttggtacttcactacagtccttgtgggaacgatactctactttcacaattattacttgtaaatgatacgtggacttgcgtattagaatttccacaacacattataaagttaatcatgctaggaacatttagatacactactatgtagctaacacagaaaagccttatttccactgttctaccaatgacaaatgctagaccaaaataatgtgtttatgtaaaggaagttagttatgttcgttgattggtttagttagttataactcttgtacaacaacaacttttggttacagaattttagcttttaaccattgtatataagcatgtattcttacattcaataacaataggacaattctttttgtcttctttttcaagctctttctctctacctttctttctctctatcttcaacaattgtgatagacaatgctaacaataatattgctcaaagtcatttcaacaataaataatgaatatggccactattggtgttggtaatgcttcctccactttccctatagctcaaccaaatttctccaccattggaccaagaaatcaaactcacaagaatgatcaatctaaatctcccatatacttcaatcatacactcccagttaagcttaatgatcacaactttctactttggaaacagtagatcttggctgcaattcaaggaaattggctgtataaattcatttaagatgttgctctccacctcaatttctcattgatcttaatgaaactacttagattttcaatctacagtacctgcgttgggaggttcaacatcagtttcttgtgtcatggcttatgtcctctatgaatgagagtctgctcacactcatggtaggatgtcacagtgctctacaaatctcgaatgcattggagaaacacttcactctttaagtctcttctaagattcttaagttttgaactaaactttagaatctcagaaaaggttccttgtctctcagttaatatttgctaaagattaaacaacatgttgtcctattagcatttgttagtgaagtcctctcagctcgagatcacattgtcgcaatctttaaatgagtgttgaatgaatatgatacctttatcatatcatccaatactcgaatagaatgacacttagtaaaaaaattaaggctcttctccttgtttcaaaatctaaaattgacaagactaaaaagaagttgaacccatcatcaatcttgatgttgctaacttcaaaccaagtcctaaaacttagtggcaataggaataagtcttgctcaccttatcaggaatttcaagaatttaggagtacaaagaggttaattctactttaattaccaaaattttcaccttttaattcctttggattccatgctaatcgaggctcgtattcttgcaatatgtcacaatttggatcatcttcttataattctaaaagaggtacctcgaatgttgcatgaggtgtaagactttctaccacgcttagggataggttagatttaattagcattaaaataataaaaaaataaagtggcaaaatccatcccaagt

SEQ ID NO: 304688 - DNA, 5532 bp, Cannabis indica
actcagttacatctaagctcgataatggcagagcaggtagacaagtgggtgttacaacaacaacgaggaggagaagaagaaggaacaataatagtaatggcggaggattgtgtgtgaagcttactggttcggttttaggtggaagcgatgaaagtagattgggttttggaggagctggtgcttctacttcacgagatcataatgatgatgatggtggtggtcggactcggaggattgatcgtgaaaaaggtctcattttgggggcagagagagatgattctggctctgttgttgggtttaatttgatccctcattctggtatgtttctgtgtttgtttgtgtattttgtaggtttttttttttttttcatgttttcaactttgtataatacatttccaatttccaaatacaataaagaaaaaaactttcttttcttgggaagatttttatatatttatgtatatatggtcaagggtgctttagtttgttatgtaataaaatattgtaaaaagaactgttgaaaatggaatagattaggcttttgacaaattatgattagttttgttgaacaagtatttagcttttttggttgtattgaaagtttaaacctataatttacagttgtaagcagacccagattattaaattgcaaaagaataaaacaaaatgttcaatagaagattctttttcttaataggttgtggcacatatgataattaaggacagtgaaggctttctttgcaataatgttattaggatatgttccatgtggtctacaatgtctactgttgccaacttaagtattgataacttgtccacttagtttattaaattgtgtgaccaagttatgttaacaagctcaataattgactgtagatgactcccttgcaaatgcaatttctgatgaagtaaaacaagctgaggacattgatggagtggagaaaccacataccaaaacaacctacaatattgtctttgttactgctgaagcagctccttattcaaagacaggtggcttaggagatgtttgtggttctttgcctattgtacttgcttctcgtggccaccgtgtcatggttgtttctcctagatatcaaaatggtactgctgcagacaagaactttgatggtgctgtcgatactggtgctcgtgctaatgtattatgctttgaaggagtgcaagaagttggttttttccatgagtacaaggaaggtgttgactgggtaagaactctgatttatttatatcaaagctgtttctttgtttgttttgggagattgtgttttatcacgatgaactctttccttccttgcttcaggtgtttgtggatcatccagcatatcacaggcctggaaatccttatggagatgtgtatggtgcttttggtgataaccaggtatgcttattgttattatctttagcttagtaggcaaaaatactgttttgttcaccattaacaacgagctgtattctgatttggttttacagtttcggttcactttactttgccatgcagcatgtgaagctccattggtgattccattgggaggtttcacctacggggagaaaagtattttcctcgtcaatgactggcatgcaggacttgttccagtgtatgtttttattaattttgcaatttttacatctacttcttactgtatgttcttaatgtgtaagtaatgtgtttcaaggagcactctattcccttaagattaatttgtgactcctcaataaaattagcctttggtggagtgttaaccattacttgaattctggtgtgtaggcttttggcagcaaaatatagaccatatggagtttacaaggatgctcggagtattctcgtaatccataacctggcacatcaggtgaattgtttcttcttcttcttcttcttaaaaaaattttacaactcaaaacacatgacaatgtcagaactcagaacattacatgcttttctgcataattagtatgagattaaataaaagaaggttcttaaaccagaagagactaggggtagaggttcatctggtgatcgatagtatacttctgataaacaaatgcttaactgcttctactggaattgtgagaccaacttcatttttaattcatgtgatgagagcaaaaaggttttgttccgattaatttgataattattcttaaaaggaaagcagaatgtgatgtctgaagttgtagtgaaatctgaagctagatagattatagttcatgaaattgaccttgtgataatgaagctgtttatatgtcttgtgcaagcgtgattatgttcctattatttatcttttctcttacattagggagtcgaacctgcaataacatacaagaatttgggacttcctgcggagtggtatggagcattgggatgggtgtttccagaatgggcaaggacccatgctctcgacactggtgaagctgtcaacattctaaagggtgcagttgtgacatctgatcggatactgacagtcagcaaggtttcttttcctccactgaaatgatatttcgattattattatcattgactgcaaaaactagaaatacgcatttaattgatttcattgtttgatgctctaattgtgaaaaggtgattgaaatctaagactcttttataaaacatggtacagattttcaattgaatagggaactatttgtgtgttactttatacttaagtagctgcatttcttttaatattttgttataattttacagggatatgcttgggagatcactactgttgaaggtggctatggtctacaagatctgttaagcagccgaaagagtgttcttaacggtatatctgttgaaattagttgtagatgagtggcatgcttagaaaaatgactgatacaaatttatgaatattatgaaaaattaatggtatttgttttttccttttacattaataggtatcacaaatggaattgatgatgttgattggaacccgtctacagatcgccacatcccaaaccattattccgctgaggatctttctggcaaggtagcaaaattcttttgttttgaaaggaaaaaagatagtattgttacaaaacagaaatcttacaccgcctcgtgttagtgatgtgtaggtccaatgcaaggttgctttgcagaaggagttaggtcttcctgttaggcctgattgtccattggtaagaaacgaattcctactaaacccatgactggtggtagctggagaatgtgattgcatcccattatccatttggtttcgatttatgtagattggattcattgggagattggattaccaaaaaggtatagacgtgattcagcaagctattccagagctcatgcaggacgatgtacaattcgtaagttcttaatttttttttctttgggaaggggaaaggttttattggagaaccactttactttgtttgaacaaggagaagaaccatcttgattacactctactttttgtgcttccattcatatatcaacaagtgtagatcactggagttgcttcacaaattgttgttatgaaagtttttatgaatctaaaaaactccttattctctttctcactagttagttttttaatgtagttatctatttatttagttacattgttgtgatttcttccaaggggtaagtaaggacaacaaacaactgaagttatctagcatgttgcaggttatgctgggttctggaaattcactgtatgaagaatggatgagggaagcagaatcatcttataatgacaaatttcggggttgggttggatttaatgtcccgatttcacataggataactgcagggtaattttcatttctgtttttgagtactattacatatcccaagtataatccaatagaaattcttttataagcagtgttgagtggaaaataagttgtagtctttcaatttgcccaaatgcaacatttccatgaaaaaaattcgcgagattcactaatttagattgcaactcggttgccatattttatagatacgcaaaacttgggatgtgactctttatttcactatttaaacataatgaaatatgttcatgggactgactgattcttgatctggttgctcagctgtgatatactgctgatgccttcgagatttgagccctgtggcttgaatcaattgtatgcgatgagatatggaactatcccggtagttcatggcaccggagggcttagagtaagtccattaaacatttaacaatttagctaagtgttttattcttcttggtgatattttttttcatactatttattttgcttcaggatactgttgagactttcaatccatatactccggacgggggagaaggcaccgggtacataatttcccttaaactcctacactttcatacatgagaatccttagagaagcaaaaggctttgtattttaaataagaaaaaattaccaataacttttgctgcttggattcttatttacaaccatactgaattgtatttacaggtggacattttctccactagccaaagatgagatgttggcggtatgttattttattatgcttaaataaccgttattaacattttacttgagagtgttaaaatggttgagaagaaatgttgcttatttgttaatctttggcaggcattaagaacggctattcggacttacagagagcacaagtcttcttgggatggattgataaaaagaggtatgcagaaggacttcacatgggaaactgctgcagaacaatacgagcaggttttcgaatgggccaccgttgacccaccttatgtcggttgagccacaaggcgatgagaaaaaaatggttacacgagtaaaaccgatcctggtaatggctgaagtaggcgatactttttgttgatcataaatccagctgctgcataaaacagattaagtgttgcccttgatgcttaggtagttaagtcgttaccataattttgattcatcttcttttgattagtgattctgctatttaaactgtcattagactaactgctcttatgacctttgtgttacaaaaaagctactgtaaaatgttgttttacaatgattggaaaatgggaatgtccatattttgtgttgttgagccaagtatgccattggatttttgatattgtgactaaacttcactgtttatctttcagatgtttgatgtggaaagagttaattttatttgatgatatcaattggacgcatttattactagtgacccatttctgatattagtcctttaagttttgaatttgtaagtgctaaaaacttgataacttttttagtaactaagtacctaaaattgtaattttcttctaattctgttattagactttatatttgtcttaaattccagttagagcagtgtttagagtcacaaacttaaagatgaagggttttaaattatgagataattacttaaggtattattttttgtaaataagttatatttttacgtttatagaatttcttttacatttttacaattttctataaaacgatacgaaaacaagaaaattatataaaattaatatgaaaataatattaaaacaaca

SEQ ID NO: 304689 - DNA, 1675 bp, Cannabis indica
cacataaaaaaatactaaacaccactagtacctattacaatctcttaaattttaattgataataaattaataattaactacatatgttcattatattgattgattgttgtatagatataattaattaaaaagtattatttttgggtatcagtggtgctcaataccttttatataggtgggactctattattagttagcgataatctctaaaaattattttcttaagttatatttgatccgatacataattataccaataacagtatggtactgaaaaaaaatcctagacagtagataccagtaatgtctttttgacaattctcttaattaactacataactttcatggtatgttttcaggaactagaaggaaggtcgatgagggtgagcttagccgaagggaaacgttcatgagaaaaatcagaaaaggagaaagaaaaacaaagcaaaacaaaaatggggatgaatgcatagccatctagatagatcacttgagagaattgaacagctacttacttggattggattgaattgcctttttttctcatcatattatttcttgttgtgtataactcatcatcatcatttttcaactaattctgcatagtcttatattatcttctatttaatatatattgttgatcattaacagtagaaatttaattttattacagcagcaggtcccctttttttttttttctttcaataattaatttaaatttttagaattaactaattgttaccatgttaattattattatatatgtatgttttttcctggtgagaatgtgtaaaagtctacaatgtcaatatcattttttcatgaagcatattaataaatcaaattgagtatcttttattctcttatatattttaaaattaatgctcattattaatattaattatgtacaagacaagagtattaagaaacatttgtaaggaaaatgacatatgtttagtcgtttaaaaaaaagcttagagataactaataatatatctaaaaaaatacattatgtttgattgctctctaagtcttatttataatatatgaaaaaccacaaagatagccacaacacgttttcacaataagaactaatttaaatcacattttacaatgacaaatcggaaaactttgcaaataagtcaaaaattacaatttaaactttaatacttaccataaagactatacaatctgctatattcatagcaaaattaaaaaaaaaaaacacaactagcgaaagggaaagttaatttttttaaaaaataactcatttaattaaacttttcacaaacaaaaaaatcctaaataaaaaataaaaaccatataaatgaaatttcacacaaaaaatatatttaattcatattaaatattcacaacaaattaaataatattttaacaagtaaattaaaaaaaaagttaaacagaggtcttagaaatgtcttaatgtagggatatgattttgtcccgtgatgtactttcacggaatgtattccgtagtacattagataggtctcagggtacattaaatgagtgtcaggtacgtttctaatttttaaccctaattactcctagaacaatctcagccgtcagatcaaataactctctcatctgacggcttccgtacatcacagattacaaaccgtaaaagtacaataataggacaaaatcatatccc

SEQ ID NO: 304690 - DNA, 3800 bp, Cannabis indica
tttgtgaaataatcccaataaatttatgtttgatcctttaaaagactaacttaatgattactctcgaggtacatataattttaatgatgtcatttaatcttacacaaaaaaatcctacaaacaaaatccaaaattttaccttcaatgaaatacactcaaaatacaaaaccacataatttgtttttaagtttaaatcttattattaaaatagtaaacattagactcgcccaataatccttaaatgaaaaatattgtgaaattagtaaaacaacaaacaattcttcataaagagtaaaaataaaactaaaaaaaattaaaaatgaaaacttccatcttttgcatttatattgttatgatgttgtttaaggaaacattgataaagataagtcaataatcatcattagtacatatgacttatcaaaattgccagaataccattaatccaaagcaaagttctaaagagaataaagtgttctatagggaaattaaaaagaagctgtacacttatggccataatatatctaaacccccccaaaatgaagaagaagaaaaacaacgagtcaatagttgtcataacccgaaaaaaggattcaacaccgagtgcattctggcctttcgaaaaccatagcttatgtcctctaaacctgaaatagacaatgcagttgagattgtgaattaccaaaaaatcgaatgatgaaagaaacaaaatgagatgtaaagcaaaactaaaatctatttgagcaaccgagagcagaactcaattccatgttattcttctccattatagtttcaagactaacaaatatgcatgcgaatcaaacttacaaaaaacttaaagatgctttgactattgttcgaaagaatcagcaacgatcatgatagaataagaatcctttttaaggggtgagtgtccattgtatgtcgatcaaacatttgtattctccccaaatgaagaaacattatcaaccattaatcattcaaaacgagtaacgaaagggggaacaccataatttttaaacatcatcgtcatttctactaggtattccgaatgtaattcatggtgttaataaaaacttcacagaaatatcgtctcattctttaatggtacttgcacacttttcacataaaaacactagacatgcctatcacacaatgcttttaaatttagaggaaccatcttaaatttaaatgaatttgattagaacatatggaaacacgcatcttacaaatcataagagaaaaatattccaaccaatgcaaaacaatttttttcagtagtgatggggaattaccttatcgggttgacttaacatgaacttcaataaggtcatcatcctccattcccaaagctgcaggagttgattctggacctactgtatcaccgtcaaaacgaaatgctagagtctgtcggtcaagcttaactttatcggcatataatttgaatagcctctcgaacttatcatcctacacatttgaagtacttaaattactcaataatataaaacaggaaactcaaattctatttttgggatatgtataatggaaaattgcaactgtaaggaaataaaataaaacaagctcagcttaaccagacataaattaaacaaagcattctaaaatgcaaaatcatggatcaagttcttgcacgcatagagaatggtttgatgatgactgagaagtggggaaccccaagtgtagatccaagcttaaagccactacgtgagtaccatataaagttctatttatactgaagaaaattgcagtagccaacacaagtttgaaggcgctaagttttgccagctgaatcctgaatgtttcagctttaatcttagtttgcgttcattgaaaagcctacacaagttccaggcctcaaggatgccatttctatcagctccctgaattctctcaaagtgcgataaaaacttaatgcttctatattaagaaaaccataaaattgccaaaatccaaagcacaaactttgaccaataattagaaaaataagttatcatgtataagagtacaaacaaatcagggtcacaattttctaagagaatataccatgtatatacgaaattgcttgagtccatctttgtcctggatagaaataactattttagctctttcagcacatggttttgaaggtggctttgggttatcttcagcagcagcatccaaagaaagctgcaatgatttactgagctcttgcttagcagactcttctatagctttcagtacatcttgggttgattgagcaaatgatactagctctttattctttaatctgcatgcacaagggcatttgatcagaaaaaaaatgtggtgaagctcaggaaaacaatttaacagtagccgaaacagaatggtacttcaatttattatatgctagcacaccatactaatcctaaagcctaacagaatggtacttaaattgaaactgtctaaactgtgagcacattaaatgaagcaacataacaagtaacagttcaaaaactatttaattcagatataataaaaaggaaagttgtcaatctgttttgataagagatctgtatacttggaaggtttagcccgagctaacacattattttagggataataagaagaaagctaaattattttttatacctcaactctttaatggtggaattctcagcaagaatcctagcattgcgagaaattttgggtggaggcggaagccagtcctcattttccttttcttcactatcaagtatatcaactactttcccatttctcaccaccttctcaacctgataccatatgcttcaaactgtcaaaaaaaaaaaaggacagagagagagaagtccatttcaaaccactcctctcccaatcaatcctacttccatgtattcacaaacagagaagaaagtcattacctcaaccttcctcctttttggagaagctggacagggactcaactcatcatctgtaagtaaaatttcaagcatcaattttttattttcatttcatttcaaaatcttaatcaagtaatagtttcaaagtcccaataagaaatactactccttcaagtagaaactatcaaatttcacttatttccccaaaaccaaatccaacactaatcactattacatgaaactaatcaaaaacgattcaagcttcaatctttctaatcaaccctaacaaaaaaaaaaaaaaaaccattacaaatttaaaatagatagttagggttaaaactcaccgtcatcgaggcaaacgaaattgtgtggttgaatacgcctgtaatcgaacaatggctctaattcttcggtaaaatcatcctacaaaacaaagaattaagacccataagaacaagaaaagagaaattgaagaatgaaattcaaaaaccctagcttttctgaattcttaccattatgattgaaaggtttctcaattcgaaaaatagcgccgaaacccttgagctgaattgggaaactcaaaataaaataaacagttttggtttgacttggttgagaagatttaatcccattcggcaatttggttgggccttcgtgggcctgttttattttattgggctttttttttggaataattacataaagcactattttttgtaaaatatttacatttttacgctcaaagaatgtttttttacatttttacagtttcccaaaaaataacacgaaaacaatataaaattaataagaaaacaacataaaagtaacatcaaaataacaacaaaaaaataacaaaaaataacataaaaaaaaaaaaaaattaacaacaaataaacaaaatttcaacataaaaagaccgtattttat

SEQ ID NO: 304691 - DNA, 1147 bp, Cannabis indica
tttttttttatttattataacaattaaggagaaaagtaaaactaatatactgatattaaatttaattgttattgtatatgagtaagatgagaactacaaatcaagatcttttgcctaaaaatcttgtactaatttacgtgagactttattaattaatatggacaatttatctcagagaactgagaagttttgcaaataataattaataatatgacaacatctctcttatttggtgtattaatgaatataataagttgccataattaagtaatattaatgtctgtgtttgtgaacttatatatagatgcatgattttaaccaacagaaactttttatggctaaaatgtacgtcaaagtcctaacataaatattatataatcccatttatatatataattaaacttggtgatcaagtcatcatcttcattgtcactacgtatatatatggtgttccaattatgcattaaataccaaacacagcgtagtaatggaaatgatagatcagaaagggaaatgtattatttgaaacgctctatggtagttacatatagtgaatcagcagaatgtgatatgctcctttttatttattattacaaataaaaagaaataataattaaagttggttttggtacagttagaaaggagaataagaaggggctgatcacctcacgtgaaatcctgtcccggtaagtagagttgtacctatattattaggggcctaaaatgaccttttctttttattattattattattattattattattttcacattcttttaattaattttttactaagctcaaataaaaataacataaaaataatgtttaaactatatattataaatataaaataacataaaattaaatgtgtaaacaacatattataatgtctatttttgtaaaataaaaaattaaatttgtaaaattattgaacaattatacattcatatattgtaataattgtctttttgggtatttacaaaaaattagtgcatcaattttactttaaccgttaaccgataagtgtatttaacttttcacttaaaaaaaattataatttaattcttgtttatttttatataattgtatatacagtagaacatctatttaagaatactctattcaagaataacctctaatttgtta

SEQ ID NO: 304692 - DNA, 4066 bp, Cannabis indica
gatgaaaattgttataaaaatctttgtacatgaaagtaaaagggaaggtgagaggtttttgatgtaattggttcttattcttgaagtaattcatcaagactcgtttggtacgccgtataaaagtcgtattatattaaataacaaataacactatgtttggataaaataatgtattgtattaattattacgaccaaaatttgtaatacaatgtatgttgtattatttaatacataacaaatggtcagtattataatatttacaaaggatttggggtcagcacaaatctttgacccaaactcgaattcaagacccggaccctgaaccaggacccgaggccaggacctggacccagactcggacccagacagggacttgaacccagactcaaacttggacccgggaccaagacccgggacctggaccgagagccggacccgggacccgaggcccaaacttggatcgagaccagagacctggacccggacctggacctgaactcggaccccgacccgaacttggacccggacccgaactcagaccccgaccaaaacctagacccgacctcggaccccgaccccgactcgaacccggacgcaggagccggactcgtagttggtgttggggtcgagtgtattgaaaatatattataactttacacgatcaatatttaatacaagtcaataccaaacattgtattgtattaaataatgctaatacaatacaatacaatacaatgtgattcaatacgacgcactaaacgagccttcaaattgttaatttatccacacaaaaaaaatacttttaattttagttattttttctaataacacggtaaaaaaaatatgattttcatacgttaaaacgaccccttaaaaagtagattgccataatataactcttctcaaatgattatgagtctcactaactttttttattaatctttctttttagaaaagaaaagtgaaaatagaaagttttttaatattacaaaaaactatgaatgttgtgcacgttttatatttaataaataaaaagggaccaaacaaaggaaaaagacagtgaatggaatttgattattaccgttcacaaaataaatcaaaaagataagaacccatagaataataaaacaccgaaccatatcattgtaatcaaaataaaactatggccaccccacataaatttctctaaatttaaacaattaaaaataattattgtccaataatatttatttatttctttccaatatataacagacaatacaaagataacagtgttaacatgtgattgtgatccttaaattaaatcactgcacaaaagattaaaagtaatgattattattttttaaataattaaaaggaaaaaaaaaaaaagacctagaatggttgcttggagaagtgaagcttggcattaattaatgaattaataatatattaagcagccaacatcatcctcacgaattcttcgtaattgataagaccatcaccgtctaaatcagcttctctgatcatttgatctaattcttcatcttttaatctctccccaagatttatcataacatgccttaactgcaaaccacaacacaataattcaattaagaaatatatatattgctcatagtttaatttttcttctatttacatgatatataaatacgagtaaaaataattaatattgcattcaaacatctgtgtgaattgactatttataaattagcatgtacgtaaagggtgacagtactacttacaattaaatattcagttaatgcttattatttaataataatgatttatttttatgagaattaaagtcaactaattggtatatatatacgtgtgtacataaagaacgttaagaaatcaacctcagtgggcgaaatgtagccatcttgatctttgtcaaagactttgaatgcttctctgagttcatcttctgcctcagtttcctacacgtacacaaataaaactccaactcattaattagccttcataaaagtagttagatattaataattttttaataatgagaataaattaacgactattaatatatataatattcttttttgtagtcactataatatttattttattaatgtattataccttcatttttcttgccataagatccaagaactcccccaactctatggttccattgccatcgagatctacttcgttgatcatgctttgcagttcatcttctgttggatgttgatccaatgatcttatggcaatgcccaattcgtctattgtgatgcaccctattatatataaaattaataaataactaaaataaaataaactaatacgtacataacaactgtactatgaataaaagcctatacataattagttaggcatgtcaaaaagatccatttaattattagagcggatccgacggatcacaactctactatgtttatagtacattatatatgtgctaattcttttgtgttgttactgttctattaattttataatgcaaaagttttgtgttgtgaattagtaaacatattattagaaccaataatccacacaaggagagtatatggaaaggaaactataattaaatgaaagtaatatatatatatatatgtatacgtaccatctccatctttgtcgagaagacagaatgcttcttggaactcagcaagttgttgttctgttaatctttctcccattctgagtttgcagctgtattgattattatttataaatcactaccgacgcccaggctgcagagatatatgttatatatatttatatatgtagtactaatttagtgatcaatatggatagagagatatagatatcacgcaagtatatatagagctatatatatagacaattattttgaatttaattattgggaagtcatagttaacgtacagtagtcaatatttattccatttctaaacttgaaaatttcggagtgacgtaagatgcattgatctgttttttgattctactggtcaaactgattttaattcaataaatgtctgcactatttataatttcctggagtttgttagttatattactattcaaactttcaaagtcttttgtagtagaaaagccttttggtgatgaaattttgtgtggatgccattttttcagctttgttgaccttatttaaaacgtattcttattaatttttttgacgtaattttcaaacttattatacatttatatatattatatatgtggttaattaagaagacccggtataagagtcaaatatatgacgaattatatatatagatatgtgtatatatttatattatacatgtcatctttttcaaacataaataattctcatccgtggaaaaaatttcaaggtttattttagtccattttttatctttgttcttctcaaaagaaaattcaattattagccatctagataatactatcattttcaagtttcgttgtcgtttgatttgttttctacgcttgaaattttcaacggccacattcatttcttgacccatttatataactatataatgatatatcaatttataatttgtcttgatagataaattgaagaataattagcaatttttctcttttaactttcgacaatctttattttggcctctaaaatatacgacttgtaaattatatatcatttatagaaatttagtttttctcttacgtttcgtctcattattctttttatatgatgacgtgtgtctttgtcaattggcaactttacccctcattacaagaaaatgttctattaccgacggaactattaggggcggactaaatccgccggtaatagtatgattttctttaaaataaaagtaataatattgaaggaattgctttgtgcaggaattttcccggtattaaatttcaaagttattagcagcgtactattatcgacggaagtccgccgctaataacattaaataatatttaaatttattagcagcggactattaccggcggaagtccgccgctaataactattaccagcggatcctattattaccagcggacctccgcctctaatagttttttatatatatatatatcagtattcttatttgtctatctc

SEQ ID NO: 304693 - DNA, 1668 bp, Cannabis indica
tgcaaaaaaaaaaattattttgaagtgtaaaaataaaaaagtctatatttattaaagtaaaataagtgagactcgatattgaattatactaatagcgatattacacctcacaagagtgcttgccactatgaacgtcctggagcatttttcctaaaaaataatttggttggataactagaaaattttatctattaactttaaatagttcttttaacaaaagctaactttaatagtttttttgaaaagagtttttagtttttggagaaactaaagcggaatcctaaactcagccaaataagccttaaagtacgtatctccaatagtaatattttggagaatgcttgatgaagtggaaaacttaggtgacaaaatatagggatgttataccattacagataaaagaatgtcacacaatggcattgctgcaatgtttttttaatacaataaaaattaaaagtacaatatatgttatataatagtttcataagaaaaagaattatatatatgtaataatgtgtgagattataattataaattttttaaaaagtattatactattagagtgttttagaaataaagatgccaaaaataatgtagaagaaaataaaataaaatattatatatttggatgatgtgtagatatataacatcttcaaaaaatactaccattggagatgttcttatatctcttctgtcatactgactgactgcctatgtctcgctttcttatcttttttggtcaaatatcaaaaaacttttaactcttatctcttctctttaaactatggaattttaatatagatatattagagatggaaatgttacaattttagttactaaaacatgctaagttgaactcgatttataatttacacaattattcacttagtcgaacataatttattagtaaaaatatttcaataaaaaatatttatattattatcacttttttaatgttctatatttataacagactggtaacaattaaaaaaataataacaataataataaattgttaattagctctagtactagaaaaacttcgtgtttactaagagcatgtgtgattttgtgattagtctagctcacaattttgaaattaattttttcatttatgatcttgaccgatcacgaaataatacatacagttcaaatgttaacagagtgacaaatattattttaagtagtatttttttcactgaaaaaaataattaaataacgcgttatcatttaaaaacacacaactttgaaaactaaccgatctatatcttagaacacaacatacctacatagtattatacatatatatgcaaaaatatgaaaagtaaaatgtgggataaatattcattttgatatgagtacaattgatcattttgtttggaatttgtatgtagtagttgttatcaattactttcttttaatgcctcaacgtattgagtgtagttataaatacattcacgtaaatatcctaggaattatttcataaatacataaaaacagcaaaaatttacgaatgttagatggttattaattaataatttatgtccacaacatacttatgaaattttaaatatttttacaattgttttgattttatttacagaaatttaaatacagtctttttatgttgtactcttattaatttgttgttaattttttgttatttat

SEQ ID NO: 304694 - DNA, 2862 bp, Cannabis indica
atttcttcttcttcaagtgcctgaaaagagttcttcataatcgtaccagtagtctcagctgatcccttctctcgatgagcagtacctttcctgctatagactttggtaaagccctcttcatctacctgtggctgctttctattgtctatttaataatccattgttgctgtcctactgccttcttcttacactccactgcagcatgacctacaccagaacaatgtgtgcaagaaattggcttccattcatatttgactcctaccgaggtaatggagccaaattcattttcaaattctaaaaatgctggcaggttttgatccatctgaacttcaattaacactctagggaagtttagtctctccctttctttagtcacattatccaccatgattggcttccccatccgaccaactatcttaaaaagtgatctttggccccaatatttcaattccagttctttcaattgaatccagataggcacactcttcatatcatcctttttgaacgtctcatttggatcccaaggcttcattactactggccttctattaaaaatatgaagcccccattcaagacttgatccctgtcctcaattgagtgaaaacgaataatgaatatgccataggatagcaccttcactctgtcaactttgccctgccagattctatgaacaaataaaccatctaaaatatgcagaggagggtttactcctaacacatagcagacaattgatggcttccaaaaaaagatctcatcttcaatatcatctaaagtaatcctcactttattctccttatgctcagtgttcataaaagaattctcaaggttacgcacaacagaattggatcgtaaaacaagtagaattgagtttatacatgctgcaatgtcactgttacattgcttattcgcctggaggaagtgaacaaaatcactccgaacttcatcttgcctctgaatcgcctccagttaagacttcggtgagagaggaggctgacaaacatccctcagagctggaacatcctctgccagagcttcctcgtccgaaacctccagagcatcaatttctgagatctggtctatcgaaattgattgaatcgtatccctttttgatttcccccctttcttcttcaaaatcttagtggtagttttaggttttccatgaatttttgaccttgttttagccatggcaccagctagttcagctgtaagagcaagaacccagggagaaccctaattttgtataaaaaagttattattttaaaaaattctatctcatacaatatgtttttttaagagactactacaagtatttaaaaacataaacttatccaaggtgcaagtaaactacattgtagattatcatatcagttaaatcccgtgtactgataaatcattggaattcatttaataacataatcttgattactttcctctatgttgacatcacaataaataagaatatcaatgtgataagaatttggattaatttataaatcaaacaaatgatcatgagataaacatgtgaaccaaataacacattaaagaagtaataaaataaatctatttttttattgataaaggaatattcaagattacattgaaatggagttttatttagggcacaaaacctaacaccataagcggtttacaattctttagcaaattaacaaccctatggtggtcccttattttaatttctagtaaaaataagggtctccaaattaagcctattgtagtagtgcttaaagatgatcgatcattcatcatcagagcctaagtagtacctttcaagcaaaccaaaacccaattagttaagcgggaagggaagcaaagacctttcataactgggtaagcagaaatctatcttttgcaggtcgtgctcaattcattaactttgttttaataaaggttaggaacttttggatgagtttattcattttattccaaaaaaaactaccgctgccatagacaaatgttgtagagatttcttatggggtgctactcgaaatcgtagtgaattccatcttccctcttgggagaaggtttgcttcctcaaatagtttggtggaatttaattcctagaaggaaggatatagaatattgctatgaaggcaaagtttatttcagcaatttctagtaaacaattgggttaaatgagtaaataccttacagaatcatgattactggtatttgcctttcaaacaagacttgagctagtaatttaagaaattgtaattgtagctttgaagttgttgaagatcagagatgccgttaaagatagtctggaatggctgcaatggagctcaaaacttcttgccaagttacaagttacacgatcgtgtgctaatactgtttatgacttctactatatactttttgtggaataatagagataagtgtgtttttgattcttcttgtaatactgttaagagtgttagctattgggagacacaagaatgttgtaaaacctagagacttaggtttgaatttgagtagacttaagaacacggatttccatgcctttatttttaatttttcaaatgtgaaattttttagtacgtaggagtattttagcacaaatttaactaaaaataaccaacgaaatttccaatcacaaatccataacattaagcaaaagctaggttcaaacatatataatttctgttttcaaacaccataaacgaaataaacataagcacaagcactatataaagtgcaacacactgacacacagatcacacatatctttatatagtaaaaagtgcctatctaacggaatttcttggtttaacagaataagaatattctattaaatttaacgattagtttgatctcacgttaacaaataaacccaataattaa

SEQ ID NO: 304695 - DNA, 2518 bp, Cannabis indica
tgtaatttcattaaactaaaataactagtgaggattgggcaagtaaagcaaaatagcttgactataggacaagagggttaaccccaattcacatggcactaactttgtaaattaaagtataattgactaatacatgaacaattttattagcctcaccaaatacaaacgagataccaatcacattgctaaataacaacaaagatctaatctgatctagcaaacaatcaacatcacgataattgtcttcctttttttggattatttgaacagcttccaaacagtctgattcaatgctaaaccattgtatatttctctgtaatcccgtttgtaacccgagtataatggccatcaattccagttgcagcggtggatattctcgcagtaatgcagtcaaccaagcaaacaacacttcccctttatctcctctaataacacagcctatactcaagctgccattgcctttcttcacaccatcgtcgacatttattttcatcccactagactttggcaccttccaagtagaatgttccctttgagatacttcacccatgttgcattttctccctgaaaatcagcatggactactccattccaccatctcagctggttgtgggacaaaacctccatgaacaacagcaatcctactattccatacattccatgtaaaaactaagaaaaattcaaactgttctttactcaaaattgtggtctgccgcattaaaaatgcaagctcatcttcattaccatgttgctttacttttgttggagtccacaaattttttaaataatcttactaaccttacaatcccatagtgcatggaatttagattcaggaacccttttggagcacctagtgccaaaaagaactgtctaagcatgacgttttgacaaaatggtgtgagtaggaagccaagcacgaaccaatttccacacaaaaaccttaacctttggtgaaattttaagtctccataatttttgtcaccattccacaacaagatgatcatcgaattgctgtcggtcctttcttaaatcgcttgccattcaatatccactcttaactgagtatttaccattcttgatgtaatgccaaagtattttgtcttcaatttctcaccccaagtttggaattgtaaggatcatctcagcatcatcttcgttgaacatagcttgaataaattcttcgtcccaatttccatcacctgacttaagatcagctacacggatgttcaggaagtggtggcctatcatatatcttgaatgtcacttgtcgcggcaaccacgggtcatccaatactcgaacattactcccatcaccaatcctccaacattaaccttttaaaattagtttctttccccatattaaactacgtcaaacaaaggatgcatgtgttccacattttgcttagaacaaatttattagggaaatttgaagccttcaaaatacaactacaaagagcattaggataccttacacaacgccaaacttgttttgctagcaaagcctaattcaacattcccaagtcccgaagtcccattcctcctttatctttaggcttgcatagctgttcccatttacaccaatgaatcttcttatccttctaagataagcccaccaaaatcttaccgccattctatgaaaactaaaaattatccccttagtcaacgagaaacaactcatagtgtaagtcggtatagcttgaacaaccacctttataagtaactccatacttgccattgagaacattgatgttttccattcgttcaattttgccaacaccttatttttgatcatatcacttagttccttattgttacgacccacaaaggatggttgacccatgtatttcccatgagactcaacatgtcggacccccataaaattagctatctgacttctatcttcaacatcaatttgcttcccaaaacaaacctcagacttgccataattcatcacttggtctgaagcagtcgtgtaattattcagtaaattccaaaacctttgacatccttccattgttccatcaaagaaaaccaaactatcgtcagcaaagaacaaatgggacacgaagaggtcatttcttccaaacataagtccttgtaatttactccttcgctcctttgcctgaattaaacaagagaaagcctccgcatagaaaagaaagaggaatggagacaatgttttgctttgtgccctaaataaaactctatttcaatgtaatctttatcatttaattatcaataaagagacagaagtattttcatcacttatttagtgtgtcatttggttcaagttatcatttatatgtttatttgatttataaattcatccaaacccttatcacattgatattcttgtttattgtgtcgtcagcacagtggaaagtaatcaagattatgtgattaaatatatatattcctagatttatcagtatacagggtttaactgatatgataatctacaacatagtttacttgcaccttggataagtgctatatcctttccagggcattggttaaa

SEQ ID NO: 304696 - DNA, 1421 bp, Cannabis indica
gagccttaattacaacaaaaatctacatagcaactaacatagaattcacctgagaaaccaacagaaacccaaactatataaattttttttaaaaaaatagtatatttgagaatttttccaaaatatattaaaatttgagagaaaaaaatagattttgtaatatacttaaaaaatctgatgtgatttaaaatacaaaagctgatgagagtgttttccgaaagcttttgtaataattattgtgaatatatagaagctatttcaaaaattgtaaattaaaatatagatgcatgcatgcattatgagatgagttaaattgtacatagtaaatcatgatcatacgtaccacattgattttgattcttaacatcagtcacagcaccttcatttcgccaatcaacgttatctgagatatcttctaccatcaagttttcatacctgaaaccggtagaagaactcgaagagaccaaaggcatcttcaaaccagtgaagtgcctttggaattcatcttcactcaaatctgtaaatttgttgataccgaccttgtatgttcgattgggttgttggttaaagttttcgataaagttgaggttgttcttgaagatttcgaaacgtctcttcttttcgatgtcgtcggtgtaggtacgttcatactgagccatccattgctcatgcatgtcgataagggctgattcatgcaacgtgcgaagagacaatatcacttgtgaatttccccaccataatcccaatatgaactacaataaattctaaacaatacattgtggattaaactcaacacttaaattttaattgaataagttatgtatgttgtgaagaattaatcacaatttcattggtatttatagaagaatattggacaaaattttccaacataactttgacaaatgataataaaattgaatgaaaaaattccatagcgtatttggtggtgtagaacttaatttcttagttttttttttctttctttctcatgaattgttcatatatgaccatagataggtaataagaataactcactataccaaaataaatagtgagactaactctcatataattactacagaaagtaaatttttgcatggactattttctttttgtctagtatagttaatgctcttggtgtggccaagattgattattatgagaattacttaggcctctccttaattttgttggtcatatataataaaagtggtctgttcaattttattcgtgatagaatttagaaaagacctcaacaaacaaattgtttggctttttttcagtttttcaatttttaaaattgagaatagaaaacagttttttatcattttttaaaatttaatggtgtttgacacaaattttttaaaattattctaaaaaaatttcttactaaaaaaataaatattttaacaccataccat

SEQ ID NO: 304697 - DNA, 2844 bp, Cannabis indica
actttccaacgtatcatattaatattagtataattaaatatcgaattttatataatttaataaaataatttttataaaatattattaaccaattgtaagagaccatctataaatagtactagacaccacagtgtcttctaccaatgttctaaatgttgtagtagtagccttaagattaaataattgaaagtgttaactaaaatgatttgagtttaataattcaaagtttggaaaatggacaataaataattaaaatgttatatgaatgataagtaaatagaagattatgacatgtagatagtctagtcatattaattcaaccccaaaaccgcgtattaatgaagattaaccatttcagcttgattaaataatatattttttaataaatccccttctttaataattaaatatttttattcattttttgaacttttttcttgttgttggataaatttttttatgtgtttttatgagtataatggtaaaaatgtttaagagattctttttttttttgggtgatataatttagtattttaaattatagtataatatatttttatctaatttattttttatagagtaatttgcggcataaatacttaagtttaattatcgattatagataaatacttaagtttaacttttaacgataataatacttgagttatattttaaaaactttcgtacgtatctggctgttaaatatcaagctaatgaccatgtaatagtctttaattggtccatgtcattaaatttttatttttatttaaaaattaatttaaatataccaataagaaaatgacatgtggacaagactgaccctaagcataggcgggctaagcccgcgtctagggctcactcaatttaggggcccaaataaaaaaaatttatctttataataaaggtctaattttttttttttttttttttttttgtcataagacccatttcaactcagggctcgctctgcatgtggataatgactaaacactcaatgactatgtatttatggaagttttagaaatataacttagatattatcactgtcaaaaattaaacttagatatttatctacaactaagaattaaatttaagtatttaagccgcaaattaccatttttcgtattttaacataaatgaggatgaaggaacacttgaagtttgaggatgaaggaacacttccactcaatttctcactatacatttaataaaaatactcatttgatttgtataattcaaataagattaacaagtaatttatttttaatttttacatatatataaattgtgctcaagcaaataaatcacaaagaaactattcatatatacctttggacctttggtactttcattattaaaacaccatatattttctttaaattataataattaataatatatatttcaaattacacttaacaaataaaaattagcaaactcaatattttttaatttaattttgtcaaaagaaaatcaaattaaaatgagcaacaataaatatcaatacactaacaataaaaaaaaaaaacacaaccaaaagttgtttaaaactagccaaactattctaaaatctaaatattatgtacaaaaaaaaaaaaaaaaattgaaaatgaaaacagtataaaaaaattaaatatttaaaaccaaagacaacgtaaccataatagtccaactaaaaaaatatctagaataaacataaattaaaacgattttttttttcatgacaaatcattaaataaataatatattaatttaagtactgagttttgattttgacaatagtggttgaagaaaagaaaataaagtaaacattcaactgcttcttctcaatcatatgaagcttcaatttagtttataatttatttatttatttattttatgaaaataatttcaaaaaatactaccaataagtaaaaacacaaaagggccgaaagttatcagtaaagacaaaattaccgatacaaaaattgtattatcagtagcagttaaagtcaaattaataagagaatcaattactatattaacagttctcgggtaataattaaaacaaacaacattgaaatatatttacataaagttttaatatcattaagaattaaacttaaaaataaatctaacaacaatgaattattaagtttatgaactaagtttttacaatcagattcgaatggaatgttaaatactaaatgtgagagattgagaagctccatttcaaacaacaagggcctcaacctacttcaataagagaatactgtcgatcttttaaattgtcgaatttaatttatttttagcaaaagagatgactcatataataaacgagtataccaattataatgaatattattaaaactaactaaaagactaattgatgaccatttcaaagcttctaattaattttgttttattatgatatatcaattcacttgacttgaaaatgaaatcttagctagaattcaatgcccattcaataccgttaaccccacgtccaaatttggaaaaataataataatcaccttaaattacgtatgaaaattaaggagcaaaaaaaattgatattgttttctaaaacttaaacttaataagaaaagttctttcaaaaaaaaaaaacttaataagaaaatattttgccataggacttgttagacttgttaatattaataatatttcttgaaatataacttttacatacgattcttttatcatattctatttaattttatcatgaaacaagtgacgcggtaaataatagttgataaatgaatataaatttaataagttttgtcttttttaatttaataattaaaaaaaattaaaagtgaaaatataaaggggtttttttatttt

SEQ ID NO: 304698 - DNA, 1906 bp, Cannabis indica
gtatttttggaaacccttggccaaaaataccacatggccataagaccttttatttataaattccattcttccctcttatttcccaaaacatttcatcacttttttgaattttcactcaccaacattcaagaacaccatatcaccattcatctctcaaggtgtcagttagggattctcaagcagtaatcaaggtaatttttttcttttcattctttttcattcccattcatcttctcttctcctctctctcattaaattagaaactcacaaaaccctactttttcttggtgtggccgtggcactagttgggtgaagagagaagggatctttcaaattttcttcaaggatccttggaaattcaagcaattctttgagctaatttctattcttcatgctttcttggtagttttcaattgatttttcccacaattacatggatgagatgatggtggatatgaaaattaggaaaaatacttttcttcttgaatgtgtttggatatatgttgtgggagtagtgtttggatatgttttgactttatcttgaattagttatggttttggtgatgaaaatgacaatatggaagtaggattgacaattttgggcaaagattgcaaactttttggcttaagtttgggttgtggaaattaggtcccaccatgtgcttgatgaaattcttaagtgagaaaaacatgtgtttttttacattggaaaactcgaacacatgtaattttatcaaattcttggcttgattacttgtatcattgaattgtcttcgtctgagttgaatatgtggcatgttcccatgtggggattggtgtggtcgagagctctaaatgattgggtctctttgtcatagtttcttgtcacatggtccctcataatggaatcttgccacgtcatctttaatgtcaatggtcgtcttcataggcgcgccattgcttcacgtaagtgggagttgcatgtttttgagcatgtggtcgtatgggcgacttggtctacttttccatgacttttaagagtgcacttgggttccaccgaatacaataaagacacttttcccttttttccaataaatagccacattgtcatggtttcttcgggtccaaacctattttttgttttgttgaacttttctaggaacaaaaagtgagttgcgagacccaaggctatgtcgttgcgtgacaacctcgcggatatagaggaatctgccactaaccaaccttctactagtacaaagtggcctgctctacggactagggccaaacctgtgaaggtatactttgaggcgagtcgcatcacttcttcattcaaaagtatatcccaaatatgcaattatcttagtactcatgggcttagctttggtggagagcggctatggagagccccgactcccactgagcttagctattttcctccctatgagagcatattcgcgtggggcacctctttgtttatggtggggtgtgtgctaccacttgcctcttactactaggacgtccttggagccttgggactagctcccttccagctatcttccaacagttattggattctgatgggacttaaatccctgtaccacatgctagagctcggagcccgataagcctaatggtaaataattagggtttatatttatattatgggtgaataaggtaataagtggattatgatcttactaatttatttcagcataaattttaaattttgctataaatgagtaaataagcgtaaattgttaattacagatatttatatagcatgtgtgaatgtaatatgacctatatgtggaataaaattattttcaggttcggcgaccttgaagacttgataagtggataaatatgcgtaatttgttaattacggagatttatttgaaatacgtggatataatatgagttatttgtg

SEQ ID NO: 304699 - DNA, 3388 bp, Cannabis indica
taacttaaggtatttaatccgtcgaaaaaaagcatgtagtatttaagtgtataaaaccgaaaacgtatggtatttatgccgcaaatatccctaagataaataacaatccatttttcctaaaaaacattatttattattattttttaagttgggagacagaatgaaatgatatgtagcaactagtaactataactaataactaataacaactaatttactcattctaaaataaaaaaattattaattttaatgaaagaaacaatacaaagaggagcaattatatgagcaacattgcttgaaaaatcaatcaagacagcagcttctgtgcaaaaattaaaattagtaaaacttgctctatttatatcagtagtctaaatttgcccatatttcaagctcttcctttaactaatggctaatgccacctaaggttactaacctcaactttatataatgtatatgaacacataattttttagtacataaccattagctaaagaggaaaattaggttcaagcttgaaacgactttacacagaaaaatagaaaaggaaactttaaactactaaggcactcacactcctacagtaagaatttagcatcataatactaccagacctaatttcatcactttctctttggttttttacaagttctttcgatgttaggactcactgaagaagcaccactcatcttcctaggagagcaacgattctttcgccacaagtcctctctttcggttgctgctgcatgtacctcctcaaatcctctcttcatagtctgatagacttgttgtaccatagttgtggcttgagcagcagctgaagcaccagtttttgtgaatgtaccccaatcaaacttgttttggttttgtgtattgggaccattaagccctcctgttcctgcattttgaggggcggtacttttctttctcggattagatgcctttttggtagctttgcgtttatttgagttcttttgttgcttcaaagattttggtgatgctggtgacttcaagccattaggaggagttgtttctactgcaagaaattgctcatgacaatcagagcattggagcttatgatcaagataaattctgagaaatttgtattgcttcttgcaccgatggcatgctgtccaaaaaaagtagttggattttggcatctgacttgaaggtttaaagtgaactggttgaacagtacttctcaaaggctttgtgctaaattcggtacttattgtggaatgaccagccgaaagggtacttttcgggagacttgccccagattctgtactttttgtagaattcacccctggttcacaagttgaagcgggatttgagtgaccagctgaagtggtacttttgggaggacttgctttagattccatatttgttgtagaatttaaccctgactcagttgaagcaggagttggggaaaagtcaccttctgcagtggcagtttttggaggctttgccctagagcttcttctagttgctgaagtggtacacgtcggaggacttgcactagattctctttttgtggaatttaccccagccttttgagttgaagcaggaactgagtgaccttctggaggggcagttttagcgggctttgccctagagtttctaggttttgcggaataaacctctgccttgtgagttgaggaacctgcacgagtagtacttttcggttttggaggcttcgctttagatgttgtagtttttgtgagattcacccctgaagctgttgctgatgcattcccatttgtattagaaattttttgattcattattgcattcctcttttggtcaaaagctactctcttggccttatcagacaacaaagcccatgcttgtgaaataagcttaaaagcatcatcagctccaatggaattgttcttatcagggtgaagcataagagcaagcttcctatactgtttcctaacagtctcatcatctgctttttgatccacaccaagtatgctataccaatcaacttctccacttatcttgttctcagcagaaatatgtacatcgagcgttgataacattttggcgataccatcaagcccaggaaataaagtttgagccttcaaagcaaacctctttgcacccataatgtccttcgccaagaacttcttttctgcaatctcttttgccctagcagcctcatctttattacactccattttcccagtcaatcttctcgaatgcttattacagatttgttgctacagccagcaagcagcttcttgatctaaataaatacagccattccagagtgcaactccagaaattccatgttctatcatatttctattgatttaattgtcagcaaaacctattaaaaagaaatagattaaaaaaaatgaaaaaacaaacaaacattttgaatcaaactgacaagacaaagcataataaacaaacacattacagtttgaaaacagatcagctctttgatattataatttcctccacacaaccatgggataaacaacaaatgtttggagaaaactgtgtcatctaaggcaaacatttagtaaggaagaaactcttgctgctggtggccagggaagatttagagcttctcggctctataacagtaagttgcagcaaactcaggttcactaccagcatgctgtttggtgtaggttgagtgttcctaaacacagatttgtgttttggcaggctgttaacattcaacttctaactagagatctcctctctcggatttgtatcccaattgagtctctgttatgcccagttggtaggtttacaacaagagtcatgctcatctctttgttgagtgtccgctctctaaaagggaagggtgatctctctagtgttcagttggttgggtcacaaagcttggctgactgagtttattggctggataatttggcttaaattttaaaaggaaagggctgaaggagacgatagttaatgccacactgcaccagccatggtctatagcctttggattaatcgaaacagatgtatttttgatggagtttcttatactgatttgcacatagtcaaggataccaagagtgttattcaatacaggttatacaatttaaaaatttgtaattctaatatacaggaacaacaattgtatagaaaagtgatgagtgtataggtttaaagttttgtctcgaggtggctggttgtagcttccattgggaggtgtgtgatgtgttttgtaagtttggtggttgattaatgaagttcattttcttcttgatcaagataaataaataaaaaaaaaatgttaggaattcacttggaatataatgaccaaaaaaatgcaatttacaacatagtttttaggggccgtttggtatgtaggtttcatttcatgggaataggtctaacattgctaggagagtgatga

SEQ ID NO: 304700 - DNA, 3035 bp, Cannabis indica
aaatattaaataatgtaatattaaaaaaaaataaccaatccaaaataatcgattcaatctgcacttttacggattggattggatttgaattatcatgcggattaaattagattccaaaaattagctccgcactgatataatatgaacaaaatagtacgaattaaattggatgaacaccctacatatatcaatgggataaaatcacatctcacgaatttcttttctgatattaaaggttaatattgctgctcatgaattaacttaacatgctcttataacagacaataaacttttctgaatggaaggaatctcatctaatttgccttttgagattttttttttaaccttaaaaaaaactcaattttaaaattgatatttaattatagttatttttaaaaaattgccaagtaatacatattgagaaataatccatatatattttaaaagaaaatataatatagttaaatacaaatgaataccactaaaaaaaaaacaatatagttttaatagaatacaaggtatctacgatttctatttttatcataaaaaaacaactctagatggttaattaacaaacaagaaacctgaaaaagtgaaacatgtgaatgaaaaggtcagcttgtttttttttttttcataattctattgctttgttgataataagatgagcttaaaaacaaaagacaaaatgagatcaaattagaatggccgagtacaatcacaaaactcttattttcttgctcttaataggaagagaaagaggatgagttggtctcgaaatttcgtatccctcaaacacttgaaaccgatcgaaaactagtccctccaaaggcggatgagcaagaatagagtagtaagcgaataattaaagcaattgaatggcgaaaaatattttatgaacaacaaagctgaagaaagatttagcgaaaaacaaggaactatgtttacacctatttgcgccgtctgtttaccaccatatctggattgcctttcctcatcattgctacaaattcttcatagtttattctaccatcctgtaaaaaaacaattggggtctctagctttaaacacaaggtttactcgaaaaaaggaatagtatggagactgttaagagatagaacttacattgtctgtgtcaacttctgcaatgatttcctttattgttttctcatctcccatgttatactttttaagggcttgctccaattcttccattgtaatgtacctaatatcgaagaaacaacaaacgatttaacctcacctagatgtacataaacataacaatcatccgaacgattgtgggctgaccgaagttcatccaaaatttggtatgttacagatcattagataaaaaatcaacagaaaaggaatcatattttgctaataatggctttcgaggagcttacccgctcttgtccttgtcaaaatattcaaaagcagtgaataagtgttcctctctttccattctattcaagtgcatggtagctgttataaactcaatataatcaattgtaccatttccatcaacatcagcctgaaaatgacatgacaaagattagaggagaatagttgcataaatcatccaaccacacaaaataaaaggtacaaaaaatgaccacaaataagttataatacaaaatatcacaaggttctctaatctattcaagtgtaaagaagataacatgagaaatatcagctttggttcttcaattgtggaacagattcaaaacccacaacaaagaagaataaagtcaactcagtgtcataagatagattccgaaagaccagagacattaccgcttccatcaactgcctcacttcagactcagaaagcttggtaccaagttttggcaaaccggctttcaactcttcgtatgtaatagttccactattatctgtgtccatggatttaaacatttccttcaatcccatgatttcctcttcagaaagattttcagcaattacctaaagcaagaagaatggggaaaaaaatcaaaattaaaagtttaaaaccgtaatgatatgattagagaaactcgtctcaccttcaaagctacttttttgagtttattcattgctctgaactgtttcattctagtcaagacagcaatatcaagaggtttatcagatgcaacaccatcttctctcatccatggatggtctgcattgcattaaattgtattttcagtaagtggactaaatttctaaattaagccaaagaataaaactttagtacattcaataaaaaataagtgagtgataaaaaatatgggagggggagaataataagacagctgaaaaaagtatgtttattccgtcaaccttaaagactgctaaaagaatctagcctagccacttgccgttacaaattggctattcaaatgggaaccagaaatagaatgaacaacgtgaccacattataatagcttttctattgctctcagataacttcatgatataccgattttctagctcattaagatgatactattagatatttttttcttttcatatctggtgtcactacgagtacattatgtagccatagaacacatctcaattaaggcaaaactaaagaataatgaattttgtggttcacataaagagaagtgcagaaaagatttacaataacaaaaagcagctgaatttgccatctattctttcattaacttaaaacaaaattgaaccagtgggttagaatgtacttaatctctgaatgaacaaaaaaccgaaaacaagaataaaagcagtaacatttcagttccaaaaagcaaatgatcacctacataacatgcccgtttgacattcaagtttataggtatattcatgttagaataagaagcaaaaattaagaatacctatcaagcaaaatttatcataaaatctttcttcagtgtggaacctaattctatgttatctattccataatgaaatagttttgaaacttacttaggacgtcaaatgctgatagccgttctttaggatcagacaagcattttctcacagatctttagcactactagagatggaaggcc

SEQ ID NO: 304701 - DNA, 2137 bp, Cannabis indica
catgtcacgaaaatcatctataagtgaatctacactaaatgtttcagcaattttctttcaatatacactagcaaacaatcaatcaaaaattcatcttccatcttgttgcaaagtgtagtcttcattatattcatagccgaaaaagatcgttctgtagtagctgtagaaactggaagtgtaagaataagaattaccactcgatatacaagtggatagactttttctcatcttgtctttaccatccattgacataactcataaatactttccaaatctgcaaaatcaggaagttatcgcacatgatcaaaatgttgaaattgcatccttaattgtatcatctcatattcttcaaagtcttgtgagtaatacttttgtaccaacttacatatgtcatcaattatgtatgatacacgcatttctcttggatctaaagttaaactaagaatgagtaattccattgcattatcatcaaatttgttacttatttcttgcaattgagagtctatcactacattataaatatcaactttgtaataatgctttaatgtcatgccatcttgttggcgaatggcatttcctcttgcaatgtaatgagtatcaaaatttggcacatctatattaatagcttcacaaaatgttttcacctcatcaactaatttatcctatctatcttctcttaatttttgaatgagaatcttagtagatgaaacaagatccattgcatttaaaatatcttgagattgaagttgcaaagcttgacaaagcatattagaaatctctagaatttttttcataagatgcataatgaaaacaaattcataagaagttaccgcctcataagctgcatcggcatctcctcgttaagaatgtgtagtgtcatcttcaataatattcaataaaacttcacatgttgcactaaatatttttatcaagctagaaatatatttcaagtgagagctccaacgagtgtcacctgccctttgcaaagcaccaatttgattgagtcatgttccgcactcaagctcattaatctcaagtaaatgggcaatatttgctacttgagcagcttttaattggccattacgcttacatgatgcaccaataatattaacaatgaagttcaacttgttaaaaatttatggacaagaataacttccatagatgcagcaactaatgctagttgcaaacggtatgcaaaacaatgaatataataagcattaggacattcgcttgaaattaaagcttgtaaataattccattgttcacgcatattacttgcaccatcataaccttgttctctgatagattgaacatcaagagtatgattagtgaggatagaaagtataccttgtttcaatgttaaagtagtagtatctttgacatgaaaaagtccaaaaaaaatgctcttgcacataaccatcattgtaaacaaaactcaaaacaattgacatttactcctttttagattcatcttgtgcctcatcaactattatacaaaattttgcatcgccaatttcttcacgaattgtgttcctcactttatatgccaaaacgtgcaaaatttgtttttgcattgttggtgatgtatatgatgcattttgtggacctttatctaaaaattcagttgctttatcattataagaagctataaaactcaataattcaagaaagttccctcgattgctcgatgttttggactcaccgcgacctctaaaatatcacccttgaaatgcgagccacctaattgactcaattaaaagcttcaagcgaagtctattttcaacaatttcttttgatgtaaagtttgcaaactttcttgcaacatgcgtttattggttcataagatttgcacaagttttctcaacattcctatgtggtgaagtgagatcttttccgatatgtgccaaacatgagcaattacgtccatccctcacttttttccatgaccgaaatccattaatagtaaatgcatctaaactacgagacccatttttagaattaaatacaaaacatagtagacaaaatgttgcatcctgttgggttttatgccctaaataaaactcatttcaatataatcaaatttacttattaatatagatcagaaataacatttaatggtgcatggttcacatgattt

SEQ ID NO: 304702 - DNA, 3832 bp, Cannabis indica
taaaataatttccaacaacaccctcccatttccatttagggatctggagatgttgaagtaatcccgctggcccctgatattctgccttaacttgttcacaagttagacatttcaacacgtactcgactatatcacctttcatacctggccaccagtaccaacagtttatatactggcttttgaaaggggtaagtaattaatgaatttacttataatatttatatttcatatatatatatttatattatatacatttataatgacttaattttttttattattgttatggttgaagttaccactgtcttccactcgactaacactgtaaaagcacaaaccaatccaccaccgaatatttataaagtacattttgtagagaccgcataatgaaatgaggggaaaatcgcaaagtgcacatagaataaagggaaaaataacatccccaaagattcacttatcactttctttctgctgccctctccttctccccacattcctctctctcacccacatccctctcttgatgtcctctctctccccgcgtccctctctccccggatcctgctctctcccttcatatctctatctccccctgctctcctctctccccacatctctctctccccactccacttcacacacctaagccactcgctcatactcctcctctacgcaaggaaactcacattaacttgacccttagcaaaattttctaaatatttgtttcatctcttgattattatctctaaagagacaatatcaaaggaacgtgtgacaaaggaggaagtcattggaagcatgcacgcctctgaagaagtggttgtacgataggtataagtagtagaggcactctttgtcttactcaaatgaacaattgacagccgaacaccacctctacactaccagtctaacatgttaatcttcatgtaacaaaaggaattttgtcccattaattttgcgaccacatacatttcagagcctccaatgacacaagtataaataacttattttgaaatgctgtaaggggtgaagaaaaaatcagttgtaagagagctttttgaaatcaatagagtagtattttcatttccatatgagttcttgaaggatcataaacatctttattttaccttaagctcctagcatttgatttttttctaattatttagtttacaagttcttgccatcaataatttggtgtcatctatgagaagcaaaaatccatagcttcattattccccaagttattagctatagaaaaataccaaggcaatctcgttgcctgcatgatatagaaacacgtttggacaacaactagtttgttgcctttcaaagagaaccactggtgatcatcgtcggataaggtaacagagaaaaccctcaaagacaccaagacaacgagggaaactatgtacccacaacggtggtcgaagacagccacggtggagctggttaagccaatgagcagagagatagagccaccgcctcaatcacatcccctaacaaagataatcctcaggtgttatgaaggccatctttagttagatatcaaccaccttcggaaccaaaagctcctggtacctctctccacagacctgggaaggaaaattgggtatactcagtgagctcaagcacctaaactcgtccttgcctataggaaatgaacgaccttcgattgaaaaatcaaaggatggaagagacaatggcgaatttgcaataggtgttgaattttttttgattaaggggcaatctgacacacccatcattctacacaagaatagagatgcaaaacttctagatgattgttcacaacacgatggaagggtgtcccgacactccactagaaacacccctcagtcgactcaagggaagagtcccaacactaggagcgcaccgaagggcagaaagcaaaacgtcttacacatcaaaagaagatgaagaccaaggaaaactccctggatccatgagataatttcaacaaaaattatttcctacggaggtcagtaccacccgcatttggcaacactatctctacagagaaaattatgaaattattattgaccataagagtctcaaataattctttactcataaagaattaaacatgaaacagagatgatgtttgggataagccaaggattatgatcgcaagattctttatcatcctaggaaggtcaatgtagtggtagatcacctaagcaggacaggtcctaggcaggttttcagtacaactataatctcccctcaattggtggttgatcgacctaataattttacatttcaatttgatttgttagaaagaatcaaaagtgccctattggtggattttaaattaatgaaaactcgagaagaagttttagctagccaagctaaggatttcttagtgttagacaactggaggttactttataaaactaaagtttgtgttccaagcagtgtcaagctcagaagagagaccgtagatgaagcccatactactccctaatcattacatacgactttaaaattttattactaatggtgtagtatgtagaaggatgtagtagattatgtatttagatgcgcaacatggtagtagattaaggttgaacatcagagacgtgtgaggttattacagcctgtaacgcttctcgagtgaaaatgggaggatgttactatagattttgttgttggtttgcctagaactggaggtatgtttgatttcttatgggtgattgcagtttggtttactacataagtacactttttactagtggagacaacataagcagtagatctttatggtcaaatttttgtaaaagagatactttgtaggattctaatgtttattgtttcggatagaaatttgacgcttacctctaagctttaggaaagtctctagagggccatgggtacaaagctgaagttcagtaaagtttccaaccctcagtcaaatggtcagtttgaaaggacaattcagatattggagattgtgctacaagattgtatgatggatcttgaagtttcattgattgagtatatgcatttgatagagttatcatacaacaacaattattagagtactatagggatgctccttatgggatattgtgaaataataagtaacaatctccaattcattaggataagactggagaaaggaaatacttaggtctaaatttagttcagcaaacaagtgatgctataaagaagaacaaggccagaatgcttacttttaagtggatagatgagttatgtagattcaaagctcagaaacacagaaatccaaagtagaggatcatgtaatcctatgaatatcaccaatgaaaggaatgaaatgattcaaggaaaagggcaagaatatgccctagatttcgagggtctttagagctttttaagatggttggattagtgatatatagtctagctttgcctccaatattatcatcggtacacaatgtttttcatgttttatgttaaggaggtatgtttcacatctgactcatattctgagttatgaagccctagaactttaacctaacttatgatgaggatcactcagtacagatccttgataagtatgacaaagtactttagaacaagactataattttggtgaaggtactctagagaagcagtaaggtggaaaaggcaactcggaattaggttctgacatgaggactcatcatccagagttattcatattagatttcgagaacgatattcttttaatagggggataattgtaatgactgcatagttaaatcattaaaattagcaaataattaagaatttaattactaatttatgattgtgtgtttcttagtagaaattagggctcgtcgttagaaatagg

SEQ ID NO: 304703 - DNA, 1107 bp, Cannabis indica
ttgaaaacagagcaagaagtaccattaatttgaactggaatccaaggaatttaatcaatccaaggtgtaaatgaattctcacttagaaatgaattgttttttcaagttcacaattgtaacaaaagaagaaaaaggcctacggacctcatgtataagtattgccgaaagtaaagtctctgaatttgtgtcagatagattagttgtatgagcaaaaaactcaatatttcgatcataatttctcctcctttccattatataatctaaaagacacaaatatattcaaagacaaatacattataacctggaaaagatcacaattcttacttagaaatgaatcatttttctatattcataattgtaacaaaaagagaaaaaaaaaaaagaaggccaacagacctcatgtatgagtgttgtcgaaagtaaagtctctgcttcagcagttaaatgacgaggagcagcataaataaaatgaaagatatgtactacaagctctaattgtgtggcataacaatcagatcagcttatacaaagttacaaaagttaccaaaaaattgtacaccaccatcttcaccaaaaaatgaataaccatgtcaaaaaaagctccattgaaggagaatttttcttcctagcttatccatcaaaatgattatagtgactaatcctaaaaataagtaaaaaactgattggtaaagaagaagattggtaagaactagttcaggaaacatacaccaaaaagaacaaataaaaaacagatactctaaatacccaactacatagactagaaaattatgtttataagaaacaagcataaactaagaatacattccatacagctaacaatcgatatgtactttaaataaaacgaactatgaagttggaaaaatgcaaaataataaagttaccatgagaagcagctatggtagacatgatagtgaccacaatagaagcaaaagaagatactcctttaccttcaaggacactagaagctacctgtacacaaaatttgaatattcaaaatagctttaaaaaatacagttaaatgttaggctaaaattagtctaagtttcgggtcatattttcggttagttttcactctttgtttctagt

SEQ ID NO: 304704 - DNA, 1839 bp, Cannabis indica
cacaaacatgactacgactggtaacatatacactagtactatatataaagactatatatatatatatataagtatacagtattaataagtgttatgtatgtatgtaggttgaaaacgccccctgcaactcctctgtttccctccatagaaatggaagctacccactctcctcacactcgcatacctctttccacaacaaccactaccagggtacattattaacatattatctcttaattaacgtctaatttcaaactaattaaactcatcattctatttctatacataataccaaaaccatgcagtttgcagatgcaaataatattccaattattgggaaggccacatcatcatcatcatcatcatcatcatcatcatcatctgtccaaaaaccaacaccaacttcaataagttcaagttcaaatattaataataagtccaagactacaccccaactcacaactactactattaatactaatagtagaaacaagaccagaacaagaactacgaatcatcccatgaaattgaacaagaatatgaatatgcagatgagagatactactactacagctacaattacatcaaagacaaggatgaacatgaatgtgaatgtgaatgtgaatgcaatgatgtggccaaaggaaaaagctcctcctccaacagtaccagtacatcaggaaagagcaagagcaagagcaagagcaacgacgcctactaccaataacccaaatagggcagcaaggatgatgatgatgaccacacaatcctgctccccaacactctccagaccacccaacacatccaatactactactactactactactactactactgctgccttcttcaggggtagcaccatggtggataagctaatcaaggccagaagatcatcatcaacaacacctacctacatattataacacaaaccatatcatcaattaattaattacattacatacattattaatgttgatacacctgcattccaattcgttgttatatgataaagctagcccactaattaatcctcaatattaatcagtgaaaacccattaaacacatcatgtacaaacaagtattcattatctaaaagtgtagaggaaatctgataaggagttgagacaacaatgtaaccttaaaactttatacttacacagaaactcttgcaaattaattaccaccaataatccattaattagggcacgtacaaataataaatttattcaaaacagaacgccacaattatagcaatctcatcaaacatcatatattcttattaacaaaaacttaaactttcatatagttcctccaaaaattattactttttttttatagaaagttcaatatcatctggagaagcgctcgcagaagtctaacttgtctattcagaaggagtctctaggaaaagctagtcttcctccagaaaggagttctggatggccagccagcgttcattcctggaagggagttccgaatagtcgactttagcggttgctattcctattcgggaagtcctttcaacgtacgcttcagtctgtattccagggagcgtacgtctcatccagaagaactttaacttgagctgacgtggagatatttttgttacgagaaatttgttaagtttgttataaattgtaactaatttaacaacttagcattggcagctaccgactttgggatttatattcttaatttataaataccgccaacacttatcattttaaagtacgtgatttcaagacaagttttgagaggtgactttgttgttgaagactgagatcaaagagagattgagaggtaaagagagagaagtacagagaaaagagagagaga

SEQ ID NO: 304705 - DNA, 2703 bp, Cannabis indica
cacttcacagaataatctcaattaaaaaaaaaaaaaaaaaaatactaattttaaaatctcatcataacaataacaataaattcaattgagaaattaagaagaatatattgataaaagactaaacaaaatcaccttcaaattttgagtgtgagctcatccttttcaccgtagaggtagtgaagaatgtaaggggtaactcggatgacggcgacccatgatccggtcatgataacgtgtgtctggtaattaaatattaatggaatttgttttatttttattttaatattttattattttataaataatattttattattttattattttattttaatattttattttattttattattattttattttattaatattttattattttattatttctcataaaccaagaattcagttatataggcacactttatatagaatagatatgtatatatttcattattataattaattaaaatataacaattaaatgaaaattaaaattaaaaaaaataaatgtaaaaattaaaaattaaaaaaaatattaatggtgagtttggacataatcaatttcattgaatgggttactattttcttttcttttttttaattgagcaaattacacttaaatagttataacattgatttgaataaaatgaagcacaaaccgacccacgaatataataaaatactctgtcatggagattaagaaagaaattgaaatggaaagttacaataatatcaaaacattttctttacctgtaaaaatactaaaaatttactttttcaactaacactgttaagtctttcatgatatcccagctaggcttgtcatagtttacaagttcataaattcatcaaacttgtcttgacagtcagcttaagtttgcatatccccatcaaagtttaaaactttaggcttaatactgccttgaaaaatgtctttaaaaaccaaaaatgagtcccagttatcagcaattgtaagttattgagttccaaaacagtcaagaacagaaggggtaaagatttctcatcctttatttcttgttctctttttcaattttcatgaacgaagacttggttcactgaacatgctatacaaaacaagccaaccactgagagaacaccacaattatttttgcagtattgggatgaaaaggcaaagaggataatcaagagtgataacagaaagcttaattctagaatccatgctgttgatgttgtctaataagtggccaagagaaatagatgaagctacacagctaaataattgcaaaaaaaataacaacaatacttttgattacaacttgtgaaaatgaaagaagatatcaaagcatcgaactgagtttctaattattagtatagtatcaactacagatacaatgaaactttacaaaacacggagcatctgttaatgttgaggtacaaccggtcttttttccaacatctcgtaatgaagcacgaaattatcctgcaaccacatctttttaagttaaatcgaatgggctacaataaacattgtcgcgaaatcagtaaaagattccaaattcaaacctttcgggcagtttcaaatgtgttcggatcaaaacaatgataggatcctctctcgtaggtgtttgttttgacaagtggctccatgttggggactctaatgaaccacaaacggtgttccttgtgataaaaccagcctctgttataactgcaaccacatacagtttagccaactatatttttcaattgaaaagtaaatatgatgataatatcagttgaaagtgcttacagttcattagcagcatataattgggcttcatccttaggcatactacaaagtatggtaacaaaaagcagtttagtatcttaaaaaaataaaaacattccaaatactaaatagagagagaggctctaaaaaagagtagcacctgtaaaatatatagaataaagtttctactgtgaactttgcaaagtatccttgctgcaaccaccaccaaaaaaaattagtaaaaagtgtacaatgacgatgaatgaactagagaagatatggttatgaaaacagaacacacacatgtaaagaaggtggttgtttagcatagtaacattgtggcacgttgaattctggatcacccttagctggctcgtctgaccaaggagaaccaaaagttttgtgaagattttccgttgaattcaaatttaaacctaatgtcgtcaaatcaattccaagggcaagtgatgttagatcaggatcactcatcctaatcacacttaacaaaccaagcaaaccatatcgatctggtgcagactgagctgcttgcatggattttaatccctgatccttaaatgactgattaacagctgacatttgttggagtcgaaactgggactggttctggtgttgctgatactgctggataagctggtcataagatcccatgccagatcccatgcccgaaacagagcttggggagttcaaaggccttaatccaataccaggaggaccgctactctaaaacaagagaagaagaaaaaatgcataaatacatacattttatttcacacacaaaaacaagaggctactagaaatcagtttgaaaatttaaaaacagtttcttaattttgcacttcaatctctgtctaatgattgcaaacatttcaaagcgttgacaatttaacacaatattgagtttccatcatttttataactgtaacttt

SEQ ID NO: 304706 - DNA, 1988 bp, Cannabis indica
tgggcatcaaagatagaattacctcttcatctctaggattctttcccaggttagccatagggtggtccccattggtagtactatgacttgtcgttttcaccacattctcctgagcacctttccccaattcgttactccctgtaccatcagtacgattttgaatgttgttcctccaactcaacgtccctccctttcgtgggcccccgatcctaccagccactctttccaccgtctcaacaccgtcacctccgtcctcctgaatcgtgagggattgcaggcctcgcaccattctctcagagcaagagttgtctcttctagaaccaccattaccattcccatcaaaacaacttcgggccactgagttggtttttatccacgtcccatatagaggagtagcatcccctatcggaggatacacatattccatttgtcttgaacatttcttactttcatgaaataaataaccacaattaaagcaaaccaaaggaattttacaatatttgaattgaacccattctttccgacctctgttaatgctcaggtggaaccctgccggaattctttggtaaggtcaatttccaccattagttttagaaagcctcttctagcattcaccgtaggatccactgtatcgaacttaacaaaggtccctaccttaccctcaatgaccggagcattttggaccgccaaatagggagtcgggaggccatggatttgtgcccaaactttcgccactctcatatccaccaaatgccagtacccatccttgggccattcttgtaagttcaggatctggcccgccataatccagggtcttccatttaagacgttcttcaaatcgtcttctctttcgaaaaatatgccccacagccctgtctccattgtcttcatccaccatttccctttcaagctccagatacccgagaggatttgcttgactctgtttctaggcataggagctttaccaaaacatttggctagggcccctttcttcaccatctcctctgatatctcgaaagatgcttccagttccattgacgattcctccaaaaatttcctcctcatctcctccacgctgtctggtggttcggagcttccccctttctcacccgaccctgagcctaccatcggcgtcggcctcagttgctcattaaccctcatcacacctacttcgccacatctcccagctttttgaggactaaccaccagaccttccccattctccccagctccgttcatcccctgttcttccccgatagccatttgaccttccccatgattactaaacatgtatagtagcagctagtgatgaaatggactttgttgtatatctcattaatatatatattttgtacttttttattttgttatatataaattttttggtatgtatatatattttaatagtagtatatataattttattagtatgatagatgtaattttttttagtgttaatttagtattattgtaattgttttgtggtatataattttattactacagtatattaattttcaatgatacgatatatcaaatactgttatatatatttaatgatctaatatatttattcgtttttttataataataataatatgtaatactaaaaaaattatataacttaatttaattattatacatatatttttaaaaaataacatatagtaaatctatttttataatttttactagctaatatatttagtcattttttttatttttttttaaaaagagacatttactaaattagtgtttaaacttaagttcattttgcatatcgcattctttttctttcactggatttaatattatttatttattatttataacacatgcattcttttactagaatttgtgtgaatttaaataaaaaatatataataacaataaataaaatatgaatatacacgtgctattttacttagttttttttttaaaaaaaaaagcccatgtagttaaataaataaaataaagaaatttttaca

SEQ ID NO: 304707 - DNA, 1251 bp, Cannabis indica
gaatatcatagtgtcttttttataattttttagaaaattgactaccgagtttatttattctagacattcttatgtgattatcacatcctatttatgcatatatacatgcataaatataataataatattcatcatgaatcacatcatatttccattatattctttgtatcaaaataaatatatttttttgtccaaaatttttttaaaatatatttgatatcaaattcgtagataatataaaaatctaaaaaataatttatattcaaaaaagtaaaaatcacaaataattcaattgatatcaatcatactcttagagaaaaatcaataataatcaatataattgatataatagaatcaaaattcaatgttttgtgatatttttttttatttttttaaaaaaatgatatcatatgtaaaagaaaaaaaaggattatatgtagtgatttttagatgtgtctaagcttattttataatattttttgttctaatagaggccaaatttagttacatggatgagagattacatttatttacaaaaattctagaaagcctccaaagtactcataatgactaattattatagaattgttgttagaatgaacagaaataaaataaactaaaagtacatgcaaatgaagttgaagtaaagaaatttcaaaaaataaatcgaatctcgagaagttaaatttatacccactaaataaatatagttttgaaaattttaaatttactaaatctttgaaaagatgcaagatttgttttgtttttttgtttttttttttttttgtaatttactttgcttatttgaaaattatgggtaagctttatcctctttgtttatttttattttaatatgtatttattgtcattgttattaccacaattaaagttgactttatatatattttatagagagaaaatatttagtggtcatcatatgtttgtttttaaagcatttggatatatggttcctagctccaggaagaaaccttgaagttggaattttagaaacttattccagtattttgactaaggatgagaggaaaggaactatttcattcagatggaagttatcatgaagggattcaaaataatcatttgaataattcaaaagaatatagtgatgaaattatttctccttcaaaatagtaaaaattgaatagaagaaaaagaaaataataataaaaaaatgtaatctaatagtaaatatagttaatattgttataaatattattaattatgtggatgtcc

SEQ ID NO: 304708 - DNA, 1190 bp, Cannabis indica
tttttatttttttaatttttattcaaagggcctgtaatagagctaatgcgttattttgttcaggtaaagagagagaagattatgaactttagtttatgaaaaagatggtcatacttaaagttaatgattattttgtgttatattaatcctttatatcatatattctagaatattgctagcacctctgtgctttaatcatttatatacattattttcctacatcggattcactaattctaattatagggtttctattcaaccaaatgatttatagttaaattaaagttattcttttaaaaaaaaaataaccggtaatggaataatgatctttttgtttgacaatggcaaaaattgaacagtgaattgtctccccctcataaaaatatagagttagtaattaactctagccttgatgagttagttagatgcactgttagcatcggcaacaagttagttgtgagaggttgttattatcagttgttttctgttagtttaataaccaacttagttctatacctatatattgtacttagctgctttggattcattgatataatttgtttcagttttcattctttctctcattttttatgcttcgactatctttacaaacgctaaaagattcaacatggtatgtgaccttattctttcattgacaacaaatttagctagcactagctcatgtcttcgcgtggctattgacacagatattataactttttgagtagtttataataaataacaatttaatttttttctaatatataataatattaaaattatattatcaaattacttctacacaataataattttatttattaaaaatatatattttttaaaagtatattttgttagaatatattatatagtatatgaaatatagcatatatatacgatatgtaatgcgaaaaatactataaatatatcgacaatatatatacaatgaaagatcgaaatacctccagtcattgatctttgagcttcaatcactgtgatagtttcagtattggagttcgggcatcttcgctctctcaactctcttttgataaaatttgctgaataatcagaaaatgagtggggagctcagggaccgagaccctatatttataggtgagatactccatcattatctgcgccacattaattgtcagaatattttgaaattaattcaagaaatcaaatcgggt

SEQ ID NO: 304709 - DNA, 2763 bp, Cannabis indica
acaaaaaaaaaaaggatttatatgagatgagacaataacttttataaaatggaaattttagtactatatagtactatgatttattataggtaaatattgtaatgttaaacttaacaacttaataatattgtaatattgtttatggggctctataatggatatgttatgcttatttgatataagtctataattacaagtttttttacatttattttcttagagtttaaggactgatattgttatcaaaataagtaattatttattgttaatttattgctgttaattgcattaaaatggtgacattgcaattgatttgacagttagctttcagatattttatatttggggatagagagattatatatagttttctagggatatgattttgtcccgtgattgtactttcacggaatgcattccgtaatgtacgacagccgtcagataagagagttatttgatctgacggctgagattgatctaggggtaattagagttaaaaggtagaaacgtaccctgacactcatttaatgtacctcgagacccatctaatgtactacgaaatacatttcgtgaaagtacatcaacaaaatcgtgtccctagttttgtatatgtatatcatcagtgtattgaggatataatatgtacattacaaatatatattttatgcagcttttagtttggttatcttgaggtactaatcacgaattaataaatatatatttataatttcagcattaatttgaatatatttaatgtgttaattacttattatatacaatacatgtatgtactagtgtatacttacataattcatgatgagtagttgcttaattttctaactatacattctatatttcatgaaaattttgtcaatttctcacctaaaaataaactaaatatgtcataaaaaaatgctatcatattcaacattttcattcaggcatttcaaaggatcaattatattgatcagtacaaacatatatataaaagggtttctttttcagctttgcatgtcttcattttctttatatatattgttatttgagtatatatatataaatatatatatatttgtgtgtgtgacatttaattttgtgtattctttgttgtttaaagtatgcagcaagtgattaaacgacatagtttgcaatcagattatcctgaaaagtcgaggcaaccatcttttgatgagcttcaggtaataacatatatagtaatacacaaatatttagttacatttttgtaataatatattaattaattcaaggatgggaaataatgttcttactttttctttctttctaattttacacatgaaccatgttgttgttttatatgaattagaagaagggtggtttgtgaaagtagatctttttttataataaaatgtttttttttcttttcttttaataattttttacaaaacatatagtttttaagattggataatgtcaaagtgtgtagtgttggaaatactgttatattatgtataagaatataatatatagatttaatatgtgtaataaactaataatattgtaacatatgacaatatatatattaattgtcattttttttataacatttggggaagttacttgttacacatcaccaatattatcaccaatattaagtgtgttacacattttaatttaaaattcctaatgctataagagttatggtgtgtgcatgagttacatttgagtccatataacatccatggagttatgagtttgaatttcaaatagtgatatcctaaacactatataaagaggtctaagatgcttatattggtatgagaagttttctatcaaaaaagcacattaattgttagaaaactctaagacttgataattctcaaagctattttcatgaaagtgatctcaatgcttagagatagggaaaataagtttttggacaaaagtttaataccttgttctagtcatagtgatccccactaatctacaatactcaagattgtgggtgagtgtatatacatatatattcttcttttgttatataatatatatgtattatattacatatgatgtattcttcttatatatatatattgtaacatatatttaatcaacctcttattttagtctttgtattatttttacaatagaattgtaatgcatcttaattttctttcattgtaataaaatctcaatcaaatactattttacaaataatattaataataaataaataaataaagaaccaaatttgccaagtaattaataactatacatttatagagaaaatgactattttgcttaacatatctagtacgtattataaaatgaatggaatattggatctcttttctcttggagaatatacttatttttatgagtaacaaaacttttagaaaatataatatatgaataaactacaagtatgtgcaatttgtggatatggggagttcacattttttatttgtgaataatattaaaagggctagggttgatattcaacccaattcatgctatgaagtttatatataaatatattataagtgcatgcacatacatcaaaatcaaatttggttcttaattaactccttattataatttttaaatttgcttaatagtacttataattaataattactatcactaagactgtcaaattaataatctgcaatctatcaaataataaaccagaaattcaagaacaaactaataaagccatgaaacaaagtaaagaaaaaccattatatatatatgtttatatatatatatatatatagactctct

SEQ ID NO: 304710 - DNA, 1825 bp, Cannabis indica
agcccagggtacaaactttacacatctgatagtgcaccatttcatgatcccactttacaccgaagcatcataggctcactacagtatcttactatcacaagaccagacttggctttctcagtgaataaactgagccaatttatacaacatccaaccgaggctcattggaatgcttgcaaatgagtacttcggtatatcaaaggcactgttgacttaggtattgtttttaaaccagcaacatgtctaactctcgaagcattttttgatgcggattgggcctgcaatttggatgatagaaagtctaccactgggttctgtgctaaactaggaggcaacttaatctcatgggggtccaggaaacaaaaatcagtggccaggtctagcactgaatcagagtatagatccctctccactactgcaactgaagtggtttggactatctctgtgctatctgaattgggcattaaggctgctggcacaccagttatctggtgtgacactcaaggggctcaacagcttgcctcaaatccagtttttcactcgagaacaaaacacattgaagtggatgttcactatgtgagagaactggttactgaaggaagattgaatgttagctatataccaactgaagaacaaccagccgatttattcaccaaagcttgaacacttcccaagtttaattttttatgtcacaaactgtcactggggactccccagtcgagtttgaggggggatgttgataatgtaactgaaagtggttagttaggttgttcttatatctgttatattacctaattttctgttagttagttattcagttggtgctctattgagctgtgtataaatactagtcctgtaacacttattattcattcaatacaacaacaactttcttctttctcttctttactctgttcttactaaatcaactatgttgatgatgatttcttgttgttgttgcttgatcatctggatcagaactattataattttcaaaatgctcagcgatttctagtaatcttcttacagtactacttgtagtttcttgaaagccttgatgatgatcttgtgggattagtgtatcgggttcggtcgccggagcagaagaagggttgaggaagttgggttcaggctgcagccaaatagtgtcttcccagaagttctccactgagctatgatcaacaggttgatgatgatcttgttggagtagtgtattcggtccggtcgccggagcaggaggagggttgaggaagttgggttcatgctgccaaatgtggttagggttagggttagggtttggccaatagtagtttaccaagttcatatcatcaacagattattgattatgagtaggacttccttcatcatgatcatcttgacggtccatgtcgtggatgatcggacagcggttgtgttactttctcaagaaggagtttgatatattaatcatggattggtgacggtaaggaaatataatggccaagttttttcgtttatatataagcaaccggaagtagttaatggagggaagcatagatatatgtatataagaaagaatgagatggtatatatataaagaatttctcaaaaagaaaaaaagattatacaaaatattattcataaagtacgtacagtatatatgttggaatattttttagtgaatttttacctcccaaatcatacgttggaatttttattaggtctaatgaagatgattacaacttcttattaaaattttttagtgaatttttacgtcctaaatcatatgttgtaatattttttttttcataacggtattcgttatagtcactacaaaaaactgcta

SEQ ID NO: 304711 - DNA, 1777 bp, Cannabis indica
attcgatagcagagtcattgaaacaagtcttcgatgaagatggatcgagaggattaactggaccagccattacagccacaccaccaccatcactgctcgaaaatggcgtagtcattaattaaagataggattttgagatgagaattggaatgaaatgtaaggattagtacaatttccaaaaccctaaatcattcccaaattgggaaaagtcttttctttcaatttctatttcagtctattttgtttctctctctctctgtttttattgcaaaatccttgcctcctttgatttgggttttattctctatcagagagtgtctccctccaaaagaaagaaagtaagaaaaaaagaaaatatttttttgttagaagataaaaggaggaaaatgtgtagttggtgccacgtgtcaaccacatgccacgttggaccaaagtccaattaagcttccaaagggcacacatgatattgaatacattaatgagctgtaatatcgttattggtatatttcgatattgcgtttatcttaattataatggtgttagacactttactacctcatagtaatgatatttttaaaattaactacacacttattataaagagcattcctattggtgtctaacaccgcatcttgtgattagttagtaatacttaattacattaataacgatattaaatctcgaaaaatgttaaacatcgcagtgtcttttaatatttttctattatgaattccattaatctctttaatatatggggtaaaaactaatttggtttttagattttgtgttttgcaacttgaattttgacacatgtattaaatcatgttccttaaattttgcaagttgttaaaaaaaattttcgaactacattgactgagattattggatttaagaacttttatccaatttcgtttaattttattaacgtggtgattgtctatgtgttaaatcgtgccccgaaattttaatacctaccaaatcgtaccatctaaactgtaatatatactaaattatgttctctaaatttttatctatgtcaaacttccattagtaaaattgataaaaaaaaatcttgaatttaataatcttaaaataacaaaaattttaattaagttttacaaaattatcaatcaaactttattttattaaattataaattagagttaaattttcatcaaaaaatttactacattattaatactattattactaaaaagaaaatattttgagaagatcataaaaggggaacgcatagttgggtgccagccacgtgtcgaccacatgccacggtgtaccaaacatccaactaactaagcttccaatgttttaaaaatgaacaacacacactttattatgaattccaatatctcttaaggtatagttttgtgtgaattttgatttgtacgtacgtacgtacgtagtatgaacacaaagtatggatgtgggttattcttgaagtggcacgtgcataacacgtgagagaagtatggataataataatggtcgtaattggaagcatcttttcacagttttttgagtgtccacatacacatttcccactggtttttgattgtggatagattcaccagctgatgattcacccatcaatttcaattatcaaaacctttgagcttccttagtggccactctccactcaccaggtggaattattacatattaactaccaaaacattgtattattattattaggctaatttggatttttgccctcaacttttaaggtcgttaaaaatacctctgaactattgagattgtt

SEQ ID NO: 304712 - DNA, 5405 bp, Cannabis indica
aaagattatctctacaagatggattaagatcatcactatctatgtattaaggtacgcttccgctatttgaatttttctctttgtatcaacaaaggtattctttagatctatagttatacactcataattatatgtaatatatttatctatggagttgaatattgttattgcaaattttatgagtgataatgaattctaacaagtggaatctgagccacttttgattgattctttgagcatttaaagtttatgttaaaaaaaattgagaattttaattttactctaaaaattagaattttgatcttccattattattttgggttatggttgtttgatatttatctttagactaaagaattaattgggatttggatttggtgattatgaattattgtcgttgatcgaacatatttgattatactttctgatgaattgttgattaagtaattgatttcctttattaaagaaatcatggctgcggcaggtccatgttcttttccatatcagaattgcatttcttttatttatatgtaattttgaattaagtttgttgtattatattgttacgtttatagcaatgacttaagtttcagacccggaggaagttctagactcttcgaacactcccagcctcctctcttctgcgagaatgtagatgaatatggtttcttcaaaatcatcttgttcacacttacacccaaatcgtttccacactgtgaaaccttacccaagccccatatctcgagatcttggtggctccgactcctcatccaacggtgaccaagccagctcggctagctccaaccgtcctcgtcgcatcaagctgcgaagcccagaccgtaccaagcgcatcaacaataactctggccaacccctcaactccttttcccgtcatcgcatttatgagactccttaaggtattcttcttccctttcaatttttctggtttctgtcaatcatctctgctaaagaggggattaatcatgatctctaggtataaattcaaaagaaaatttaaatccttacatgaccgaatcctactttccttctgtggggatattatgaacaccatcatctcatcaatttattgctgtgactctcactattcttatcaaaaagaatgtatcaatctagttaatgcacttggtgttgaatgtgttttgccctctatctgaatgagatcttttgtacaactgctctgcttcccattaaatgtttgtactacagggtattatttctactttagggagagtccgattctgcgatgtgatactcaaccactgagtatcatattaattgccttatttggaaatttatctataaaaggacccttgtcttcatcccccagaccaccgatccctagcctttactgtatttcttctctctgttattgcttctgttattttgttttctgcactaacgaagtcaccactatggatgacttaacaaactctcttaccattgctttgaatctcacagataccgaaagcactatccagaccttatatgaacccacccctgcaaacacaaacgaacctgaaaatgtcccgactcaatttttcctggtggcaaatttgcatacggttaaatcatttaaccgtaaggtttttattgaaaaaatgactggaaattggaaccatatctctagattcccggttaccataaccgatcgctctcaaggccttttcttggttgagtttggatgtgagggggataggcgtcgggtgcttctacagcagccttggacctacctcaaccagccccttcttatggatattccaaattccttggatgtcctaaatgggaacaacctcttaaaaatcccactctgggtgcaagttttcaacacaccattcctcaaacgcactgaacaacttgcggaattagtctccgcttctctcggccacctcttagaagtgtatcggccatctttccgtgaaacgtggggcccatattttcgcatcagaatcatgtttgatgtggcacaccctctcccccggggaattcccgtcaatttctcaggaataaacaaggtggtgtggcttgagttaaaatatgaaaatctctcagatacttgctttttctgtggtcgtatgggacacaactataataagggttgtgtggactatatgaaagcttgtgatgaagcccctcttccacctgagctcaaatattatatcaaaaccatttctggcaaagttaaggttactactaattctctgctgtgttctgaacaacttagctttgccaaccatccggtggccacttttatgactttaaatccggctagtgttgtgtgtgtctctctcccggaccccatgccctcaagaccaacccccaacccacggccaaacccaacttgtgggcctatacaagttgggaccttcatcgcatacacaggacactgttacatggactcatggagagacccaacctaacaacaccaatccaccccaagccgaaaataaccaacccactttcacggcactccttaatgccactatgagcaactctagcgtccaaaaagctccgcaagcctcaactcctagcttttcaagtacctcacataactctagtagctctaaatctactagttccaagtactgccatgtccctttgctcgtcaacattcctctccttgacactagtaaaaggttggaggctatgaacctaacttaccaacctggtgttgcaaccccttctagctccaaaggcacaaaaaggaaatgcaaacccaattcgaaggatagcttcaagagacaaactgagatgatcaatggggaacttcgccatcaaatcaagcggtcctgctctgacaaccatcaagacaccgagatctctcctggaaacgcaggcctcgccgttgagcaagcctggccgcagccatgaagcttgcagcaggaatgcacgtggtattgggagtgatcgtgcattctgacatctctcccgtttggtctccttatgtaaacctaatattttgtttattatggaatctagactggccaaaaatgctgttgattggcttagagttaggcttcattttgactccggtttggaagtccctaggataggtagaggagggggccttttgttattttggactaatgatgtaactttaactttgctttctcaatccattagtcattttgactgctatgtgtcgctctctgctagtaatgttttttccatctcacttgtttttatggatcgcctattgaggctcatagaccccacacttggaaaatcttgaacaggatcggcaacaacaaccccagagatccttggcttatgatgggggactttaatgctttccttacctcgaatgataagcaggggaaatcccgacaggggtccggcccctgagttcaggcttttgcttcgttcctttaatttaacccccttgacccgaaaggccctttgcttacctggaataataatgtggcctctccaagaaatatctaggagcgtattgattggggcattgcttactcttcttggaccgaccttttttcagatgctcttctcactcatcttggttttttggctcggaccaccgagctcttgaaattgttaccaccagtaatacaatcccctcccctaatcgcctttataaacgttttctttttgaaaatgtttggctctctgaaccaaattggaaagcaactttggaatcgtcttggactaactcccctggcccccctgaggaaatcccccgtctcattgccactcaagccacttgtgctaatcaccttaatgcctggaatcacaaaaaagatttccagttcgaaaatcgcatcaatatgcttgagagagaccttgagtgtgctaggaatagcaccacctgggattatcgtgcaattggacacatcaaggacattcaatcgaaactcgatgctctgctctataaggaagagacttactggaagcgaagggccagaactcaatggcttgcccaaggtgacaagaacattaagttcttccatcgctatgcctcccaaaagaagaaagtcaatagaattctcaaactctacacgactaatggtgtaacgtcctcgcttcaagcctccattgggtccttacacccacaaaatgatggatcttatacatgagtacgtcactctggctgcttcccagattgatgactgaccatacagaccaacacgagtattttcagcgtgcattgtcctcactcacacacttcctgggaacacttctcaggaggtcacccatcctaaaattggtccaggtcaagcacgcttaactgtgaagttctttcgtgatgggttaccaaaaaataaagtgcatcttgtttttcggtatgcaaatcttgtctagaaggaaagatggctataagacctttttctgcaaaaggaaatagagccaaagaaaaacttgagattattcactctgatgtgtgcagacttattaatattcaagcttgaggtggttatgaatactttgtcacatttattgacaattattctagatatggtcatacttacctaaaggccaagaagttaaaaactttcagaaagttcaaagactttaaagttatggctgaaaagcaattaggtaaatcattaaagacatttcgatcagatcatggtggcgagtatttgattccaaattcaaagactatttgttggaagaagggatcatatcctaacttacagcacctgaaacacctcaacgaaacggtgttacaaagagaagaaatgggaccttgttagacatggtcagattgatgatgtattactcatcactaccactaaacttctggggatacgtacttctagtgcctacttaaatttttaatgtagtacccttgaagagcataagtaatattctaatggaattatggaatgggacaaaacccagtttgaaatatttccatatttggggttgtcctgctcatgttcttaaacccaagactgggaaacttgctccaagaactgaagtgtttatgtttgtaggatatttagatgaaactcgaggtgcctatttctatagtcttcaagacaaaaaagtatttgtatcaacaaatgttacttttctagaacatgactatataaaaagtcacaaaccacacagtcaagtggttatcaaggagatcagaaatgagcagatttttgaaccaataatttcatcagcattagttgaatgacggatagcagttaccacaattcctgaaaaggaaactccgctacatcgtcgtagtgggaggattgtgagataacctgtccactatggacacgaaccacatgttcttgtctctaacacacagaaggccgatccattgacttatagagaagaaatggttgaccctaatgttaggttttatgccctaaataaaactccatttcaatgtaatctattttattcaacatcaataaagaaacagaagt

SEQ ID NO: 304713 - DNA, 2251 bp, Cannabis indica
aattatgaaaactactaactgacataaaatgcatctcagaattcaataataacagtataaataattatttaaataactataaataatttttcataattaaacatgataaactgctaatttccaaattaaactaagcggtctttacaaaaacagttcatatataatatctaagataaccacaactcaattacccaaaaagcaccaaaattagaaaaccaccatgggagctcaagcttgagttccatgaactcaaacttaccaactaataattaaagcttagaaacatgctctaacacttacccaaatacacaaccaaaacatgcaaaaatcaagtaaaaaccctttatttcttcaaagtaaaccaaggaggataagagaaagatttacctataaaaagaacaactttaacccttgcttaactaagcataggttgtaactaaactttcagttcttttaattctgtcggtgccatctgatacagggccttagagacaatttctgcccccagtatcaattcaatctaaaaatcaatctctcacttcggtggtaacctaggtaactcttttggaacacacctagaaattatcgaaccataagaacatttttgggtcccattggtatctctctcgtggtatctactacactaactagagaaccaatacattcaccttgcaacaaatctcttgcctgaagcgtcaagatcattggaattcgggatctatgaatccttcccacagcacaagctgagtctcaccctctagttcaaatgttaccatcttcctcttacagtcgatggttgcgttgtattttgctaaccagtccattcccagtatcacatcaaaatcgtctaagtctaactaaattagatccaacgacatttttctaccttccacatacactggaagagacctaacccacatgttggagacaactatttctccagtaggcaacaaagtaccaaaactacttgataatacatcacttggcttattcaaactactaatcactttactcgatgcataagagtgcgtagcaccagaattaattaaagcagacaacataataccataaatggaaatcgacctttcacggtggaagggccagcattaacctatgcttgagtcaaagcaaacacccgaccaggaactaaagcatcttctttcttttgttctggtttcaatacctgtggataattcttcattttggtggcctactaccccatactagaagcaggcttgagcttgacattcgtcctgatggcatcttttacatctggggcacttaggataagtcctctagttttcatttttgccttgacggaaaccttgattatcttgaaacattttattgggacacgtagctggtggatcattgggtcttcttttttgatcattggggtaaaaaccctgcccagacaaacattagaagagggcttccaagaaatatctctcctcatattgctcttctttcgaatctgatcttcaacacccttagcagcaagggataactcaaccacttgagcataagatcgaacaacccttattgttgtttagcagtacaattacatcctgagcaatatgttcttctaaacctcaaataaacttggcctttctagtagcttcagtggccactttgttggaagtttacttagccaatcgatcaaatttggttacatactcagtcactgtcatactaccctaagccatctgtatgaacttttctgccttagcagcacagataaattcattatagtacttctcatagaagaaggtctagaacatttcccaagtcatggtattcaagtcatgacattgggacacaatctcccaccaaatatgggcatctgttagtttttatagttcatattagagtcgcagcaaaagtagaataacattttggatttcataaaaataattgttgaatccgatataaaccataatcttgaatctcaattcaattatacataatgcgaacctaactattagtttagagattttacctcttgttgcctataattgtttcgtcgctatcttttcttattatttaatcaagcatagaatccaaaagaacttgttcaagagttcacactagggtcttccaagtcagcctcaacactccaggaatagagtgagatattatattcaatttagatgaatataatttagtaggggtgttcgcggtgcagtttttaactattttttcaaaccaacccgcacatacggtttttctaatttcccaaaccgcactcgca

SEQ ID NO: 304714 - DNA, 1362 bp, Cannabis indica
aaacttgttattataaattaattggtgaagtcatttacaataacagagcttgtaggcggaggtatacaatccgaccaataacaagtctcatccacccctaaagcaaattttgccaagccatccgcagccatgttagccgaatgtttgacatgagaaacttttacattagggaaaaaagacaatagactagaaacatcaacaattatatcctgaaaagaagaaattgctgatggagatttacataaagcatttgaaacccgaagagcgttcgtttcaatttgagagataggcaattgtagctgtagcatccaatttaagctatgaaacaaagcaattgcctccatttcatgcgaagcaaagcaacccacaactggtttcgatactgcagcagctacctgaccattagaacaacgaattaaagctccaatacccgtgattttcttggagttatcaatcgcggcatagacgtttagcttaaaagttccagctgcaggagaagtccaaggaatccgctggtttatatgtgaagccggctgtacagttgcagcagtgaccggctgagttgtgtctgaagtaagagagcagtatttggtttgagcatttttatattgctcccagtagttactggcaaaaatagcaagatcccttgattttttggccttttttccacgaattaccagattcctctgtccatattgaccatagtatacaacagatctgttccattaccaccttggtgtaaacagcaaccaaatgtatcaaataatccccctttcgcatcgacatggtattattccagtcaagtgtaatgtttgagtggcgccaaacggaacgagcatacttacaaccaaagagagcatgacctatagtttcccaagcttgatggcaaattgattaagtggagtctgtaattactttccgtctaaccagagcagtagcaacaggaagagcatcattatagacacgccaaacaaagatcttaattttctgtggcaatttcagagaccataaaaagttccaccaatcaaccatgggtttggaacaggagctatgatccatttcttctagtgaggcagctaaatgatatcctgtttgaactgtgtatgtacctgaagagctaggatgccatatgagtgtgtcgtctttcctaaaaaagctgagtgggatcgttaaaatgcggtcgacatctgctgaagaaaaccagtggtatagcagagtcaagtcccattgccgctcttcagtaataagattcgaaacacatgcatcttgtggtccagaaaagagatatggccgaaaggttgaatgccctggatgttgggttttatgccctaaataaaactctttacaatctgattagttatc

SEQ ID NO: 304715 - DNA, 2515 bp, Cannabis indica
atggaaaagcaatcgctgctacaactccaccttcactgttacgaattataccaccaaaacctgttgtatgatttgattgcgagcatgctgcttagtgttgagcttgagaagacctggtggggggagtccaattggttggaggaacctctggagttccaagaccttctatgttatgagtggttgttcttgttgtgtactctgtcaagtagttttccgcaagggtgggaatagcatgaagctggttcgttctctaatgcttgatcttcttaaatccctattatgccagataaaccaagagatacaaaaaaaaaatttccacatcctttttttccatgttagtataaatattatcagcattttcatgaaaagaagtattggtagccacagagagatagggatagaaaatactacctttccaaactcttcaaattcgcttgcaaaagaacaaagcatgagtaacaaattcctcttctcttgtacaaaggtcacagacaggggagtgggtaggtaaagtgtttcaatttagaagggatatcaagatgccaaaataatttccaccagggggagggggatgaggaggaagggatatttggtggtgagtggtgggagaaacttatgtaatatcttattttgactgagtaggttcctgactttgtaagcttccatatgagtttgtcctctgccgggtgaagaggaagtgggatagaaaggacatcgacaaccacaagagggggaaaaggattggtttaggcgaggtatattgcaagtcatgttgttagagatatagaaagctacattgttgggaacatggggttgtgggtggaaatgcttgtaggaaggtatccattaatcatgaattggagaggtgttcttaccgttgccaatcttcattatgagtcctttgtgcagtaattatcttccctagtgaatgctatgccagacaaaagatggagagtggccaaggctgcaattctagaaaaaaaacgggggtggtatttggcagcaaagattttgccacgagagagtttggatgctaaaggattcgccaagcttgctttgtaagcatagcttgattaaaatgaacaagtgagcaagaacccagaccaccgtttctcttggattgatatagcttctatcatttttgccagttagttgaggggttattattggaattgaacccccacaaaaaattttccatgatagattcgaaggaatggcaggtggtagaaaggagacgaaaacaagccatagtgtaagtggggatggcttggattacggatttaagaaaaacttccttaccgcattttgaaaagggcttatgcttccaattattgagatggtttcagattttatctttgaggtagtggaagacctatttttttgagcggtcaataagctaggggagccctagatatattttaaaggtatcacggataggaatacccatgtaattagagataagattattgtctctgagatcggtgttgggagagaagtaaagtgacaatttttggagattaacttgttggccagtggctttttcgtagttgtgaagaacatctttgatggcattgtaggaagtgatggtagcttgggcaaaaaggatactatcatcgacaaagaaaagatacgagattgtaggggcactcctggcaactctgtatccattaaggatttgagctctatcgtggtgaccaaggagagcgaagaaacctttagagcacaataaaaatatataaggtgagagagggtcaccctgtcggattcctctagaaagtgtgatggttcccacaatttgtccgttaacattaaatcgaaaggtgactgaggtgaggcaattgagaactaggttggtaaaggtcgtggggaacttgaacttatctataatggccctaatgaaactccattcaactttgtcaaatgcttttgccatatccaactttaaggccatccaacctttttttccacgcgatttaatttttagggagtgagttatttcctgagccaccatgatattatcagaaatgaggcatctttggagaaaagtttttgattgggagatatcagtttattaagaaccaatttaagcctattaccgattgttttcgacaggattttataagtgacattacaaacgcttataggtcaaaaacccttgacgaggacgggttgtttgaccttggggataagagtgatgagggtttgattaagttgggtgatatcacccgcttcattaagcgcctagagaatggcagccaccacaaactgtttaacaagagaccaattctttcggtagaaattggtgttaaaaccatcaatgctcggggctttatccaggggaagttggaagaaatctttctccactttatcaatggtgtaggcttcctgaagtatttgtatctcaatctctggaagagtggcaacaatacctttgaaagcatatccgatatcttctatcgtatgggtcgaggaagtgaaatgattcaaaaaatagcgctcaatttccttagtgatg

SEQ ID NO: 304716 - DNA, 2505 bp, Cannabis indica
aacatacttgtgagtagatctaagatcctggtaaaataattgtcaacactatcctcggcagatctcttgggttctcaagtgtctgcacattcagatttgtcaccattggatcggttgtattagtttgatttcccctttgattttgcacaattatcttgtgtcctaaaaaagactcaagacaaaaactttgtgtttttttgctctcaatgaaagcaccaaaatgttggcatcgcttttagccaacaatagggagtcttaattaaagcgatttgacaataaataatatagaaaagtaaagaagacaccagatttatagaggttcaaccccttatagggaaaaatctaataatttaatattttaaaaattaatatttatagttaaattgtttagtaaccatcaatgggtaatacccattaagaagtgttctatatatatatatagatatatagatattgatatattgattgattattgattattaaaataatagtaaaatatcaatttgtagatttatggtctattaaaatattaaaaattagagaattaaggagagtaaaaaaaaatagctttgaattaaatttatagcgtcatatcaccgtcttatttttctcctttatatatattgatattgatagtaaaaaattttgtcatattgatatagtaattatgttgatctatcaacaataacatcatcaaacatagcatctcaatagcatcttcaaagattgcaaattttataggctcttgttatcactcttgttatgagagggagaattcctcttgtagtgcgcacattttctaaagctattaaaacctacatgttttacattattccttgttgttggtgaggctgtatggttgccatgaccttttttaagtgcatgaatattttaccattttgtgccacagaaagtgctaaatattatgctcaaacctctaagagcaggaaaccatacaaaaactgagaaaccatgtggcttcaatttactatcatcttttcggttgacatagtctcttcattccaaattttaggagaaacaaatatacaggtggttgggcacaacacacaattatttattacctctataatacaggacaggcatacacaaaaatagagctgaattatcttttataacatagatttatgaaaaataaatatttgaatcacatgcataaaatactgatcaatctttttcatgattgatcatctcttaggcagaaactatattgaaaatcttacagttctaagatcgatgaaatacaagtattttaaacataatctcaatccatagtattctccattttgagaatgagtagtggaaaaatggggataaattttttaaaaaatcttatattattcgagatttatataacaaaatgatgatatgaagataaaacaccataatatagtcaacttacatccccaaaatcaaaaccagcatatcacagtaataaaacaacctccatttagacatgaacaaaaattgaaaatatatagagtgggggaactatgaaatggtacctggtcattagagatgatctcaacttctgcattaaacaaaaccaagcaaaaattgaaagggacacagaaggaaaaaaattattggaactttttaaagtagcaatgtataataagattaattaggttagcattgtcatttatataaacaacaaaagacaaaaatcgttcaaacatataccacatcgtctatgtatagagcttctggctcattaaagtagttcctgaacactgagcaaattatgaagaaatgtccaactttcaattcaattgcaaaaattgtgaagagagcaaaacatcagtgacagtaattagttaagaagcctggatatgctaccatacaaattatttggaattgatctctcaaaaaatatcacttaagcaaaactgaaatgacgtgcttgaaaaactatccagactaccaagaccaagcttttggacccaaaaaccaccaaacaaaaataaaaaattactgccttatgacatggaaaggaaaaaaatcagcttctcaaatattaccaccttcaaggacgaacttaccgctcattgtagtcttgcagattctttattttcttattgtaatgatttccagacaaagtaaccttcttcctggtcaaatttctcaacttatctcctggttaaagttctgaatcacaacatatatatatatatatatatatattttgatttttgatacaaattatcagtaaagaatgaattatgagtacaaattctttagactctaaacgaaacagaaaaaaaaagaaactattcaatgcaaaatataaaaatataaaaagtaaacttttagtatttccttatctcatatagttataatctacatatgtaattaataaatatatatatgggtgactattcaatggttacatttttattgtaatcatatggttacattttttttaacctgtaatagcaggttactaataggtaaactttccttttttagatttaattaattataatt

SEQ ID NO: 304717 - DNA, 3030 bp, Cannabis indica
catttttttacttaacctagtccacgaagaatagccctagttaggatctttgtccccttcttaaagtatgcatgcctcctcttctactgcaggggattctcgaacaaaggaaagcccgtatttttttcctaccctcttcttttctttcaaaaggcaaggtagtttacttgcttacttgttagaggaaggtcttgaagagccttatcttatccttattggagcctcttcgtgcctgaaatctctattgatctgaccgactcgaaacaaaatgaaaaaacaattttgtcctttaaaaatctatctcgccaaaatattattctcttattgaaaagaacaatttggttggaaagaaacaagagaattttttatggaaaactctgtcaagtagagaggttatgggaaaaaaatcaaattttggactgcaacgtgggtttacaggactaaacattttgaagatttctcttttctagacttgtgtcatcagtggaaatctttgatgtactagatatgaatatgatgtgtttgttgtgcttgttttagtatgtttttatgctaaaactcatgtacccacggttttcctccgccacaagtgagggttttcaatatataacgagtaggggccagtctaagacaatggcctctgtctctttttcaaaaaaaaaaaagaacaatttagtaaaatattccattatgtttcctagttatataaacaacatgaagtaattttgttttcctttctagtgagttcaagtaaacaaaataatacaaaattagaatttccatttccctctactttattcccattcatttctatactgaattattctaattccgattacacgagttagttaacatgccacaaagctagtagctgacatacaggagaaaagaaatcactgattaattcaaagaaattctgatgtaagataagagggagaggaacaaaagaaagaccaaaaaagagacttctgcttacactagaaatgggaactgttgcctattctaggatgtgagtgtacctggattagtaatggtcgggcatcctgaataatagactgaaagccctcggaggttatgacattaagactatcatctccagtatctaaaggacaacattacacttgtaatttttccaaataaatgcatgcaagagtagatcgattgcaataaatgactgagaccataaccaacctggaattgcagaatctaacaacggaaggtctatggttgaaatacttttccctgcatactgttctttggccttctcaagaacatcctaccaagtataaacaagaaatccagaaatttttcgaacaataaaggacctggcaaggattaaaagagaagacaaagagagcttcttccaactgaaagtgtaattttctcatattcattagctggagattgggaacttactaattgttcttcaataccaaatatatcataatttttcttccatgtcgggtttgtcagcaactcataagcatagcgaatctgcaacttaaatagtcagtcccaaatttaaagcagcagtatcaggaatgacctgacgagcggcaaggaagagtaattccacttgaaaatacaattaaaacaatgatactggaaatcctcaacctcgaaagatcacacgcagaggatgtatttgaatgaaatgcttgagaggatgtaaggttgtattattccaccatgaaatgtgtacatgcacttgtacgctacttaagaacatgatatttcttaatgcagaaaagaaaacataaaaatggtttaaaaccaactcatatcagcatgtaccaaaactaaggaacttagaccaactcccatatacttagatctagaacgaaatccgttgccttattcctaacatgttagttttttcaaccattcttaacatgttagcagataaacaacataagataaagcaagaaattgctgaccttgataaaatcagaagtaagaggaacctcaacggctgaattcctgtagtggataactttttttggttattaaatttaagaacactatatgaaagcattctccaaacagtcaaaacacataacactatgcttcctaatggccactgccatcgactccaaagcttaaatatatataatattaataaaatagaggacattacaccgtagtggccaaaaatgaaaaggaaaggccacttctatgtttttacaaataaagttatgaactatatttaattagagacaagcaaaaaaaaaaaaaaaaaatcagacactagggcaatagaaattgcagaaattaccatttggatgaaagtttctcgtaggcttccttcacttcttcaattgaactgtacttattgataagcagagcttcaaattgaccagccaaatgcgttcagtcagtatagataaatacataaacactataataaaatcccctatacatacaattcgcatacggcatacatatatacaggtatgcgggatgtgtataatgtatgatatagagtgcaaaagagagaaactgagaaactaccgtcgtaatgagaaggaggaaatgatttaggaattagaacgacttgatagaacatagccactaagaagagagctaaaggcaccgagtaagctttgatcgtcgacaccgacgtcgccattgacgaactcgatgccgaagtagaagaagccttggtcatggtggcgaatggcgattcctactgagtccacactctactccactggagactgagttatagaatcttcaaatctcggactggaaaaaggaataaataaaatatttattatattttaaaaataatatacagaagactagacgaatctgattgcggagcgtacaagtctccggaccaaaagcggtcttcaatggcaaatttgttaatttctatttaagcattatgacctaatccttgcttttaggattagttagtgatattattaaaattaggtaatatagccgttcttcggctaatttaatttcttttagtattataataaaaaataactatttattaatttaataaatagttacttaaaaata

SEQ ID NO: 304718 - DNA, 1405 bp, Cannabis indica
cacttgtaatcattattaatacctagatttgttctgtacataaaatgaattaaacaatgatcgattagtacttacttttactatgtgaggggagatgatgtgataaacataatcattagaattttaattttttggtatattagttaataatttcttttgataaattatattagttaatattaactatatctctctgtgaataaaaattgtatgtacattaatttttttaacatatatatttaggttagttttcctagccaccacgaatttccttcaaaagctaacttgtaatttattccaacaacctacggaccctggttctaactttttgaaccactactcagcggatctccccaatgttagtggaaaacacaaatattttgcttcattactgaccctcataactgtcattactcgattgaatcgagacaggtgatcactagggtccgtgtctcctacatacatcatcatttcgggcatttcaaactatttagggtccgtgtcccctacatacatcatcatccacattggctcccggtcatcacaattagattttgaatcatcgccctttttcctacgagagaccttggctatgtcttttttgaggattgcaagttcgaccaggattccttcattcaaggtgccctccaaaactggtattgcttgtttctttttctccaggtgattcttgaggtcactgtgcctgttattgagcttttatcttaactcaacagggggatgtttgtgatttttccttcctcttcccatgggctcttcattcatagatacgctttttcgatcctcccgatcttgagggccagtgctcttcttagggagcttgtctctacggaccttttctttttgggaaatcatttgcggatcctgagccttcttgttcttttctaggaaagacgtaggatttttctttggacatccttctaagggttatcagatagggcttggttcccaaattttgcgtctttgggtacttggtgaagattcttccctttttttgcctggcccatgaggcatgtcttgtggatgcacgtgatacctaccgtcaccatagccttctacatggcaaccattatattgtattttcctattttgctcattctatgcggccagttcggcctcatgatcacccgcattttgccttagggccaataatttagtgtaaccgccatcatcatagaggtcatacttttcttagttttcttcgtattcctcatcatttgttttgtcttgtttttccacttctacgtctactcgcgaagctgcttcttcatctcccagatctttgggaccttgggggggacgaggctaacatgtgtggtttctagtctccaccattgtattacttgttgaacaattctcactcctctgacatggacaaactcgagac

SEQ ID NO: 304719 - DNA, 3230 bp, Cannabis indica
atttttttattatagtacggtaagtttagttttaagttttttttttagttttttttttttttttgtatatttacaatactggagttatcatgagaatgatccttgaccacatatacaatgtgattactaaacttttaagaactaaaattttaaaaataaagatgttgagggttagacctaaaaaagacaatgaccatgtctattcttttcttttcttttttcttttttggtaaaaataaaattattttttaccaaaaaaattcattatttttaatattttaaaaatataatattatatgctacttttcatttgagtactttttatagaaaaaatacaccaataatattatatacatatgttacttttgataactatagatattacctctcttagaagatcctctaaactatataaataaaaaaaaaaaaattaaaagtagttctataaaactacaatataaacgtttttgaaaaaaaataaactaaacaattttcttagatgtgaaattaattaggaagtgtaacgcaacatctcttggggtaatattacagatttttccttaatgaggtcatgtatacttttaattcttatttgctactaataaaacaaaagacataatagctgttttttttccttaagctaacaatcaatttatataattagctaataataaatttataattagggatgtatataggggcacatgtacatcgttgtgtaaatttcatacatgaagacttttgtattgaataataattaaggtagctagccatggagcattattattattattattattattattattatttgtgtcagtctttgacatggacgtggtagcaagtgattcttaattaattattgtaacctttggagtttaataatgcatgatcgaccgttccatattccataatgaaaggtagtaagctctgactatatttttttctggttaaataacgttatctcaacatattattatgcctaagtggaattaatgtatacatattaaatataatattaaaattttctgccatgttttcaaattttctattaattattatagaaaatataaacaaataaaaataagcgaattacatttttcatcatcgatcgggtcaaaatatgcttctaatttacacattaccctagcgataataagtgttgtcgttaacttgtaaattatcttttaaggtaaggcacaaattatacattttataaaaatagatttttaaaatttaatggaaatatatacacagggaaatgcccccagtttaaattagtcaatgatcataaaataaaccaaaatgattcattcacaactcatatttaaatggatatccataaattgtgtagcagcatcagcatgtgggaattatgttctcaaatttcctaggctagatatagagaataggcaataggcatcccacttgacttgaatgaacattaattcatgcttagtcgatcggtactcaaactggtttgtacaatctctcttctcaattctcaactctatatttggtctgggggtacgttagtagttagatcatcctatacctagcctattattttagttatttatgcaaaaagtagtttaaatataattctacctcctacctcacagctctgtaaccaccttgttgctctcccacctttcttgtccgcgagcttccccaaaatgtaagctgcctaccttctttacttaattactgaaattttcacttagcagaaagacaagaccaaaaacagaagcagaattttattgagcaaataggataaagattaacaattttgatatgtattcataagcaaacatttgtgcaactaggtactaaattacaaacttttcagttttgttgacagaattagtgtatatatgtggttaaatttagctgatttaaacatgcatttccagtcacttaatagccagttatacccaaaaaccaaaggtgttccatattacgaacaaactctttgtgaatgaaaactggagtcttgatcagaacattaaatactcagcaacaacaacaacaacaacagccaaaagtaattaattgtagttaaattactaacataagtaaaagcagagacatacaaatgaatgttgggactaggtagccaaaggaggcatatcttgtagataagctgagataaagatgagcaatgcacatatggagacacctaaaagagggcctgcaggaatcaattttcgagtagcagccaaccgaatacctgagaattaaagaaatgaatgaattgaaaatgttgcatcttttccttttacatatgaaaataaactaatctgctcttaccaaatacagatgtgaagaggaatgcagagccaaaccccaaagcatccccaatgggtctactctctgctgattgcatcagaacgtaaacctacaaaaccataaccatattattattcacatataattacagctaaatcaaaatctcatacctaaacaaatggatttgatttgagaatttgatatataacatttcaaaagttgagaattaggagcacttacagcagccatcagagctccacctgtaaggcctccgaaaagagagcctttgcttccagattttgtgactgcacacacacacacacacacacatacccatatggaattcaattgatgtataaaaatgtagtaatagtaagagatcgattggatagagattaatgaatgggtggtgactaacaggcatatagaccaccggaggagaggagtaggccgtagagtgcagaggtagaaggagcgacctctgcgagtagttgttgataattaccaatgctgccgcaaacaacaacatgaccacctctgcaactgtaagggtttcttctggttttaatcagtagttgttgatgataatcatcatgtcggttggagttcaaactggaattacgataacctagtgcatgtagtatcgatgatgatgatgatggtgaactcaggtacacagaacaagacatggcctccatagctaagctactactgctagtgctcactgcttacttcaattcaccgaagcaatctattctactcagtctaaagtactcattcccatgggccattgcaagcactctcgctcagcccagcccgggccggcccaactcagcccagccccgcccacttagcccatcccttttcatttgggatttgtttaggaatatactatattaggtaagtttttacaaaaataacgttaataatgtatcacacac

SEQ ID NO: 304720 - DNA, 838 bp, Cannabis indica
gatgttaatgaaacatacttgttagtaaatctagatcctggtaaaatatatctaacagatctaagactggtaactcgatgaaaatttaaatggaaaggcatgggattttcccatttggcaagcatcacaaaagtgttctttttcattactagaaagacttacattattgaaattacaaactaacttgaggaatctactagatggatggcccaaacgtctatgccaaacatcactttcagaaattaaaagaaaggtagatggttgagttacatcttgttttgacaaaattgaaacaccagtgatttattgaattgaaagaaagatttggagtttggtgtgttgagctggtgaagtccatctctaagaatcccttgcagcaacaccttctttgtgacattgtccttcacaaaacaagaatttgggtgaaactccaaagctgtcaattttgaaacacttatcaaatttttagtgatttttggaactatatatcatttaagttcaataatatgaccattttgttctgaatttaaaataccacaaccaacatgagagataacaagctggttatcgtcaccaatgactagtttttccttaccaccatagtcatgcttttgttgcattttggtaccatctgcagtcatatggttgctagccccactatctacaaaccatgcttcattgtccacaggagaggcaatgaaggcagctacagagttatttttagtgtgagcctgattattgttcgggtcagagtgttggggattattttaccaggatctagatttactaccatgtatgttttttaacatcctaaatatgaatttctaaaacaatagaa

SEQ ID NO: 304721 - DNA, 3809 bp, Cannabis indica
ctataatttctctgtctcatattgttattttccagttttttggttaactatttctcattcccagttgagtactcgccattctaggttgaatactcgcacttgtcttttcacgtaaattgcttcttgtcactaataatatcatataatttggtgttgcgaaattcactcgacaacatgatctatgactctactctaattttagaacactaccaaattctctttattgattaagcaagaacgaacacaatatagttgagaaagattctctattgtatctcttcaaagtgttacaactctcacactcttgttcaagaattttcttcatctacaaaagattcttcatacaaaatccaaacacaatctttctctcttttctatgaacctctcaatctctttctctctcaaactcgtcaatccagtgtgtttaagtgttggtagtatttatacgcttaggatagcgatactaagatagtggctgcaaccgttaagttgttaagttagttacgacttaacaactttaacaaactctttgtaacagaaacttcatgtcagtacaagacaaggtgcttacggatgagacatgcgcttcttggacaaaggacaaaagcaagtgctgaaggggcttccggataggaaaagtgccaattggagtcgactatttggaacacccttccaggaagaacaactagccatctaaaactcctttgtagagggaggctagttttcttgaagaccacacccggagtggtcatgatagtcatccgggagcacccttcttgatggtaactattattccacgaaactttttctggatggacaagttagctatccgggaacacatttttgaaagacaacgaactttcataaccagtacaacttatggagatcttttcatttagaggaactatatcacatagatggtacaatttttttttttggtaattctatagttaaccttctaaagatattgtttcagtatacctttattatttgttttaacaacgtcaaatcattttctattcataatcatgaacaatgcattataattatttaggaatgaatatatacgtggcatttgttttatacgtgtgataaataattatttaaattttactttcaccattaaaaattatttaattttttaaaaaaattaccagtgattctaaaaatttacaacatatatgattatgaaaaaatgaaattaaaaactcttctctataccgaaataaataaaagatataccaaaattacttttgagggttcatttggtatgttggattatatcatattatattaaattatattttatataatatttttatataaaattatatgtagtattgatttttatgaacatctaaatatatataatattttagtataaattaaatttaatatagtattacataataatataatatataatccaattcatacaatataataaaacttaacacgaggtaccaaaaaaaaaaaccctaaatgagatttattatatatttttctaaaattctttttaaaaggaagagatggtggagtttttattttcaaatgtatcatataaaaataaatcattcataacattttgacacctatcttgcaaagctttagttgcttttattttgccattacttaaaaccctcattttttactcccttactatgactcccaaaaaaaaaggcaattaggttaatatttttttaagggctgaagaagcttttctgaaaagggataaaaagaaaacaaaaaggaagttattcgaatcgatttcagccaagcatataatgtgagtttgcaccggaatggaccacatattgatacaaataaatttgtcttagtattttggtgatcccaactactatttttcaagtcacccaactatccaagtaagaaaaaaaataaaagaaacaaacacttaggctgagcctagtttggtagttttgaagaattgaaagcaaactaagtcagaaaatatttgattgatgaacctaacattgacctagttattaattatatttcgcacctacataattatgaacgtgtgcaactttgataaattacacatgggtgattatttgatggttacatttttattatttttattgtaatcatgatggtcattatttttttacatgtaatagtatattataataggtaaaaattcattttttttagaattaaattaatcataattagtaatttttttaaaataattaatttaaatttaaatatttaataagattcttacccttttagcaattaatatttataaactagtaaaatattttaaattatatataaaaaataaattgtgtattttaattaataaattgtgtattttaattaaataattatcacttaataaaattatattaaattttaattttactattaaaaaatttgtgacataaatacttaatatattaaatttgttgctaataaataccgaaattcagaaaataataacataaatcctcatttatggtttaatttttattctgatgtgtgtattaagttctgagtttgaattttattatgcatgtttacaggtcttttaggactatataaaggccaaatataccatcttctacaatttcaacaaggtagcaaacctactggctataaagaggtattctaattcaaccagatatattcttctcttcaaagtgttattgaaagaacttttcgagtatggaagaaaagatagaaaatattaagagatatgcctagttatccatactagaagcaagtaaaaatagtgattgcatcaatggccttgcataattacattcgaaggcatgcaaaacgtaatcgacattttgagaaaattaaaaacaatccagattatatgcaaataattaaattaatattgaaaaggaagatgagccaattacaactttaaatttaaatgaaatagacaataacagagatatgattgttgcaggtttgataggcataattaaaatatattcatatgtattttctttttttatttatttaaattatattgtattttgtcatattaaattaactgttatgagcaaaatttataataatctaaaattatttaatagataatatttatgttaatttttttttttattttttaaatgtctaactaattatttcattatatatacaaaaattaaatattataaaaaattattattgtttttaataaaataaaaaaaaaattataaatatgttaatatgtatgaatttatttgaataaataatacatatgatacttattttggtcattgtatatttgacaactatctaattattttttaccaaacacttatatacaacttttttaactcacagctgttttaaaattatatttactaaataaaaattttttttcacaatacaattataactgttttttctcatagcacagctatagttactttttcttacagggcaactgtgccaaactggccctaaggacacgagtgccttctaagtaataggaatttaagtctattaagatgaagatgctatgaatgatacttggtgacatagatatatttttaatattttttaattaatacttactattgaaatgaaaaagaatgtcacaaaaaatgtcgtaacataacatcctttacatcttctttttctaaatttattattattattttatcataaattaagaaaatttgtttatttaatatttactaaataataatataatattattttaataatttttaaaaatgcttatcattgattatgctagaataaaaagtattaaaaataatgtggaaaaaatataaaattgttataaatattaataattatgt

SEQ ID NO: 304722 - DNA, 1272 bp, Cannabis indica
tttttttttttttgaaaagcaaggttaatattataagaaatacctactggcccaaacaaaatacatcacttgacatagagacgatctctaaatatccaataaagtttacagctaatgctcttttggcaacataataagccataaaattagaaaaaatctatgagttctagtaataaaattacagtctaacaacaaattagaagcattcaaaaaggcacagtaacataattttgcacctcctaactacttggcatgattcccttcgtaacattaatcacaatctctgaatcactttcaactattacatatttatgcttttgatccactgctgaattcaaagccaacagacaagtctcacctatagacaaagttagtttattgttataagaatgtattaatttatatttatataaacattattaattaaaaattttaaaaattagattatcactttttctttcacatcacacattccaattctcactacatttttgtgactgctaccttctcattttactttgtagttaatcaaaaaaattcttcatttttctcttattttcttaaaagaaaaaaaaatatccccataattttacgtggctttggccctatttttggccccaaatatatattagagattttgttattgtttaatttggaaaagtgaatatgccaaaagaaaaagactttggtgaagtcataatctaattttgcatagcaagtgagtggtgtattattagtaagaaaataaaaataaataatggtgtcagattcccactactgaacagtacggataatgatatatgatttgaataacaaccacgtgttttttgcaaccctaggcttagcttaattaattagattggggtctgtttctgaatacagttctgtactgttcagtacctgtacggttcatacaattcaccaattgaatttatcacgtgccaatattattatattatatgcaccaatcttatcttttattattcttaatataacataaattatttcacttatcctttttaaataaattagggttaaagcctacatattaggaaaatttatatcttttttattgatgtttgttagaaaaaaacgaaatcataatttaccaaattagttatatagagtttacaaatttataaaagttgtttataaatatgaaacagcgaggaatgaaatttgtgttctaatcagataaatttgtattattttgtatttttaaagtaaaaattcataattttaaaagtttctatatttaatttttttaaaaaa

SEQ ID NO: 304723 - DNA, 2001 bp, Cannabis indica
ctcaaattacaatctcgaaccttctttgtcttcttcgagagagcaagaccacatagatcgcacacactcatgatccagaaatcgaatcacacaaaaaactcaagaacatcatcacacatacacaccaatacagaaagatgagagttagggttagaaaaataaacaaaaatagaatcatacaaagatttgatcttagagttcatcccagtagatgggatacgtctccatcaagctcatcttagagcagcttgattatcctctagaatcaacatgtattacaagtgtgatttccagatttaaaccacacaactttggttgataatctctaaagatttttctctttgttttcttcctctatctctttctaactctctttcttttgtatgtgaaaataattgagctctaaagagcttctctctctactctctcactctaactcagctcatagaagaagaagaatggattcagctagtctcttccccttagatttgtttatttataatttgtagaagtagttgcggcagttagagttagttgttgtgttgtattttcttcttcttgtggtaatctatttattgttagtttgttataactaaaattgtttgagagtaccgtatttaagagtctgtactagactttggccttcatgcacccttgtgatataaatacttgtaaatgaaaccaaggcttataaggggatttacacaatattgatcattagactgctatttatgaagttattttttgtctagactcttgaacagggacaaataaatgtcacattagtgctacatatttaatgtaatgagcagattgtaactgtgggggtgatttgcaccaatttttaaagtccagaaggaatttttacaataaaaaaaatttagaaggtaaaactctgatggctcatagtttaaaggacaaatttagaaggtaaaactctagatggctcataattaaaagacatcaaatttttaacaattttttttcatcaatgacgactaataagaatgagaaaaatcttaatttactcccaaataaatggatttttacccccaaatatgtgaaagaagacccgttattcatgtttttttaatattttattttttctatagctaacctcgccgatcctccctggacttgggcttggctttggttgggtgtggtgtaggcatgatggatctcatctctttttgttggctctatcttctcctagggccattcttgtttggcagcaaattcttcttgttttctagcttcatttggcaccatcgagcatcaggcttgtgggtggaggcctggttttagggtgtctctcaaatttgggagggagacatattggttttgggttaagggctttcggaggttgtagagtgtgttgttgtcaaatttatttgcagatgtggcgcttggtattggggtcagtgggggtagctcttcatgtgactcttgattttaagtggtggtgattttagggtgttagtggtatctaggctagttgatttgattagcaatattagtttggtgttttgttcatttttgtttttcttcggttcatatttggtttcagatgttttgtcttaatttttttatgtttgctttaatttatatatttatatatatatataatggtattctttcacagcctgctaacttagtagagattgttattgttgaagaatggaaaggagtttgatttttttttttttttgaaataaatcaggagatttattaatgaataaactcattcaaaataatagaacgcatttcagaggaacaatcctccaactgaagcacacaacctgtagagaaacaagagtctcttgccaagtaatgagccaacttgtttgcagatcgttgaacaaaacataactcaacaaaagataaagccaaaagtaaattcctaacatcttgatcaataagaccaaactgtgaggacataaagacttttatcgtggactgcttggacacacaccaaattgtctgtttctaacactacattgt

SEQ ID NO: 304724 - DNA, 3365 bp, Cannabis indica
ttgaaagaaaaaaaagcacttgattgattttttttcttttccaatttcatgactagagttattctagctatatgacagtattaagtatgagtaattagaagtttttagttaaagattgcaaatttacaatactaaggggaaaagtagtaatctgaaagaaaaaaaagtttatatgtattgtgctgaattattggtttagcattggtaagaattattaaattttgttctcttgagttttgtttggaagttggattttggttaggaaagattaaggtaaggaaaatagaaggaaaaaaaaagtgtggagaatgattaaaaaaaaatcaatttttcttgtttggtgtgggaaattttgttgaatcaagtttttttccccaccaaaatctaatttccatagtcttatggctttaggtattttgcatttgattctatctaggcatttggtaagggtaagagtgttttgtaaaaatagtctttatgaaagtttttattagcaaaataactttggatggtcgcagaaacgaacatgaattataatgtgcaaccataaacgtctattatggtcgcaaaacgaccatagattacatgatcccatagaataaattaagtgaggttattttgtaaattttagtattttaggagtaatttagagctctgttgtttactgaggttggagtgaattgtgtgtatttgattatggtagtgtgttcatcctctccaattgcagctctctaagtccaaatacactagcttctagatgtgaatatgttactctatggccctcttatgactgtatcttacctatttcatttttttatttttgtggacaggaagctactattctttggtggtttaattttatgtttgttaagaacatagttcgtgtatgatagattgatagtgttagtttataattatcgaaaggagatacaaatggctggttttatggctggtatggttatcaatcatggatcatatgaaagtgattataataaacattcgctagagattccagatgatggaggtcgttggtacttctcccgaagagaaattgaagaaaattccccatctaggcacgacggggttgatttgaaaaaggagacttatctacggaaatcatactgtacatttctccaggatttagggatgagacttaaagtgtaagttttgttacttctcgtttatggcatatgccaattgaacattgtcttagttttttcctaattatggtgcttaacttctatctagtaaaggttttaacgataatgaaaagtcggtttaggagaaccaatgctgtctttagtggatataaatgagatttagtttgtttatgatcattgtttcaagataatgatgattgtaactattgtataatgcagaccccaagtaacaattgcaacagcaataattttttgccatcgattcttccatcgtcaatcccatgcaaagaatgatagaagggtaagcctatatcattcaatcttggactgcccttctcattttaagtcattgtaataatgctaatataggtagctatacaaaattatcaatccatgctgattggcaaagcaactgccgaaatgtacgagggagaactgttagatacgattgagttggaatctgatatttgacattgggaattcatctattgtagtacttaattttgtgttgtaaatcctttgcagaccattgcaacagcatgcatgttccttgctgggaaagtagaagagacacctcgccttctaaaagaagttatacttatttcttacgaaatcattaataaaaaggatcccgcagcagcacaaaggattaagcaaaaggtatctttttattgccttagttcttgcataccaatcattcctttatttatcaatgcatgatatttctcttaggaagaaaagaattatgatcatgttattaggttttggtggtctagaagaaattttattgattttatgagacaatgaggaccaaataatgatgccttaatcaagattttaaaatcgtattcgggaatcgtctttagcctcaacaaaaagaacaaaacacctcatgaattatcataaaactcatacaaacaacacataatttcataacaaagtcataaaattcatgaaactacccgtttatatcataaattacattcattgaaggttccaaagaaaatcctaattgatagaggaatagtagaatcaaatcaaagtccaagcatgaagaagacatattccaactcaaatgtttaagaagtcataattttcatgatcatcatcactattgagactttacgagaaatcattgtattgtatagctcgatcgttgtctccatcatcatttttagcaccttcaaattcatcttcctcatccaaatctacttggatattttttccatttcctacatcataacatatcaatatgaataatttatatcatagactagcctactctatataactaagtctatacttgtaactacataattgcaatgagttctaaaagtaacctttctttggtgcatgatttgtttcttcttccttgttgctcttgaactcctaccctcatcctcaatctgcactaccccttccgatttcaattactctgctatcgccatcttcttcttcatttgggttggctacccactcatcatcagaagacacattttcaacaatcaaaggatcatattctacacttcctgattgtttcttcaaaaaattgtgtttcaactttctattgtacattatgtacacaggagtattcatcctagctgtggttaggcggtttcttttctttgcgtgcactttattgagaacactccaattacgttcacatgtcgatattgaacaaataagacctaggattctcattgcaaattcttttagatcccaccgttcgactatataatgaatggaaaaagaaatgaagtaactatatctataattttttttttttttttaaaaaaaaaagaaaaaagtcgtaagtatttacttggtgcatgtaaaacacccattaatcagctcagaaaatgatttaccttcaattttttattttttttagtaaaaaaaagaacatgtaagagatggactgccttgagttgtgatttattagggttttccattgcagtttttttaatagtacagacatgagttaccagacatagctttattgtgagcctgaatagttttccttagttatatatgtaattttacctttaacaaaaatgttttcaatgattttctttttttttttgttagagtattttcttaaacacaaagccttgactgccaatataattttggattcttgttgacactatctggcaatacaaattgatccatgtttttttcgtttatatctttaatatagttcac

SEQ ID NO: 304725 - DNA, 1784 bp, Cannabis indica
gattggatcggtttttaattggaatttgagattgacatccaataaccgatccaatccaattagaatccaacttttagcttccaatccaatccaattgtaattggatatccaactttttgtaattggattggattggattggttcggttcaattggattggattggatgatgcccacccctagtagacgtcgttgtctgtgcgaagaagcttggcctgagtcacctaacatagcaaatattcccttaccaaagccattatttttaccacaagtcattgtttcttttcctccaagtgatttggattttgacattatggctattaaagctcgtaaatctaaaatgccccaaaatccttctgttacattcgaggcagaattgaggtcagataaattgccccttatttaggggatgttttaatgtcttgcaaattaggaaccagaaaggatgtcatattttctcagtcacacctagcgaatttagttgttttcctccaaaacatgtttgaaaagatgagggttacagggtcaatgagtcttcaaatataggagcttagagttttgaacaaattagaacagggattgtactctcccttagagactattttgaagatttcaataactaccacggggttgcaccctttcaactcgcccccaactcctatagaatcctcggttgcttgaagttgttatatcacatcttaggatgagtgtgtccaacttctcttgagatattgtatttctactccatcaaagcctgttctacgaggaagtattgctcaggaggcttttactatttgagaactcatactaatgattgcaaaattatcgtcaagcttcctgttgatggagagaactcgtcaactaagttagcggttggaaaatgcaaggttaccaagaaatgtaataaagatacgataaagatgaagatgaaaagatgtctgaatatttctctctatattgaattcaatatttgagttacaccaaatgattttccaacccccttcacatttgagatggggggtatttataggctctaatggcctggtgttcaaagtggtctcatggggagaagatgtcgctttcccgctacatgttgcacgtgttagaggtaacctgggaccccatacccatgtctagtgtcagatagtccctagtcgcaggttggaggaggatggtccccgggttcatgcgcatggtccccagttgcacgcggggtggtctccgattatagggtgtaggagaatggttgcagcgtacccttggtcaggtttttcaggccttgcaggtccattgtcgtcgccacttgtacctccttgttctcagtctttagaaggcgtggtggtacgctcttcccttccacgctttgttcttacaatcctttctaatgtcattcttatcattatgcatttgatttttcccttaacgtcgcgacccctcctaataacatactcactccatgcgcaccacggctcgcatgcaagcccccatctcttccccttctgggctcacgtgcaagccccccatggactcgaatgcgtgccccattcctccgcacaatgtcaaatctcatactcccactctgtgcaacctctcatcaccacggctcaccccaagacacaggctcatcataaaaaattgaccctcatggctcgcgtgcgagcccccatgccttcgtagcaagactcactgtaatgaccgctctagtaatgtggattagaaaaggcaattagcactaatttttattattttattattttattattatttgtgaattaatttatttgt

SEQ ID NO: 304726 - DNA, 2005 bp, Cannabis indica
ttaaaaattaaaaaattaaagtaacgttttttactttttttagttaaaaaaacgtaaaaaacctttcctaacctttaaccctttttacccttaaactaaaaaaaaaaattaataattgaagtttttcaatccaaataagcatgaaacttgtcgagatgcacaatactttttggagcatctgcattactcggatagcgccacctaataatttcgtttgttttctttttccgtgttattattattattattattattattattatttagctaaataattatgattataataatcaaaggattgtgttgtgttgtgttccattgaataattgagatttgagatattgtgtaaaaccacgagtgtctccctcactcatgataatgcatgcattcatgtggttttttttttttgaaaaaacaatgataatattgttaagaggctaatatctaggcacgaaagccactaaatgaggccatgcaaattattatttctatttatctaaaagcctataaaaatatatatttagggtacgtaacataaattagttagtaattaatatatgcattatgccagacagcttattacattattttaagctttttctatagaaacagaaaaataataaaaaattaattaagcacaatatctttaaataaatattggttaattaagatggatcattaaggacaattaccgaactactgataaagttgaaggtggtggtttttaaagtttaaaaatctaatacgctcgttgttgttaactttatataggatggatcactctctcaaaatatcttatttcaaaagaaaaagtgagaaaatatcttgaaagagtttgataattataataggtggagaaagcctgtcatgttgtagctgacctggaatcatattgatttttttggtactcatcatatacataggacctacacaaaaacttgtgtttattaactagaatatcacttattggattacgaatgagagtcagtaatcatgacttttattttttaagaaatgagaatgaaatacataagttttacagtacttattgatttaccacttgaggctagttcaagtaactataagagagtacgtgtattgaaaattttgagttcgaatctcaaattatgcatgattataatatataaacacttaaataaaaaaatatagtacttgttgattagtttctctcattcatattttttttaatgtattgtcacttttatttttaatcaaataatccaaatatacatatatttttaatatgtattatgtatattttaaagtaaattattatttgattaaaaaaagtaaattaagtattattattagggtttttttattttagtttttacatttcaatacaatttgttttttgtatttttacagaatttcacacaaaaactcgtatagcttttaatagagcaacttaaatcgcaatgggataatattctttattattattattactctttataattaaatattttaatacatttttttagggaaattaccttataaactattttttttttaatttgcgatttgggtagttctggtggtttctatatgttttgctatatgaattttggttgcgatttaaattgttctattagttgctagatagatttctatatggagttctgtaaaaatacaaaaaacaaaaactattttaaagtgtaaaaagaatttttttttatttttattttgattcaataaaaaataaatatataagttaaaagtattttttattttattttatgtattatatgcttttagggtagatttagatattatttggaagattatatcatttctagtcatatacatatgctctacaaaaaatcttacatttagtgacaacaaaacttgtgactaagtgaaaaaattgtgactaattataaatcatgattcctatggtgtgactaaaaggtccgtgactaaagatattaatcgcaaaaattactatttgttgtgactaaatgtatttttagtcacaatactt

SEQ ID NO: 304727 - DNA, 2437 bp, Cannabis indica
gatgaccatgaattggattttgaatcctttggattaaagtaaatttaaagtaaacttatccgctcattgtgcctaccatgcttttatcatatttgttctgtttttctcatgcctatttgtttgatgttattactagatgacatatttcatagcttattttgattagttcatgctattcgatatgttcaagtttttctgtgcaattaatgtgaagttggttgtgaaaatttaccctatgagatttagggcaatgtgagtttctgttagccatgccatcattatattgtaattgtattatcaattttactttgtctctagctccttgagtaatcgagtttgttagcatttagtttgttcaagtttaaaatgttaggagaagttttctatatatcaagttagaacaatattttatgctcttaccttgtgttgtgtatctaaatatttcaaggactatgctaatcgataggcctttcctaatttttgacaagttgagactcaaaatcttgccacttcaaaagcccaataagaaattggatcattaaaatgtaatctattaatgttgaatctgctgagttgaacctaaaaccctttgtagttgagacacaaaatcttgccacttcaaagcagttgcaacctttattgattactgtgattagttatagtttagacttgggtcgttgagtttaacttagaataaaagaattagttgatccaatgtgttacatattcagtcttagttgaccccaaatatttgtcgccaaatctactttaatgtgcatttaggaactggtggttgccacatattagcttgcatgctatttaaagggtattactctctaattttgattattcttggcctttctggctgtcaaagttcacttttttaaaagaccacgatagtacatattattttcgtttttaaagatcaatcatctcttatagggactcatgtgagtaaggctttcatatttttttcatttccttttgggaccagttcttgatgagttgagtagttagtagggtcatttgaacttgtctaatagtcttgagatatcttaaatatcccccatttttttagtagacacctttaaaatcaaggaaggtaaaattggttaaaaatcacaaacagttaatattatttaatagatataatgaaaagaaccaaaaactaaatctcatacctgtctcactttataaactaaattttttattttgagaaagtattgctagatagaaattcattctatgcacatgcctgcctctatttaagagggaatattgtccattcattatgagagttgtttagatttcccatcaatccaatatacccagtgagccattagatgtcatatcttcttcatctaaattctatatccattggctagcattggtttcatgagactaatgagaatgcttacttaaaagtcctacctatatcactatatttatttgtatgtttatgcttatattgttaaaagcaatcactttccagttcaccattcttaacttttttcaagccttaccatcccaaaatcagtaaataacaaactagaagtcacaattttacaccaacattacttgtgttgtgttcttatagatgtcatgacataattaattagtaacttaatagtgacatagaaaaagaagaaagaggtattacatcgctttctatctatttttttttttccattctatattctactatatggatctaattattgcaaatgagtgttaaaagcaattaattctgaaaaatagaattaagaaaaagagaagtctctcctgacaaacctccttgactattaatattataaatattattatctcattctctatttttttttttcattggaacccttatgaaattcctttccttacattagttctttctatattctaattttaattaccttagaaattttcttaaatcaataattttagtcgattaattaggaaaaatctttttcaggtcttataagttatccatttctgcatgtattacaacgatacgaataatatccaacataattatataagatgacgtcttatacgttgtcaattttttataatcgttattaaattaaaatataaaagatttaatattaattacataataatgatataacactacttgagtgttggacatggttgatggcctttaaaattcatatggaactaataaaagtgcacctccaaattatgttatataaaattatatttacttataattacacccgcatataattttttatatcgtatttttatagtggacctcatttattattataggtagaatttttttttaaaaaaaaaattaatattttatttataattttatggtctaaagtttttatttataaaaatatatttgtaaaattttaaaattacaaaaatacattttattaagtaaaaaaaataagaaaaaactaaaaaaaaa

SEQ ID NO: 304728 - DNA, 1544 bp, Cannabis indica
ctttgtatcatgtgtgattttgatcaccgtgtcataaaaaaacacgtggcgacatgttattggactatgtattgaataagttaaaaaaatatattgccacatggttttgagcaaacacttaacgaacttaattgacatatttaacaacaaaaaaatactacgattgcaacaaaatcataagataagattctttggccactaccttttttttattagagtcatatttataacaattataaatataaaaagagtttttccgcaaattttccgtattattattattaaatctaattcgctcgccccaaatattccttactaaccatttaccaccactattaatttttttccacatcaattttatttttttcttttccaaataaaactaaataattagttaccatgacaatcaattattcattttcaagtatggctaagtaattgtataacttcacaattgatgatttttccatatttagttaagtaacttgtttaatcaaaaagttagcttgatgacattaacgtggatactattttggacaattgacacgaagaatacaatttatagggccttgcatcccaggataaggcaatgttatctacatactgggggcacctaggtaagcaccaagatccaataaagtcattttttgtgttattcttcagcaaacaagtcacaatgaccacaaaataatgaaccatgaggctgatgatgtcacgtggacatcttgagggtcaagctggatctagtagctgtactagccgcctaggttgacatcctgtgcgctgtcttgcatcaattttggttctcaacaactttatatgggtgttctgcttagacattgctcgaggatacatgaaagacatgcctaaacaaagatttggactttggagataagtttacaagaaatgacacccaggaattttgatcgaaagccggcccctccaatcttactttgcagccctaatgggagcccaagttgaaatctagtcgatctaggtgcacaacggctatggtttaggtttttgagaacttcttttgactgtgactcctcaaatccaacaagaaacaatgctaggacatgagatttcaccaatgacatcccaaagaatcccaagtcaaactataggttcccatgttgacattttaacctgggcaccaattttgtttcaccgagtatttcccgcaaaaatttgatgaaactaaaatttgtggagtacttttcaagaaaaaagatattaaacataaacgaggcaaattctggagacttttcccccacctaggcgcctagtgcaagcccctaggccactatgggcattgggtgcccacgttgacatatctcaacctagggcactccattacatatttctaaagaatttttctaggcatttcccttattttagtctacgatgaagatacaagtgcattcaggaaacaaacaaaaccatcttgagcctagatgaaaagctgggcgcccaaggtgtcatggatagatctgttgggttttatgccctaaataaaactctttacaatctgattagttatc

SEQ ID NO: 304729 - DNA, 1741 bp, Cannabis indica
gtcccaacatttatagtagttgaaattagaatagaagtaggatagtgtgttgcatgcctacctgtcttgctgtagtcatggccccacttgatcactcatttactcctttgtttagacaaaatctataccacttaatattttggaaagaaaatgttaaaaagtactagtcatatttagtactttttaattatgtgttaatattattgttggtatatttaactattaagactcatataagttagagaaatcaccttatatatcacttttttaacttttattttctattttatacttctttttttttttctattttttacgatttgaaattgtttcgttaattgcgaataaggttgcgatttgaattgagttgcaatttaggttgcgatttaagttgcttcgtgggttgcactgtatattctgcaaaaattaaaaaaaatactttacaaatgtataaatgaaaaaaaccctataatttaatgtaatgattaattttatagaatatcgctaattaattacaaagtgtctgtaacacaaatatcaaataacaatgctcttttgaaaaatttatgttattttatgggtttcacacctatacctaatccattttccaacacaatatccccactttatatttttggtatttttttcttttctttcttattgtctagattttttattgagttagattgaaataataatttctatagtgatggcaacgagtagggaaatgatggtttttttagaaaaaaaaattatttttttgtaaattgtgatatttttttgggtatatatataagatgacttggcaaaaattgattgatagttctaaaaaaaatgatgcattggtatgtggatatatattttttttataaataagaaaaagactacgtaattattagtaaacaatatattacgaatattaattctgattattttttatttattttgttagatttttctattactctaatccgattttgaatattgtataatacttgtattactagtgaaaaaaattataatacatgaatggttgtaaaagttttgtgtaaagattatcatatctatcgatctaagtggtttaaaataaaaaatataatatatgatcatcatacaccacatgataataaaaatttacatattaaaaaaacatgatcataaattttactattataattaattaattttaatgattttttttcattaaaataaaactaattatgaaagtgttcaaaaagtaggttaactttttaaaatatatgtgtaataattgtgtccaagacattggtttgaagttaaagatgtgtgaatgtgagtgataatatattgtgagataagtcgaataaacttagaactcatctaaataaggattttaaggtttatgaactcaaagctgtcaagatgttatttcaactaacattcaacatctacaagaatattacaactagttaaaatacaagaatcttgtacaaggatcgacatatatagtcatagtacactctgtaatgtatttggtcgtagtacatatttcctcgtgtatctggtcgtaatactctcttatacacttggtcgtagcgcatactgtgtcatgcattcatctggtcgtaatacatactcttacatacatctagtcgtagtacataattttcatgcatctagtcacagtacatactctgtcatgcctctagtcaggcccggccctgggcataggcgggctaggcctgtgcctagggcccaccta

SEQ ID NO: 304730 - DNA, 3383 bp, Cannabis indica
aaaattccgtaaaaccgtattttttgttatttttatgtttttgtgaaataatccctaaaaaaaagtaaactttgaccctaataactaataagggtatataagaagaaagcccaaaaactaacccattaaataaggttagttagcacctcaatgaatccattttgttcattaattgtttggctccacaggccataaaaattaaataaaaaaaattcaaaatctgcatactcttataaagcagcggcaagcagaaaaaaaaatcttctccagaccagcaaaacattatagagaatataaccataaaatattgctgcaaacttgagataaataatatttcaggccatgcatttcaataattcttttctgaattctgagagtctagctctagctaaaattattaaccaactataacactacctcacttttatcaaaattcagttccactcctttaaaaggagggattaataagaatcctacagcaccaagcgaccgagttacataatcacaggttctagagtcatgaacaggtcaaactactagaaccacttctttgtagctcacaagctttgcttttctgctgatggatgccattttaaggtggaagcatttggtaagttgctcacttgttcttcgatggctgccataaacagatttgaggcttggatcagtttacttgctgctgatgacttccatacataggataagctccatatgctgcagggtacatggttggatcatgaggtggtagtgcatatccatagttatcgtaaacgtgtcctccatagtatgccccgccccattggttgccaaaatcccctctgaactgtaaactacaaaatacacaattataaaaaaataaataagtactcagatactattaataaacaagattgtgcagttgtgcactaggccatatggacaagaatggaaattatcctcctttaaaagcttcatgctagtcccatgggaaatatagtgattataatcttattagtaaagcagtcgtagctgttttaccaccagtaacgtttacataacaatgtttcaagaagtctgaatcacagtcatgtccagttgttaagaggctcaattcaacaaagttgtttttggttgcataggaacataagttggttgtttatgttgttcttgttaagtgtgtgtgggtgtgtgtgattatggtgaaagaagaaagaagaaaggagagagggaggagtgcctgcttattggctggattgcggccccatgagagacgaaccgtttgcttcccaattactgttccattcaacttctgcagtgcatcctctgcattatttctgtcacgaggttcagaacaagaagcaatcagcaatttatacacagctttgaatgccatagcagatcattgaatgaaaaatttacctgttggcaaattgtacaaatccacatccttttccagctgggattttaactgaggctatttctccatactgagagaatggttgcctgagatcttcatcagtaacattagggtcaagccctccaacaaatatctgcaaagtgcatgcatgactctttcagagaagaaaaggtcacaatagatagataaacagggccaatagaagatgaaaaactcactgttgtgtttgaagaatctccttcagattggaagccttgggttgatgcaccattaggtgcataccctcctaataatcaaaacaacatagaaaggacattcaaacaatggttaataaggaatagagttagagtattaaataaaaatgatcacaattgttattttctattttatttaattacgtaaacatttgagcaagcatttcaaataatggacgaagcaatagtatcaaaccaattaacaatgagcgagataattcgtagagcatacaaatgttttagccaatatataagaaaacacatacaacatgttctaattataaatttcatatacaccctatgtgaacattggaattggattagagaataacaaactatattatggacaaagaagtaggcagtaaaataatctgcaaggacatgtgataagtaactgagaccagtacattaatggcgagacaaaacttatagtcacacagacaaacatatataattatgtaaatatgttagtttgtctcctatacccgcgagctgcaaatataattagttctgagcttatatatgttagcagacaatatgagattaagaaagttgaaattaatctatagtaccatgttgattatatccagaggacttccttggagttgcagcaccaattctcataggtctgctggaacaataaacaccattcatttcggtcattgcctgagtcctttcactatcatctccaaaccttacgaatccataaccctttgaacggccagtattggcatcaaagacaacttttgcagctttaacagatggatatttactggcaaaagtttcgtgcaatagtctatctgtaacatctgcagctaaatctcctacaaaaattgaaagatcagaggcattattatctgaacgcttttcgccggtgctaaatgttgcccagttgaggcgaaaaggcagatctgtatttggcatcaaaatgccagtatagttctgcagaactttctctgctgttgcgtgtgaaaaaaactccacaaagccatagccctcagacaaaccagtctgcttattgcgtataattttaatggaagaaatctgcatcaaacacaactctatttgttaaataataaggcagacagaaagaaaataatgtgcttttctgtatggaatcaggttaatatatttccaactgcttaatatacggttggaagaacaagattaatttgtacatgcttcaatataaatttcattgtaagtaagtagaaatgattgtaggaaaacgaaaacgttttacttttttaagtagcagacccaaaagagaaataatcttgatgacatcaagtacttaaatctgacaaaacagaaataaataaaagactagacagaaatagaaaaaatcaagttatcttgccagttgccattcttcctagtgtattttgctaatttgatcaaacacaaagttgatttgttccattatatatacaatagaatatctgtatatatatatattaactccagcttaagtattaattacttttgttttaatgctaaatcatatctagaagaggaaaggaaactctaaccaaacatttatgttaaacgtgcatttatggtaaataaacaatatgtctgttacattccctcatcacatttcaccctaaatcaaactctaaactcacacgtttcaattgatagctagctatggcgctagctccctgacattttgaaattatgaacaaatcattatttttatatggtaaactaaaatattgattttttttttt

SEQ ID NO: 304731 - DNA, 1396 bp, Cannabis indica
tgtgattaaaaaattaaaaaacaaaaatagttactaaacgacacctaagataatgttataaatatatttttactttaaaatcttaacatattgtgttatcgaaaaatatcatataaacaaattaaagtgtcgcaaaagcaataccttttattctgtaatatgtattatgtagtgaaaaaagagagggaattgcataattaattaattaatattagtctcactgtggtgatgatgatgatgtttatattaatgattttattagtaaaaatgtagtcataaagctcatgaaagcaatagactattatagcactatataaataattaatatatttttttttgtaaagaaaataattaatatatatttgctgtcttaattagcaatgaactaccgcgtgtcttttatttatttattaattaacttaattgggtgcctataatgatatattatgtatagaaacggtttgtggagccaacttaattaagtaattcaatctacgtatgattatttaattagactttataatattaaataagagtttgtgctaagtaattgtagatattccatcttcatcatcaacagaattttctctccaaaattcaacctaattaatattcattaactcttattaattatatgaatatgattatgtatggatgataataaaatggattatgtgataaaaacatgtgtctcaccaaaaaaagcacatagttttttttttctttgatagatagcacatagttttttgggtgctgttaattttgtaagccataattgaaattattaagtagattgtataattactagggaatatttttgtcgttgaatattggattaataatatatggtatgtttattggctataccataatatagatataatcaagtgatttgtgggattatattacaagtatagctactaaatcttaattttataatagaatttttgataattaaattaatactacttataaaattaaaatctataaaaaaataactaaacaaataaataaactagttaaattctacaaaatcaattcgtgacttggctaatttaatttcaaatcgaagtctttttttattttatttttctttcttttatttataggatgaaaaataattgaatatttactctttattcacagtatatatataataatatatataagtattgttattggtattaaaggtatcattttggaagtgatatttttctaaaaattattactttaacttatatgacactcgatacttaattatattaataaagatattacaaaattgaatgttaagtaatactagtaccttttagtgtttccatatatatatgttcattgttctatatatactagattgatgttacatgtaatgcagtataattagtttttttttttt

SEQ ID NO: 304732 - DNA, 2719 bp, Cannabis indica
gagattgaacctaagcatggtatggatgaagatcttttgatataagatcaaccagtgatattgacttagaaagatacaatggtaagattataatatctttaccaagatcaatatcggtctctgtccaatgtatactccatacatccaaaactagaatactttgccaatgttctggaaagaacataacacttatgcaaagggtaagtacacttcatcgctatttatctcatcaatgtaaatccagtgcactgatgaatcagggacattgtcttttgaagcatataatcacaatcacattccactgtgttgacatcactgtaattgtgaaagactatacattctagacttaacagattttgtatatattaaaccacaatcatgaaaactacatgtaaacataaatgacttctaatttttcattggtaacaaatcagattagatctaaatgagttttatttagggcataaaatcccaacacgctactcttcagttgtagttctattaactcatttataagagttagtttagaaagagctaagcctccatcactcttcaatgattgcctctacttgatattttgggtagctgtagccccttgatttctataagaattttttttattttgtaagcttgtagagtcaataaatgtgcttttcacaacaacaacacatattgaagaccagttgatgagtaaaaatggtgtttcagttaaaatatattttgtctaaaccacttgctcacaagataacttcttaaagttattctttatttttagttccacatgcgtacaactggtagccctctaagaaaattcaaaggcaaggtctatgaaacttggtaagttgcaagtgagaaagagaccgtaagtctacttgcttacttgggcggcacccacaccatgcaagcatcgaattagcacagtgaacttatgtaaagaaatttcaaactgagtaagaaaaaaattgaaagacaagttagtgcaagcatactttgctagacctcaaaaaagtcaatttagatacttatatgtctaagcataagaagatagccatgattaaagacttcctggtcagtcatatgtctataataaaattctttaaggctaaacataagttgtattcaaaagtagagggctaataagccaaaacaagactcgaaagccttaaggttgaataaaagtaatgttaaaaagtaaagggaaaataggacatacatgaacatgaaactaatatgaaataaaatcataaacataagatactaatgaaatgtgtctacttgtgtgtagttgcagggggattcaaattgtgagctgaagcatcctgatttccaagaagttggccagccataggctctgtaggttgactagccatgagattagtggcctggccgaccacctcatccatgggttggtcggcaatagccttatcaagatggctagtgaagaacccttaggctagacagcagactggcctgccacctggtcaacatggtctgctcacatcctactctcatagagctccttcccctgagcgagtgttctcttgcggaaaggagaccctatgtagaagaattcaacattggggttatgaaaataaacctcatataagacctcaaaggacaagtccaaatactcgtccttgatggcttgttgtccatcaaaggcaagttgctttgactggcactcattctcaagctccatctccaaccaagaagattcgacaataaggttggtcacttcttggttcctaataccaagtaaacgttccaggtcattctttagatcctgggtttttctcaggtgagtttatctctagacatgtgcgtccctctctgtttgaagctcattctcctttgtaacgccctgaccctcagggacgccacatgtgtacttttataaacttattattactaatctataaattttggaaaagtgtggtttaatttaaatctttaattaaattcaaaataaaaactttcattttaaatactgtcgtaatatagggatcccctgtttaaaaaaaattcttttacaataggttacatttccaaacatagaaaggaaatcgatcccacttcccagaagccaagaccccacggctgatatgtacattgctgggagacctctgactcatggctaaacacaacttctaacttcttcacgtgcaccatgaagcacccgtgagtcacaatgacccagcaagaaaagctactaaataaaatttatggaaagtgctagcaaatttcattacaatgtaatatatataccgataggtcatacactttcaaggtgcacaaataacctaacgtctatgagagtacacttatcacataatcaagtatattcatagttattcagaatcaacagtctcggtgtttcatacaacaccctaaacattcatcattataaatactcatcttcagtgattcataaaacactctaattcgcacattaccataatcccataacctcagtgcttcataaagcactctcatcttacctcttcataaatacaaattcttacatttcgtgagtcactaagattctgcaagaaaagaaactattttcttaagcaatataaaaatccattcattcacattataacaaagatatatcccgttacaactcatcacataataacatgcttaagtcatttcacaaattcgtaatcacataatcttggtactatataaagtacccttaccactcgtcaaccacgag

SEQ ID NO: 304733 - DNA, 2623 bp, Cannabis indica
ttttttacttttagagttatttttattgaacctagattatgatttcaactttctatgtgtatttttttttagtatatatagacctcaatatacagcctctaaatcatctctctcaaatatattataccgtagaaacgtttttttctctgtttcatttgagggtgataaaaaaatggtgggttctgagtccaaccaacaacttgagcttactctaagccttaagccctcttatgtcccccaaactctcaccagtcttctaagcgatctagccaaaatcgatgatgttgaaaagaaaatatctattttgaatgattatttgaaaaagtatgaagaagaactctctcagatcaaagatctgagatatgacgttccccaatgcatgcttctccttatggacggtaataatttctttcatcatttatttgtctaatttattttcttgataaaatatacaaaaaagctttttgtgtcaacaatcttatatatatatttattacagcgattgaaatcgtaaaggatgaaattactaagacaacaatgaggaaagttgtttatgatgatcaagatatatctgtattatatgattataatcatcatcttgatggccataaactgaagaggcgagtttctgagtttcttacaagcaaaaaagagacttaccagaatgactaccgtaatgatgagatgcaaatgaaggatatcatcattaataataccattaataagaataatgtaccgaaaaataaatacatatgtaacggtttaagtattcagaaggacaaatccaatattttaactgaggcgagcagctttgttccatggaacccttatcaagaccatctctttacaactcatgaggtacgaaatctaatctggtaaaatatttttctaaaatgactaaattatcctcaaaattatttattcaagtatttaattttttttaattattttaagtatttataaaaaacaattaattatattgtcctttcagtcatccaatcacgacaaaaggatggtagagatagataatacaaggaaaaataaaaatgacaatgatggtcaagatgagccgatgtcaaatataatacataaaagaacggtgaaagagaacgataagaataatgaaaaaagagaaagatcgaatgatatcgatgaaaatatgccgaaattgaggagatgtggtagtgtaataaaagagatgaatgagatgattcatgggggaggagtaatgttgcaggcagagcaagaattacttttggatagcaattggaagggtactactataactcggagaacttggacacctcctcttcatttgaaatttcttcaagctttggatgtccttggagggcacgaaggtaatttcaacaaaaaaaaatatatatatcttattataaattttaattattattctaaatataacttttcggttttgtaataaaaactaaattattttacaagcaaagaaaggaaattttgtatattttttttttcactttcactaccatttttggtattcattcattccattttaacttttatttttttttttatttctttataagaacacatatttgactttattttccaagtaaggattataaaaatgcatttattagattcttttcaatcctttcaattgtaacctataaagctaaattgcatttttgtccatactaaaatttctccacttaccaaacccaaattattattaatatttgtttaattacttaattttaattaataccacaatataaacattaatatttttttattataatatatatattttttttgtgtgtgtttgaacacagttgccacaccgaaacagattaaggagcaaatgaaagtggaaaacctcactaacgaccaagttaagagccatcttcaggtaattaattaatttattaatcagattaatttgcactatgaatacttaaatttacggataaattgaaaaatatattttctttgttccattaattaaaactattctcatattatatattttttttaaaatatacccacttcttttgggtgagttgcccaatatactttcactctctacttaagtctagtatataatttgcattaacttaaaggattaaatgaggatatcatctttaaaagtgggtatattttaaagaatataaaaatagaaataaaaatgaaaacaaataaagtaaagtgggtataccatgtaatttcttcttaaatttaactcttggttgtaaataaatacctagatttaatttctaacagtaataatacttaagttataattctgaaaattccataaatacttgaaggtccggcccaaagcataggcgagctaaacttgtatctagggcccacctaactctaagatcccaaatattttattctccttttaaaaatatatatatattttattgattttataaaaatatcatattttttttttcttaataagggctcaaaaatatttttttcatgtgagtcacttaatttcaccgaccttagtactcggtcgttaagtattcacatattatttttttattggtatatttaaattaatttttaaataaaaaataaaaatttaatgacttggaccaattaaaaattgtcacgtgactattgactt

SEQ ID NO: 304734 - DNA, 2565 bp, Cannabis indica
taaatgcaaaaaaaaattattttgaagtgtaaaaataaaaaagcccttttaaaaaatacatagtctaacttattatccttttgtaaaacaaaaggtctaaaatactatttaccatatttgttatgcttttgaattattattattatatttataaataaatatgatatttttttttaatgtttgataataagaaaaagtaagattttttataagtagataaattatgaaaattattccaactaaagaaataatctctcaaaagtaattttccatagtttctacacaacgatttcgattagaacacttgttgtaaaatgtaaattacaatattcattttggttaaactaaataaaaaaaaatagtgcaaaaaaacaacataaaaaacacaactaaagctgcaaataataaaaagtaaagaacattcttagctaagaccaaaaacaaagatttgcttttgcaactatgtttgttattatagttatcaccaaaaatcattgcatgaacaattcccatccttgaaatgatgatatctattagcatctctaacaacaatctccctctcaacaatactacttatgaatttcaaaactgtatgacaatctccacaaacccgaaggtttttcactacccgaataactgtccccgggacagccttgagcaacccgaaagctacagccaacctctcgctatgcgaaaacagttgcctttccttctcttgctgttccatgtcatgtaaaacagagttaatgtcaggaatgtaacctcttctcctcatttcttcatcagttccttaagcaaaccgaaaatctcataaaaactcgcctttcttttccaaactcgatggagctataacccggtttcttcttaacatctagagaagtcattagctttctcacttttgacacattttcccacttattagctcctgcatagacattagataacattatgtaagtagaagggtctttgagtttagtactcgaaattcgttttgctatcctaatcgccatctgggtatttcccagattcttgcaagaagttaacaatgctgcccaaatagcttcatcgagctcgaaagggatcaagtttataacattctcagcctcatcaaagtgtcctgaacgactaagaagatcaacaaagcaagtgtagtgttgaagagagggattaattccataatccttgatcatcgaatcgaaagaaaactcttcctctgttgactaaaccaacatggctacaagcatagagcaaaccgacaaaagtaacttcatttggcttgaccatgttgagcagaaccaacaattattgatatccaagtatacaaattcgtgaacagcattctccccaacaatcttatagtgtcgcctttttgaccacaacgagcatagccagaaatcatagctgtccaagaagctgcttcttcaaccaatccacatttcgcggtttgttgaggaaagtaaaacttgagcaagtatgctaagtttccaaaaaccatcaaacaacaatttcgatcttttacttgttttttgtttccttcaagcaaaccataacatatcccgaaatcaaataaaatatttaaagtaatgaaactgtggtcatttcaattaaatatatagatatagacatggtaagagtcccaacccaagtcacttagattggaaaaacttgcctggaaagaaggagaaacgaaacttaaagatctttccaaacattaaagtcagtagctgaactgttatagtttacaatgctatcttggcatcctaacaagtaggtagaacgcattggatccatgtttattatagcatgagcagttccacttgggcttgccgcaagagcaacctcatctgcaccgataatcacctcagcataaccttcttttgcttcattgttctccaactgcaaaattatacacaaaaatatatacttacagagccccgaaagaagagttttcattttcgagctcctaaaaggtagtaataaggccgcttaccctgaattttgttttagctccccatatgacaaatgtttcattacaagagtagtgtctgtgatttcctcgtaaaccaccgggtcgaatctctccaacatgaacagacacacaacttacagcaccacctacacaaatagcaaaatcagaaaacaattttccgaaattcaaaacacacctaatagataggtgtactttttcagttttcacaaactgaagaccccatttaagtttgtagaaatagtctttttttattggtaaaataaccatgtatgattgcacaagtgaagcgaccaaatattacactgtgcgaccattaaacaaccattacaatcgctttgcaatcatagatttatactgtgtgaccaacagatttcaatggtattttactattacaaattgttagtttggctaatttcccatttcgatatacccattaaaattttaatatgctcattaaatttcaatggtagattagcacattctcttaatcctataagtataacccccaccctaccccacacacacacacacaaaacaaatatactcaaaacattaaacaatgcacaacaatattc

SEQ ID NO: 304735 - DNA, 2979 bp, Cannabis indica
gtgctgaatttggctcccatttcagcctatgatgcaaagataaaataaaatctgaatattttcaagctccaattcccatataagacaatagatacagttttgggacttgatatttgttaccctgtctactgttctgttctgtggcttgccaatgctttcttgattaaagttgtagtgtatttgggaattaaattgaaatttgtgactctttagccagctatgaaaaaagaaaaaagaaaaaaagaaaaaaagaaaaaaacaaccccaaaacctagaataaagagcatttcgattggtttttgtctttaattttatttaataattatcataacatggactttggacagattctttctttttttcttttcctaacttaagaccccacttgtatgttgtaaccaaattgctcgtaacttttacttacaagtcaaactatcaaacaaaaaaagtaactcatcacaaacaaagaaaagcaaagataacaaatgttaagatttttttttcccctttttctgatgatgtgcttgtttccatttggaccaccaagagctgtaatttgttaataatatctattatttttttaagaaaaactaaaaaaaacaggtgcattctcactgagcagaaagcaaaagtagcagtacaagtgtcttccaaaaaataatcaaaaatcaaattaaaaatattacaactgaaaagggtaacaccaaaaccaacaactgcagccttgagcacatgagaatggccccatttcgattggtcagaatctgtgcttggtttcttataaataggaggtagctgctcccatcccagttggacaaaacattagagaggaaaaaacaccatggggagtgaaatgaatgttctgtttcttttgattattaatgtggtaatggtggtaagtgcttctggttctactccagatgacaactacatctcagtggttggagatccaggaatgagaagagatgggctcagagtggcctttgaagcttggaacttttgcaatgaagttggccaagaagctcctcacacgggcagccccagagctgctgattgttttgatctcaaaggtaaaaaaaaaaaacaagactagactagactcaactcttcttttcatgtacattttttctggtacttatttattgtaatgggggcaggttcttctcttaaacacaaggtaacaaaagaagataacaaacttggagttgggactccattctctgggttaaatccagaaaatgccaacaatgtagatctttacgcagcacagaaagaaatttatctgggttctctatgtgaagttagagacaccccaaaaccatggcagttttggatggttatgcttaaaaatggtaactttgacactaactcaggtttgtgtccggctgatgggaaaagggttagaccctttaaatcaacaaggtttccttgctttggcaaagggtgtatgaaccaacccacctttaaacatgatgagactgagttgtatggtgagagcatgagaggaggttttaatggcacttatgatttggattctgaacctgcaaatggtcttgatgggatttccttctacgaagttgtttgggaaaagaaagttggagttggaagttgggtcttcaatcataaactcaagacctcaaagaagtatccatggctgatgctgtacctcagagctgatgcaactcaaggatattctggtggatatcattatgacacaagaggaatgcttaaaacggtcagtgaaacttaactttctatgtttagttttcaaattactctaattgaagaggtcataataattgaattacactaattgctcgactatatagtttatgccacgttgctgagaaagacaggtccattcgttgcactgtcaatttttcagtagtcctcttttcatgaatagctaagagttaaaaatgtcaaaacaatattgtcatgggaatctaacttgggtcaaaacatgaagttgttttcaacatgattcagtagacagatggtcattactctgacctgaagctactaatctatattatatatgcttcaacttgatgtgactctttgttgggaatgctatatttttcactaatttctctagtgtataaatttatactgtattcagctaccagaatcaccaaattttaaggtgagactgagtttggatatcaagaaaggaggaggaccaaagagccagttctacctaatcgacataggcagttgttggaagaacaatggcttagcctgtgatggtgaagtagtaaccgatgttaccagatacacagagatgataatcaaccctgacacaccagcttggtgcagccccacaggcttacagaattgcccaccttaccatataacaccccaaaacataaagatttatcgtaacgacacagcccgcttcccatactcggcttaccactactactgtgcgccaggcaatgcccagcacttggagcagcctgtgagcctttgtgacccttacagcaatcctcaggcgcaagagataattcagttgctgccacatcccatatggggtgactatggctatcccaccaagaaaggacaaggttgggtgggtgatcccaggacatgggagcttgatgtgggtggcctttcgagtagactctactactatcaggttactactttcataacagaacaagtttgttcaatcaacaagtagtaattagcagatttgttttgcgttaacaacatcatgaaatgttttgtgtttggtttgagcaggatccagggactactccagctagaaggatatggagttcgattgatgtggggactgagatttatataagtgataaagatgaagtggcagaatggagcttaagtgactttgatgttctgctcactactccaaagttctagtctcattttagtattttagataacatgatggttattgatatataattcatatgtataaatatactagcaaaaagcaacgtgcgaggcacgtatagt

SEQ ID NO: 304736 - DNA, 2081 bp, Cannabis indica
ttgctccgttagttgctatgtgagttactacgtaaatttttgtaaaaaaaaattattttaaagtaaaaaaataaaaaataaaaaaaaaaaaaaaaacctaacaatatatttagatatcaaatggcattcttaaataaaaataataattgaagatcatcttttctagtttatcttttaaaatatattgccaaaatttaattatctattttatctcaaactttaatattatatcatacatcatttttttaaaatgtatcaccattttattcattttaaatatataatattaacatttacacatatccttatataaaaaaatagattaaaattctaaataattaataaaatatatttagagtaataatagtactctataatgtagagcacaaatagtaaattataaaaaagttttaaaataaaagagtttagaacatctaatatagtgtgtttataagttagttatttaaatatattaaagaatttttattttaaaacatctaatgtaacttctctaaattcatattatcatatttgccattggtagtataaataattaatagtattttgaatacgagtacgacatgctcttaattaaggtatttaaataaaaatatgatttttttagtaatttacggcataattatctaggtttaactctcagttaatcctttatcaaaaaaaaaaaaaaactctcagttaataaatacttaagtttattttttggcgctaataatacctaagttataattctgaaacttttgtaagcacatggctgttaattgttaagtaaattgccatgtagcaattcttaattggtccaaattattaattttttattttaaaaaaatagtttaaatgtaccaataagaaaatgacacatagataataacttaacatttaacagtcaggttacagagttctaaaaatatgacttaggtattattaccgtcaaaaattaaacttaggtatttatttgcaagtgagaattaaatttaggtatttatgccgctaatttttttttctaacaatatttattatatgtagctataatagttcttttgtaaagttttaaaaaactatatattggtggcgtttggtaatacttttatttttaaattttttaattacaaaattaaaaataaattttttgattttaaaaaacaaaaatgtgttatgtaaccacttttgttttccaattttaaaaacgaaaaacaaaagtgtgttctgtaaattttattttcatttgttgattttatttaattcggggtcggggccagagccgggttcgggtcgggtccgagtttaggtctgggtctaggttctaagtcagggacgaggttgggtccaggtccaggtctaggttaggatttgggtctggggtctgagaccaaggctgggggcaaggtcgggatacgggtctggctttgtgtcttggtcgaggtttgggtccggggtctgggaccgagcctaaggtctagggccgggactggagtcggggtctagagtccaggttggggtctagatccaatgtggggtgtgggtcggcattcgaagtccaattcaaggttaggatccgggtcggggtttggagttcggtgcaaggtctagatccagggccagggtccgggtctgggttcaggttcaggttcgggtctaatccaaatttgggatcgactctaggtctgggtttggggccagggtcggggttcaagtctggggtcggggtttgggttgaggtccagggtcagggtcagggtccaggtctgagtctggggtcggggtctaagtcagggtcgatgtccatgattcgagttcgagttggggtttgggcctggggttgaggtccaggtttgggtcttggtcgggatttgggaccggggctggggtcagggtcaaggcccgagtctaggtctagggtctagggttggggtcaaggcccgagtccaagtctagggctggggttcgggttgaggttggggtctgtgattcggtttcgggtctgagattgatttttgagttcaggtctgagttccatggtctaggttgggttgaagtccaaaatattgattaagaataaaaaa

SEQ ID NO: 304737 - DNA, 3271 bp, Cannabis indica
caacacagtggaaagtaaacaagattgtgtgattaaatgtattcctagatttatcagtacacagcgtttagctgatatgataatctacaatgtagtttacttgcaccttagataagtgttatgtcctttccagagcattggttaaagtaagcttgggtatctcaatggagtaataatgggttggtaatctccaagaggatccagctggaccgcgagcatctcccgtttgctcctctcagcgagtgaagtatattcagaagattgtacaagaagactaatgaaagatgatatatcactcaaaaatcaagacaatctatatgcatttaatgtagcatcggaaagaacatcataggccttgctctaacaaacgtgtttaagagttgaagtccaatatttcctgatttcatgagcccccatacatcaatcgacaactatataaataaggcctcaagtcatggataagggataaatcacatcccaccaaactcaaatagacagcccaaaatccatcataaaataggcaattatgtcctaaatcaagattgggaaattgttccaagcatggtgtaaacaaacccgataatagtggccttttacctccatcatgggcctataaataccccaatgataaactaaaaaggggatcgatcgagaaattatctataataaacactctcattaataaagttactcgtggactaaagctcattaaagctccaccacattaagaaacatatcttctaacattcattaattacttcataccgctctaattactggttgccaaaaatatcgatctatattttggtactttcaatgagagatgtaggaagtcataagtagcatggtaatgtaatggtaaaaactagaaatacttcgcatccataacacctagatgacccaaaggatccaaaggaggaagaggtagcctctagggtgaatattgaagagaagaagacactaatgatccagaatattataaccaagaagaatatgaacgctacgatgaagataactatacagagatagatacatgaagagaaaaaactatcaaccacgaggttgagttggtaaaacaaaaagacaaaataagaggatgcaagagatattggttgcctgtaaaagggcaatggaaaatgcgggcatccaagtggactcacgtttagtcccatatgtacaaaaagggaccgagatggagccatttcagtccgaagagggtcagaaacaaaaggatagggaacctagtcccatcagaaatcctacaggaaaacttgcaacaaaggagaaccttacggatatccccaaaataaataaaaaggctaaggatccactctcccatttagtctaggaggctaacctggcaaagtcccttggttatagggaagatttccctgggggacttgtactttaggagcttgcgccacgcctctgggtggtaactaaacccttacctgtccttccctcatatgaggtaagcagtttttcacccactcgtgtaagtggccgagccgatcaagctttcaatctcatcttttaggatttttcactcattattagtgtgcccaatgtcatattgctactcacatactttgttggggtccttttgtgtattttgctatcacattaggtgctccctttggatgactatttgctccctttggatgagatatccagaggctctcatatagggggttcaatgtgtaataagttaaagaggtctgtcaaagccctggatcattacgaagaaatatgggaagtaggccaattgccaactcagagaccccgtctcatggataaacccataacatttactgaggaagatgccaagatgatccgtttcccacaccatgacccattggtatttaaaactcccattgccaataagatagtaacacgaattttggtggataacgggagttcagtaaacatcttgttcaaagaggccttcctcaccattggcgtcatggatcaagacttgtcacctaagggttcataacttattggatttaatggaaattccatcatgctagtgggaaaaatcaggctcccaatgaccctgtgcccaaatactcctcaaagtacgttcaagtactacacctttgttgtggtagactatccaatagcttacaacacaataatggggcatccaacattggtggatttgggagttataaccttaataaggcatttgtgtctcaaaaaattccctacccactctcctaaagtaagaactgtctgaggaaaccaaggggaagcaagaaatttctacaatgtggcctccaaattagctctcctcatggtccaattcacaaaaggatggcatccactagaggtttaggatgaattagacccccgagtgggaaatgaggtcatccttgagcccatggaagaggtagaagagattcaaatctatggtcaagacccaaccaaagtaattcgagtagggaaggacctcaatccctaagaaagaaacgaaattgtggaaaccattatagagtctatagatatttttgcttggacccacagagacatgaccggcataattccacacgtaattacccatgttttgaatgtcaacaaagacatgccagcagtgcagcaaaaaaggcgtccccttgaccctattaaatctaaagcattaaagcaagaggtggataaaatgttctttatctgagatgtctattactcggagtggttggctatactggtgttggtacctatgccaaatgggacatggtgagtgtgcatagatttcacaaatctaaacaaagcctaccccaaagattgcttcccacttccaagaattaatcaaattatagatgttacattttggctatgagttgctagcctttatggatgcctactcaggctaaaaccaaatcaaaatgcatgtggctgatgaagaatgcactagcttctagactgacaaacgagtatattgtttccatgtcatgcccttcgagctcaaaaatgtgggagcaacctaccaatggttagttaactaggtgtttgaaaacctactaggaaggaacatggaagtttacgtggatgatatgctggtcaaatccaaaacatgtaagaaccattttgactatcttcgagagtgttttgaggtactcaatcccaagaagtctactttcaaggtagaatcaggaaaattcttaggattcatagtaagtcaacgagggataaaggcaaaccctaaataaatacaagccttgctcgaaattctatttccaaagaaatacaaggatgtgttgggttttatgcc

SEQ ID NO: 304738 - DNA, 1737 bp, Cannabis indica
ggaagaactaaaaaaagaaagatctaagtcgaagtaagtcaaattcactaatcttggggcgtagttcagactgatttcttcctgctttagtctaagctcaattttcaacaattttcttttaatataactaatttaaaggcaattcctagcatgaaaaagtaaaaaatccaatcttttgcaaaatacatttcaaaatagtatttactcttgtataaactaacaaagcaaaacataataactcaaaattgaaaagatttacctcagaacaaaaatgatgagttgaaaaatgcttcttgtaaacagacttattattcacaaaatcagaacttgaagagagatcatcagcaccatctttaactacataaatttcttccaatccacaaggatagaatctgctgctcaaaactgatgttttcacacaaatctttgccacaataacaatccaatgacccattaacagtgataaaagcccaaatagcattaactctgcttgaaaatcaacaccaaattattattattataagcaaatattcaaagtaagaaaaaatgctaaaaggtgtgtcatactgctatttgttgtaattaacttttaggaaatattgctaaacaataaacataacccattttaagagataattctaaccttctttgatcttttccaatgctgcaaaaagggattttctcttggtcctatcagccactgttccagaaaaacatcatcaaaaaatcagattttttttttaaagaaagaaaagaaagaaagagattgttgttattacatttccaaaccggtttaaagaaatttggaagaagaacccaaaagagactaatacagcaactacagaagcaaaagcccatgatggggtttcagccaaagacctttctgccaaaagagaatgttcattctccattttcaagctcagatcagacaagaaatttcctgagctaattctggttctgggattttcaaatttcagaaaacccacatgagaaaaaacaacatacaatcaaaaagtttagaaatttattaatttggaacaatgcagagcttgttgggggaccagattgaagaagaataaaaatgggttttttattttggtgtgcttagaattgaatacttatttaccattatgattcttcaccatcagaagaaaagaagaacattaatggaacatgcatggtgatgggatgtcaagaacaaggagttatgagctacaaaatgggtcccttaattgaattgatttgatttcattgcatggtttggttggaacttgtaaaactatatatattatatatgaataaacgtgcttgtctcaaatatatgaaatgaaatggtcaaaatcaaaacttttttatttttaagatgaataatctaaataccgaatttgcccttcatcaattgacacaatgtaagtgtattgtcacacttaatatgggttttttaggaattttattgtgaaaatattcttcatgaaagaaagagacaacatgacaaacaaacaatgacacgagtactatataaatgaatggatttcatttgattaaataatatgagtgtgataggttttaattattcttaaatatattattactatgatttcagaaaatataatattattggctaatcagtaatttttccccctaaactttgacatgtatcaaatcgtgtcacttgaactttttttgctgttaaaaatttcccccgaactattgagatggttagatttaaggactttt

SEQ ID NO: 304739 - DNA, 956 bp, Cannabis indica
caatatcatccttataaattttttaaaaattacgaatatttacagtataagaaatagagcaataaaaaagttaaaaaaaaaattcgaatttgtgttattaggtgtagaaatttattaaaaaattataatgaaaagttaatataataacactatttccttattaaatacacaaaaatgttcctaattacaatcattgattgacacattttttttggcataaaaaagtcatcaacattatgaggtgatatttactcaaaatagttcatatatagttatttgaggtatcaaaagaaaataaaaacaagttccaaagaaagaaaaaaattaacaaaataagggaaaaaaatcagcaaaataataattaattaattaacaaatgttctgtgttaaacacttaaaaatatcacataggtacaaacaaacaaaataaaaaaaataaaaaaataaaaccaaaatcacaaaacaaaatccaacccaaaaaataatcctcaaacaacaaaatctaaattatcacattaatcttggtaatctaaaaaaatgacaatatttagagttcaccacttaaaaaaatacataataatgtatgtctatcattaatttaatttatgtaaatacattacgtactcgattagcagaaccatcaaaaagagcagaattgtcacgccattgaactctttggttaggaggaagctttccggagcgttgaccttcatagaacaagagtgacttagttagggcttctccataatccaaacactctattccttcaaaaacactaacaacactactactattactaacactctcatattcatcttaacactcttcatcattttattttttaattgtgtactcttgtgagtgtagtattggaactatatatataggtaaaatagataattgtggtttcaccattctctaattaaaatgttgtcatttaattctgataattatat

SEQ ID NO: 304740 - DNA, 2272 bp, Cannabis indica
ttttttaggtgttatgtgtctgagtggcattctaaaatttgggatattcatttccttaaaaattatactcagatttggatgaattagttacctgctgcttacttttcaggtacatgcttatgagagaatgaacagagtatttaactatactttggatccatgtggtcctgtttacataactgttggagatggtggtaacattgagaaagttgatgttgaccatgctgatgaccccaaaaaatgtccatcagcaagcgataacataccggaatatggaggtgtatgtcacttgaactttacttcaggtccagccaaaggcaagttctgttggaacaaacagcctgaatggagtgctttcagagaaagcagctttggtcatggaatacttgaggtacattctaagtttcatttgaaccaatttggtgatttgaagtagttcttcattgaaatcttttcttttgtgcaggtagtaaattctacatatgcattatggacttggcatagaaatcaagatatttataaggaagagagtcgcggtgatcaaatatacatcgttcgacagcctgaattgtgttctaaagctttaaaagtaagttattagttttggcattgacccttttaaataacaagatcttgtaatatacatattactcattgtttttcttcataaatgtttctttagctaaccctttaggactattatcttagctcacttaaagacattcaatctcagccaataagagtttgaaaactgagcttctataatcctaattactgttattggttagactaatattaaggcataacaattagacatagttacataataagaatttatcttagaccagtaaactcttgttttgaataaagtcttgaaaaacttcacatgtccattgatttcttacttaaacttgttcaattggaacagcccccatcagtcactactactaactcattacctacattgtctgtgaattactgccattctctggtgagcttcctcacttatcttctctgttacaaatgttataatcatgtataaagccttactaatttcagaacctttctttcattggaaatttctctccttcccattatggcaaatctatattccctttggtgtgtctaatttttcattctttctctgttcaatgtttttatttctgtttttgatgttattcattgggatattttccagcctatacaataataaatggtgtattactatgtaattttccctaacaattcatacttaattaggacctaaaataataacaaaaaaatgttaagataactatgcttaaagtcaagaagttgattgagaattacagacttgcaagcccttttaatgataacaagagaggttgatcaagaattatatccttatattattcggaaacaagcttctccttacctttaacacttgtaggattaggtgtttctgatcttttcgggtgagaatccaccttagtagtgctgctgcagctactagtacttgcctcacaaccattgtgaggcattgaacaaacaagatcttcattttgtgatgatgatttcatgcaatgagcaattgttctcttaaactcatcctcttgatgtcgaaacaaaaggcagaggccgcatttttccactcgcaagcttcttccactatcactcgcaaatgaagcctcgatgacactgcaatcatttagctgctgctgctcatccgaaaaccaccctcttggtatgtaggaaagccaaatgaatcggccttcgtggtctaaatatctgaattcttcattggttgttcggtgaacatgaggatgttctaaattgcctctatcagtttgtaactgacaaataagatggtgaggagaagaacattctcctatgtttggatgatgaggatcaagatcagtaaagtatgcacataatgctaatccaagccaattttcatctgacaatagagtagtagaagtaggcagctcaagtttgactgaagggcctattgtataattcctaaaccactcaagaatttcagttgaagtgaaacatgagttaaatatggtattttgatgaaaatcctgtaaaaaaagtacaaaacaattagacttatgagagagtggaaaaagatgttggaagcttctacaatacaccccgaaaaaggtacaccaatgcaccccttattgtttcggcattcaggagaatattttaatcaattttttttttcgtagtcgtgtaatttgtagtcatttaaggcatcttgcaaaattttgagaaatttagaataatt

SEQ ID NO: 304741 - DNA, 1117 bp, Cannabis indica
cttgtgctccctattctactacctggaacaaatgtcccttgagggttttatttcaggatagtgaatctggtggggacccctccaacaagttatgggaaggaatcccatgtacccttactatctttggtggtttgggtaactaactgagtggtttttttttagcttccacaataactaagagagctcggcaaagagtagtggatgcggacagagaaatccacgcagtggagcaaactcctgctctaaaatagtgttgagctcatccccatgggagataaattaatacaaaaataaattccagacctatgacaacctctaaaattatgaaacatagagggaaatggaaagtgttccaggacttttctggaataggttgtctatcatgggagaaaaatcaagcaaatgcattgaaggaggttttgatgctaggaactggggttatgtggggatgagagctcgtcttccttttagatgctactttacggacttctgtggagtagctagagtagctccttaccaattcattcctcaagtgtattgtctgtttgttggatggtatgtcctgcgcttccagaagaagaaggtggttctgactcttgtatttctacaagattaaggcacaaaatatgagtaaccacaacgacaaagttggtttctacagactagggaggtattccaagaacttggtgtgtcccactagtttcatgtagtatacatacgacatctgagactattggttctacacttccagcttcccattaaagagagccccgactctcagtcttgactataatattgcaagtgtcatcatctgtgtgaccctcttttgcgtgtcttctcattttatgaattcatcttattttcatttctttccgattgtatccctcgatcaccattaactccagagctggaagcgagaaaatgttgggttttgtgccctaaacaaaacccatttcaatataatcagatttactaattagtaaagattagatttcattctatgttgcatggttcacataatttatttcatgattatatttaatatataaattctattaagtccagaacatatatatataaatatatgtatatatttgttcatgattatagtgtcgtc

SEQ ID NO: 304742 - DNA, 1935 bp, Cannabis indica
aaaaaaaaaaatgaaactaaaattcttcttagatgctaaaacaaattagaaatacatcaatacactttttttaaaggtatattgtaaaatcacccataattttataatatctcatataatatatataaataataaaaaaaatcttaatcaaacaaaaacacaaaaacgtaaccatttcataacttgatgacacttggcttatggagtgtcctaataacttcactcattgttatatttatttttacaaacttccaaaagctcctctatcttaatctttatgtcctaacatatcaaacaattaaatacatctttattttaaaaattaatagacatacctaactgaaattgtcatgttttaagattacaaaattttaaagtttaagattatgatgactgatgagtagtatttaaaacaaatgcttagcttcattatgagatgttcctatcaatcaatttcgataaaaaaaatatctctcaaattttttatatcatataaattactcatatatatatatggtcgattttggggaaatgtaaattcatttgtataaaaatatgtaatgtagtagtccattacaattatatattaattaatacctcagaaatttacaccccactatttaaatatatatttttttaacattgcattcatttttttttaatttttcatattcgtataaaataatatggcttgaggatattcttttccaaggattttctgttatattatttaataatatagattagattgtgaaatatgtgatatatacattaaagtgaggttataatatatatgtatggtaatttaattacatgttatatgatttaatatgtctaaattctaatataagagtaagagttacaatctaatttgtaactcttttatcacaatttttcaagtgtgtaattaagagaattactacacaaataattataagatcaaaatcatcatatagttgttagttgttagagaaagttaatatactcatttatgtgattaaaatgagatagaaaatattgaaaatcgattagaaaataaattacaaaactcttaaatgaagtgtatggtgaaaaataacctggcagcatgtcacctgaagctacagtttctagaaaatgcaactttcaaaatgaaaatgttagcttcattctccaatgtacataacctattttacactcataatttaagggctagtaaccagtctttgggtgttggggggtttggaattttaaaattatagtttacctacactataaatagagacatgttcatatgagatgatttagtgtgtttctatcaagaaaacacattgttaaaaactctatagacttgataaacccataaaattatttttattcttcccttgccctaaatgtctgtggtagtaaaaaataagtttttggacaaagatataaaatattatttaagtttactaattttcatattatgtgcttgtagtgttaagattactctcacatatctttttacatatatatatactatttatatgtatattttgagaattgtaactatcattaagaataaaaccaatgagtacaagttacaatcttaaaaagtgtgaaatattatcattccacacatatttttatatagccctaacgccttcctagcaacccgatgagcatccacattgaacattgtgacagttagagccccgtgatccgaaggggatcccacatcgtctggggaaggtcatatgtgatgattctgagactgtgtaggtatgggactacatagttgaagagggcttaagttaaatagattgattggtattacatatatcaacaatatgcatcttattttttggtagcccatcacgaaagaactccacggttaagcatgctttgacctgggataatttcaagatgggtgacattctaaaaagttttctcaagaagtgtgcgagtgaggac

SEQ ID NO: 304743 - DNA, 3725 bp, Cannabis indica
acaaggtcatttttaagatcattacaaatagaattaagcctattttgcctaatcttatttgccccactcaagtcgcttttgtgtcgggaaggaatatacaagataataatgtgatagtgtgggagattatccactcgttcagctagaaaagaggcaaagaaggttattttgccataaatattgaccttatgatagcttatgataggctgaattggaaatttattgaccatgtgctttcttgtcatggaatacctatgaagttttgcaattggatctcctagtgtattacagcaaccaccctcaatatttgcctcaatggggggcggtgggcacaattaaacccttttgtggccttcgatagggggatcatttgtctccttacctatttatttgggttgtcgaagttttctcaaggctattacaagatgtcctctacaagaacattattaagggtataaggctgagtagaggtggttcggttctctctcatattttctttgctgacgatttaattctggtgggcaaagctaatttgaatgaagctataggctaatggcattgtctagagaggttctgttcttggtctggccaacaagttaataaacttaaaacttcgatcttttttagtaaaaatacttccagtggcctgaaacgggagattagggaggctttgagaattggttcaccaaaaggaaatttaaagtatttgggccttcccctattcagataaagacaaaaggatgttgatttcaatttcattatggataatctcatttctaagttgcaggggtggaaagcgaaaaccttgtctaaggcgggtcgggctactctcatcaaatatgtgggcttgtcaatgtcgttgtatgttatgcaaactattaggatctccaaccgtcttgctaccaaaatcgataacatggtgcgggacttttggtggggttttgagaaagacaaccccgggctttaccttaaagcttgggataaactttgtcttcccaactctcttgggggtcttggattcagaaaaattagagaaatgaaccaagcctttctggctaagtgggggtggaacattcttaacggatgtcagtcactgtgttctataggattttaaaagaaaaataccttaaaggaaaggagttcctttactatggatataaagactctgattcttggttttggaaaaacattgttaacaccaagcccatcttaaagaaaagtgcttgtaaattggtggtggatggtagtgacacacgtatttggggggagctttggatccctcacatgaataatttcctccctaagcctaataaatctcctgctatggaccacagtattgttgcaatgcttttttctaatgatggtgattgggatatccacaagttgaattgtctttttgatcgtgagactgcgtctgtgattttaaaaggaggtgctcgctccctttggcacgagtaaagataagtgggtgtggactcttgaaaatgatcgtcgtttctcttgcaaattttcttatcttactctggccttggaaagagctcctcattgtgaggttgctcccttactctggaataagctttggaatagtaaagtgttggagcgacataaggttctttggttgtgtattctttcaagtgccctccctgtcaggtccgtgataaggaaaagatttcctattgaggatgcgagttgtcctttgtgtgggagggaggaagaatctttagaacacttatttcttacctgtgatgtggcttttcatgcctggggatcgtctccttagggtatttatccggtccatgacaccgacattcgtatgtagaattgggtcaaattcatttgataccttaaacacaaggggattgctgctgaagagattttcctgtatgcgtctcttgtggttgataccatctggcgcactcgcaacgacaaggtacataataactatactgttgatgtgaagaaatgtattgactctattcgaatttcttttgcaaatttacatgctacctttttcccttcccctatcccatgcctgaaggagagctggtctcctcctccttaggattggatcaagctgaattgcgatgttaaagtggggcttgatagcatgtgtacattagttgttgccaggaaccatcttggtaggttggtttgggtccaaacggctcgagtggatttttttttatgcactttgcggggaagcagcagcttactgtttggctatttcagctgcgaaggatattgatgccaagtttgttattgtggagagcgactcgagggtagttatcaatcctctaaatgggaatgagtctcattgggttattagaaactatgtctctttttgtaatagttactctcctttgtttactagttgtatttctctaatgttagtaggacttgtaattttgctgcccataatgtggctaagtgggtgtttacccacaagagatttggttttattacgttatcaaccatcccgataaacatattatgtaatgattgtgaggtctaactggttctatttataaaagtacgcttttcttcaaaaaaaaaagagagacaaattaaacaacatgttaattcttcttaatacgcaagaatactgaacttcgggttccagtacacgtgtcatgaccatatttactgcttaaaaaatggggataacaattgtcctatataaaaagtgtttttctttttaaaattttgaaacaaactttttaatcattactatttttggaaactgcatcagtcagctcttgcattaatccaagtaagctatttggggtttagacagtttttgccttcccaataaaaagctaattatgagtttaagcaataaattcttgtcctttgaactgactcatgagttaagcaccatagatttaatttcactttaatcgtacgatgctcacgaggcagatataagtttagcattttaatccttgcagccacttccgctattgttaagacttatatcctcatttctcttctgaactttgtgtgtatgccctctttgtctctatgttatttctttcgaattttagcaaccatgttttcaaacctaaaaaatgcatcattctcgacccttggattcgtcgagctctagggaagaactcatccagtccatcattaatttctcatcacggtatgatttcttcttcccctgtattgcattttagaatatattccttttcctaaattagtgattttgatagggcttttaatttggttcgacttaacttaggtttttagtgatttttaagatctttataacttcgggttttcattttccaaaatttttggagtttttttttataccttttccctttttcaaaaggaaaaagtgttttcatttgactccaatcttgaaaacccaaaatttttggatcacaaaattcacttttttcccgctttaccctaaaaatcgaatcctaaaatctataaaacaaaacttgagaaaatgatgagaaaatccgtgaacaccctgagaagctaaataaactaaatgtctctacttgatttagatgattcatagatgaaataattaagagtaaatgttcctatctgcgagagccgagatgttgcctagctcgagcctcttcatctaattaaataccgagcctcttcatctaattaaataccctttggccaaacctttatttttacccttcgttaatgttttcttttttttttttttttttttcaggtaccttaggtttccaaat

SEQ ID NO: 304744 - DNA, 1346 bp, Cannabis indica
tttaaatattatttattttctgggatattacaatgcatgtcaaacactactgtgcgaacttcaacattataaacaggttgagtaagctcaagattcatttttggggtaacaacattcttaacacagtcaaggacaacaagcggattggacatggaagaactaaaagagaattgaagtaatcgataacaatagtagccaaacccgactcctaatccacccaattaccttggtcactaagcagcctctgaataaaatttgttctttgatgagtgttaacaacgacttgaaagaatttgatgttttgatctgcctccttaagtcataatttcttagttctttgcttccaaaaaaatctcttttggtctaacacataaagtaattgcttcttcatttctttataccgttggactgaggcactatctcttttactttttgagtgatccaactccttcttgcaatctctaatccttcttttgaaatcacctataaccccatgttgaaagcttcccgatacacaatgaaattttagcaaacaaaccttcttcagtcggagtatcccaacaatcccgaattatttgatagcacataggttctttcaaccaagcattttcaaagtgaaactgcttcgtacctacaacatggttagcgacaatcaggacgaggaatataggactatgattcaaagtcgaacgatgaaggttatgaggttgagcattcgaaaacatttgaaaccaaactatatttaccaaagctttgtcaaggcgaacctccacccagttaaggtaacccctatttttctcccaagtgtattgatgacctacaagatctaagttaaccagatcacagtctgaggggatgacttgttgaaagctttcaactaagcttcttggatacgggttatcgccctttttatcaccttgactactgacattattaaggtccccaatgatacaccaaggtaacgaagatagcttatgaagtaaattccatgtttggctacgtaactctcttttcggttcgccatagaaatcagtaagcctccaatttggttgcccctcaatagtgacaagaaaatcaatgtagttttgagagtaccctgttatacgacccccattctcttccttccaaaaaagagcaagaccatccatcgtctctaccttgggcctcaacacaaaacttcccctcaaaacccaaacctctcccaacccaatccactatattcttcaaacacttcgtttcacacaaaaagataaattcaggcttcttttgagatacaaactctttaaggaatcaaaatgtccataggttcccaagcccacgacaattctaacttaaaatattcataa

SEQ ID NO: 304745 - DNA, 847 bp, Cannabis indica
ctttttttaaaaaagtgaaaagatatagaaaaaaactccttatattaactggttactcttaccagattttctcattttttcaactttatctttaatttcccacaatataaccttttgaaaaataaaatcatttttgcacaaaaaaaaaatatataaaaatccttaaaatttataatttcctcaaataacaaacatggtataaatttagctagttgagtaggtttgacaaaattgactacatgtccaaaattttaaccaaaagggtaaaaaatatggccaagcttattacattgacaaacatataaaccaactaattggtaacgaaagtgactacatagagaaacagagagtgagtgcaatggacattaaattgaagaagacagcagccagaacagaaggcggcggcggcgacgaagaacccggcgtagacgggacattagcattagatggtgaaggtgggtgggagggttcttgggaagataggacttggatggctaacttctggccagattggcagtggtcgccgaaggtgcaaatgtagtaatggtgtccttgggtgagagaaaagttggttgggcttgttgtgaaggtgttgcctatggcattggatgcactacaaccctcgtatgatgcttttggtacttcaaccacgtcgtgcctgccattcatgaacttgaatgctgaaacaataatggtacacaacattaacactataacatatttacattagtgtacaatttttttggtacgactacaccccattattttataaattgaaaaaataaataatatctaaagcaaaaaatatatatttatcatgtgatggaaatgtgcacattctcaaact

SEQ ID NO: 304746 - DNA, 1775 bp, Cannabis indica
aattattaattagtcttatatttacacttcaaacagtttttttttatatatatatattatttttcagaatttaaatcgcaacaaaaaatcacctagaaacccctattgcaactagcgcttcaaccactttagaaactcgaactagtaaattaaaaagaaaagttaaaaaacagtatatagggtaattcctcgttttttttttttggctaggaaaagaaactacattcaaactaaaaaatgtaagaaattgtagcaaattggggtttaaattctcattgtaatggtttaaccaactaaatttactaaatatttttctcgaaaagtaatttgcagtttaaataattaaatgtaatttttacaaataaatatttaaatttagtttttgacaataataagttactgactgttaaatatcaagccattatatttaagtacttatgtagataattatcgaagtagtttttttcaataataatacttattatatttctgaaatttatgaccgttaagtgtcaagactttatatacgtgttattttttcattaatatatataattaattttttaataaaaataaaaatttaattatttggaccaatcagggattgttatgtggtcattaacttacatttaacggacagatagttatgaaagtttaaaaaatataacttaagtattattaccattaaaaattaaatttaagtatttatttgtaacttaaacttaattatttatgtcgtaaattaattttttctcaatttccaactatatgagtgtactagtaaataaaggtggcaactagcataaaaagaaaaacaagaaatattgtattacaatgttaatctctaccctcaacaattattcaagattcattatagcaaacattatttcaatttcacaattaaactattaactccgtaaaagttgacaattattccaatctccctgttgtaagtaatcaaggtgaaacgcttaataattaatttttttaactaagcaataaatatatgaagtatacaatttattttactcaaataaagtattaaattctatagagataggttaatctaggtaataaatccttatataattcatttaacctatgctctatttttcatcacaattaataatattttgttttttgtcaaggaaaaaaagaatttcattaatcaaattacaaacaaacaaaacaactaaggcttaaaagaagcctcagaaaaagaataccaactcctttcactcaatttgagattcaagtaattagttgttgttcataggagttcatcttttttcctttaacactatacaatctgtattgcatcatacatttaatttctttcactgtgtatacaactatacacgaagaaccctcatggaagtatttatttcaattgagctaaataccatgcaccggagctgcagtgagtgcattcattacaaaagctaaaggacttgatcttatcttattattccgaatctttcaaatatcaaaactcaaaaggccaagctaaaaaaacccaactaatgaaatataaaaactcaccactctttattttagaaatagcagtcaaagaagagatgggaatgactctctttctttaagccacaaactggacaatcaagagtatttatagaaatataaaatcttgacagtaagtctctttctcattgtacttagaactctggactattaggtgcataacaattctaacataataatagaattgttataaatattaataattatgtggatgtccaaatcttttatttattacc

SEQ ID NO: 304747 - DNA, 1880 bp, Cannabis indica
aaaaaaataataaaacatgcattgatagataaaattaaatctcgtggtcattacaaaaaaaatatttgttgaaatagagaaaacagagaagcaatcatactcattgtgggtaaagactcactttgctacattatgggcataaaattaaataaacaaccaacaaaataaagggaggtatttttacaaaaagaagagtagttcacaatctcttatctagcctccttgtcggtgagtattaattattatcctagaatcgatttctacaataatgaaattacaacctttaacctttgtcattttcagcgccaaacaataagcaatcgcctctccataaaaagcaacaaaaaaaatctaactttatcgtgtttacctaagtcaccttgcctttgtgatttttagctataaatatacacatgttttttatctctactttaagatcacaattcagtttaaatcaattttaagaagaaagacgtcattcatgcactacaagatcaaaattgaagtagagagaatagtaatatatagaatatataatatttatttattttctattatttatagagatggctttacgtaaaatggatggccaatttacttcttttggtgttgacatctacaatatatctttgaattttcctttatggaaaacatatattcaagttttcaactttgcaaagataatatataagaaatattaatatatcccatctttatatgataaatatttttaaccttttatctacttcatcaattttaattttaataatcattattatatctttaggtagtgcaataagttatcaaatgatgcttttatttattcttttttttttcttaaatctaaaatatataatattcttatacatagctatagctcttattttttttttaaaaaaaataagtaattaattataaccacctaggcatgcataataaaaggtaataatttaatggaattaaacaatgtatgggcataactttaattatagtgttatgctataagttggtacttatgaattaatgaattaatatatatgtcttatcttatcttttgacttttttactttgcgtttcttattagattaaaatattgtatgatgaaagaaccgttaattgattttttggtctattttttaatgtttaggggttttatattaaattgtagtaatttttcttaagtattatttatgtgatgccttcttataaataataacatattgagaagagataataattcaacattagaaactaatacaaattagctaaatattgtaaataattaagatatataaaatcaaacatatctcctaattaattattcctcttctagaaataatttgacatcttcaagatctctattattttagcttcacaaaatatggaaaataaagacaaaaaaacaaatattactgtcctaataatgaatatgattggccatgtcaaccaacaaataatatagtcaagacagtgttataaaaaatttttaataagttccaacttgatttagttataaataaaaataaaacttcacattataatttatgttataatattttacatttgttttgtcataaaattaaaaaattaaaaatttcatattatctaaattattattttctttattttagttattatcaaagttcttttttaaaatcatcaacttattatcaaagttataaattttaaatagataataattaatttgaaaccttctttgtttaaattttagattaggagttaattagagatcaaaatatttatggctacatttttattgaattattatatcatttaacacaattcacatgtaaatattatatgatatagcataaaataagtatactaatcattaattactatctctctaatatacatat

SEQ ID NO: 304748 - DNA, 1384 bp, Cannabis indica
aatctaggaaatcggaaaagggccaattttgaccccctttttctaatcaaattcgaattttgattgcatataacaataatatttatgagacaaaaactagtcataaattacatgttttgttaattacaaagttttataattatttaaaatatgaagttagttgatttaatttcatgttaaaataagacattatcaaattgtttgtttattttattaatttgacttagttttagattttaatataaaaataataattacaataacataatttgaaaatatttaagatatatttgtacagttttatgtgctatagaaaataataatatttccaaatcataattaacatattgctttgttaaaaaattaagatattgctctaattaaattattactaattatattaatcatgttaatcatataacatgcctatatttatcaacatatatcatctttttacttttgaaattgtgaacaatttgtgatattgtagattttttatttgatagatgatttacaaaatatatattttttttaaatgcaaaatatttttaattaaaatttatataaaacactcctaatctccatgtttacgaccactaaaaaaaatctccatatatgttaatttactaatcacaaatagtaataatatgttttgtaattcatttgtttatccttttttagtaatgaaaatattttaataagaattggaaagtgaatgtgtttattattattaaaaattaaatatcagattcaccctaaaaaagtattttatttagaaaatatacatatttcataaaagataatttagttaacttaaaatatactatttaccttttaatttagaattcttttttactatgtgagtaaacaatataaaatatatatataataaaataataattttgattattcaatattttatttgccactgcttttgtcattgaatatatatattcataaaacaattatataaaaataaaatagaagtaatttacataacttttttaagataatatatatttttattttatttttacaaataatactatttataattctgatttatatttatttgatcgagcaaattcttttattttattttgttcatttaaattattattaggttaatttcttactcgattggcttcattccaaaattataactctcaatcaaaatttagtaaatcataaaaataaaatctcttctagataattgtttcattaaaaagaaaagaaagttgtaattacttgaactgccacacacacacacacaaaatattacaaatactcaagcattttcaatttcaattaacaaaataacaattattaccatttagtttcttctttttatttatttattttttcaaaaaacaaaagaaaaaaa

SEQ ID NO: 304749 - DNA, 4864 bp, Cannabis indica
ttttttttcataaatatcaaataatttaatattaaaaagtaaccaatctaaaataatcgatctaatccgcacttttgcagattggattagattagatttgagctactgtacggattggattggatccaaaatataaaattcgtacttagtgtggatcggatgcactatgatcaaaatagtaagaattggattggatgaataccccaatatatattgattattagttgcttcttttaagttttaagcatacatgctgaaaattttgttagacaaatgctatttttgtatgatcaaatcttaaaaaaataaaggaaaaaaaactactcatagtgaaatgaaagacctattggctctagacagttggtagaaaagttgattgacataacggtattcccaatgccaagtcaaataagcttcatttcatatttattatattaatgtttaattaattaatattattaaataaagatttgaatgaaaagaaagagaagtctgcttcatttcacgggttttagaggtgttttcagatgaaaaaagcttttaggtaaaaagagaaggaccaagtctcatggcgtccacagcttcttcttcaacttcacacgaaacccattaatggttatcttcaactagtctctattacgttactttactttacttaccatgctctgctgctaagtaccacacccaactctcagctaactttctttgatcacttagctccacctttttcaaatccccctatacaccaacgtttctcaaacctccaaaacacccatttttttttgttgggcttctttcttttctctatggctaccaaagagtcgagttctgcttctccaaatgagactaaaatcaaaggcgtcctcacccatggtggtcgatacgttcagtataatgtgtatggtaacttgtttgaggtttcaagcaagtacgttcctcctattcgccctatcggtagaggtgcttatggcattgtttggtaagtttattccatcacaagttaatatttttgagcttttttctttcttggtttcgtgtgtatttccctggggttattattttatttatcttcactcaatctctggggagttgtttcataagattcaaatttggttgagtgtcaatggttttagagaatagtatgtatttgaccctgagtttttagtatgaaactttatgttgttttttatgattcgggtaacattaataagatactatagatgtttcctttatcatcaagtctctgttttgttatgtgaacagtaattagatttgatgcaaaaacgagttgactcttctgtaagaattttattcagcaaacatgccagcatggggctttttcttttgttagatttgttgatataaattttatagaatgactgagaggctttctctttatttggatttaaagaatttaaactttttataaagctgagttattttgctcgttgggaagttgatgtttgcggcttccttttaggctctttcttattatctgctcctatggagctggttcaactaaattgggaaagatatgtttttcgtttttcacttactttttcccttttaagttactaatttgataaatagaggagtggtaatatgattgttttctttttagtgctgctgtcaattcagacacacatgaggaggtagccattaagaagattggtaatgcatttgacaatagaatagatgccaaaaggacattgagagagatcaagcttcttcgccacatggaccatgaaaatgtaagtaagagttgttaagattacttagagctgctttttaggctcttaaccactttcttaatttacatgaatcaacttttctttataattatttttcttatcctttccattcggggaaaaatctttgttgatctcttgttgcgttttaccatgtagtgaaacatcttgttttaagtatttgagataacccaactaaaaaacttacaatgatagagtcccttaaatgtctcatcatgtttctttttctattttactttaatctaacaaattgaattctttaggaaaatatatatgtattaatgtatatggttaacaaatgtttcctcttttcgtcatggagtcaatagggactcatgttgataatcatattgcaggataagtttcattgacatgggtattctcattgcatttgcttgctatttctgctgtaactattgatcttcttattccatgcctcaggttattgctattaaggacatcatacggccaccaaagaaggagaccttcaatgatgtgtatattgtttacgaattgatggatactgatcttcatcagatcattcgctctgaccaacaactaactgatgatcactgtcaggttaatatgatttaagtttatactgcaccctgattatttattgatgattctctgctaatctgttctgataataactaatctgtaagactttagtgatgtttgtgttcacaatgtcaattgatggacctttacaactactttgcttcttgacaagaagataaatgtagaagacagataaaggcacatttttttttccttttctttcactttctcctataaacataaggtttgtaggtccttgaatctttaatatatctaataacagcatttcatcattgcatagttaatagagttgcaatcctgattgcttcctgttggccccatatctcagtagtgctcagatacgaagggaatggatgagttaattttccttttcgagtactttctctagtgctaagagtatattactaaaaatgtcctgttctatgttcaacatatgttttgtttctaattaaattgcaacatttgctgtgctttgaatttcctgttgtgcataacattgacattctgtacaacctttgcagtactttctgtatcagctgttacgtggactgaaatatgttcactcagccaatgtgttgcaccgtgatcttaagcccagtaatttgcttctaaattctaactgtgaccttaaaattggagactttggattggcaaggactacatctgaggcggatttcatgactgagtatgttgttactcgttggtaccgagcaccagaattgcttcttaactgttcagagtacacagctgcaattgatatatggtctgttggttgcatccttggtgaaattatgaccagagaacctttgttccctgggaaagattatgttcatcagctaaggctcatcttagaggtactacttatttatatgaagatttttttgtggcatatgtgattgtctttcatggttgaaagttaagagcttcctttgttcttagcctcctttgatatagtatatcttcttgaacgcagttttcttatagtgagtactgcttgttctttatacgaagatgtgttttctatagttagatgatgtaatgacattttctgctatttttttttgtgaaaagttaataggctcacctgatgatgctagccttggatttctccgaagcgataatgctcgaagatacatgaaacaatttccacaatgccggaagcaacaattcgctgctaaattccctaacatgtctcctggggctatggatctgctcgagaaaatgctggtctttgatcccactaaacgcattactggtacaaaatttcacatgttcaacatcatcagtcccaaattagtatattaaagttcacatttgttttcataatgcaactaactgtttttgaattcaccattcacagttgaagaggcactttgtcatccatacttggcatcccttcacgatatgggtgatgagcctgtctgccctaggccttttagttttgatttcgagcatccatcgtgcagtgaagatcacattaaagagctcatctggagggaatcagtgaagttcaacccagacccggcctattaaaaattatcatgctttgcttaatggtgtagaattatatggtgaaaaaccttgaccctgtacatggtatattgttcctggatgataggaatagctctagagattgtttgtcttaaattgaagtcaactaagaactaaaatgtgcaatgagctgagccggtttagtgttgactgaatatcagcaatctccaatggatggtcatgtttggttttaattggttcttgtgtgaggctatgggctattaaggctccaaagcagagttcaaagggacaagaaatattgccaacttccagtgacatataacataaaactttggactaatgattgtgatgttgcatttgccctcagaagggtatttgttctttcaaagatcaaataaaaccagtatattaatatgaaagtatgtttttatttctttatgctataagattttacacttgttcttatggtgagatatttggtatcttttatagttttaaactttctaactcaaaatatttgattcttttttattgatgtggtaatgtaatataaccaatgctttttccttaaactgctattgtgacaacattgttttgatgctaaatgtcatttaaaacaagataacatgtaatttctttttattattattttgactacttggtttatccttgcttcaagatgatattgacaaaaaacactaggccttgaaataacaattcttgagtttaacatcatcaataggtaagatatcttgtgggaaatcacaagctgctctcttctctgagccctggtcctttagtagctgacaggtctttggaactacaccacttgaaatcccaccaacatctgtacaattccattgcagtttctttgccttccttgccagtccaattgtgacattggagatgcatagtccagtaaaagggtcacctgagattccatccaaggagcctgccattgtcacattctcagcaaccatgtcaaggtaattaatgttgct

SEQ ID NO: 304750 - DNA, 1119 bp, Cannabis indica
ggtgtatatagtatgacactagagtaccatactatcatggccatcaaatataacaaaagtaaacatattttccaatggcattttcaaaatattcaaagagaaagatgtgtgactaggcagaaaatgggaagaggagccccactactactagagtacccaattatggcctagtatgtgtagttaaatgcagtgcatgtgcatttaggaacccaaaaccaaagaaaaattaaattcccttctactttgaattactttacagactctttttggctgactggcctgacctgacccatttgcattcatttactagtgcttaaaagagtaagaaagggcagagcacagctttttctcatttcttttcaggtctgtttctttggtcttgagtggaaagtaagccttttcattgtgagtagagtaaaaactgtggactatccttcttactataattacattctcttctctatagctttagatgttggtttggacaagattttatgggacctgaaaaaaagagaaaagggaaaacagattacagatacgtgctataggttattttagagttggattataattaattatctgattgattcaacatatagcactatccataatgataaaatagttgccattagcgacgttcttcaaaagtcgcagcttgtgagttttccatttcgaatgtcattgctaatggtaactcttttgtcattgtagagtgtaattttgaagtggtaataagtcctattaagaataccatttgtagatgggaaatatgtaattatattactgcttgtctgaatttttttaagttgtcgttgggttgtaattattttaagatctttccttcgtttaacaatgttgcccataaaattgtgaaatgggcattaagattggctatcactgataatattgatgttacatctattgcggtaaacactattgtaaggaccaattagtctaattattcttttaatatataaggtatcattttttttttgaaatgcaagtaaatggtcttatttttaactttatgatagttaatgtcctttttttaaaataataaagccaatattttttttactttttaatacttaaaatacccttcattatataaaatgtatt

SEQ ID NO: 304751 - DNA, 3573 bp, Cannabis indica
aaaaaaaaaaaaaaaaatcggtactaacgtatttttataatttgttcaacaaaattttgtctctaatgtttattttttctaaacttctttcttgttggactaagctttgattttctttctttgaaatgaattaaacgatttgagaccgttggattaacatccttagagatgtgtggggcccacactcattgtcaaccaaacccaaccaaaaccaacacaaacggctaaaggttcttgatagtatcacattcacactataaccaaatagtacacaattgtgacaatacaaaaagtgtacaaacgacagggtaattggtgtcgtttatagtagttgtggcggcggcggctgcggcggcggcagccgcctcctcaggtgtggtaatactctttctccatttgggtatattggaaaacgggttttgagttcggttggaataaaaaatagtaagcattactaaagttgtaattatgagttaacttggcacgacttacatttcacacctttagaaactttgtgacaggataggcctatattcaaatgtggattgtgatggcccatatttgggaaggtcggcccgacacaactcacgttttcatgcatttggagaatttgtgacatgctcgtattcaaatgtgggtcgtaatgtgatggcccatatttgagagagtagacccaacaggatcaatttgtatcatgcttcgtttcgagctagatccaagcttttgtcagtccaaatttcttagttgggtccacgtttgagtttatttgagcccaccttgttattgctataaaaaaggaggttagggtttagaaccttctttaatgattttagggttagtcacattgttttgtttttctgtttttttttttttttgacaaaaagagatgcatcttattcataatcagacaaatcatccaccaaaatagttgaaaagtagtaggggctagttccccaccatagccacgacccgagaaagaacaagtggcagtcgccaaccaattagttaccttgttcgcataacgtttaacaaaaacacaagaaatattgttaagattatacattaaagtacgacaataaaaaaaaataactaaattaaaaggagacaataaaggaactgaactatacagagcatcaatgatgcttttacaatccaactcaacaacaacttgatctaggccctgttctttgattcagctcaaagcttccttcaacctagttgcctccgccaaaagagaagagacacgaccaggcaattgtttgaaccaatgataaatgacagctccataatgatcacgggcaaaccctccaatcctgaaacaaaaagccccataagtaacagaggtatttacattgactttaatcatatcaatattaaaaatcgaccagatttgccacattattaaatcagatccatagaataaaaattgtatttatttatttagtttctcttataagagaaaggataccctttctagaatgtagtcttaggttaaattataattttatatatttatttaacaatacagatactttatacataattacattgaaaatatttattaattattgaaatttaaatacttgcaagtaaatactcaatatgttaactcataaaatgagagttcataagattttttttcatactttatttatatataattgacaaataaaaatatatttgtattaaaatgtttatttttttttttttatttcgtattaggcattcgggctaaaccattcatgttttcgtgtcatgtatgtgggtttattgtgttatatcaagctcaaattcatattatatgaattcctgctaatttgtagttttgtgtcgtatttggtctaaatttattgatgttacccaataaattacacaagattcataataataaatgaacttggtaagctaaaaatctcatcccttgaacacttcttagactccctatttatagtaccaacatagccataaataatgagttggcaaaggaaaccacaatttttcttggctagtgcatcgtgggagagttgaaggcttgaagctacaaatcttaaaatgatgcactcaatttgggatgtgaatgggccatgtcttgtgttgggcatttggcccatttgatgattaagcccgttgtagagaacaattgaatcaaggagatatacttgggcttgattgctttcacattaaggcccacaaaattactacatttagtatagggattagacttgattgtaaagcaattgttgaactaaatgtttggtagattaaatttttaagcatggatacttatccaaggtgtcaaacacttctatgaagtgacatttaataattagttagcaattttttgtaatttttattaaagtaaaatatgtagaattcgatattgaattatactaatagtgatattacacatcacaaaaatgttagacactatgagttggattgcactgcacatgcaatttgaacaatttgtcaaattacacctacactatataaatctcaaaactgtacaaattacactgcaaaaatgtagtgtagtgtagccgattcacagtaattgtctactaatttaataacatatattataataaaatttcatgatatatacaggatcttaggcaaaagcggactaagtgccggcctagggcacacccaactgaggggaccaaaaactaaaaaaaaatacacatttttagtaattttacaaaatgccactttctcttttttgaaaaaagatttaataattttgttgctatctaagattcaattaactttaggttgatcctaaatatatagtttattgacaaaatttattacaaaaaatgttcaaaaatagtgtccaatttatgtcaagctactcaaattttggcacatgccttaacaactaaaaattaaaaatgttgctccaatttcaattattttcaacctttcttgttttataaataaatgttgtttaattgctttcataaatatataaattaaagaatttaaatttaaattggttggtcaaataaatgtgttttgaaaagagcttattcaataaaagagtagccctccctcatcctctatctttaaagttagctaggcattaaactcactatttcacttcactttgactatttctttacatattttagaatcttcattcattgacttaaggttttctcattgatttattagtctcttaattttgaatatataaaacccacttggccttttagtgtaatatttaatatacatatataaagtcaaaaattaacatcttataactaaagcttgatcaatgaccaagttagggaactacaagtagtcatgactcaacttttttcttttctcttcaagtatacattggaccaaaactataatgagggaactcttttgaaccaattaaaagggcctttaataattggtatttacctaaattacaaaggactaaacttgtattattcaaacataaaatatgtattgaaaataaaattttaattattagtatttaataaagagtaaatactattttggactctgctttttttttttgttgttgcgtaaaattattaattactacgcaagtgcacg

SEQ ID NO: 304752 - DNA, 1517 bp, Cannabis indica
aatttttcacacacactgtattgaaagcccataacataactatataaaaatttcctcctcttgttttacatatgttaggatttataaaatactcaagaaacacaaataatcaaagatctaattatatttcaaaagtgctataagaaaccctaacctaaaattattgttgaagattgcacagaggttatgatctttcaagaatatcatatttctttgaagtattctttttttattgggaaatgagagaatacaggaaccttagtgttttttggggactactatctatttatagcttcatcatagaatgagttataagtatttataatttgacccatcaataaattataaatcaacttatggtatctacacattatcttcatgtctttaatatttttttaatatttataacataattagtcatttaactttgtatcatactttataatagcatatatattatgtgcccataataaaattttaatccaacaagatattgactactatagttatatatatatatatagtacataatattttcaagaagtatactcaatgacactatagtgataccataacatttccatgagtgtagataaatcctagaaccatttccaaaaaagaagtttgtatattagactaaatagtttaattaggaaatttgaatgaattaataagaagcatttaatcatggtgaccatcacaaacacattaattactcttgtagaagattattagtctaactttttggtttttttctcctttttaatataaatttctttaggtgtaaagatttaaaattagtactactagctagtgatgatgataagaaatttcttactagtgttgagttgtcggccttgtctcttgctagtgctcttactaatggactcaccaacatataaaacattgtctctctatatatatatgtgcctaattagtaattaataattaattaatgcttaattttgttgttattataaatttgatttggagtgtaacccaatttgtctcaatccattgacttagaaaagtgatgaccaaaagtgtgtaactcatcactaaagtggtgtttcatgtttggtaccacggaaaatatactaagatgaacctactttggaaaatttggtctttctctccatacattatattatatatttatatatatatataaagatatgaatttaatggcccaaataaattctaaccactacactagaaagaaagaaagaaactgtatacatataatgctaacatgacgtacgtagtagggaattattttgtgaagaggtgatactaaagtctaagtactactcaagtttgtattgtactactttgggtttatgtgtgcactatatataccatatatgggtataaataatataacaaaaaatattgacggcaatattatttgaactctaaatataaaatttttaacctccaataaattaattttttctaaattgactattttggtatttatttttgggaaaaaaacagaaaattacaaaaaaggaaaa

SEQ ID NO: 304753 - DNA, 4259 bp, Cannabis indica
aactcccaaatcggagttcagaataaaaagttatgcattcaaaatttgaactcaaatctgcccgaaaactcgagggcgggccgcggcatgcaaaagccatgtcgcggcacctgggacaaactcccaggttcctacaagaggggcgggtcgcggcatacccagaccatgccgcgacacctgggtttcaaacccaaaaatcagccacctacaacacgaatttcattaagagaacacttctaaatcaccccaaaatcacaactaaactctcaaatcataaagtagagttgctaggaattattatagagtctataatacataaatcatgcagcaaaattcaacgtaaaactccatattttagattgcacaaaagcataaaattaagctccaaaccaacaaagttcaagctcatgaacttgagcttcaaactaaaacaactcagttaatttagtagcaataaaccaaatagaatatgaattcaatcataagaaataccctaaaaatctcacccaacactcaacaatataacttacaacaacatcatgcaattcacacccaatttaccaagatcaaacaccaaattcataagcatgcaaattcaagaacatttcaactatttcatgctctttaaccataaaattgaacaaggaaaaatcaattagaaactgaaattactagctcaaatccaagctcaaaaatccacaacttcaaagcttcaatcaatacccaagttccaaacaatttccaccaaatcaaattgggaaaaccaaagagggtttgagagagagagggttcgagtatgaggagccaaaaactagaaaataaactctaattttctctcaaaattcattcttttattatttttaaaataagggtcaaaaagaccattttgcccttagggccaaataacacctctaaactcaaacaagggcatttaagtcattcacacacaatttcaaacccaattaatttcagattattcacttataattaaaatgctaaatatttcaatcgaatttacatttcgggcccgaacccgattcgacccgaaatacccagtggtgactataccgcaccaacctgtcagaacacatctgaaaaagacaacacatgcatactatataataatatagttccataagcatgttagtaaattaatttcactgttttacccttctcgggtcaaaattactaaaatgcccctagctcaccaacggggtcttaacatgtcataaatcatataaattctcatatattaaattatataataatataattcctcaaataatacataattatctaattagggttttgctaatccaatctcataatcctagggtatcacaaggagtatgccttcctatagcgagatggatgtctcgctatttgttatctacgtccgtcaagctataacacttagttagtatattgtatattatatgctaagtgttctaacagctagttcacctcgtcaatgcctttttacatattgcgaggttgatgcctcgctatgtattgtcgatatcatccttacggttatgtcctttcacgctgaatggtttttcgcataacagggcagattaaaattgctcgcataaaataacacagattacaactgctcgcgtatatacatggtagataaataactagttaaatatcctcaagattattaaatacacattcaactcaaaaaaatcttaagctaaattcgagaaaagggatatttaaattgtgaaacaaaacgcaatggacaaacatttttttttaaaaaaaaaaactcaaaaagcaagatatgaggcataaaagtaaatatataaataaactatgttggtcgtccaacatagcaaaagtatcttataaatgccacaaagggaaaatattgtcttggtcggatggccattaaactaaaaaaaaaaagagataaaaagactaggcctacatagtaggagacttagttggcttgatctgcttcaaacttggctgcatccccagcctcctccttcttggtcttcttgcagtacgcaagcatctctccagcttttttgctcaaaaagatgaaatccatctcgagattggcaaaccagggctgatatattgatcgcctggaaattttgttgaccctatttttgcgtcaaccttgcctcttcaagctttcgatcagtgtcagcctatataaccttgttagcctcctcgagttcttgatttctcttttgagaaaattcaaggtaaatttttagagtcctttgttactctttggcttccgtttcaacccgagttagttcagactctgaatcattccacttctcggccatggcatcacgatgctctctagtttggtgaaattctatctcgagcatctcaactcgttgaagccccctgtattgagcagcaaaagacaaaagagatgcctacgagaaatgaaacgagaaagtaagagagtataaaaacaatggaaataaaagaaaaagggggcagaaaaaagactaacctgctgtataagatcgtaactcctctaaacaaaattttcaaagctccctttattaagtaagtcccagtcactggactcaaaagtttggtaatgccgccaattgttggtggcatgtagtgagcagagttgcgaaccttctataccagcttgataggcaagggcaggaggctcaaggaagcccatctctagacgagagctagagaatttcacctggtgcacagacccaagggtcggttcactggcgcttgccacagtaggtgcagccttttttggagatttcgcaggctcaatagtgagttggtttgaagatcgcttcttattagcagttgtttttgttcttttgggttctttaatagaactcaaggcttcattttctagagctgtatagtttttagattttttgttgataagagtggggctgttgagcatatcttctaagtcgagatccatatctgtgaggcaaaaaaaatatatcaacacttgttcaaaaaagattataaaaggtggggaataaactcccacttaaaataaaagttaccataaccatcagatgatgaagaggaagaactatggtaattactaaactccctaaagccagtgaccatgtatatgtcataggggtttattggagataagtcccaacttgaatcaaaatgactcgccctatcaaaatcgataccatattgctcgacaattctaaagtatgaactattaaaactaagttggacatgaaactttggataccaactataaaacctatgggttatgcgatctatacaaaaattatctcaggtgtaaaagttgtattggctatctttaaaagttactagcaaggtacttgcggtgctaagtacagctggtgaccatccatattgattacctcgggatgcttcttcttcagcttctcgagggttgatgttttttagataatggatgcgagccacatagcctctatcctcctcatcagatggaactgggacactctgccacttagaatattttgggttcttatagtcgtaagtgaattggtcagttccgtggaggttgacgttcttcaagttggtctcgttgagaagaaaatctactaatcacagttcgaaaggaagacctaatagagttatatgtcgctcgaccatctggggagtgagaatcgatcttttagtaatcgttgtcaatacaacaagtaaaataagtaagtgttcaactttataaattcaaaaactcaaaactaagcttttgagaaaaggtgatactttcctatgattcaaaatgttgttgtgttgatgggggagagaccggtagtccagaaggagttatccttgaactcggtcttgtttggtaaactcacaatgatcttgcgatcacttgtgtgtgtactaaggtagtaaaaacctcctgaacaccgcttcgttgcgggaacggcttttacagaataaaagtacataatttcgcggggagtaggacaatcccaacctaaaatgtggtataggacctttaggcaagccaaaattctgtaagatatcaaaattaattgaaaaagagcaatttagagataattacagaactccttaaagtattccctcaagggaagtacggattcagccttgatgagctcgaggctccaagcgccaattttcgacgaggcacttaagggtgagcaaaaaatccaagaaaccgaccaaaccgagtaaactgaccgtccgaacaccgaaaaaatcgacaccgaaaaaaccgaaaaccgaaaaaactgacttcggttaaaaccgccttaaca

SEQ ID NO: 304754 - DNA, 2573 bp, Cannabis indica
cgtgcgacagacttcaagtagtctttctcttccgggaaggagggttgaagacgtattagacacccaatgatctttcacgcacaaagaactttatgcttgcgggagtcatgttgaattttatgtagcaaacttatgcttctgcaaggaaaggctaaagttaactaaaattcaaatgacttcgctttaaaagaccaaaaggcgtgaaacacaactaggcgtgtgacagacttcaaggagtccttcctttctgggaaagagggttgaagtcgtatcaaaccccaatgatctttaatgatctttcacatacagaaaaacctcgtgcaggtgagagtcacattgaattttctgtggcagacttcggcttccgtgaggaaaggctgaagttgtactaaaattcaagcgatgactttgccttaaaagaccaaagggtgtgaaagaccattgggtgtgagacagacttcaagtagtcattcccttcccagaaagtgggttgaagtcgtatcgaacccccagtgatctttcaaccaaaggtttggtaaagccaaaagatagttcatgtaactggcaattccacgcactcggtagcttcagggaacgtgtataatttgacatagttccatcttgagccaacaaatttgggagtgctgagaaacacattctaggagcttgagattaacttattcttcagggagatctcaaggtacccttttgactgggaactggcatccttctgggcttgacctcctagtccaacattcgtgataagaactcggggcgagatgataattcggacttctagcaatgcaactgctacttcaataaggatttcccaactggtttataacgtctaaccattcctctggtagagattttccaactggtttaatgtctcgagactttcttcgatgtaaccccaagagttatagttacatcataatgacagaatccccatcaacaaccttcatcagaagttatttgccttaactacactctttctaccaatagtgccataacgaggcctaactagaaacatggcagactttgatgacgatggaagaaaactcatagtcgacactaccgcggggggcctacaatgtcagtttgtgatcaacttcatggctcgacaaaaaggcaatggaagtaggcgacggtaatggatctagcaccagcatcagcaccgacgctgggatcgatggttgaggcattggagtagtgacgaaatgcttagcttgacatgtctgttatatcctatagtcctccgtgggttacttgttactggtgcaaccggtctgaacatcaccactagactcaaatacatcttatatatttccgtgtctgcatggtcgtgccttggtgagcagcagggtgcctagactcgagagcactgaaggcttgccgttctcttaaggggtcaccggccggatctgggtttttcaaaataaacatgggtgctgcaagaactccaaggcagtttgtttccaccttctcctctttctttgcttggatagaggtgtaggcctttatccttgacgacgcccttggccagcagacattcaacttttcaccagatctcagtgggtagtcaagctgcttcctttgtcattttcttggacaggctcttcttttcataacttgagattcataacgataaacgccgtgcgtgtttcgatcattcctcggctctcaatgaaagcaccaaaatatttaccgagatttttagagactaaatatttagaacttaagaaagaagtgaaataataaataatagatatgagatttttacgttgttcatgcgttaactatccttagtccacgagtctattttattagctatataagtaggaccggtactctctattcttcttattcctcttgaagaagaagaagcttcataggaattttagtagagtttttatatattatacaatgtgttttaactttagagagtttcccctccttacagaatgaaggggtatttataggccattttttccttcacgtgattgttaggccgatcttgctacgatgaattcttacccttgatttggtaggtggccaattcatcacatggcatttaagggtgtcagcttgtactatttgatcacttcacacatgttgcctcagggtcttcccttttgatatgcccttgtcgatgaccgttggatcacttgagcaggtacaactgggcatgcatactctgtaataaggcataacgtggggaaaagtcttggtattgtacctgaaaaaagcatggttgtcctgtctgcagcctgacaggtacgggtggagcttccttatgacactgaacggggttataactcatcttgacttcttctgtgacctgtattagtgtcctttgggaagcccttatccgcattcagcttcactcccagggactgggagagactactaatcgtggatactccctgcgtccttgccttgcatggagcgtatccttcatggaggtcctttttcaggaccttaagcagatcaatggcgggggttaggattaaggatacaaactggccaattattatttagacttccaggattagagtccatgtgtcaagctt

SEQ ID NO: 304755 - DNA, 1359 bp, Cannabis indica
tttttgttgttgtttttttgttgtttttgtgcatttgtgaaattaaccctttttacttctaacctttttcaccattaaaagaaagtaatacatgtacaagaattgaccaatttttttctttatcccaaacatctttctgtaatcttttttttaaccacttttaacagtcttaagattagggatttaaggcaagattatcataaaatttatattatattgttaagtcaaaccattaaaataaagatacattatagattagataggtgcaggtggagcattagaacaattagaccactcctaacctaactcattgccactcctagttttaaagtcaagtttaaattaaaagcttaagatcaccaaaggcaggcacagagtttaaggtcggcctactagaacataacattttttgcatataatattagatttgggtctattcaattccattaaattttccctttaaaaaaaaaaaaaaaagaaaaactctattagattttgataggtataagtgttactttagtgtagacaatgcaagttaagaccagccaaacctaccaactacattttagttatgggccaccaccccgaatacctagactcctcatctatattacatgaaaaatcatttatttaagcatgagtggtctattttatacattttcaaaacctattttcatttttcaccataaattttatgatcataacttgtgagccatgtagtatgtagtatgtaccatcataccatttaattattgcttctttttttaatctaggcaaactatacaaattaagttgagaaatttagagttaaaaatgtaaagtttttttcttatcaaattgttaagtaatttagtgaaaataaggtatttttacagtatacatctttaaaattagtatatcgacccacccttttttatttttaacatttgaatagttttaatttcatttttttttttaaatagttatattgtagttacgtaagatattttgtaaattttttaaaaattaaaaataatttacaatataaaaattagagttcaaattgtcaatttcacaaacgtataaaataaaagagccacacatgccatacaaggtactgtttgaactttgttttcagcgcgttaagttattttgatttttaaaaaaaatttaccgtgtatcttagataattacaacgtacactgtcatataaaaaaattaagattaaaactatctagtaggggtgtgcagaaagtcatccgatccaatcccaatcgaccggtccaatcccaactgatccaatagaatcggatatccaatcataattggatcggatcggatgcaaattttaaaaatccaattggatcggatcagatgttg

SEQ ID NO: 304756 - DNA, 950 bp, Cannabis indica
aataaaactaacactacgtggcttgacacgtaacaatcacctagtatacatatacacactcatatacaatgtttatattgcttaaaaatatcataaatatataaagtaggagcaccattaagataacactatggaaagctaaagagacaaaaacttgagagcacctttaaatagagaggtcacaaattaaccactaaccgaaaaattcccctttcaactaaagtcatgtacgagcctaaggccaaactgaccaaccctcatcaaaagagttcaaaaattccacatcagcactaggttgaagaaaactctaattgcaaggaagaagcttaagtgagaaaatttgaatttaaaaaatggtcactctaatatgctatgttctaaaataagtgtatatctaaataaataaataaatatatcaattttagtttcattgtagtagtcttacggactcttttatgagatgtaattttttgaattctccctcatatggggctaagggatgctccttatgaagctatcaaattgaagtagtataaataccaatttgcaattgaaatactttaaatgaggtatcaatatgggcaaggtgtttctttttcgacttggttgactgagtctctcacggagatggtttaactacaactcgatcattttaggatagtttcaaccctttggtcagtgtcattaaagggatcattttgagtaaatttagtcaaaatataactgatataattgaggtttcctcgcgttattttttttttcaagtaaaaggtaaataataaagagaaaggaaaatctaaaaaataccaaaatattatacttactttcaaatattatatggacactagtattatttatcaccttttcttagtgtacgttatgattagttaaggatattgctattaggcaccagtggtgtctagcacttttgcgacatgtcgcgttgcgat

SEQ ID NO: 304757 - DNA, 2766 bp, Cannabis indica
aatactaatcaaatatttaataacatatatacacacacacgttgtttataaaatataaacaaattttgtaaatatatctattttttcttaaaagaaaatgaaaatttttattaataggcaaatcagacagtagtccattacatgatgatacatcgctcaaagagcataatcaataagatatgaaaactatttcattacaataaaaggaatgaaaatcctaacagcaccttcaattaaaggaccaataagttgccagtgtagaagcatcaataaaacgtgatgaatgctagatcttcaaaccaaatatgaacatgtgacaaatcacacctatcaatgattattagccaaagatcttctaataaaaatttggtaataaacaaccctattattcaatcagaatatataaaaaaaaataatcaaacagccaaccataataataaacaatcacaccataaactatggggctaataagaatatgaaatacccccaaatatgagcatgaaaaaggatagtcatgctactaacacatacgtgctttgagccaattgagattcctccaacatcccaaaagaaacaagactaaaattttcttccatagataaacaaagccctactatcataataatagcaaggtggtatatcaatactattattaaaactaacaacaaaacaagaagacaattataaagtaaaaacatcctaaaaacaacatatgccacatgccaatctaaagtcccccatgaaaacttatcctcgacttcaatttttggaaacaaacccctatcccatccatcaactttcaccttggcaaaaataaaaccgcaactttcgaccaccgcaacccaccaatttgttgctgaccacgacccccatgacaccttgtacatacccaaaccctaggatagccccaaaaccagaccctgcttaaaataacttgacaaacaaaacacctaaaccagacctaagagatggagaccagatcccacccagtgccagaggccaccaaatccacacccacgaacctgaaccaagcaccacagatgcccaccacacaaaacagaccaccgtcagagaaacaaaccccaaaatccagaaatccaattggtggaaaaggagaaacccatattaaaaaaaccatgacactcatgaagattcccgaccagagtcacacccaaggtcaatattagtttgcgagccctagtctaaggaaaatagcagtggtggctggcaaagggttacggagaaaatcttgtagacctctcttttgcttttctaagatcgctattgaaataaatttttaatttgtaaatatgtttgtatatttcttttagtttcaaattttaaattttagaaaataaattattttagtaatatattaaaatataaatattgatttatgtatttatatatttaactttatgtttttttttaaaaaaaaaaattaaattgaaaataatttaaaattgtaaatatatatatgtttattaaatattattttataaaattgtatagaattatataattatatttttatttttttatctatatatttttggtaatatataataaatttatttgtatataagtaaaaatttgctgctctatttttaattgatctgccttaatgaaattgcgtttactacattaattagttgaacaaagacgataatcataagtgataatacaaatatctcttccatccataaaaaattaataaaaaagaaaagataatatatacaaatatctattaaggcaaacttattgactactttaatagttaaagatcatatgaaatattcttgagaagatatgattttcgcacaacatcattatatttgtttctttgtttgttttaagcaatgaaagctgttaatataataataataataataataataataataataataataataataataataataataataaattgcgtttaaactggttaatgtattttagatgcacagcatgcccaaataacgcccggccttaatttattattaattttcttttttcgtcattagaatatatgcaaattaaagttatctaaaactaaatatttattattaaaagtagtatactactactaggtacgtacctgccttctcaagtggtgacatatatatatacatattagtaaaaagttacctgcaaaaaacttatactaaattttaagttaggtattttttattttatttaaaagtgataaattaattaaaaaaaaatattattagttattagtgttagaattattattcaggactaatataatcataagcttaataacataaacagaatcattaactatgtgtctaatatttgtttataaccataataggatgattgataaattaattatgtattagaggcacatgagagtaccttttatattataattggcccattaaattatagtataccataaaaggaccacttaagccctattagtgaataaccccttaaagttataagggtatgggatgtatatatatgtgttatttggtgattgagtagttttaaggtgtatggtaataagaaaagagaggatagttccacattgtggctctaagcttgggtctaatcttgagatcttgttggtgattcttgttggagacattgaagctagaaaaatggctcatatgggtggattgggaggtatgtgtattcagtgacgaagccagaaatttagttgagtgagggcttgaataaatattaaatcaaaaataataaaaataactgataaatgtatctttcaaattt

SEQ ID NO: 304758 - DNA, 1693 bp, Cannabis indica
aaaaaaaaaaagaaagaaagagtcataaaacctcatactgagcccactaaactaagaacataaaacttcctacatttactctacataaaacaaactctactacaattcaacaactgcatcagtgtcaagtcaaaaggtttacatttctacacactcagaaccaagcctaggcgcaaagaaaaatcaccgagttatgttagagtaattatatattatacagaatcccataaaagaagaaaaagaaacaaaatcccaaagtaatcctaaaacctttagtcaacaactcaactgttacatagaattcttccgcaggaatcaaaagcactaaaaccaaaaattgtaaccttctaggtaaataaatagaaaacaagaagtcattgcccaccttcgttgaccattgaaataatcctccaattctacgactacttacgacactaaaattagttcatcctccgaaatagtgatggttattatagagaaaaataaaaagttaaatacagttaaataaaagcatagggccacccaaattgtccctgtcaaaatgcgaaagaaaaatcatagtcataaataatgaaattgtcactacccaattaatcacaaactctcacaatcaaaacccagttttagaaactttataataatcaataacaaaaagggcaaacaaagcaatctcataacaacaaaaaaaggataaagaattgaaataaaaaggagttgcgtggtccaatgtaatgcgaaagtaccagccttgacaagcgcgtcccagagctcttcaggcaaaatgcagccgttgtgttcgacatcaatggcctgaaaaattcgataaagctcgagctccttggcatccatataccgacggaactcgtggtaatcgacccgtccatccctattggcatcgcaaaccttcaaaagatccttggcgtacttgtactccggtggaatttggagagcggagaggccagcctcgatctgggcatagtccaaaaacccggcattagcaacgtcgaagaaattgaacaggctacgaattctgaggtccctttcttctttggcttctctcaaggctagaagcacgtgatccattgatacgggaccgggtttcttcacggggttgcagcagccctctgtggcgggcttagggcccatctgagaagaagcccaattgctcgacggccggcgcagccccgtcggaaacagttaaaagagaatcagatccaagaataataatatcgtgggagctgggaattgagagccaatctttgtgacccccagatagcgggagcaaaaggggttatgggtatggaggtagtgttgtgtgggtaggattgttgtgaaagtggagaagaaaggcctggaagaagagcataatctcaaccccaagaaagaagaggttggatattcgctattggctagtgcgtgcgcccgtttgtgggattctctatatatgtatgtatgtatgtatatatgtatttctatttgctttattaaaagaaaaaaaaaatgtttcttttctctctttctttctttttatcaaaattaataaatatttaaaatttgcccctcatttttctacgagtgttacactttgacccttcccaaattttttttaagctaattagtaatgtttcccctaaactttgacatatactaaatcgtgtctcctgaatttttttgccgttaaaaattcccctga

SEQ ID NO: 304759 - DNA, 3136 bp, Cannabis indica
tcctcgtcggtctccctctcctctccgtcgcatacgtcagaccatcaccacctcccgtcggtatccctctcatctccgtctcatacgtcagaccaccaccacctcccgtccgtccgtctccctctctctttctctctctctctccgagcttgttataaatatatttatttatttatgtacatttttatttattatatatttattttgttattgtatatatttaatgcgttttaaagttagttgttattgtaataaaattaattagttgctttattttaatttaggtaaaattataaaactaatgcaagaaaaaaatgggggaaaatggcagaaaatctattttttttctgtttgttttttttttttacattcccgacggttttaaaccgtgccatatactataggcgataattttaaaccgttgggaagtccacattagcgatagtttttaaccgccacctattttgtccattttacgacgatcgtataggtgacagttatagaactttacgggaatatttcaaatgattgtttaaaaacgtcgagaaaaactatttttgtagtagtgttttgagcctcaccatcgaccccctctttctccctctatctctatctctctttcattttgaaatttttgtaattttttaagctttcaagaggaaaattaaaggcatttttggtggattttggtattggagctttgagaaaagtattggaggtaatttcattattttacttcttgatttcaacctttgcaaagtatgtattatattgaaaatacttctctttgagttgaacatgcatattgtgattatctagtgtttggattggttttttgtgatgttctttcattttaaacttgaaaattgctagcttgatgtttagttgagcttgaacctaattatttaggtcattttgtgatagtgttgttgagtatgaattctgaatatttaaattgtattagatctttgaaaatgatgatttgagcatgagttagtgtttggaatttgagcttgatttgttaggtgagtctaagcacatttagtttagttatgggaatgcttaaaaacacccttgtttcattagaaaaccaagtatgtgatttaggtgtaatcagatagttttggttaatgtttggatctagtaaaatcaagatttttgggagtttctgggtttctatgccaagtcgtcgcgaccagacctacggtcgccactgcaaggcttcacgcagaaaaaggggaaagccctacccaatcttgccttggcgagcatggggtcttctcgcgacgataaatggtcacaacgaccctgcaacgacagtttaatgtttgcctattttgtttttggagtaacttttgactccgaactccattttagacattctatatatcgttggaaagctcgtttcaagctctattatttggcacaatgttggagtcttaaatgtgaatatttatgaaatgtgattttggattaaccctattatgtgaaacccaagaattgtgactaggaatatcgacacttggtcaggatcacttatggattgggatttctccacatacgctggaagtcaagtaagacattgaactaagcatatagagtataaagcggtggcgtagttatatagtgtgtgattagtttaatgaaattgagggctacagttattaccctaagtatatattgtcataaatatatgataatgtattatgtgaataaatgattagagttacgcaagtaaggtataattaggttagacttggttgctaaaacccagataagtcattcgggccttatatgtaaaagagacgtgtgagcataatacgtaggtctatgttatatagacattagatacaatagtattattatacatggaataatgtgatatacagtgtagtgaaaaagttataacagaggcgtaatgtatgaaatgtgagaattataattgttctgtcgtgatgggccttggctcacaggtgctctattgtgtaggcaacggtaaaataaaatagtgttgagtcagccatgattttgggggttttaaagataaattgtacatgtttcggccaagctagaccacatgggttgggtccaacaaggatttgcataaaaattccatatttgtcgcttatgttggccggtatgaaataacttgtgatattttgaaaatgaattttatgggatcccggatatgtaactttaaatgttttagtttgaagtaaagtatatattattacaagctatttatttaattaagtttaatattagtttcaaatcacttggcttatggaccccaattaactggattagtctagtcgcatactatgcccaacatagtcaaaagataagcaagactaagagaagttaatactagttgcgcatatctcttatattcgatgagcaagtatgtctctcctatgtaaagtaaagattatttctttacatagttttgttctgaatatgcaatcaaggctaattggagacactctttaagccaaataggaccaaagacccattatgcgattctaacaccacaaaaccttttagctcgcgttcttggaatatggacaggcaatatgcgacttaacaagttacatacattattgtaattaagacaagaacagaagaaaatgttcttatatttatacttgtaaatgtttatcttaataaattatgtgaagttatggtaattgttagaatttatttaagtaggatctaaatttattaacatgtagttgattataattctataatctaacactctaaatatgaatatcttaatacgatgaaataaacacataaaaagttaaggaaaccttcattgatggcaatggaataatatgtttccttctactcagatctccaacctttgtttctttctatccgagagtaataaaaagatccgagtccggatctccttctccttcaattttgttaaccactgtcttccgcactatgattgagtacttgagttgctatgtgtgggcatggtactctatcactaaaggtttaaattgatgaagaacagtaagaggagttcgaaaccactatgaaggaggctctcatttacaagttgtctgacaatgaataaaaactaggtttagataggttggatgagaatgagagcatcatgttcctt

SEQ ID NO: 304760 - DNA, 2035 bp, Cannabis indica
aataataataataatttaagaactgtttgtttattttatttctaacgactataagacttagtctcatgataaacaaaattatattgtaatgttctgattgtatattaatttctttcaaaaaaagatgcaggtcttcaccctactgttttggaattaagtaatttgatcacatagagagtagttttatttttagtctgcaaaataataagtttagaataatttataaaaccattcttaatatttttttaaaaaatatttcttacattattttgtgttaatttagtaaaaaaaatttaacataaataaaagttcaggaggcatgatttagtacatattaaagttcgaggggcatgattagctagatatcaaagtttagggagcataatttagacataaacaattattgaaacagtaaaattgaataaaattagacaaaagtttttaaatctaacaatctcaatagttcagggcgaatttttaacggccaaaaaagtttagggaacatgatttggtacattcgggagaaaaaaatctcaatagttcagggcgaatttttaacaaccaaaaaaatttaaaaaacataatttgatacattcgggagaaaaaaatcttaattagccattaattaatgctctaatgctctattattattgataaaaccttaaagaagtgagcaatgaaccaattacatatgttgtattgaggagggtacgtattaataaggcccacttttgtacatgttgtgaaattgtcaaagtctagtggactttaattgtatatgtacagagatagatagagatgaatttatactgaatacccaccaactaattaaatgacatctcatttatttacttaattactatgaaatgactttatcaatgtatccaataatgggactcaacaacacttcaaacttcaaagtgttcatccatgaagaaaactattatattaataattaatcagtaagatatagctaaacgtaaaatatcagtttgaagaaaatctttcgggtccgtttagaaagtcattcagtgatttgatttatgcataattaatttgaactaatttatttgatgatcgtataagtaattaagaaattttaattacacttttaaattttaactcccataaaaattatattaaaaaaaattattttaaatattaagagctaaaaatattatttactaatataattactaactattttagtcaaacaaataattaattcatatataatacatataatattaattatttttaaatattcttttaatatataaatttaaaaaaatctgtactgataaaaataaaaaaaaattaaaattttataaatatttaaaacaaatctcactaaaattatatattaaatttatacatagaaaaactctgaacaagcccgtcgacatagttaatattggatggatgtggacacacaaattattacaggttgcaaaatatttcaaactaattaattacatccatattgctatatatacatagcttatatatatgtgtacatattatatatatattgatcatttgttttggttgagggtagcggcggcagccatggaggctccaattccaggaagagtaggagtgatgttctgatcaggcttattccttatttcagcatcaattaccctttcagcatcttctctcgtcacacatttatccctctctagcttctcactcgcatcctaataattattaggataatttcaccacacaaataactataaaatattaaaaaatatagtagctagtaaattacggcataaatacttaatgtttctgattttatacacttaaatacttaatatttattttttgtggtaaaaaaacctaatattataattctcttacactattactcccacttccgtaaattcataaatatagacacgtgaaaaattcagatgcattacatttatttttattttattttaaaacttaagattcttaatatcagaaaccaaatgctacttgtttcaaaaaaaaaaataattctcttaacaattttcacatgatatta

SEQ ID NO: 304761 - DNA, 919 bp, Cannabis indica
caaataaaaataaaaatacatagaatgctaataaaattatagattatgtctatggtaagcactttagttttgtccctataatagacatatttttatttaatctagtggtaataaattgatgaatagatataaatggttaataattattcataaaattatttttttaatgatattcttgaattaaataataattgtttaaataaattattaattatttctaacttcctccaattaattaataatcttttttatctttctctctctttcatttagaaaccccataccttcacaaatgcttttctatatgcttcgtaatcatgtttatggactttcccaaatcggttcacataataaaaatttagaattattcattttcatagtttgatttttgttaatgttattataagatgcccttcaatacccttttaacctttgaagggagaaattatcaaaaaaaaaaaaaaaacctttgaagggagcaagctagctgtaatggcatcctcatgcgatggtggagacaaatcgcgaagacagatccacaaccatcaagccaaccaagagaacagatgctaggcccgtagacctagtactcaaatctttctctgacgtctctttcatccaaacattgtgcaggtaacccttttgaattatttcctaatttgaactagtgtttcttttatatatgacatacaaaaaaaaaaaataaatatttcttattatataaataagattttgtttgcacactatataactgtttgattgcaattaggggtgttcgcggtgcggattgtgcggtttttaaccattttttcaaaccaacccgcacatgcggtttttctaattttccaaaccgcacccgcaccgcgatactaaaaaaccgcaaaaaccgcaccgcaaaaatgatgcggtgcggtgcggt

SEQ ID NO: 304762 - DNA, 5649 bp, Cannabis indica
cctagttttttcactgaaaagaaaaagttttgaatttcaaatggcccacaaaagtgaaagaacaattaatccataaattgcatgaaatgccaagtctaaaggcatccatatagttatgaaacatgatgaaaagccaaggcagtaaactagagaacataacttataaattcaagatggaataaaaagtaccggtgcagcacccgggtatgtacacttcaagcaggtgatgaatgcatttttcaaagcatgatgtaccccaaatatatgcactccattaacttttgagcttgtaggcttcaaaccaagtagaactggaaggatgcgtccatagaatgcaggcctcttcgttgcaattgttgaaagactgtaataatgataagttagacaaaaagataattttgcagtaaaataacaatacactaaaaaaaaaaaaaaacaaatttcaatcaaataactggaataaaaaaataagacaccagttactgattaggctgtggaggcagtgagtaatacgtgtgtcggtgttggcactgtgcagtgttggtggttatgtggctgtgttggaaagaaatgacagaacatttgatagactaacaataataacacacaagaatactgaaatcccactagaaatccttcattgaatcctcaataattacataatcaagctcttcgagaggctttctatactatttctaacccttcaagagggctttctatcctatttctaacccttcaagagggctagatctctccaacttcagttactctcaattctcattcaacctaaggaatctgccaaattcccttactctatttatagagtatagattttgccacatcagcagcctaattgcaagctaataaccattgaaaatagaatacctcaccctaagcaattaaacagctagtacaagttaaataaaactctctaagattaatcctttggtaaacaaactgaataggaggcttatcaacatttcaaaacaaggagaattctctagcttatatatgggtcatctgggtcaatcagtgtgaagaattaaaaccctatccttttttctgatgtatttaagttggggagcttttcttgttctttatttctgttttgaagcttgtttgaactggctcctgctgtttgctctattttcggttgcttatttctggttgagcttgctttggagtgcagtgtagccacttaaaatttatttgtttgtcattgtattcacaatatgtattcataaattagtattagtattgtccttatccaaatgataaacatatcacaaaatcattatggtaggaatgaaatttactgaaaccaattgtagtaaaaattaaactggttggctgccaatctatttgagggcaatcagaatcaaatgaaaatggggtatatagatttatattgcatatgacaaggaaaagagtaaatacctattaataagcacaataagtgtcgagttactgagggaattcccagaagggagcctgattttatcaagcagtaatcccaaactttgactggcctcaattgataaatccccaacattgagtacgggatgacctccacgaagccaagatatattgaattccattaggtttactgcaaggagttcatgtatgttgtatcaggaaacacgaggtttggttatacatactttactatcaaacataaagagccaaaggcaaagtccaaatgtggtgtaactgtaaccttcgtcagatggaggctctaaagagccattagggtcaggtgtgtaaagaagaatgactgtctccacaaacttcaatgctagcaatcttattcctccaccaccatgctagcaagcatgacataacaataaattaaacagtgaacaaaaccaaaaccaaatcatactatattgtaaagcttgtttcttacccgaaaagctattgaaaatattttctccttgagcttcaacacccactcccatgccgactctagtgaatcatccaattcactagaatatagaccctactaaagaaaaaagtaaatcagtaccgtattcggtccaaatacaaagtcgaatttctccaaaataagtgctttcaaactcctcataaaatcaatacaaggtgaccaacactaccccttgaatgtgaatcttgcttcttcttcttttttttcatttccattttacagttatataagagcatatggtttataacagctacaaagaaccagtgagaacaatgtatgaacaatcaagaacatactaatcataacaaacaaaagaaaacaatagacagagtgatatattcacctgaattgcaactttttcaagagttcgacgaaacaaatcaattccacaagtgacagcttgtcgagcaacagctggtgtaggatcattcagaacagttatcaatacaggaacgatttcagataagaaatcgacatgcttcagtccaatttcgccaattaacctacaaagaaaaaagaaagaagaaccaataagaaaacaagaacgaagtagtaaagaatcaagaaactaacataaaagataacacaaaaagctagggtttaacgaaatttactgaatagcgaatttgcgaaccggactgaacctatcagaatgaagttcgaaaagacgaggaagaaggtgagagagcaaatcaagatcatcttcaaccaagccattcttcaattgtcggaggcgatcgagcttcgatggaatgtctgtggccaacttggccgagtccacaagacccgaaagcttttccatggagttcgccgctaccatcaccattcccaccatggccaaaaaaacgacgccgtttacttctcagtggaacaaagccatgagaagagaactgccgttttagggagaaaaggagagtttcgaaaggtttgagttagcgaggagaagagggaaaagaaagaagtaactaattttcttattagatttggtaaccaaaatcaaataagggaaaaggaaaggtcccaccgagacttgaactcgggttactggattcagagtccaatgtcctaaccactagaccatgggaccatttttgtttatataagctaattttatttatttatatgttgttacaaatttatttatcttattttgtttcttctcattagctttcaaggaagaaaaataataaaaaatatatctaatgtgcatgtgaaattttcagcagtttgttaagatgctagttattgatcatgggatttgaatgttacagaggacttctaattccaaatgcatggtatgatattggtacttcttgtaaaaatggaaaaattgaaagaatgaatgaggttatttatttgtatgagaatgtacttttatatatgaaaattgtacaaaactgaataagaattgttatttcaatttttgcacaaggtgatatggcactaggcaaggtgacatgtggaggttaatttaagacatggatggtttgttcacctttgaatgctccgtccaaaatagtttacacttatgcctaaatacctagcgaacattcagactagacgccgtgaaggacaccgtgaatttagaatcctgagagatatttttcataaatatcttcttatttttactttaataaaatctatacatttatgggatttagtttgcacagccgagagattcaagggatttcatatttgatttcccatttattcttattatttttagtaacaatgttcattatatattcgttataaataatagaatcattctattatcaagggatccgagttcagacttttgagagagcatttacgatgctaaaatattttgtaagctttcatcaaggttgttaagaaactcactgaaccagcttcttgtgatctcgataatctttaaagtaatacaaatataaaagacgaggttgaacctctataaaattttatgtgttcttattgctcataattattattttattattatgattcataatattattactttaaagactcagcgtcattggctaaaagcgatgtcaatattttagtgttttcattgagagtgtttatccagatttttaaaaaacgaattataataaaatagaactgaagaaataaataattcaaagaaagaatagaacaaatacaagatttttacgtggttggggcgttaataactcttagtctgcgagtcggtactattatgtatttaagctagaaaagcctttgggaatacaatgagtataagctcccagtttttgcctgagcaagtattgcaagagaattcaaccctttatctaaaggatttattgggtatttatagtgttatgagaattatattaattttctatttttttttttccctctaatgggaagtttacatgaaaatatataaaattgggctgtcttcgtgaggcccagcccataggaggatagatgtgctgactaagcagattggatacgattaagttgtcaaaactgtgtcctataattgtgaaaaattaattatggattaattgcttggtctctatttaggtaattttcctttttatattgatacgatcttctgtcgtgaattgaggaacatatacttccttattttgtgtgcttgaataaaaagagaaatcggactaatcttccaagaacatgctttctggtccttcggcatcacggtactgaaactgctttcaggtacaggctgtcattgacagaatctcgtctggttaaggtcttgtctgacttgggcttggcccaaattatcttatttgggcccacgggttggctatagatgctgacctagaatctacatgtccattactggataacatttaccccctaaacttccataacgttgcgtacggtggaagcttgccctaatccatatgagtggacaggtggaggtttaaaagtaatatttttattactttctaggtattaatcgatcacggaaggtgaacttctatcttcagttgtggtaggttaacgtgacagtcatctagtggtggaagagcacgtttactgaggagttgctttctagaaaaacttttattttgacgattgttcactgtttgccatgaaatctaagaaaaacatcttcatcattgatttgcgcctcgattctagagcgcattaattgtttgacacgcttggctgttggacttcttagccattggatgtgttgtttgtgcttttggagatacaatcttgaatttttttcttcttttttacgtggaataccacctttggtgtaaatacccttgaaagacatcatttaccactttccccaatttcatatttttcattcgtctgaattcaaatttccttgagagcaaaacacagtgagaaagtcttacattgaatgaacctattcttcgaggaccttctctaaatcacttttcgcctgagaaatcgtcattttccaaatcatccacccccagtgatcaatcgtcttcagaggagtgaattggaaaatgacaactttaactctaagattaactcgctgattgccctagccaactatcttcgtgctaggtgtgctcaatttcctttaccagacccgacaaagatcaatttattatcgttgattccaccaacaagtatgcattcatttacttttttgcttttaatcacatttttgagttcactatggaatgtgggattttcatgttcttttttggctgaagttagtgttggaaattattttatca

SEQ ID NO: 304763 - DNA, 2850 bp, Cannabis indica
ttagggttttctagcaaagtgctttattgatagaaaacttgatctctctcaaatgagcaccaaagacctgcttttataatgtttagtgatcacacttagaattcaaacaccccatctcatttctcttatataatgagcattaatataattgtaacaactatatttcataccttttgaatcctatcatcaaattgtgtaataactcttttattacactaataatgtgtgatcatcaacacaagagttacaagtgacaacaaattgtaactcatctccaagttacaacatgtaagttacaaagtgtatattaaaatcatgggttacacattcatttaccatacaaattaaatatattatttagataataatatatttatcatattttaatctatacattatattaaataatataacatcccctctaccaaacatagtgttagagccaaacaaaaaaacttctttgagacttttaagtcaatgtgtgctaatttttagtgtttagttaattaattttgaaataaaacttcaggcaccttaatcctaaattctaacactcccccgtctaaaagaaaataacaatataataatgttaataataaaattattaattaatatgtcattatagtggacataatttaattatcgactattttataacacacaaataatcacattattcacataaaaatgaattattaattggaaaataagtgaatagtccatcaatgacatattgatgtaaatagtttaatgcttcaagtatgtattcactttttttaatggaaactttaatttgattattatgtatcacccaatgcaataaaagaatttgaggaaatatatattttattggataaaaaaattattttgactcctttattattttattttatttttgcaaagttttaacttttgtatttaaatatgtgttttatcactattaactatgttttgtttaattatttttgaattttgttatttaatctattaaaaacatatttttaatatttattaaaaacataatgtaacaaaaatatgatacttccagttgttaatcctaaattttagcgatgctaataattttcaaagttagttgactactcctaaagcaattaacgcaagcgcgtttgataagtttacccactcggtatataattcacaacgccactgtcgattctcacaattctcgggatacacccgtgccattcgttatctagtcccttagtgatcaaatgatgagagcatgaacaaaaaaaggagaagttgtgcatgcgaggatagacgcatgggcatggttgtgcaggggagtgttgggacgacggcatgggggctcgcatgtgagtcagaggtgcgtggtgtagagccgtgcgagtgggtgttgtgtgttgtgagtgtgaatcttggtacgggggcatgggggctcgcatgcgaaccgtgagagtgtgtttggtgtggtgagcgttagtcttggggtgatgagagtcggcacggtgggagaagatgagagctgacatggtgcgaagtagcggtggcaaaataggtttcgacacggcacccgacacgaattttacgggttagggtcgggaaaattagatgcgggtcaaaaacgggtctacacgactttacataaaataaaaacaagtcaaacacgacataacccgcttaacacgaatatgacacgtttgatacgatttcttttaatataataaaataaaaaatgaataataatataattatataaaaatataaatttagtgattcaatgttaagttaaaatattttaaatttaattttcttcaacataaaattaaaattattttaatttttttcatttttattatatatatataataaactatatatacataaatgtatataagttttctaatagagcttaaatatattatttttctctataattctagcttcaataatagcaaaacgggtgacagtgggtcgacatgaacacgacacgattttttacagtttgggttagggttgagataattagacacgagtcaaaaaatgagtcgacatacttgatacgaaatataaaaacgggtcacataaaatatgatacgaacacgatacgatgatacattttgccaccccttgtgcggaggatggaggctcgcatgcgagcccatgtggggcgtcacacacgagcatgtgaaggggaagagatggggacttgcatgcaagtccatgggggggctcgcatgcaagccgtggtgtgcgtggagtgtgtatgttttgaggagggggtgcgaggatatgggaaagagagaatgcatgacgataagaatgatattataaaggaatcaaaggacaaggcgtgcaagggaagtgcatacaaccacgccttctgaagactaaaaacaaggaggtacaagtagcggcgataatagaacggcaaggcttgacgacccaagcaagggtacgctgcaaccactctcctacaacctgtactcagggaccaccctgtgtgcaaccgaggaccacgtgcatgtacccggagaccattcacttagctataacctgcaattggagaccatctcatactaaataagggtatgagatgccaggctacctccagcacctgcagcatgtagtgggaaaatgacttttgtccccatgggatatgccattagagcctataaatgccccacatctcagatgtgaaaggggttggaaaaacatttggtgtaactcagatcttgaattcaatagagagagaaatcaatattaaggtgcattttcacctttatctctgtcttcatctttatcacatttctgggtaactttgtattttcaaaccactaacttagttgacgagttctcactgtcaat

SEQ ID NO: 304764 - DNA, 2769 bp, Cannabis indica
ttttggaaatctttaaactatatgagcacattccatctgtgtattggacagcaagtgtagatcttatggacgagcttattcaattgcttgaaattgaaaaaaatggggaagcaaagtccttgttgaagaggtgcattgacatcttagaaaacctgaagaagcatcataatgttcagggcacctaaactcaaatttataggattcttgtaacttgggacataggaatacatgtacaaaccaattgaatcacattaatacccctattttttaaaattggggaatttgcattacaagttatagaatttatagatagattttactttcataatagtacatataatacaatttttaattttattttttttggtttttaactttaagcatgaattttttgctaaaatagtattttacaaacataaagtgatactaaaaccaaatttgagtttatattgttagtgtgctgactatttgaaacttttttttacacaataccactttatctaaaaaatggtgatgtttcttctagtctttgcactcaatattccatgtcgaagttcatttttgatgtccgtgttttccaccaaggatgtgtgtcacccatgaagagggcttgtgagcaattagggtctacttgggtccagcttaggcccaagtactaataagggtccaagtattacgaagacggcttgacattgcttgccttgatcaatgcattggtccgaaacaaccatttcatcttagtcagggatactacaattttttttcttgtgctgtaaaacagaagttctagcattcaggactctgttagtttctccagctccatctgaccgtcttggatcctaaaagatatcattggctagctagcatgcaaaaatgccaaaaaaataagcaaagttaagtgtgcaactcaccatagattaatctcgaaggccagcagagtggagcttgtctggctcactgtcactgagctcctaaagctcatcatcatccatagaaggaggggctctctctaggtgcctgcgagctgcctccatggctctctgccccgaggatgagcctactccccgatcgggcttcggggcacccctacttgaaggtcgttccctcctagccggaggatcatcaatcatgagttgcccagctagtgcaagccctggaggaggaagaggaagagatgatccaacaacatctctaccacgggtggtccaaaccaccttggccctcggacaacttgaaggcttatcaaaaggtccaccagcaagacctctcaatctggaagacatatttgcaaaaataaagtagcaaaatcagaacaagtcacaaatattcaatgcaagacaagaatgtaaaagatggtgtaatcaactatcaaataccatcatcctcagaagagtcatcgtttgaatcctcagtaaccaccttgcccttgcctttagatgtaggcaaagagcgagtaggtcctgtagagctctggcctccatgcctaatctgaagagaagcatcactaactgagcccccgcggaccaagcgccgtcagatggccctctcactcctctccacattttgagcaatgtgagacagaggcacgtcatcatccaagtcagcgacctatccatcattagtacaaactccctctgcagttggggctccatccacaccaactggtaggccttgggctcccacaactccaggagcaagagggtacaagtcgtacttctggaagttggccacactagccaatctgattatgtttctcttctccacaaaaagagataggatgtggttcaccctatcactcatctgcaatgtagggatggagtgcttgtaaaatggcacccgctagaagtggtagtgcccgatattctgaatgtcccaagcaacgaagtaattctaggtgtacccacctactttggacataggtgtgctgttggtgtcacccaaccactggtggccaacttgactgaagtagaagtacccagttctgttctgcttcggggaaaacttcagattgaaatagtatccaatctcataaggagtgaggtgaggccaacctaactctttatacaaaacaaacattgccgaaaggtacttgatactttttagggtgatttgtgttcacatcccgaaataagcagcgatgtctctgaagtaaggatgtaacgataatattgccccttgctgtatatgacgctccaaccatgccatccaattaagggcaagtcggtgtgctctctgatctctagtgggtatctcataatgaacaccccttactagaccactagctagtatcttagcaaaagtatcaacagagaggatggatgcaggagagacccacctatctccctatgatctagcatccagaatctgaggctttgaagattggactaagatgtgatccaagcctaacacgaaggctgaccaagcctgttcaaaggctcaccatcatcatcataacttcccaaggggcggttggagaggacgatacaagttctattttcttttggcattaccaatatatgtgaaatctatattctttgaaatagaatttcatgtccattcattcttttcagggaatgatatttaaatactctaaatgtacaataaatttgtacaattcacattctattcaacaatcaaatatatttttatcttgattataagtctgtctttactacaggtacacgactactattattcaattttcacacatgatatatagatttcatgcactttaattgtgtgtggtatctcatcttttggttgtttcca

SEQ ID NO: 304765 - DNA, 2571 bp, Cannabis indica
atgcatcacaattgtcctgtttgctttgaaggtaaacatttagagtagcacaaggcgatacaagtagaatattatgaattgttagttctattatttactgaattgaaattgctatgactgctagtttctgttgagacaatgaaggacattactgtcttgccatgtggacatactatacatttggaatgtgtgaaagagatggaacagcatttccaagtgtttggctgtacaatcttttcaaggtgtttaggaaccataaatattctaacattgagtacattctttaggtactcgtgcccggtatgctcaaaatcatattgcgacatgacacacgtgtgggaaaaacttgatcaagaggtaatcaattctgttacagctaatgaaattggtttctttagtattgttttgtgtcaagggatctaattgtttggtttcgaaacaacatccagattgctcagactcccatgcctcaaatgtatcaaaacaaaatggtaagtcaccagtaatgtcttcaacttatatccgctagttgaatgaatatcctccattacctttttctcacaattcattggtataaatcaactaggtttggatcctctgcaatgattgtggcgagaattcagaggtacattttcacattgtcgcgcacaagtgcttgaaatgcaaatcctataatactcgacaaacacaaggaggcccaagctcatgctcatcaaggtttgaggaaatggtgagatgagtttgtttgttgttggtgacaacaaaaggttaactcaaacttcagaaacataatcttcattcactcatgacatggacgagaagaagacaacgatgatgaccgaattctttggttagtaatttaccttgatcatttgcttcatgtgaagtttttactcagtcacatcttttgataatgttgttggtgcacaccacagccaacaaatcacatgctcaaaatcaaaagttgtactattttacactttggttctttactaaaagatgatatataatatatatgggttgatattgtaagggaaaatagctcgcacaatattcaatttgcaagcttgtttattcaattttcatgtgcaattattagtgtctagtacaagaggggaaaagtgggcacataactgggaaaagtagtatctgggatttggtcgctaatcattagtattgctttagtttaacttaagaacattgttataagacatcctatgaaatgagttattagtacattttaatagtgaattccattaattttaatttaaatcatagactcgacattattctcttaatgttggagtttagtgaaaggttgaaaaggaggctgatttactttataatttgatgccgttttaaagattgaatgttagtatctcattcgttgtcgttttgattatcctgttgtttgattacaccattgtggataacgtgttaggtttcctaactcttttgcattcattggtggcgtcgggtcagtcaccattgcaatcccaatttaattgggtcgtttctcttttctagtcatgctcctatggtttcatattgtcgttttcattttcccatgtagaatctgctgtcattttcttacaatgttgtagatagatatcatgcctcactgagtaatttcaacattagccgttacaagatacacaagctattgctaggatcatttgataaactatggtgatttaatatttgagaagtataatgaataagtaatgaaaaaaaaaaaaaaaattctgaaagcatagcatgacaattgacaagctttagttttgtcaagtctcttttaaggcaaaaatcattgggactcataggtaaatgtatcttccatttatgggctgcaaaggtcgtgcatttatctctgcatactgaattaaaaaaaaacatcacaaaaagagtattatatatatttgtgtatatttttatggattttattacaattaaaaaatggggaggaaatatgaacttacatcatgaacagcttgtttgagcagtttcacttgttctatggaaactgtgcttatctgagaacattcaagaaaatttactttgataagaaaacattagattaaacaagaaattaatgagagaaaaaagagagaggtgtgtatatatatctacccttgtatttatggcccaaagaactccttcagtgcaaggagggactgtgagtgagccaatgtatctgtagtacttcattgatccattcaatcctaactctttggggtcaatcactccttggtgtacctctttctttgtatcagttatgtttattatatctctggttaactgttacatgcatccaaaaaaataatttattacgtgaatcccaatattcatttgcatcatacttttgcaattacaatctaaagtaacaaattaattacttaagcgcttttttttttagagaaaaaaaaaacaatgtttaagagctttagttagtttataatattaatatttcatagcataagttattgataagaacattgctcatgttagccatgaattataaaggaagtaatgattaaacgactttaaatttaaccttggagagaaaccaat

SEQ ID NO: 304766 - DNA, 1302 bp, Cannabis indica
caggattctcctccctattgtctcatcttgattaatattcacttgtgttatttaagtttcttgaattactttcattctttttgaatcataaaaagtattgatttgccaaatagaatcataagtataatttagtagtattaatcaaatttcttgtggttcgacctcacttgcgtgagtttactacttgattgcgtgcacttacgtattatttaataattttcgtaacacttaatagattagcctgcaatttccttacttcctcactactaatcttacactcacgtggtctgcctcaaccacaggttctttttgaaggagagtctaccaacaagcaacttcattatcatggatcagttgagacaccaaacaccttggttcggccaacacacaatcacaatcgcaatcctcccataccaccatcagtaagtacaatttttaccaaccttgctactactcttactattgtccctactgccattcccccacaattattcaccactcaatctcatgttcagaccagtcaccctcacaccagtcttcacaccaacagtacccaaacaaacactcctaccagcagtgcacatattgattcccaaaatagtcacactaatatcaatcttcacaccaacaatgcccaaactaaccctcatatcagcagtgcgcatactaattctcataccagtttgccatgtgcttcagcagtccccacttacagcaatcaacccatcactgatctctcccacatctacatgcttgaccttactgatcatacctttgccacataccctttactaacaaactctgtcactatttccccatctaactaccccatgaagcctttctctacttacattgctgctgtagtggctgtggataaggaaaatcaaccaacaaataccaatattaagaggccaaatgactcgctatccatgaggaaaatgctgaaaagatgtcgaaatatccaaggatcaacatcttctcctttgtaaagagatgatgatcatgagatgctagttttcgagtttgaggattctagctgttgggaatattttaccaggatctagatttactaacaagtatgttgaatcaacatcctaaatatgaatatctctaaaacaatgaaattaaacatataagagtttaagaaaaccttatattgattgcagcagaatataatgactcattccgttcagatctctagcccttgattcctttatgtagcaaagcattatcaagatttgaacctagatctctttctctccttcgggtttggttatcaccgtcttactcactatgattgag

SEQ ID NO: 304767 - DNA, 695 bp, Cannabis indica
gcctttactaatccacattactggagcggtcattacaagtatcatctccactccatacttattgtccctccatcttactcttcatatatcttactgtttcacctttctaccaaacatactaatacatgttttttgtttttttttaaaaaaaaaagcttttgtatagattgttcagtatgtttgtttttgtaatttatattttcggaagagggacacttatactttcaagatctaaattcaaacaagaaaggtccaattgcgggcccagtgaggataatagattaaacttactaagttgtgccatctgaattctagaagaacaactcatccaagtgagagaagggccagtagagaaagcatctagataccttttagcgatgtttccagaagggtaattaaatagatctttaaatgtcaaggttgatataatgctcatttaataacgaatcccaccatattaggactttgtccccaacgtcaaatctgaaaatcacgtgaacaataaaaggagatatggtaattatccaacaactaccaaattgtctttattacacgtgaaggtcgacacgttttctacctgtcactaaaaagtggtttccatgtgtacagataaccattgcctcacggactggacctcactgaatgggtccaatgataactccaaattcgtagttggaggttcaaaatttgaagat

SEQ ID NO: 304768 - DNA, 3794 bp, Cannabis indica
gtctttagatgttgttttgttaccattattgtccaagagagagataattttattcttggcatgtcgagatgaggcatgagcatgaaaaaatttggtgttttgatccccactttgtagccaatcaacacgagatctttgttgccaatattgctcttcttgctctaaaagttcatccaaaatactctcagatttttgcaaatcatgcagtaaaacctgagttcgatcttgctggttgttgagtcgtgcaacttccttctgtgccttagagatttttttcttgaaattaccaaactttgaaccatgccattgttgtaaagatgaagcacatgctgcaatattatgcagaaaaatgtccatggcagtacccgattgttgacaatacttccattgtttctcaataatgactttagcttcatcatgctgcaaccatatttgcttgaaacgaaatctgcttcgcctttggacaacttgctgctgctggtttttgagattaaccgagactgctatagctctgtgatcagaattatagcagtccagatgctgtgtgacaatcggttcaaagacagatgcccaatgatcattaacaaagctccagtccaatcgttcctttatcgtatccaatgtacggcgacctttaatccatgtgaaaggatccccttgaaaagagcattcatttaaatgacagttcgcaattgtattttggaattgctccatttgagattcattacggagagccccacccaatttgttttcattggaaagaatttcattgaaatcaccaatgaccagccatggtgataaaggagaaacatccttaagccgttccaatagagtccaagttagaacttgatgttgagcagaaggagccccatagaaagccgtaaaatgccattttggttgattatgaaaagcaatataacaatcaaaaacatttgtattataagtaagaatagatacatcaacatcatccttccaaagcaacatcaaccctccccccaaacctattctaggtacatcgagaccattactaaaatgtaaactattacgaaaacgagaaagaacattagaccctaacttagtttccattaaaaaaagtacatgaggagtttgctctttgacaagcaaacgaagatgacgaaatgcgctaggattccccaagccacgcgcattccagctaaggattttcatggctcatggcggggctgaaattcagcctccgctgcaaagtctttagaaccagaacaatccaataaaccattggaaacatgctggtttcgatccctcccaacagactcattaggagtaagatttggtcgtggtaatcccctgcatctcttaagtgtttcacgcattgactctctgtcatggtgtctcttaaaactagtgtttggagttttattttccttcccagcagccccagaatttgttgatgtaatgattgacggagaggatgtaatatcagttagaggaagagtcatgtagttgctggtttgactagtcacagtgcaaggtaatggtgggtaagttgcaaccacattatgatgattattagcagcagtaggtggagtgtatatagtggttaaatcatcatcggaatccggtttagaaagacttttgccacgattaacatcagaaataagtcccttttgaggtgtgttgtgagagttcatagtaggattcatgtgggaggcatttggcacaaaagtggctggtgcaaaagtaactgttgcagcagtaggagaattggtgtttaatgctacagaattcggtggttgttgctggtatgaatgagatccatggagaggcattgagcagttaactcccagtcctttttgtgatgattctccttgaaacaggatcgaaggatgtggcaatgatcttttattcaaagatggaactgctgcaattaaagatgatttcgccaaacgagtaagcagaggccaagcatttcctttcccaaaatccgttcgatatcgatcataacccgaagaaggcagcagtgagccttttattgttggtcgatatggtaattcaggttcagcaccattgtcaagttgttcaagaaaaaccatacatttgttgtaagggtgaccaattttgccacattccatgcagtattccggcaacctttcgtagcgaaattcaacccagaacttatcttttacttgtgtaagagcaatcatacgtcctctcaacaaaggttttgtaacatcaatcttaactcggatgcgcataaaaggaccccaaccttcaaataaagaatcctcaaaaacttcaatgaactcgcctattaaattaccaagagccacagccagtcctcttgttttactcataaaagggaggcgataaacttgaatccaaaaaggggtgtgggtgagaaaagaaggagaaatattctgtccaatacttggggagaacaaaatgatatggtgattttgaaaatggaaaggttctttctccaatactctcagtttatctccttcgcaaccgaaagacagcataaataattcatcatcctctgtaattttaacaggaaaacgaccatcccagtgctccgccattttcctttgtagtgttgataaccatacttttttagaggtcataattcttgcgtacagaacatggctaccaaccgaaccagaagagataggatctccaaaatcaaattcatacaccgactgctcctcatcaataagggtcagagttgatttcatcttatctatgtatggatccatcgtgaggaagaatgaatgggctaaatctgttactctaattggaatgcacaagagagattagaacatcaaggaatcatagatagcagtatgtaactgcagaaaactgctaggaaattgaaaaaaaactcaaaaaaaccaataatggactttaactgccacagagcaacaattgggcagacgctcttattgttagttgagaaaaaaatatgtgaagtgattttcttttcttcatagatttggtgaaaaaattagcaaaaaaaataatcatataaacataaaaatacaatcttaaaatacatatctatacatattcataacaaaagaaactattattataacactaaattaaataaaaaaatgaatttaaatttgaaggaccaaaaaaaaaaaattaattaccatccaactaatacataaatttataaatacatattctaacataactttacctgtatgtatcataacctaaatacatggacaaatcggtctaattcagtgggagaagttttttttccaattgatttcacactacaaaaaatgctgatcgctactgccatgcttggggaagaaaccaattgaagtgaagttgtgctttaatttttgtatttagatcgctactcccatgtgtttggggaaaaaaccaattgaggtgaagttgcgctttaattattattgtatttagatgtagattagggatatatattagattataatctatgtatatttaagttaatatatgagagagaatataacggaaattataatctatatatatctagattaatatatgagagtgaacatgagagagattatatctaacatgtatccctaattttgattgatatataggcgtggatagataatttagagattatatataatctttattaagtacatggttattaagtacgatttgatcaattaataatttttttgattttcttttattttaaaaaagagaaaataaattactaatagttaaaggacattttacaattttgtatacattattttaattaattacaaaatatgtgcaaaaaaaatttattatcattttct

SEQ ID NO: 304769 - DNA, 2354 bp, Cannabis indica
tttagattagtatgtagtttattttcgatatatctgtgtggttgttctttatcttggtgttatttttctgatttttctttggaatggcgagatctagttttctcgccaaactgaatttttttaacaaattatcgatactttttcgattatatattgatatcttctcgataattaaagaaagaaagtaagggatgacaattttaataatttttcgatggtatatcgacactatttcaatctaggacaaaatgtaacaaaaaatagcaaaattaatcatacaatgcagatcatcgataaataatcaatatactattgataaaccatcgataatcaactaaaataccaagcaaaaaaaatgtcaacctaccatcgatatactaacgataaactatcatcattattatcgatgatttatcgatagtacatcgatggtttatcgatgatcgatggtttatcgatgatcgatggtttatcgatgattctgccttgtgtgattaattttgttaattttgttggatcattggtattagtttaaagaaaatccagagatgtatagtgttaaaagcacttaccaacttctttaagtgcttcatgaaaggtgatcgaaaaataataattctaggctttggagagacttatggaatctcgaaattccccctacggttaaagacttgttatggagggcatgttccgattgtctaccaaatttaactcaattaaaaggatgacattttgacatctctgttgtttgttcgatgtttcaaggaatggaagaatcaattctccacattttagtcgaatgtcccttaaccaaagcatgttggtagtgggttgatgtggttctttgcaacctctcggccacagattttacttgttggtttcaacagcttgcgacaagcttctcaaagacgaaggtgtgtcatgttgccattatttgttggtctctctagcgtgctagatatgacctggtttggcaaagtaaaagttctgttgcaaatggtgtagtgtcaactgtgttgtcttactttaatcaatggaaggatgctcgtaaaaattcatcaaatacaagggctcctagcccttgtgttaatgtcgagcattggtcagtttgagtgtaatcatttaatgaatcttaccataaaaccaaactcatctaatcctaatctaacttttacaatctagttatggcaatcaaacaaacagaacattttcttgtatagtgaaagacttgctcttgtgactttaaaacaaataaattatattaacttatgattttgtaacaaatacatataaatgattataatatgcccaacaatatcaggtctaaaaagggctgatcctccgagccaactttaacaaaaactcaggaacaaggcgtcttcttggaggcgctgcagcgtctttggcaagagcttccctatcatcagcatgtatcacagaaactatgtgatcaaacaactcatctttaccacctctcaaagggtcctgaaatacaaatttgcattcaagaattataagttgcttgcttggcatatggaaaggccagttttatttaaacttctatccaggaagctaaatttagtagtttagaactaatcaaaaaatcgcttacctgaagaaacaaatcggtatgagtctttccttcatacagtataagctcagcttgagctccaactttttgaagagtgttacaaaaggtttgactgcaggaatcaggaatcaaaatgttatttaaaatgtaccaaactttagtgatgcctacttcaatgtggaaaatttagttctttatacagagaagtagaattggttgaatttctttcactaattcatgtgagaatgtcgtactttggtaagaatttaactgaccatcctttttcctaaggatgtaatatgtactgaggtaacattctaacctggcatcagaaggaacagaaagatctgcagttccatggtaaaggataataggaggcaatagcgaaattgcatttttaatacttgggtccagtattctaacttcaggagaatattgtttcaaggattcttcaccttccataacgctagaatgacgaaacaaacaaagctctatcaaaagatggaaacagagcgctatcatagatagtacagcaatcaggtagcaaattaaacaacatgttgattcttatgtacctcaagaaaatagatcgatagagtcctcgtttatggaaatgatcaactaaattaggtaaattatacctgcagccatacacatcaaaggaagctcattagtttaagaagctaacttagtaattagtagaattcattcaaaataaattatgataaagtaacagaaatttaccctccagataaactaaaat

SEQ ID NO: 304770 - DNA, 3858 bp, Cannabis indica
ccaaacccgaaggagagaaagagatccaggttctgatcttgataatgctctgagacagaaacgaatcaaggggttgagagatgatcttgaacaaaaggagtcattatattacactacaatcaatgtaaggttttcttaaactcttatttgtttatttcatttttatagagatattcatatttaggatgttaatcaagatatttcttagtaaatctagatcctgataaaatattctcaacaattgtagtcactctggggaaagttggtccacaatggatttgcaacgacaatttgaagcaaagtatgagaagtataagagcgagagggcatggccatatgaagaaatcatttgcgtgacaaattgagaaggtgtgacctcccaaaaagtgacaccaagaggctggaagagcacattgctgccctgacaaagttggtaaacaagcatagcagagaattatcggattccaaagatgaggatctgaaaccttctgtcaaaagaatcgcggaaacccctcttcccaaaaactttaagatgccacacatcgagttatatgagggaagaactgattagtgaacgcgcttagccaaatacaacaagatgatgcaagtcgctcgagttagtgatgatgctaagtttctatgcttttccttgactttaactaagtacgcggaagactggtgtaagggactgactctgggatcattcgacagctggaaggatttacagtccacgttccgcaagcaatttactaccgcatgcgagaaagacatggagtcagttccttgaccaatgtcaaacagcaacccacttagagcttaaaagcgttctttcaaaagatgatggaggcgattgccaagactagggttagcgatgatttgaagttaatggctctccaatcaggattggttgtgggttccttgtgtggggagagatgcaaagaaaaagagctgaaacactatgtgagttcatttgcaaagcacagggcataattaaccttgaggatgcctacatccaagcattcggagtacctctagtaccaacacctacaacaactactctgagttttacctctcagactccttccccatgtttgtctcttcttgaatctcaatacagggcctcatagctccctaagcacagtttgatgtgccaccaacacaaacaatctctgtcaattttccaataatgagattggtggaggcaagcgcaacaatgatggatttgaccaacacaatggcaaaagaggaaaattcaacgattcccttatgccattaagtctaatggagaagaggagaagtgcacatgcttcattctcctagcaaaactcccaaatcaaagcatgcccagacagacctagcaggacaagtcagcaataggcagtcacaaggctggcctccatctccaaaggctgacctcctcttgccaaagctggtaggaacatgacctaccagatccggtaggaacatgtttgacaagacctcacacatgcaagcattatatggccggccagccggcatcctacatccttatgacttgcaaggtgcacagacaagtgccaacaactctgcccaaaccatcggtgataggacacttaggggtcgtcgtttgtagaccccatattacaggagagactagcaaagttagggatcactatgctcagacacttcgtcatgagcttaaaagaatatcctggcaggcaaagaacagactctaaacaaccaaagcttggagagcccacgagctgtttctcagaaggagatcctacccaagtcaatttcccgcacgacgaccccctagtcgttactacacaaattaggaatatgactgtagcaagatacatggtggagaatggaccctccttcaacagtcttttcaaatcaacatatgaaaaaatggggctccaatttgctgacttggcaccttacaaccaagtgatgtgtggcttctttgtcaaggcatcgcactaggaaaatacaaccaccaaaactctgatggtgcagttcatcataatcgacgctccctaacctttcaatgacatgatagaatgatcagccctatacgacttgaagacggtaacaatccatctaccacctctgcctgaaattcctaacaaggttgggggtaggatgttgaaaggagaccaacaatctacccctcaaagttacaaccttagccttgttcaaagccaaaaaatagaagatccaactgccagatcaggaacgtacaagcttcatgacagacttaggccttcactgctacaaagtcatgccctttagagctgaagaatgtaggggccacatatcagaggcttgagaacaaaatattcaatgatcttatcgactgaaacatgaaggtgtatgtggacaacatgcttgtgaggtccaaaaaggctagggggcatgttgagtactaacaccaatgcttcaaaatcacccgaaatgctacaacatgaagatcaacccctttaaatgttctttcagagaaaatatacacaagatccaagcccttttggacttaaagtcgcccataaccatcaatgaagtacaaagccaaacaagacgcattgctgcactaagcagatttgtgtccaaggctaaagataaatgcatacccttcttcaacaatcttagaagcaacaaaaaatccgagtggacaaaggaatatgaaaccgcattcccagaggtgaagaaacaataggctcaaccacctgtgttgtctaaacccctagacaatgaagagataggcatgtacctagaagtcacagatgatgctgtgagtgacgtcctcacaagagaagaaggcaaaatacaacaccctgtgtactacattagcaagataactcaacccaagaggagcattgaccacatgcacgatgctggcatggcccccaggacacatcggggcaattgatgcacgacgaaacaaggtcagtttcaaagctttcaacaatgaggctgatcatgaagcttcagatgctggcctcacgctagcacacaaagcccaggctgaacaactagacatatcccacaactctcaactagtcgtaggttaatataatactcaatacaagaaggtgatggcctacttgagctaatatcaagacttgtaaagttagctcaaaggttgtactaaaagtcaagagcccaaagacgacacaacagctgacgcactcgcttgactagctagctgcacctttacaaccaaggcaaacatggtttctactcaattcttcaaagaactaagcctccctatttcaaaagaagtatacttgctagacaaccaacatgagtacacctacaatgacatatctccaaacaaaagccttgctagagagcaatgactaaggggatggctgtagggtgtccaatcctacagagcataacacactgacgtggtatcccaacaccacctctaagaagtgttactaagaaagaagctgaatagctattgatagaagtgcacaaaggctctacagcaattacgcaaggggcaaagccacccaagtgtaattgggatcaaactacaacatcaactaggcctctataaggctagtcgaccatgacctcaataggctagctgaccatagaatccacatcctggctgcccatagcctcattcaactggccaagcaatgctccctcaatgtggctgggcacgtggtcttaccctggccaggtttatccactagcaatcttctctgatacttctggtctatagttaccgagaggtaaaccacatcttgctagcgggatttcttgacaaaagggaaaaagaagagaccaagccaacttaaagcatcatgtctgtccacaaagagttaccaagtgttgggttttatggcctaaataaaactcatt

SEQ ID NO: 304771 - DNA, 3919 bp, Cannabis indica
gcatagagaaaacaacatatatttatacacaacttaaacaatttattatgggaaactaaaagaataaaagaaacttattagcctaattttttactaatatatatgttgatcattgcccaactttttacaaaaataatcaatggtaccccattaaaaagttttgtgaagatgacccttagttgctcttcaatcttcacatatcctgtaaaaattaaatctggttgaatctttttatgaacaaaatgacaatcaatttcgatatttttaatctgttcatagaacacaaaattagacgcaatatgaaaagcagcttgattatccaatgaaaatttaaataaagagaagagagtatcattttctggggattaaaatgttaaagttagtaacatcatattggtgtaagattctcattcttcttcatttttgagactttttctaaaggaaaaacaaagaaggcaattgccacctttcattgatatgtgatgatattacaaagaaaaatcagatgttaacaccaagcaatgctattttcatcttttcaaccaaaataccttactctaaaagtttctaaatccctccttccatcagtcattgtgatcctacattgacttgacacatgtcattgttttttcgccggagattgctcgatggaatttagagttgtaacagtttcacttgcttctcttgcactagaagtatgtaatggcggctttgcttcgtcctataacagcaaaaaaatcgaaaaaaagagtggaattttagcatgatattgcaaagttgttccaaattgaagacaattaaaagggaaaagcacagagccttattaagaaaccgaattagagtacgggtgatggcaagtgatcggttttactcacctgagcatgagatgtcatgttatgtgttgctgctggttccacccccgattgattgcttccatcaagttccaaagacgggtcctattgttaataagaaccgatagttacttagcatagttcgagatatgaacacagaccatacttacttttgaccactattgttaataagaaccaagagattttttttaatgaccccaacaaaattactggtagatccctataatgagggtatcttaggactatgccgagttgctccctatattcaaatgtgttcaagttgcaatgttcattaacaatataacattaggtggcaatgacaaacctgttgatagcagttttgattccactcctgaattttcgacggagtactttgttgctgttgttggtcttgtctggcttgttcttgttgcggttgctgtggtaattgatgtgtgtcgggctgctgaggctgctgctgaagctgttgctgatacagatattgttgttgctgttgccactgaagatattgttgctgatattcttgtgaaagattcaaattctgttgctgaggttgttgttgcattaacatttgttgttgatagtaataatattgccacattttgattatatgcttggttgttttgaatttcctgctcttcgctaccttgtaccggttgagatggtgcaacataatttggttgcgccatactttgcacaggccaggtaaccggtggaggtggggatgtgtttgaaactgaatttgagattggctgccttgcagaatttgatgattttgtggggatgcaatttgagatgggataacttgaccgataggaattagaccgctcaatccagcttgcgggtgttgttgttgtgtagaacctttcctgtgttgatgtgatgatctttgtaaatgcccttgaaatccaaactttgattctttacgaactttagcattatttgctcggtgccagttctttccacgatttgcaggcttactttgctgataatatctaggttttgttgaagtaggattgtgatagctcttagaagatgatggattgactacttcattttcaatttgaggggaattagcttcggcttttctttggatttgcgtacgatgatcttcgtcattattaggctgattgctctccaccatgctttcatcagaaatgcaggtttcttgaggcatagaaaattttgagtctgatgatggttcggcctgagggtgtaacgaaagaccttctaatgaaagtggcttcatatctctctgaggttcaaggccgaaagctcggttgtgatcatttccatttgggtgttcatttaaagtttgtaaagattcggttccttcagcaacttccagttttaaacttgatgaaggggaacatactaaatctaccgacgatacatttgtttctggtgaatctttcttggattgctcggtaacttcaagagcaagcaacgtcactttctcccccgaatcactgtgagcttcttcagaaggaagttgatcactagttggggtttgttcgaacgaaatatcatgaatctcatgagctggaaacttcggctctgatatttctttgtcttgtaaaggcatctgaacaagagagtcaagattagactcttcaggtggctgttgatgcttagtaacaatgttaatctctcttccctctttagcaaatcgcgatgatttttcatgtttgaattgctcatcaaccgctgttctgaaagaatatggaaaaaggcgaacgtgacgattccatgccttccttacttcatcaatagttccacaaagatccacaaactgattcaataaccattatcagcactagataagagctcaataaaatttgctttttccgagaatgaaatgatgttaacttcgaaagggatttcaattctaacctttaaatataagctcgaaacatcctcagcgtccttgacattcaaaccttgagacgcgtctggccctggagatattacattagctatgacagagtcgatcacatgtatgtgacgctgccctccatgcagtgtagcaaaatttatcaattcctataaaatcgacgatcatgaatctcaatttttctttcttagataagaaatgaaattacttgtgttccaccaattcatgaactcattaaaggttgtttaatcattagggtaagctattttcgaagaacataaatacctctaaaagtaagatgcagctcggtaagcgtttaattccttctattaagatatctcttgcagcatctgtattttcagttatctgtatgcaagaaaacaaaaactttcatacattagaagagaaaatttaactcgatggaaatgaaaaaggcgaagttgcttggagactaatttgtagaaaacaatgaagctcaaaatacataccgaaaacagaaaaaggagaagagttactcaccatgattttaagcttagaaaagtgaacatataatataggaagagtatccaaatttttgttcagctcagccatttttagtgcttcttcatatatattagtagcttcaacaaaatttccctgaaaatttcgaaaaagaacaaataagcgtaaatgaaaactaatatgtctttttatatgatgataatgtcgatttaccagacgcctttccatgttagccttccttgcaacattttctacgaaattagaatctgattcttcgtcacaatgaagaagtgcagctcgtgcgccaattgtatctccatcatgctctttaaattgggcattaaaaagatgcattgctggcactctctgcaacgaacatacatacgaggaggaccataataaacatctccaatcatgtataaagcaattcagtcaagacatcctataaaaagcagcaatcaagcaaatgacaaacaatgacactctgaaactaaaattggtagatgacaatatcttagaagactaagagaactctcccaaaatcaaaatcccattaaattcacaaatgcaacaatgttggggatgcggctagcattttttacacatttgtatgaagtaacggattcatctatactatcaatagagtttgtaa

SEQ ID NO: 304772 - DNA, 2105 bp, Cannabis indica
tctgcccctatttataggaatatgttgacagttattttcttgggatcagttttaaatgtaactattcatgaaatgtggataattctcacgttttatttaatcgcatgtcagataatatctaataactgcacaactgccttttgtctttattccttaagcagttattgctgacttgaaaggttgtacctcgcttaacatgagttatcctccttgtccctcttaattagaaaaaagtgttaagtgttggcaaatagtttgcctcgtcacatttctttatttgggttaatattgcgaggtgactgtctggcaatgtgtaacgtgaggttgttgcatgtgattacgcttattctgcacgagtgaattaatatcttctttctatttatgtattttgaggcacgtgtatgtcttgtcaataccagtccaataactttttattcttatctcgcttaagactatacactcagcgagttttgaatatcttctactaaatttttatttaatattgacgagttatttttattcgcatttaatgatataattttattatatcattaaagttgattcaaattctatttgtaggacacatgtcaacttttgaagtgtagctgaattttgggtataacaattaccccttaaaaagttctttttcaatttaaaagagctttttaaatgattataagggtatttttgtgataacccaaatttgaaagatggcatgctttgggttttggcagtttgggattttgaggcacatcattagcattaaatgcccgccttttccaattatacagtgttcccatccattagatcttatttcttttgatctaacggtgatcacttccaggatataagattcaagaataaacactcatttcacaatttttatccttcaaaccttcaagcctttctgtgaaaatcatccccgacttctcatgaccttgtatgcccttactataactgacttactttttgctcgtttcttcggattttatcttcaatctcaaaaaattttgaatatgttgattcactcatctcagtcccagtcacagagttcttccttgtgtgataatcctcatcagaatagtaagtgatctgtacctttcttttttatatttacagtctgattttcgtgattaattttcttctttatttacttttgcttggttattttttaagtaatttttgtgttgttggataattttagggtcagagaaaaattttaggtttatttgattcatagttttttggtataagttgaattaactttttctagaaattacgattattttctttttgcaagtatgtcccaatatggttctgaaatcccaactccaaatttcctagaaaaaaaaaatgtcttaaaaaattagctcttccatttgaacccaaaatccaaaaagctaaatctaaacttgaaataaataatgtcaaaattaggaaccatttaatagaaacccaccaagctgaaattgccagtcattatagatggtttttacaagaaattcctgagagtgaatgccattttttgcgagatgcagcctagccaaaacctcaaattgtaacttctatccctttagcgggaccttcatttttacctcgagtcactgttgctttcttaccagatgacctagattttgaaatcatgtccacgctagctcgtaaatcaaagacccccaagatcccactatcacttttgaggccaagctgattgaatccaaagtaagagctattgaggactatgtcggcaatgtattaaagtcttgtggcatcaagcaagagcgaggatgtcgcattagatccattgctctaggggagtttagctgctttccaccagaaagggtgattcgagaagaatgtggtgaagccaacactatttcctcgtcagggattgacgcttggagcctcgagcacatcaaggctaaagcagtacttcccttgagggaatactttaaggagttttgtaattatctcggaattgctccttttcaattaattctgacatcttacaaaattctggcttgcctaaaggtcctataccatattttgggttgggagtgtcctactccccttgaaattgtaatgaccgctttagtaatttggattag

SEQ ID NO: 304773 - DNA, 3407 bp, Cannabis indica
gtacatattcggtattgagggttacaatctttgagacgccattgatatcttattagttatgttgttagacgacatatttatgtatattgtgttataaaatattttgtgggaagaatttgagatctgaattatatttattatattaaaaaaaggtttatatttaggaaagttttatcaaattcactttttatgttaaaaacctttaattataaaaaagtaacttgtaggtattgtatggatttccaaatccaatcaaaagatcttattaaatttcaacatttttctgaataggaaaaacaattattatgagttttggaaacccaaaatcaaaggcctaataagttatctaaatttatatataattatataactacgatcacacatgggtccatagctcagtggtagagcatttgactgcagatcaagaggtcaccggttcgaacccggttgggcccttttataattataattaattttaagatttatttaaaactatttttttttgaaacatctttaaaactattttgatttatagaattttgcatgtataataataaataataaataagctcagtctcttttatttattacattctattcacttacacataccaaaatcaattattcaaaatggaaaacaaaagttttttgcagtgtttattatgcaaactatatttttttacaatcaaactccacactacatgtggtttctatttcttttttttttaataaaaaaaaaacccaccacaaatacaaacatcaaaatccaaaatcttctctttcccaacatttctgacacgtgtcacataccatttttacaacttccaatttgatatatacccaaaaaaaaaaactcaaagacaagttggacaatgaaccaaaccattctcattacacttagagcacctcaccttatccccacctacacccgccaccaccttacaactccctccacactcccaacacggcacgaaccgggccccaccacatccggagcacccgagtctcccaacacctctctccaacccgacccgactaataatccgacccaaccgacccgaatcattaagctcctcaatctcgtgggccccacccacataccttcccttaacgaaaaccctaggcactccaacctcatcatcacctaataacaactccttaagctcacccaagaatccaccgtgtaatgccacgtcacgctcgtcgtaagcaaccctgtgtaattccaatattgcccttaccctattacaatcctcgtaagtccttctcactccttgcaacgacgtcgtatatatcaccaccgattctgaacctcccggcggacacttctccgggaactcgttcagtgggtctcgtttaatggctaagattttctcgatctgggcttgtttcccttctttctctttctccaatctgtctctcagtataaacggattctccgtcaccggctttactatctcgccggaactggcgacggtgctgcgtaccggccggagttcgggtttcggtttgggggagagcttggcgtcgagttcttcgagtgtgtggaaggatttactgttggggaggttattgggctttttggcaattggacttgggctttttttaattgggctgggcttttcttctgatttgggctgaagagtgggctttaaatcttgtaaggctttactaacttcatcccatgattgaggcggcggcgctggctgttcggcggcttctaatgagctgagcttgtcgagtatttgggccgggacgtgagtgggcttttcttgattggtatttgagtccacaacgatccatggctcgtggattgagttgatatcaaagacggcgaaactcgtcggcgccgggcggtagacgtcgactacggcggcgtcgactcgtttggaggaagtgcaacccattattttgaaagaagtattaagaggtttaaagtttgaagagtgtttttttagtatttattaatgaaaatttgatgggagggaaataattttgtgtggttttgaattggtgggatttatcttgtttgtaaaccttgtgttttatttgtggtcatggatttaacaaaagggttccattagattattgccacgtatgaggttttgttttgtttgcatgcatgcatggttttgtttttttgttatataagagtgaaaatatctacgtggatgagtatggggatgagaatggtgtctagccttctaggtagggcaaaaagatacttttatttggagtgggtcggagttttgatctgacggatcagttctgatttgaattaatcagattacttatctaatttttgatctgatctgtcccgtctaatttagagtttagatggacccaaaaaaattattttaaaaatacacatattttcttagtaatatttaaaaataacacatttttatcttttaaaaatggcttaataattttatttttacataaggcttaattagctttgaggaaattagactctatacccttttcatattaacctctttcatttttacccttttttttaaaacctatcatttttacctctttttttaaacactttaccgattttacccctgtcacctcaatatactctccatgtgactcccttatatcagggtattttgggtacaatacatataaaaagaggtatgtttcaattaaatataaaattagaggtagttttggttaattaataaataaaagagatatttctcattataccccattagttttagggtcggctttagaggtgatcaaggttgggctcagactaaggcggactaggcccgcacctaaggcccatccaattcataggtctaaaaaaatattttcccaatgcatacttttagtaatttttaaagctactatatattttttaaataaaaggttccataatttttattttttaaggcccaccaaatctcagaactgaccttagagattacatattgttattaatataattcaatatcgagtatcacatattttaatttaatactactactaactacaaaacgcattatatcaatatggtgtttaacaccttcaagtttctaataataatactctttttttgataagtgcctctctcagtttgatgtccacttgttttggagttttttttgggaggctgggaaaggtgatcattattcattactatttgagaaaaggattgagtgacttttttttcgcatatctttaaaaataattcatacttattaaatatattaattactctcttatatatattcaattgacttagaaaattgggttatatatctttattatatatatattaaaactatgggagcaaaaacccaattattaatcagctaacctattgtgcttgtaaaattaaggcagtttatttttaaatattatagttgattggtttttttttttaaagattt

SEQ ID NO: 304774 - DNA, 1842 bp, Cannabis indica
aaataaatatatatataataaaaataaagatgttatatatatataaggacaaaatattaaacagggattttaaccattcacgggtaccatataatattaggatgaggtgatgagttttcaagatatgtattttgatttagagaggctactactcaatattgttgatatggatgtatatatatatatatagtaatagaaaccacatcatcatcatcatgtacgtactaagaaaagaatatatattgccccatatatatatatgtatatatataattatataaataaatgtagtctaagaaagtgcattggttgagttaaacctacttttacgtggacaatatatataattaagggaaattattttatatattattttaatttttttttgttaaatttgagttgcttagataatttttatgtgagttattatgtgtattttagttaaattatttcattaattgctatatgtgtttcagtatggataaaaatgtaaaaaaaaaaacaaaaccaattttagaaatgtaaaaatgaaaagacccttataattaattaattgtattgactaatatactatatgctataattaattaattagtgcctccatgtaaattgtaaaattccatgtataagaaatttcattttgagtgtgaaactatttacttgtaagttacttatacgtatatatattgttgttagagcacaggagactccggttgacaatgacagaagaaaactaaaatcttgttttgctcaacaaaagcacatatatatatataatatatatatatttatatagaaggcatattgatcataatatgaatggcagaagagaccatgaacaagaaatattaattgatgtgtatatagaaagaaacataacgatactaatatataaggtaggtgagaaggaattaacatccatatatatgcttggcttgttcgtaaaagataaattaaagtgtatatatataaattattatacattgaattcttcttgttactataattttttaattttttctttattgctgagacacatatataaagaacgtaaaaagaaaggcatgaaattatttcaaataatacactgtactgtatataataatatataactcccgtggatcatataaaatatgagttttatgccataattttagggattttgtgtctcatcacaataaattaataaaaggaaaccaaaaacccatttcatgggagacataattcttcgttttctctcaatagtatcttatcttcagttaattaatgagaaatttacaaaaatattaaaattttgaattaacttttataaaattactgtcacacgatatttttttttcgaaaataatgtatttttataaaacaatagtaaaatacaaaacggaacaactaaaaataacagtggaacaactaaaaaacaaccgtaaaactacagtaaaaacttaacacagtacacaatataaaatttacacaatatttttgaaaaaaattccgctatattaaaatagcaaaaaaaaaattagaaattattaatttcaatttttattggactataatgaaggcccatttatttaaagcccatttggaagtttaccattttattgaaagcccgtgtcatgtgggatttattatggtagttttaacatattaaagaaaaaaaataatcactttacaaacaacatgaacaatataatatgaaaaataacatgtatataaaaacaacattaatatatatatatatatataaagaataaaagaattacagcaatagttaaaagaacagtccatatttgaaaaaaaaaaaattatatcaaaaattataagaggttttttcatttttac

SEQ ID NO: 304775 - DNA, 1704 bp, Cannabis indica
atatatatatatattactatactgtgtgggatcgatatatacatatgtggagaaataaaataattaagagagatgaatgaataaaatgtgtaatacaaaggaaatataaagaacaaaattataatatccaattaaattgcatcatatcttcacctctattgtctccccatttgcttttcccttttccattgctgtttattaaaataaaaaaggtacttacatctttaaacaaagcattacataaggaatttagatatgtatttttttttcaaagggggagacaaaataatattttataaaccatcgtagtctctattacacaagaaagcaatcaattcattacaagcagaaagtagtatctgaaatagaacttttcccaattgtactcttgcaatcaacaactaatgctagctatatgacaataatttgaagtatgcatctgtttgtatgttgacttttagcttgccactttgttgttggtagtctatatttaatagccttactgttaaacataagtgaagaggggaagaaaattgggaaactttaggcacttaagacattcagataacagaagcaccttttatatagcttattgcatcaaatatttcatcaatatcaaaggcataatttatctctacttggaaaaataaatatcaaaagcatgatttatctatacctaaaaaaatgtgtaaaccaaacaacatatactcttctgtttcttcttattttttttttgaattgtggaatatgacagccacatataggtgaagaaaaatgtatacatgcactgaacgatcactaagtatcagcctaccagcatacttcatacatctaacatctccatatatcacacaaaattcagtgctagaaaaaactttccacttatcaacaaccttcagaaacccaaaaaagtgaactattatgcctgtaattatcaatcgtattctaaataactaacattcgcatatataacaaatagaaaaactaaaagtctaattaagatgtggaagtataccctggaaagaaaccaaacagagtaatatactcaaatctgtgggtttaaaattaattaaacttaatcatataagaaatactactttgaaactttctatgcaaataaataaataaaagagctaacaattctcaatgtcaatttccttatgaatatacaaaagtgaaaattttgtgcccatagttcagaaagtcaaataaaatataatgagtgctctcaaagcatagtttgaggactgaaaagacaccaaaaagagacagcaacccatcacttgaaaaatttctatatataaattgctcctcggtcatatcattaggtatattcccattctatcacatttcaatcagacaatatttatcctaaattagaaccaaacaaaaaaaaaattgcttactataaactgtaggaattgaaaagcgtagaaatttaaaaaataccaaaaattgtaaatgaaattaaatctaattccaacttaaagaggatggatgagtgaagaaataaggcaccataaaaagttgaaattaccactgcgatttcaatcaaaagtttttaaagaaagataatgagtgagaagaattgtttgggctaggatatatatatatatatgttataaatattattaattatgtgtatgtccaaatcttttatttattgtcattaattgtaatcaacattcctcttttccttagttt

SEQ ID NO: 304776 - DNA, 2470 bp, Cannabis indica
aatttaatgtttatttttagcaggatacatacttaatgtttgtaaaattgtaattttcttttaatttcgtaagtacattctccgttttaaatttattaaaagaacatttggaagtaactggtactacatgtttctatctagacccaataatttagaatttgggccttatatgccctgtttaaaacaataactatgtctgtactgacgaaattaaaaaaaaattacagttttataaacattaagtacttataccgctaaaaaaaaaatattgagtttatgttactcataaatttaaaactttaaatacttatgtcgctatacccttatcaaaatttcacagaatatcttaaataacgtattaaagtaaaaaattatcctaattcataagtcggtgtaccatagaaatttctaatttatcccattacttattttctttcattttctttacatcccttttctaaaattgatttgtaaaacttaaccctaccgaaaagtgagaattagattgattggtagcagtccaatctatttgaaattcattataaaaagaaagttgtcgtaaaacttttatatctttaaataattttttttttatttttttattaaatgatctttcaatatagttgctcataatcttgctagaccattttattttatttttttcagatcaaatgttcaacatgagtaatgttccagttgagatacaactatatttttttaaaaaaaaatgatttgtaaaatttatatatttattgtaataaaataatattaatttggtatttaaaacgcaccgtatccgtatatatctttttcttaaatgaaaaataaaaataaaaataaaaacgccggaaagggaaatagcgaaagaaattggcggttaatgggtttgtgtagtgtccctatatataaacttaatcagaggaatttgccatttccattaaaattccaaatcaaatcaaatcataatggctctaatggcctccaaccttaccagtgaggtcagtaccaatcttcttctcccttttatttcttctgatcctcttaattagggttccaaatcatacttctgttttccattttcatttactacttccgatcttctgggttctatgagtccgtattaatttattattgtttgattttgcttttaatcacgtaaaattctctgaactgaaccttgtattttaaggtgtaacagtgatttttttgttgatttttgtctccaatgattaattgattcatagcaagctctgcaagttgctactcatttaattacattttcatattgattttgatttcgatatatatcatttttttgatgcaggttgggttgcgtttactcctttgtcctcttggatctaacgttgttcttcgaacagcatggtaagctctgaattttattaactaagagagtgccctctttgagatacataagtatgactgagtttataatcctttttgtttggccttttttttcattccattttttttttcttgtgtagttgctctgttgggattgctgtaccagtgtactctacattcaaggcaattgagaataaagataatgatgaacaacaaaagtggcttttatattgggcaggtatattgtttctctttctatttaaattttatttgttggttctctgatctttgttaattttagttttaatggatagtatactggctagagtttagtaagaacacaacccatctaaacagttcattaaacttaaaacaagtaaaatagatggcacaatacatgaattaacttggctcagacaaaaacttggcttacatacagaggagcttacagtaacaataatccactgaccgttgaaacaatgtgtacgaattcatagcaaatgtgtacaatgattggttattgcaggtttaggagaaattcctcaaacagatcttaaacatctcaaagttattcttctcttttgaaatatttccctgagtaaaaaatcattcaactcttttgaaatgttgctttgtgccacgttcaatgttacagtacgaactagccgtcatataaatatgaactaagtgtttttgcacaaatttgtgcatttgtgttgtcatctagaggaataaaagaaacctaaacaatgacaggcacttgtcggtaacttttataagtggaataattgagtgttttagttaggaactattattgatagcctgtggtagatatagaaccaaagccagtcattttcctcagccattttttcccattgcctctgatttaacaagaattttagtttcttaattcaggaatcaatttcatggatgttggtttctcagtcataattttagcatgatcagttgctacacatgcatcatgtcactttcaaattctgatgtttcttgatattgttgtgttatggcttctttgattcaaaacatgtcatttctgggctacagcgtgttagtatcaaagcaaggattttttttttttttttaagtt

SEQ ID NO: 304777 - DNA, 3377 bp, Cannabis indica
attaaagtgttggtttttttttttctttttttttttttttagtaattttaatacgaatccaattcaatccacacaataactcaaatccaatcaaattttattttaaattagttaattttaaatattaaattatttaatatttataaaaatattttttttccacaacaaaataaaataaattataattattttaaatctccaacaacaaattaaaataaataaataataaataataaataataaataataaattcaaaagaagaataaaaaatttatatgtatgtacaaagaaatatttacttttattttaaattgtatgtagaaaaaaaattatataagaatagaatatacatttaatctattaagttttgaaatataattgtattatatgtattaaaattttaaattactattttttttacattaaaatattatttgttatataattttttaatttctttttataaagatatgtggattggatcgattacttttatatttcaatcgacatccaatccacataagtacaaattttgaattttccaatccaatctaatccgcacaagtgcagatatccgtactctttgcatattgaattggatcgactatttgatgaacactaacctcaaattattttgtcatttctttatcttttttggcctttttattatggtttgcatttatcttctatagagatgctttagaaaaatctaaaaggcatgcatggccggcaaggcagtaattatatacactatgatacaaatatgcattaaccaacaaaaatgtatatctacagtgatgtttgatttctctagggactaattgtagaatctaggggtatactgtccaaccatgaatcatccaaaagaggagtagaagggtccaattcagaaggccattcagagataacatctatctcattgaaaatgataggcttagattttccacctgtactttggaaaatagtttgtagccataaattacaatggacaaaaactaaatcattcagcttttcaagttctgctttgttacgctttttgttgtgtaagctctcaaatgtggtccaattccacctgcaccaatgtgagctgcaaggttggctcaatatgcgcattgcagctctttgaagtgtggggatttcatagccatatcctgcccaccaatcacctaagcaaagggagatgaaaatcgcataaaaatatgattttcgtagactcgactattctaccaagacttgcaaaaaccgaacaaagaaacaaaacccgcatctaaactgaaaaccagaaggcttcaaaatactaccagctctaaccaactccttttaacatactatcatattcacattcattcttcttaaagattaaaatttgtttttgatgcattatagataagtgatcaaaactagtgtagtgaaaattgtcaaagtgtgtaaagaaaggcagctttaatagctctgttcatacctggggcatttattgtccttcccatgatcgcaaattgagtcccaagagcaccttgagcaccaatgtacacaggacattcctttgttatttccatcttatcattatctgtgatagccatttttaacatagcttcttgaaatccattcctcacagttaaatcaatcttaaaatttgggttgtagaatgttgaaggatttaggaatgctgcagctgcatgtaaggatgaattaaggtgcacgttccatcttcgatcaattatactccaaatcgacatgtatttctcttcaacacccttatagtaaacttttatgctaacctttgccctctctattccttcatacatgtaccccatagctggcatgtccccatcaacaattcgtaggatcttaacaaatggttcagacaaactaacagcctcgtgtgcgtacttccaaaatctgtctaaatagatcaatgactttatagcttgagcctcaggatgtttactgtacatggaagatagccagtctgtatgagaaaacatgtgctttaaattgtcttcctgaatcacaatagacctcaaggagaggaaataagtcacatatctactaattcgtggtcggattaattcctttccaccagtgaactttctcatcatattcagagtccatgattggccataaagatacctggttatggtttttgcctcctccaaaactgtattcacccaatctatgttaccaatatcctccaaaatcttgtcaatgcaacaagatgcacaaggagaccaaaacaatgaattgtacttgaccatgagaagcctgccagcatagagaaaactgggttctgtatcagttataacttgaacaacattttccacacctatttccaatacaagagactccagcaactcaaacatgtaattggaatcatcccaattagctgacacatcaaccgatcgtagaaacaatgtccccttggggcaagtaactgagaacacaacaagtgatttagtcccaccatcagaccaactatcacataaaatagtgcagccactttctttccactcctctctatacttcttatagcaatcatgcaactcacccttcatttttcccaacaaagaagatctcaatttctcataactaggagctctatatcccactccacactcaagaatagcatcaaccatttcctgatagcacaaagatttagcagcaccaaaagggatgcaattactatagaaaaaaaccgcgattttcttatcagcatcgccttgtttccgcttttcagcatcatccacatccactactggtggttgctcacttggggaaggacaaatgctaccattatgaccactagaaccattatcatggtggggttggatgccaccgctagcagatgagctatgttgtctaccattagaagcagctgcagccacagctgcaactgcagccgcctgatcaagcttatgtttcttagtagtattcgtagcagttttagtatgtttcttgggagtgtttaagatggttagaatgcggttttggacatgggctgggacatgagtacatgggacaatgtctttgttcttaatttgggctaaatgaaacttcatcctataaactccaccactgaactctctctcacagtaattacacctaattttctgtctatttgcatcaacaagcacacagtgttcccaacatgcatctcttcccctaaccattttttaattcttgatcttcaaatttactattaaaatcaaaacccctttacttcatcactgaaattgtaacacacaccataatcaatccaattgtatacactgctttaaaacaaaattgaaaattgatggatgcaattctctaataacacctatttagcattaaaaaataaacaaaacttgattgataatcacgagagagagagagagag

SEQ ID NO: 304778 - DNA, 2359 bp, Cannabis indica
tttttattttcattttaaaaagatcttttccattggcccatgataaagtaacacctatctaatcacattaagccatttgtccacaaagtaatacatatatagtagttattattattattaagagcattcatattggataccattagtgtctattaccactaaaatatgtcgccttacaattaattaacgatattacttaaaaattattttagtagactatgtagaactcgatacttaattagaccaataataataataacacatacaaaaatactaaacaccacttgtcttataacatttctttattaacaaacattataaaacaagaccaaagttttaagtaaaagtgtttatataaaccgacttctctttcatattcgcacgcgtgtggaatttcttgtcaaaccttttttgtttaatttttttttatgtatataatgcttctctacacatagttgttgtagcttcttctttcttcttcttcttcatattcataaactcttttctctctttctttctcttagacatgggaaattactcatgtaccctttacaaaagattggtttacaaagacaaagttataagagttatgaagatagatgggaaagtgttaagtttcacaaagccaattctagtacaagatgttcttgtgagaattaattatggtgtaactaataatattggtttatctaaagagattttatcatcaaagaagcttccacttgattatgagcttaaattaggtaaagtttattatgttattcctttttcttcttctaaatctaataatgaaaaaaacccttgtgggatttcttcttctatagaaggtaataataatttaggtggtgttaagagaattaagattgttataactaaacaacaattgaaagagttgttaaataagaagatatcaatggatgatgtggtaatttctagtttggagaatgacaagtctaatttcaatggtaattggaaaccaaagcttgaatcaatccctgaagagtgaagagctttttataattattgtaacatgtgtttttgttttagatgaacaaactcataacttttgatgtatatgtaatttgtctattaacaaaataatgatatataacatagtttttttttcatggtttattattgttgatgatgattatacttgaaaatatgttgaaacagaggaaaaaaaacaggggaaaaataactgaaaatacagtttgtttttatattacttttatacccacttgcttttaattaatagaatctattttcattagagtttaaaatttttaattcaatgtaatttcttttcaaggtaaattttatggataaaatgtgaaaaaaattgtgatcctatgcatgctcacattgctcaggactgaaaattatgaaaaaaaaaaaatatgactacatagataaaatattaaataataaaaaaatattatttagtatagtgataaagagttacttttaaacaaaaatgttaaagatcaattcttaatttttatttttatttttttgaaaaaaaaaatatttaatgtatagttatagatgattgaactttaaatttaagttttaaattcttttaatcctatactaaaatattagaattattattttgataataataaaaatatttgtctacggagccaaaatttaagtcctatatattttaggattaactcttatgataaattattttaatcatgtgacatccgacactattttgactaagttgctatgtgaatttttgtaaaaaaataaaaaaaagggccaaaaaaacagaggaaacaaagtaaaaacaaactacttattcatatttcttcactgaatttgaacatcaataaccttacgttcaaccttagttttaggaatagaaatgtaaagaacaccattctttaactcacccttaaccttatctttctcacaattatcaggtagttgaattcgagtgttgtaacaactaaagctttgatgtccttgttgtgaactttcttcttctttatgttctcctttaattaccaaaaaatcatcctcaatacacactttcacatcttgtttgtcgagtcccgggccgatgtcgaatcgaaacttagatttgattgtcttcgtctttgatgtcccacggtgttctcaccgcccccgtggggcggtttccggtgggtgataacatcattgtgtcttcgaaaagtttgtccattgtgtcaagcatttgcctcattgttctcattggtgacattgggtctaataaccctgcaaaaaaatatttcaaaaattttatttaaaaaatagtgacaaatttattgagttttttacacaaaatgacaaaaaaaatatattttttacatttatattaccacac

SEQ ID NO: 304779 - DNA, 3064 bp, Cannabis indica
tttttcaatctatttttttctttgtagttgaccgagaaagatgtatttctttcatatcttccccttgcacatatcttcgatcgggtgattgaggagttatttattttgcatggtgcctcaatcgggttctggcgtggcgtaagtgccctaactcataacttgtctctaaccaaatagaacttaaatctagtagttgatcatctgttatattatcaggatgtcaaattattacttgaagacattggggagctaaaaccaactattttctgtgccgttccccgtgtgctggatagagtctatgctggtaatcatcctcataattgatgtacttatgatttttactttttcaatctttgatgggtgtaaactttggcaatcttggtggaagtgttttactattgcttcatgcataatttgttgcaacaaagcactgatagaaatttatgtatattcaatgccgtttcgttatgaaacctctgatttagatttccaacttcatttgttgtattcaaattactgtccaaatttccaggtttgacgcagaagatttctgctgggggattcttaaagaagactctcttcaatttcgcatactcacggtaagtgcagtgttccgaaatttccttgcaaagaaatgattaatatgtttcacagtaaggggttcattcttagaacaaaattatttaaaaagaaaaaaaaaaaaaggaagaagcatacttctactttattgttgtttctagcataaagctttcatttttcttatgagttcttgatcatttttgcttaattgctgcagcaagtataataacatgcgaaaggggcttaaacacggggatgcagctccattatgtgacaaaattgtatttagtaaggtgcaggagatacttttcgtttctcaactgtaattcgcttgatagaaatctttacaaccaattcctaaaacttgttagttttactgatgctttcaggtgaagcaaggtttgggaggtaatgtgcggcttattctgtctggagctgcgcctctagctcctcatgttgaagcttacttacgagttgtgacatgtgctcatgttttgcaaggatatggtatcatatcttttgaacattctgtgtttttcctttggcctatcttgaacatagtttcctctatacatgttagtactcgaagaagagtcacatatcggtgtcaatctgtgcagggctaactgaaacttgtgcggggacatttgtctcgataccaaatgaactaccaatgctcggtacagttggtcctccagtacccaatgttgatgtatgtctggaatcagttccggaaatgggatatgatgcccttgcagaagtaccgcgtggagaagtatgtgtgaagggaagcaccttattctctgggtactacaaacgtgaagacttaaccaaggaggtcatgattgatgggtggttccatacaggtttttcccatcttttaattcttaatgaaacatggcttaaaatccttgttcaatttgtctcatatgcatctttgcatcaggtgatgttggtgagtggcaagcagatggaagcttgaaaatcattgaccgtaagaaaaatattttcaaactttctcaaggagaatatgtggcagttgagaacttagagaacatttatggtcttgtttctgacattgactcagtaagtttatcttaaattttctttgttatttcctttgatatactcagatgcaccaataatgattagagatgctttggtagtaaaattaggagtctgaactaccttgtaaccttttattgtgacagacatgtacattttcactctcctctttacccataatgtagtagaaaatatggttttctcgagctttcacatgaggctagttagaattttacctccgaagtttgacatgtcgttaaaaaattcctcccaaaccattgaaattgtttgatcaagaatttccatctaattccgttcaattttacttacggacgccgaacatgcgatcgtccatataccaaatcgtgctctctgaacttccgtccatgtgaagtgctcattttagagggtacaatttagtacatgtcaaaattcgaggaataaaatcctaattagctttcacattattcttatttttcactgaatggatctgtgttttagctggaagttgacattagtttaacttctcatccttcgtttcgttaatgccagatatgggtttacgggaacagcttcgagtccttcctcgttgctgtgattaacccgaaccagcaagcacttgaacgttgggctggagagaataatatatctggtgacttcaagtccatttgtgaaaatccaagagcaaaggaatacatcttgggagagctcaataagattggcaaagagaaaaaggttcacattctattttagtctgaaacttaatgtgtcatttgtcgtcacttagggagcttttcctaatattagatgtttgtttgttttgcagttgaaaggttttgagttcataagagctgttcaccttgacccagaggcatttgacatagaacgtgaccttattactccaacatataagaaaaagagaccccagttgctcaaatactaccaggtaaatcgaaattctctttcgaaaatcgaggctcattttttaacgttgctcgtgataaaggaccgaacctaggttaagacgggctatgcgtggctgccagcgcctagggttcacctaatccaaatttatatatattttttaaatacatattctttagtagtttttaaaaattctctttgccctttttatgtggcaaatgtaaattgacctgtcattcaaacaatatcaaaattaaaatttgattgtagtgttaagaagaaaaatgagattagccaatctaaactattttttaatgtggcccgtaataaaggctagaattaaggcgagttagacttgtgcataggttcatccagttcaaaaatactttattttttaaaatatacatatttttttgggtaagtcgaaaaataccctttttattaatcaattaatcaaatttgcctctaattttatatttatttgaaacatacctct

SEQ ID NO: 304780 - DNA, 1649 bp, Cannabis indica
tttcttcttcggttcctgccattaaggccagccgaccatgtttggttttcactgtggtatagtatgtatatgagtgagctttgtgtaaagtttgaatctttttcaatatgtcacactaattaaggctctgtttttgggactactgtactttttctttttctcctttaaaaataattactctcttttctttttgagggtttacttttggctctttttggtcctggattttgataaatttacgaaattggttcccagattaataagacttgtctacatcgtatggtgtacatataacaatattattggtgacgcattttaagagtcgtccaacgcttctccaactcatccgataatgtgtgtgtgtttattatgtgtgagctttgtattttccatcaatgagcgcaacaaaggctaatgtggtggccaccttttggctttttagtgcctttgtctattatatataacaataaatatatatttatattattatgctctgcacgtacgtcatgattattttagcatctacactttgcttttagtcaactaaactccttacgcttacaaaacacgtacaaccaagaaagaaaaaaagtatccacacttgtaatagtatagtccatagtattctttttggcctttatattctttaaaattgatccttttgccctttctttgagtattatttgattttttatttggagctcaaatcattggaggttcttgctgattgttttataaatttatatgtatactaatcatgcacgggttttcatttttcttttctttttgatttcatcattataactttagaattatattaatatattcatcgtgcatatgttcgtttacaaaattaagaaaataatttctaacgtttttggcgagaaagagtattaatttgtttttcaagaaatgataatagtaagatgcgcgcatcttattttgtttagaaaagggcctcaaattttatgctcgtttccgttatttgcatagtaccattgaggaagaactaaagggaataatataggaatttttaaagcctttttgatcctccaagaactaacttttattattattattactttaaagagaattgcaataatttattattggtgtttagtattttttgcagtgttatatcgatattggtataattaaattactacaaaaaaaaatatatttagtgataatattttagtcataacataaatttttgtaataaaatgtcacttttagtcacaataaaaaattatttgggactaaaacataacttttagatacaagttgttacaaatttagtttttagtcagtattgtgactaaaaatatatttaatcacgataaattataatatttgtgactaatacctttagccacaatttttttagtctcaatataaatataataatttataattaatcacaatttttttacttttaaaaaaataaataaataattagttaatgttagatattttataaaaatttatcaaaataatagtaaaatattaatttgtagatttaatcactaataaaatattcaaaaaatgagagaatgaaggagagaagagattgatacatttagaataatattatagtgtcatgtcaccgcctcatacttctcatttatatataaagatcgttcacgcat

SEQ ID NO: 304781 - DNA, 2640 bp, Cannabis indica
tgaacgtactaacaaccattgattaaaaattctatagttttaatatttgcggactatattattcatgactaagtgatattaattcttcgtataatgcaagtcacaatctcatatatgaataagaatttttttttaatatttatatataaattattcaatataaaatattaataatttaacatttaagtatatatcaaaatatttaactactatttataattaaaattatttttacaagctttttaagacatgaacctttacatatatgcccaatgacaactatagacaattatttgtaagagtagaagacatacatgtcaactccagctaccagggacccacttatgaaaaaaaaaatagaattatgaggcacactcttattcctactctattttttatttaggaaaagaattctccttaggagtttttatctgatccaatttgttattttgctcatagtacatttaatctgcactagatgtgaatttcatattttagatccaatccaatctatataataattcaaattcaatccaatctaatccgcaaaagtacaatttgaatcgattattttttaatatttaaaaatattttttcacataactaacaacagaataaaataagtatcgttgttttatgtctcaaaataaaaaaataaaaaattcaaaaaaaaaaaaattgtacgtataaagaaaaaattaatttaattttaaattatattttccttataaataagaatgaaatataaatttgatctattatattttgaaatatatttatatcgcatgtattagattttttaaattactatttttttatattgaaatattagttgtatatatattttaaaatatatctaaatatgtgtatttgattgaatcagttactttgacatatcaatcaatatttaatccgcacaagtgtgaattttaaattttctaatctaatccaatccgcacaaataagaatacctgaattttgtatattgaattaaattagatcgtgcaaattagatttaattgagtattttatgaacatctctaattcccgctcgattaagagtgttattccaagaaaaagtctctaccctacttttgaaggatggattagcctaatccaaaaacatggcacactaatagactcagaatgggcataggcatatatggtgcaactcaagtccaattacttgctataaaaactcaccactaacattcaacattaaataataatttaactttaaatacaaacctaatttattcaccaaatttaaagtatgaaaaagtgtatttgtcttgtagtatacattcaccatgattctttattaataaattttgagttatatctcattaatttacacctagcttagctaagtagctagatacttccacgcctaatttttgtatgttttgagctaaattacatttttacaatttttttttgggtgggataggttcgtgtttagtattcattagacttttatttaagtaaaattaaatatattataaataacaaatatttataacttaattaattagagtgtataatacattatgatgatatggattcaagttccattcatgacccaacccaattctatgcttaaaaaattattgaaattaattttctttctatttttttatgaaaaatttctctttttaaatttaaaattcgttttaacaactttttatttttatttcgtccctttatgtaataagctctatcattttgttttctatgatccacaaccacatatatttaacatgagaaaaaaattttaatcaaatcatctaaatatatttaataataataataatatatattttactttctgtaaatataatttgatttaaaatttttagttaaaatcttaaaaatagttttaattatatgttaaatttataagtaaaaacgagtattgtatgagggtctcaaaatttaaatttaaatcgttctagatttatagattctcgtgttaaaccctaatatgtacatgcatttgtcgtttatataaatatttaaagtgttatttggatgtgtcatatcaatattagcacaatttaatattgaattctatttattttactttaataataaccataaaaaattactaactagttataggaacatcatctcggggtattgctattaaaaatacaattacttttttatttgtcatccttgtttatttatatttttcttatgtccccacacttttaataatattaaatattatcaaaaataaaatttagtctttttaaaaatcttgctaaaatattacaaaaacactagaaatatgtaaaataaataagtttagtaagggcatagagtatcattcccattcatctctttgttgtttcctttcccatataggctgagaatccccaaaggcttgtccatatttgccatttcttgccaatttctgaacaaaaattctaatcacctaaattaaaaaaaattacatcattaaatacaaattactgctctccgaaaaaaaaatcgagaaaaaatatatatattttaattagaataattagcttttttagtccctgtacttatgacactatattatgatgccccttaatttataagtgtagttaaaaataccccctaaaatatatcagttggaatagtataatcctt

SEQ ID NO: 304782 - DNA, 1727 bp, Cannabis indica
tttttccatcttattcttttgattatttttaaaattttcttttattttaaatctgtaaaaataaatgataaaaaaataaaattactccaatatttaatactattatttaataaaataaatcaaaaaatctaatatttaaataatatagagaaaaagaaataaaaaaaattaacgtatgatttaataatgttaaattattttattattttcttaaaattttaaataaagtattattaatgaaaatttatgtatatactagaaagtatgtaatggtgcaatgcttaaattttactataaaaaataattaccacaaaaaaaggtcattattggtttctagtaactgtttcatgtttccttaaatagtttctatcggtcttctctattatttaatttcgatgaagatcttgtctattattgttagtagcttaattattattataaatcgataagctagctcttattattattttacttttttacattttaatctgactccacacccaccttgtcagttttattttatttttaatgaattaattcatcctattcattaaatatatcctgagataaagttgttgatgttcactactcaagtcataaaggaattcaaataaatttatatttatatgtttgtacaagtatataatttcagatatagggtaagaaaatttatcacagcatctactatatgtacctacgtaatataagtactctggtcttctccttaattttaccagcattgttattgttcaacatgttaaaaatatctatttagttagatttggtcagaaagatccgatctgatgaatcacttctcatccgaaacatttagatgtttattagatctcaaagcaaattcgttctgctccacctaattttttttcaaatcgaatctgattcgattcaattttaatatattaaaaaaaaaaacttaattcaagactcggacttggattcagacccggatccggacctaaacttggatcgggatctgaacctggacccagacccgagacccggacctagacccagacccgaactcaagactcggacctggacttgacccgggacccacacctaggtctgggacccacccgggacccagacctaggtctgggacccagacctaggcttggactggactcgtccgggacccaaacctggacttgaactcgcctgagacccaaattcagacttggacccgaacctaggacacaggatcggacccgagacccggacccgagatcagacccgggactggactaagatccaaacccgaacctgagactcagacctagacccgggacacgggcttggaccataaattcaggacttgggctcatatccaaaactcgggacctaggtccggacctctagcctagacccgggactcatgaccagacctagactcgagacctgacccaaactcgtacccaaatttgtacctggacctagacctggacccggacccaaatccgaacccatgacatagaccccaacacccggacccgaacctaaactagaacccgtgacccaggcctagaccctagactcaagacgggacccgaacatgacccgtagttgttgttgggatcgtgtgacagtcagtagtcccgtaattcgtaaagggaaacatcgggtaagatgtgcaatcctacaccgcctggggaaggtcaagtgggatgattctgagacgtgtaggtatgggactacacagttgaagagag

SEQ ID NO: 304783 - DNA, 3742 bp, Cannabis indica
tgtagtaaccatttaatttattattgacttacaatggtcatatatatatatttataatttcaatattatataaaataaaattaaagttgatatggaagacaatctttaaataacaaacaataataaaagtttggctttgcatatcttaaaacttgatatgaagcaattaataacaattattattggtcttgttaacaatgcactatctatacctaaataaatggagactatatctttgaagaaatcatattacatcacaatttctataaattaacaaataaaaaagtaaaaaaaaaatcttttaaaatacaacaagaaacatttacttacatttttttttaatgatttattgaccaattaattcattgctcagcaaaacactcatctaaaaagaaaaaactacaaatcaaaatcaaaagatatccttcaacttcaagcccaattccattaatcaatcaaaattgggagaccttccaaaataattttataaaatttagacaaaagtcataataatatagaagagaataaacaagaatgaatttcccattttaggcttggatcaactatatgttacaaaaaataacaaaaaattagaaaaaggtcattcccaccattcctaatcccaattccaattcctagtcctatcacatatttgataatttgagatcataaagaaatttccagtataatacttctgctttgctgatgtgattgctttcatgtacaccgaaaatagttagaaaaaaaaaaaaaacacaaccctgtacattcattccaaggaaaaggcaccgcaaaatacttgccttttccgtcccaaaattttgccgaaagaaagcatctccagctacccttctaccatcttattatattctctcccaacaattcggcatttgggaaccgcctttctaagcaccgacgtcccttgaaagatcatcatctggtattgtctcttgatcttgtttagctgcaacacagaagaaaatacacatatgacaaaccgagtcaaccaaatatagcataacgatcaaaagaaaacagaggactcttttggattcacattctcacgtacctcgtcttgtgctaatttaccaaaaccgaactttttagtccaaatcgatactgcttcgtctgcagctggtagcacgagatctttcacgttcaagaaagcgagaaatcgctcgaaacatgaaaacagggtttggaagtaaccctaaacagaacataacaagttaggaaaacttctcattaagttaaattttattgagataacaaagtgttgaacaaacctgtccttggcattccgcgctggtagccaccaaaggcagctcagccacatctgatccatagattcggaatattccagcagagacaacacattgactgcattacaagaaatgttttcaaagttaaaatattgggaaaattgaatcaccataactaaattacattttcttttttctttcttctaagtttcttacttgaccgtcaaaatcgcacaatacatgcgactaaaatcttgccccatactgctctttctgtaatattaagataaacgatgaataagcattaagcaaacaaaaatcccaaacaactaaatagtctcaatttatataagtttacagcttagtgcttacccgtagagcattgctgggattagatcattatttgaagaatcagttatcggagcaaaacaatcctacagcagaaatgaaatacaacacaagaaataagcaactgtgatactaaaattcttggttgaagctgtaattaaataagaatcgacagcttaacatatgagaacaccatgatccgacatggtaccatcgagatacagaatcattaaataatgaaaaatagtaactaataaacactcacgtggaaaatagaaacggccttggaaagcaatgatgcagcttcatcatcggaagccatttttttcccattaagtattctccatttaatatcaagttcagtcccgctctctgaaccttccttcttctgcttcttgttaatgacattgataagagattctgggagcttctcttctccattagctagcaatttttgcaaagccgaatgaatcctctgacaatctctgcaacagaaccatgctccgaccggcaattcctggttgacaatcatttttaactttgagtaaagaaaatataatataacaaatatgatgatgaaaaataagaacagggaaaatgagggtcaaaccttaagatcttgcatttcatgctctttcaaacagccaacatgaaattctctttcacactgtggaaagaaaacaaagcacctcagttaaaactagaaagtaggaaaattagtttattttatttaaaaaatgagagaactatatacctggtcacaaaataggacggtgcgaggaccgaattctgatttgctaaaatcatgatctctgcacaagaaaaaaattatgcataaatactaaaaactagaagaaatgacatgatttgcaaaaacaaagaggaaaaaagatacgcatggcatgtcagcaataaaaagagtcaagtgcaatggtgttaaaccgagactagacactactatattattccacaaaaatagaaaatatgaagacacctgcataatgcgcatccaccgaaacccatttcttcagtattgaatatgcggatgcagcggttggcaatttgctgtataggatcaacacccgggacccttccagctgcaacggcattgggattacgctccaaacatttctcgcttacatgttgattttggcatattttacaataccaagtgccactaggaacaatttgttgattaatacactctgcaatggcacccccaaataaataaataaatgcaggtgacgaaaacttaaaagtaaaaataataaactagctcaaagagcagtaacctacgtccatgaaaagaccttggacaaccatcacagcacaaaaggtctcctccatcatgacagacatagcagagatcatcattatcatagttagagaattttcgattctttgatagtgacaatgacaattcatgaagagacaccccattggatgtgtatatgtgtaagtagctgccaaaaagaaaaagaggaaaggtaaatggctagacatgttctgaaacagatttttcaaacatgacactggcaacaagaggcggtgctaaattttagaattatttgacattatagaccggaaattgggagcaaactaccaaatagaatcaaagaaatactcacggctttcgtcgtgatgcccatccagcatgggcttcaaactgggaaggactgacctgtacatcaaaaataagaaatgtattaatatatacatatatatacagatatatatttaattggtatcattaggagtatgaattcaagaggaagataaagtacctcagaattgcaacaactacacatgattccatagccctttttataacccaccaataatttctgcaaacaacaaacaaacacaaataaaattgacttgcacacaaaatgtcctaagaaaatgaaactaaacataaaactttattgaaacctctccacgggcataatatgctacttcagttccatctggcagaatatcatcctcaaaaccaatctatgcagccgaagatccctatatgtcagaaaaaggactagaaatttagaagatacctcaattgtaaagattatcaaggaaaaacaccatatgtatgacaaacgaaggatggtaacaagtgtgtgtgtgtgtgtgtg

SEQ ID NO: 304784 - DNA, 3420 bp, Cannabis indica
ccttttgggaagatgcccaagaaaaaattcgtaagaacttaggtccaaagcggataatatcataccaatgtaaggataaatagtgttgacgattcccaacacttaaattatattttgtcacatattttaataattgctcaaatatatcttggttgagtaattatttaaattaagcaaacttactcaaatattataataattttttttcttttttgaaagaagaatatctttccctagtttaacaggacaaagctcgagaagcagagacacaaggttcttggaacaatacttaagccgctaacagtggcatgaaatacacccacctacaaaccatagccaccaacaacacctccaaacagccaaggcaacataccattggcaaccgtcacacacagccataagaacccccaccgccatgagacctagtggaaaaaagcagttgccaaccacctcccttaattaagagacaccaaaactaaggctcttgaccctcatgatcggtgaccctgcctctgaattgttacacgcaacacttcgaccacaagacaggaaaaaggagcaaatcaatgcctttcaaaaactccaccagatcccaaaatcgccacccacttgcgaagaacccatttattgaccaacatccacaagagagcctaagatctcgggcgccactagcctagatctggctagcggcacccaaggaaagaggaggaaccctaagagcacgagaatgaaaggggtagagaaccctaggaagagagaaagtcgagcgaaataaaaacttgtccgaattcttttcatttttcaaattattttcaatttattgtgtagcctttgataaaattaatttttatctttgattggataaacttgataaggatttgaatttgaaatataagattaggggtgaattatgtttaaagctaaatttatgagcatgtttaagtaagatttcaaaggcaccaatttcatgaaaatgaacacttaaatgctcatgcaaaataaattgtttctacagtcaccacatgtgacaaggatttaactgaaacagttagatgaagttgcccatctacctactaaacaaagtttcaacaaatcaactcaagtcaatgccacaattccacatcttttcatgtaaattggttcaaaattagtaacaaaaaatgacaaactcatgactcatatatattaatatataaatataattatgtaaaataatattttttttccagtcccaaaataaaattgttcagtttcatttttatttaattttttctgaagaaaataaaagttatggagacaaaatttgaattttgtgtgacataaattagggaattatatgtaaagtagtagttaattgccacctctatacatctttatcagttgttggcatttgtgtcatttcaactaaagcttctcttttatttttatttttatttttgtaatatatattaaaatatcttttatcttatcttattaataatttttaattttaaagaaaaaatattgggttataataataataagaataaagaaaaatggtaaggtgagatactttaggcccagggccttgtttataagcacttgaaaacagagcaagaaagagagaaagaacagagcactgcccatcatttcaaagcaaaagcaaaagaaaataaagaaacaaagaaagaaagaacagaaaaagagagagagagagaaagagaaagagagagagaagataacagagagagagagttagagaaagagagggttttgggagaagggtttggaagaagagatgcagacgagtgagcaatctcaacaattaatggttcagaatcagaactcaggaagcttaagcttcaatagcaatctctccagagaagatgaagagatgtcaaggtcggctctatcgactttcaaagccaaggaggaagagatcgagaggaagaggatggaggtcagagagaaagtacaagctcagttgggtcgagttgaagaagagactaagcgtttggctaccattcgtgaggtaagctaattttgtttataaaagaaagaaaagaattagttaatttcttttcttgcatgaatctgaactgaatatatgtaaatataatttcaattttagaaaaaaaaaaaaaaagtttttgtaacaacacatgaaaccctaaaaaacgctttgctgttatagaaagatgaatataatttattttttaaatttggcttatggatttggtccctaaatctttgtcagcctttttcctaatttatttatttagggttttctgttttagcttaattacatgcaaatatttttatataattccaagaaaattttgtacaaggaaagttcttaatttgtgtgtatgtgagtaatttgtttcaaccttttgattaaagaggaataatttggctcacatggtgaccaaagttcacgatctgcacatccatttaaaattaaagaagaaaagtttccaacttttttagttcatcacatgaaaattaaaagctataatattcttcttccaacaactgtaattagggttttacttcttcttgttagtaacatgacatctaagaatctttgggtgagaatatttttgaacttggcctggtaaaattgagttcaaaatgatcccaataaaagggtaattttgatttaaggatttaatttgaaaataaatttaataaaagaaaaattatggaacttcaggagcttgaagggctagcagatccaatgagaaaggaagttgctatggttagaaagaagattgatgcagtaaacaaagaattaaagccattaggacacacttgccagaagaaggtaacagctttttaactatatcttaatactaattattactctaataattttgtcatttattaaaaatttgttttacatgaaaggacaaattttgttgaaaagcaattaaattaaacatgacaagctattattatattttatttttgttacaggaaaaagaatacaaagatgcccttgaagccttcaacgataagaacaaggaaaaagtacagctgatcaccaaactaatggaggttggtctcaaatgctattatatcaatcttatttgcagtaaaaatgttcatggggtctcttatttatctttgtatattggagtttgacagtgtttttttcactaatttcatttcgaacagttggtcagtgatagtgagaagatgaggctgaagaaactggaggagctgagtaagaacatagattccatgcaattgcactgatttgatgatgatgatgatggtttatgatcatgatcatgataatgattatcataacagccacttgatgatataactccactgattaggtttgtgtgatgtatttaagaattgagattatgacctcttcttcttcttcttcttttcttcttctatatttatatttattatatatatatatat

SEQ ID NO: 304785 - DNA, 2884 bp, Cannabis indica
aaaataatttccaacatctatcacttccatcagttcagttcatacattgagaatgtaaccaagagtaattgcagcctctaccatcaagaatacttctagctatacccctggtcttccattgaggcatattacctttcattaggttggccctttcaagagacttgctctgttgattgacatgaataggagagcatatgccatgcttaatgacatcaaagtgtgggtaagatatgggaggactatttttaccactaaaaatctctggaaagttggtttgataatgacatgttactgagtttttttagattctcgctttgccgatgaatcttggactatgcctcttaaagatgaagaagacagtcaaagtgaaaccttcatttgatctagagcgacgttagaagataggaatttatctaaaggggaggattccattcgaaattatctagactattcagggagaatatttgtgtttcttgatcgaggtgatgaagatgttaactttggtagtagtgtgccagagagaattagggaatcagcaggtcattgatgctccatttgttgtagtcatagcatattaccttgccttttgtatttcttctgttgtactaaccactttccttttcctttatgcaaacaacataagtttccttgctgctatggcaaactgttcaatgagaaagacagtcgtaccgaagggggctaaacctttagttgggcaagttgtgcaagctatccatgcttctttttctgctcctacaaagaagaagtctaggaaaataggcaaagcatttgtgactgaagctactccccatatcaaggattctagcaaagggaagtcaaaagttattgaacttgacgaggagtcaactgcttctctaatcaaaatttgtccagaggaggctaatactggtaatttgaaccgaaacagctcgaagttgttggatagggtgcatgcacaaggaacatggctcctttttggtggtaatgctttgatatgatctaagactgagaacattcctttaaggaagttggttacttccaagcctccgtacatcattggcaaaagatgtttcactgatatcatcagggtaaataattttttgttgtcttcttttgagcttcctcccttacatttatagtcgtctgacttacttcttttactttcatgcttgtgttagtgatgcttacaccatggacaatgagaacaagaaagttgtcaaacttgctaagaaactttcagctgaagagaagcttgccattgatgtggagagctaggtggctgacttagaggaagctatcagtgacatggagagtaatgtgtctaaccttcaacaatcattgataatgctaaggcctaaaaggataacttgaacaaagatcttgtagctgcatggaaagaaacttctgaagttgaaaactctcattgtcagtagcttgatgagaagacccttagaattgctgagctagaaggtcaagttcaacatcttgatagccaagtgacaaacttagaacagaaagtggttgaagatgttgccttctatgatggcatatgtttcgatgccctctactatgcttggttggccaatggaggagcacattcattccattaggcgaccatccttaagaactaagttccattcttgtgaagcactgtgagcaatgtcttaatgttgaacctcttcagaggatcgatttcaacttgaatggtgatgattaatggtcaaataagctacgataattaaaggctacaaccctaagcatcccaattttcctccctttgttgagtgtcaccaacaaagaattaagaacaaatagaagccattgttaacttagatacatggcttcgtaggacactattttagtccttttcttttctagcttttagctttagtgtgttagttaatcattctggacgaccttttattgtggataagccttagtaaaaaattatcagatttgctttaattaaattagaaattaatccaattccataaaacctttattctgatgtttgtttttttactttatctgttactacttgacattttaacacttgctcagtattctatgtcttaagaaacttggtcactgggagtaatgtcaatgtttcttaaagtttcttaaccatgaaggtactactcaggtgtacacaattttttgaatgcccgtgtaacatatgactctcgtgtaccataacctatgtgtccccaagtgatcaaagaagtgccttcattggtcacttgccataaaaaatctcatcggtctttcttaatcgtgaatcttagggagctattacatgtgtgagcactcatccacttattcgaagattcatgggttggcagtattgaactcactaaagaaataaccgaagttattccaagagcaactccacaagctatactcagtgcttgagagtgtcgttaggcctgtgagttgtaattgcttaatattaatgaagtaccaaaaaattttgttcaacgttttttttcatcaaaaattaaatataattacattttcgtggctaaattgaaaaaataaacattcataaatttacattttcatgaagaattagctgagttgatccccactatgctaatgccctatttggctagtagtgtaagagccataacatggccatggacctctcaacccgaagatgacttcactgcatcttgtcagtttgagaggtgatcaattcacttgcacgttgtaaagtgaatctcattttgaagcgagctattataaagataattgttgtattggtagcattgtcttagatgcactatgttccaataccttgatacaggcattcaagttgtaatcatagctttcttaatataataataaaaaggctattctattttataaaaataaataatatata

SEQ ID NO: 304786 - DNA, 836 bp, Cannabis indica
aaaaaaaaaaaaacaaaaattacaaaactacggatccacaattttatcaatatttgtatggatttaaatacatatataaatacatttaagcactatggcattgtttctatataagttaagttgtctttcatttaactttgttatactgtatgtgatttttcaaatcctacatatgtatctaaactaaatattttaaaacaagggaaatttatttaattagtctaacatttttggtcattttgctccatttagaacatctttaatggatgactataaaagtgatctatacaattgtttttaggcttttttcgagttgcagctatattatagatacaatgtgaaaataatgttgttgttcataaaaatgtaactagaaaaattgtgaattttttttaaagtgcaattttaggtatttgtgtaaaaatcccttgacaaaagtatatacctttgatttcaccaagagatcccctctttgtaatgatttatgatttttttttagagaatactattaatttcctatctatttttttttgagtatctcttattcatattcactatacaatgaattaagtacactcaaagtggatgacaaattaatttttggatagatatgagagagatacaaactttatggatttttatactatttgagcaaaaatataactttttctcaaaaatgttattttatagaaaaaattcaataaaaaaacaaaaaaaaaatatgaaaaaaccaataactaaaatgggtaatcaattactttaaggctcgtttagaacgccgtattaggtcgtattgtattgtattgtattatattgaattggattatatatcatat

SEQ ID NO: 304787 - DNA, 1156 bp, Cannabis indica
atatatatatatatatatccaaaacaaatctgaaataaaaataagaaataattttctcaactttataaaatccatactcatcaactgatgtgttccatttttattggctgaccaataacttattaatgggtgtcagctttttgagagatcctgtagtaaaattatccataatattatataggaaaggattagaacatttttattgcacattttaaagttttaacatgagtattgtaagttattattgatatgaatgttgtaagttattatctatttaatcaaaataagtaaggtccaataattatatgtcagatcttattgtatcttacactttagagtactccaaaagcaatatacaaacggttaatataacttaatggggttccaccatataatttataacatcaattacatcatttgaaatatatgtgatgagatgtttaaacccgacaattaccatctgtccatcgttatcacattattttcttgaaacttacactatctacctagctagctgtgtggagccagccaacattttgattcatacacacacgtatatctacatgataagaatcattacccttattaataaccccaaaattcaatgtgggcatattttaatgaccagctatatatgaaatgatatgacttcatcctcatataaatatatgtgtatattactttgttttttgttttgctgtttaacctgaaggaagtagtagtaagtgtgttctcgaaggctgttaataattctcaactaacccaataatattgcatccatgccagttactctccatcgacagctcctaaacctttagtatataatgtcgtcatgcatagatccatatatagaaataatagccttaaattttaatgaaggcttcttatgtgtatagatatatagtactattttgtacttattgaataaacttaattattagatatattagcttaaatattaagtagttattgaattaatactatagctagctcattcttcgtactaccagcaggccacaagctcaattttttagttatatattttacaccatttgatatttaaaaggggaattttcatggaaattgaaagtatagtatacttgtttatgccataaataaataacactataaagttatggtattttttttttatttt

SEQ ID NO: 304788 - DNA, 1487 bp, Cannabis indica
aaaaaaaaaaaaaaaattcttaagttttaagctaggtgtgaggagtgattttgaaagatggttggtgtgtgattccagagggtttagggattgatttctagtgttaaatatgactgtttgggattggtttgaagggaaatggtcggttttggcaagtgttgagttcttaaactcaaacttggctcaatatggtaatttttattccgttgagtttcgggatgttattccttgctgaattatgttgtaaatgatcttattaggtgttataccaagtttggtagcatttgggattgattagaccaagttatggaggtttgaatattagaaatttcgggtgtctgttttagacgttttatatacggttataaacgagctctgcaatatggtatataaattagagccaaaatatgtattttattttagggtattttcaccacatggttttggtagaaaattctagattgttttgtacgtgtattaggcagtattttggaatagacacttatcggtttatcactgttgtgacatagggctcgggattgtcgtgtattctccactccgacgaacttgaatctagattgaaggtaagaaaagtacaatattactacataacatgccatgttgggatataattattaatattatcatttataaaatacgattattatcggttgtgatacgattattatcgtttataagacacagtcattactctaatttaaaaccgttgttaggtttcttactcatcgattgtctcattaagcaatgatagttacatttggttgcctaattaggcaatgataaaaagattatcttattaggcaacaatttaaaaatcacctcattagataaagggggttgatagttactttattaagtaacaatataagtttgtattactaaccagtatagatactactgttggttgttttcaatataagtggaatgactgttgattatagatttgagtatgtgatcatttgattctgattacttgagtttaattgataatatttgtgtattgttatgttgtgatattatgcaattgattttcttgctaagtctttgtgatttacgggtgcaggtaagggataggaaatatttggacaaccatgagtcatggatcttctccagcaaatttacatattagcttatccggctagtggtgccgaccaaaattcatattttaagatgttctaaactttaagtgtattttattacaatactataatatcttttgtaatattctttaagggggattctcgatcttaaaagtattataccaagaaatttatgtatcaaaattagttaacaccttttcaattaaataattagtttattataaactaattataaaagggaattttgattttatatacttaaaaattaaaaaatttattattaaaccaaaaacctaaaccctaaaaaactatgccttttttttcaaaacctcaaaaatacccccctcacatttcaaatcctaatct

SEQ ID NO: 304789 - DNA, 2692 bp, Cannabis indica
aacatctcaaaaatactttgtcattgttagagcagttaaaccaactctcatacgagcccttgatggttcattcatctgactatagactagagcaactattattcttactttgttcattctaacatgccctattagagatttggtgaagtgggacattcaacatattcaactaattcaatttttaatttttatttttgttacaattaaaggttttaggtgcttgttggtaccttctatcaattgaaagagaagaagcatgttggaaaagtgcttgtgacaaagagaaaatcttttgcaaaagtgaatactttgattgtgacatgtctaaaaacctcaataggcaaagttggttccaaaaaagcaatgtcacattactatgcagcccagataatacattttatgagtatggtatttatggtgatgcagtcacttttaatgttacaattgcaactttcttcaacaagtatttttactgtctttggtggggactaagaaatctaaggtaaaaatgaaaacttttattctctctattctctgatttagtaactagtaaccaatcttttgatgttaaataatgttgcagttccttggggcaaaatttatcaacaagtacttttgttggagaaatcatttttgcaattattattgcaactcttggattggttctctttgctttgcttattggcaatatgcaagtaagttttttttgttatttcattttagttactaatgtaatgtagtactagtaatgagtttttggatggtgatttgagtaaaaatttagtgacacatttttgttttgaaatgttagacgtatttgcaatcgacgacggttcgattagaagagtggagaatcaaaagaactgacactgaacaatggatgcatcatagacaactgcctccggaattgaggcagtcagttcgaaaatatgatcagtataagtgggtggctactagaggtgttgatgaagaaactcttcttaaagggttacctatggatcttcgtcgagatatcaagcgccatctttgtcttgatcttgttagacgagtaagtttcttttctattacatacgtgacagtattttttttcaaccaattagttacatacagttcgaccatctgttatgttaaatgataaattcgaccttgtatttttcaataaattataaaatagtatcttgagttgattttcttattttaaaataaaatttaataataacctaaatgtgttatgataagattagggatgggtaacttttacaaaagggttttaaaatggtataaaaatcattctctacaactcaatactgctaactttgagtggtgggagactctataaaatatgttattttttaaattctaaagttagtttaggtatgtaaagtgtttatacaaaaaagtctctaattttttcaaaaataccattttatattttttttcttttaactaacaccatacctatttttttaatattgtaaggtgccattgtttgatcaaatggatgaaagaatgctagatgcaatatgtgaaaggcttaagccggcattatgcaccgaaggcacatttcttgtgcgtgaaggcgatccggtcaacgaaatgctctttataattagaggtcatcttgactcctacaccacaaatggcggccgaaccgggttctttaactcgtgccacatcggtccggccgacttttgtggcgaggaactactgacgtgggcattagacccacgtccaggtgccatcctcccgtcctcaactcggacggtcaaagccatctccgaagttgaggcttttgcccttgtggctgaggacttgaaatttgttgcctcacaatttagaaggctccacagcaaacaactaaggcataaatttaggttttattcccaccaatggagattatgggccgcatgttttatacaggccgcttggcgcagatacaaaaagcgcaaagaattggctcaacttcgggccttggaaagcccaatagttcctgagcccgaaccagtggcccaacataatttagacttggctatgtacgcggctaggctggtcgcaaacactcggaagcccattaacaaacattctgggccggactctggagtcgttagctcgttgagaaaaccagctgagcccgatttttcagtttgcgaggaatgaatagataagtattgaaagataaatttctcaaaaaaaagaaaaagtattgaaagataaatataaataaataaattttatttataatagataatgggccgggctagtcctctatcggatcagtaattgattctaggcccattaccagcacacactttcttcttttttagtttacatacaactgaaagtttatatattgttatgaaaaactttggttgtagtttacatagtcaggagttattaatgcttgtaaattatgttcttaaaaaagtgtattattattatttttttggtgtaaatttattctttcttataggataattcagaatctgaatactcttgtaactgttttgattgtttgattgaggtaacatattagaagaactattatatagaaatattgtaattgtggtattgacagaaaatatatgaattatatgcattattgttaactgtaagttaattagttgggaggaaattacactctataccttttttatattgtcctcttttatttttaccctcttttttaaagtct

SEQ ID NO: 304790 - DNA, 2380 bp, Cannabis indica
ataaatactcaatatttgtaaaactgtaattatttatgtttagtttcattagtacatagtacatactctgttagtgtcttaaacatgacacatctaagacccatattctaaattattggatctaaacggaaatatatagtatcagctacttccaaatctttatatttgataaattaaaaaaagaatatgtactgataaaattacataaaatttacatttttactaacttaagtatttatgtcatttaaaatagttattctgttaaatataaatttaaaacttcttgtacttatatcctaattatacattttttttttttttggcaaaggggagaaactataaagagttgatgtgtacattttatgaatataattcattattgttgacatcattaatgtctccaattaccacctcaaaataaataacaaataaacaaaaacgtgatttttgtttttattgttattttgaaaatttgtggaaacttcgaagcttatattttgaaaagtactctcctttaccacataactattttgctataaatactactactcttccaagctctataagtactatacttcttatattaatcaaacataaactttcaacattttttcctctcttcttcttattgctctcttttaaataagctttattagttcccattttaactctaaattaatataaatttgaaagaagaaaagagaaaatgagttctttgctaagaactagtttcatcccaataactagttttctctctactacaaaccaccaaaaggtaaaattaattagtagtaataacaataatctataaactggttcggttttgtacactgtattacatcatattgtattataatattatatttagtactaattataatattatacaataccatcaaacaaatcctaatatatattgtagtaaatacattataaaattccttaataaataattaccaataaatttcttctaacatataatttgtggtatttttttcagatgaataatggggtgatgatgatttctgcttctctagacagaaacttatcagaggatattggtgatcatcatcataaaataaccttattaaaagatacccaaaatagtaaggtccttaatttttctggagaaaagccttctactccaattcttgacactataaactacccaattcatatgaaaaatctttccattgaggtaaatataataaataatatatagtttgatttttctttgattgagtatagtacattaattgtttatatatatatatatacataaaacagaagcttgggattttagctgatgaattaagagaggaaatagtatacagtgtgtccaaaacaggagggcatttgagttcaagcttgggtgtggttgagctcacaatagcacttcaccatgttttcaacactcccaaagataaaattatttgggatgttggccaccaggtaatatatattatataaatatatatattaaagtttgatattgtaggtggagttctatatatattttatgttaatatttagagtaatttgcggcataaatacttaagtttaattttcagttgtaaataaatacttaagtttaatttttggcggtaataatatctaagttataattttagaacttctgtaggtacctggttaaataaattaccacgtggcaatttctaattggtccaagtcatttaaatttttattaattttaaaaaaattagttacaaattataccaataagaaaatgacacgtggatataatgtttaacatttaatagttagttacctacagagttcatgaaatataacttagatattattaccgaccaaaaattaaataaaactaggtatttatttataactgaaagttaaacttaagtatttatgtcgcaaattactctaatatttacaaataagtgaagtttgttacttaattgtactaatatcgattctcatctagtttataagaacattcttatatcagttccttcaaaataaaagaaaaaataattaagagtactctcaacagtttctctactttattttttaaaatacaacatcacataattctatgtgtttttagtcacataattgtactaatatcgattctcatctagtttataaattattattcttatgttgtgactaaaaggtttgtggctaaaagtattaatcacaaaaattaaaattttttgtgactaaatatgttttaagtcacaatatttgttgtaactaaaactaaattagtgataactcgtatctaaatattatatttttatcacaagtaactttttgttgtgactaaaaagtcacatttagtcttaaaaaaattatgttgtgactaaaaagttattactaaaagtagtaattttttgta

SEQ ID NO: 304791 - DNA, 750 bp, Cannabis indica
ggtcggatcagatccgatccgtataaggcgggtcggatcagatccgatccgagtatctaatccagcggggcggggcggggcagatccgtatatgatctggatcaggtcggatcagagtcggatcagatccgacccgccccattgacattcctattcctaggtcttggtaactttctgtcacataatctttggattctattatttttcctatattgggtaaccactaacaaagtataaactactaactagtaactacacaccaataataataatctgaataatcatattcaaaacaaatgcaaaatatataaataatttgggaaatgattgttcttgtgggattcaacaaattatacctcttcttcttattatgcaaaattttcttcaaaatatatatttatttatttgaaatatttgttctgtattgaatagtttataaatagaagcattttatttttttctcccccaaaaagtgttgacattattattctctattgttttgttctatataaaccctaaataaatatttaacttttcatttttgtggaggagacaatttagtaatccgtgaatggtcttttctggtcatgtaatacacaaaaccacagaagttaattaattaaaactaggcttatatcttttccaaaactttattaaataaaaatttcaagtttttaattattataaccatacaaatacatgcccttttgatgatatatatatatatatatatatataataattatatct

SEQ ID NO: 304792 - DNA, 3488 bp, Cannabis indica
aaaatgggagtatggcattggattggctcacaaactatgcccaaacataaataatgggctatcaatgatccataagaaaagtaataggcacaaaattgaatatgaaaataacttattttaaaaagcacacataacatatgatatgaattgaatactcttctttcttttaggccgatcaaatcgaagagtgttttcttcttccttcattaaagaaaacaaccaacaaactagctgctgattcttaacatggggatatcacatggccaaaaagcccatcaatcctctgacttcaaaatccacatacagagaattttcaccatcttatttaagaacagcccctttctttgatctcttgctagcttggattttttggtaaaggtttttggttctaatagacaataaaatgtccaatccaaaaccaacaatgcaggcgactgccatgaccacaaacaccatcctgtaacaatgtccacccacacaagtgtttccaccgcccgccatcggcgtagcctccatgtcatagagaattccggctaggagaccggagaagaggaatgatccaaggggaaggttgagaatcagaatgttgtatatgagaccataatatttgaggccaaagagttcagatgcagttgggacagtaatagctaatcgtatgccatagcaaattcccacaacaattgagccaatgtaaagtgaaccaggcatagcaattgccataagtacatacccaccagccattagaatctgagaagctgcattccaaagtggccttggtgtgccagctttcctgtaatagaaaatacaatattaaaaacttgttatacactcacatatgtgtaacaaaatattgttgcgattctaaagggaaatagtagttgaaaagtccaaattggcataaactgcgtttcaactaaagcattattgtaccataaatgtactggtccagagttaggtagaagttaaagcagtacttaaatacagtatcttcataaagacttggctgaaaattagggactcaattacctaagggaaaattctaatccaactgatagagttactactattgaacttggtgggtacaaaaggaaagagatcaaggtaaaaaaaagggacagaaacaatatataactattttgaagtatgttatacatgtatacatatgtgtagtgtttttatatttcccatatgtaataggacaaatcaaaaggcgtgtcctgtgtggccaaatgaatttgcaacgaaatttcaactggaccacagtacgacttctatgctatttcctcaaagatctagtgcccctaagatttttctagtttcatccactactaataaaattcaattaaatataatatatgcatacatatttcgttatttttatgcattgtcaatttactactccaaacactcgttcatacaaatatcattttaaacaactgaaaagatttccatgtcacgatcataacactctttttcacatagaaaataatacaattttttgtttgaaaaatcctacacctttaaggtcaatatatatattattcgcagcatatcttgaaaatgagaatatatatataaatataaaaagatctacgtcaaaaaaaaaatatatttaaaaaaagatcaatttttaataaggaataattaaaaatgaaaaagcataaaatagaccgtacatacctaatgaaatattcggagaccatgccggagataattctaccgaaaaatccccatatgctagtgagagagacaaagatcgaaacgtcggcgtatccaagagccaatccaatctgacccatattgttcatcactgccaaaccagtcccaactccacacaaaaacgacacaaacattatccaaaaatccaagcactgcaacgcctcccaaatcgtgtgctcttcaccgatcaccggcttccgcttctcaactaccaccgtatcctgagaacgttcctccgccgtaatctccggcttcagcaacggctccgtcacacgggtttcgggatccgaaccctgctccgacgaagaggaggaggaccaggcggagatgaacgagtagacagggatggcaagcggcgaagcgaggaggaccaagagaatggaagcgaaaatctgagagaagagcttgccggggttagggataaattggtaagagaggaggtagatagcgacgacgaaagcgacgccattaaagagccagaagtagctagactcttcttcatcatcggaggcggaatctgagggtggaatctcacggagaaagatcatggcggcgatgcaaacggcgagtggtgtaaccgatagcatgaggaggaaacgggccgggtcgtcgttgaatagggcagaacagaggacggtgaagattgctgtgctgagaccaacgtaaccttttagaatccctgctactgggcctctgtttttccgaaagttacgtatacaagttaccaaaatggcagtgttcatccatgtggaactgttccctcccatgcacaaaactatgcacatctgtacaccatttccagaacataacacataattaattaattattattacatttaccgatgaaacaaacaaacagtcattattaattattacctgccagtaagagattggcttaatccgttcgctaactacaagccactgagttccataaccgacgagaccttcaagtgaaccaataaggagaatggcccatgtcggtaatttgtcggaagcgaaacctgctaaaagaccaaaagctttgccgatgtctttagcgacggagagattgttaagctcgagttgggttaagttcattagagtcttgagtgcgtcggagtagttggagaatgtgtagttgttgccggaaatggattggacccagacggcagtgacgaagcccagccatttagtggccctcgtaacggaggctgaggaagtttgggaacccaaacccattatagacgacgaatgaagcagagttccttaggcactatttactgttttcttgtttaccagtaaccaccaagaacagagcgaaacttcttcttggttttttggaccagaggcaacctcctcactttctatttaaaaggattacttttgctttttgcttttctttttttcaaataaataaatgagaagaatttaatatttgattctactgtatgacctacttgtgatccaagcgcgtgcaatagatgtcgatgtgtagattttaatttcggaaaattttgatggaaaaaatctataatacatgctctaaagtctaaattaaaaaggtccccttgcttcttttttttttttttgagggtaaaacggtctatatctttttttatcttggcctttaagatttcttagtttaatctttttgtagtatagtttaattttttaataaataaaaaattaattgacgtgtcaaatatagattggtttaacataatatgagacactattttttaacagaaaattttaaaaggctatttacaaaaatataagaaaatgaagat

SEQ ID NO: 304793 - DNA, 2069 bp, Cannabis indica
ggtgctctactgtgcaggaaagggtaaagctgtgtttgatcagccatgagtgtaggagctggatgaggaatgtacatgttcgggccacactagaccaagcgggtttggggtctaccagtgatgtattttgagactctgttttgccgcttaggtcggctagaggaaaggaacttgtaatagtgttttgtaattattttaaggatcctaacttttgtaacttttaaattataaggtttaaattattacaagttattttgattccgtttattaataaagtttaatttccgcgcttattttattagtaatcccgattaggggattagggtttcataagttttttgggtagcgtgcctaattatttaggacgttacaccaaacttcctacaaacttgacaagtggaccttatgtttctattgttacttcatctaccatgaaatctgcctctttcttgatttacatgtctgcaaccattgctgtgttgagatgtgtacgatcctctgcctcgactacctcaatttggtctgtgagcaagattagcctgtggatctgacactccactagatatttttcttgatggtccaaaaccctaaagtctttcaagtttttttgtcaaagcttagtagcagttcaataaggtcttgccatgttgcctcaatcttaaactcaataggaaaatagctaacatcgattctagaaaggacattagaaacaacttaatattctgaatatggctctctagcaagagtaagagttgaagaatcagtcctatttttcttttattttaaatacttaattaagggagtactaccttttcgagttatggcatcaagtactattttagctcttaaatgagcaccataaaaatgctccaaagcactccataaaccaacaaccattgacgaacccatcacctctatagctattgattttgtcattgagctatataatcaccccattagtaattggtcattgatgatccaattttcaaagtctagattgacaagtccaatcgagccaagagagaattcaccagtgctaatacctgcaaagaaaaattcaggtggacaaacattagttccatttaggaaatcatctagcctatgacctcttacaatagtagagaccatagcctttcacatactctaattatttctgtctaattttaaggagaaagactgattgagggtgttgaaatgatgagaggtaggtttttggagctaagagttgttagatcttgtagcagtgacatttaagacagttgctggagcaacaggaggggctacagagtttgattcttctgtactagggttttacttgccagtgatatgattggctctgataccaagagaaaaattaaattaattgttttgaatattctcaaattatagagaaagaatatgggagccttgtggctcattactgccgaatgggaaaggaaagaaatatattctaacaataaaagagaagaattatacaattacaatgattacaatcccaacgacttggaaaataacgcaagctttgaattccaaaatgcctatgtacgtgtaatcacaaccatgtttgatttcattatttctttttagatctaaccttataaatttggtgtaatatcagctggtacgtaagattcaatcattggaagaagaaaaactacatgtgcgtgaagttatatgttggtattttgtatctttcttatatattatgtttttaatatgataatcaaaatttatgaataaagatcattatatcgtacgtatagacatgatctatagaagatgttgagacatgcatgaatcgcttttttaggttttgtattcctgtattgtatttttatttaattttgtagataagatcgtgatagatccactgaatgtacatgcatatataaatatatatacacatctatataaaaaaatgaagtgtgcatattgttgggaccttcttggtgtgtgaggggggcaagccattaaatcattacatgaagaaaatgaacgctgaacagaacccacctttgatacatcataatccatggatttcccactttattaataattatatatatata

SEQ ID NO: 304794 - DNA, 1236 bp, Cannabis indica
ctttaataactcaaataatcacatgtatatatttataaaggcagacactataatgaatggagtgaacatccaagagcataaaataattaatcacatattcaaagatcaaaagttatataatagcaattaattccaatgtaacagaaagttattttatctacatacatacaacatctaaagcagcagctatatggcttataataaaaaaaaatagtgcaaagaaaaggggggagaaaagttatagactggtattaagtcagtaacacaaggattctgaattcaaactaggatgcaaagttactacaaataaatcagcaattttgatttttattcgagaattcacttagtatgtaactataagaaaaaatagtaaatgaaacataaaaataccttcccgtttactttagcatcaaactcctccacaatatggccatctatcaacctggaacgtatctggtagcatatattgcgattagaaaatctgaaaaggccatagtaaaagtaaggcgaagacttttaattttagcatgataacatcaaatcctgaatcatttaccttcctccactccctatgacgagcccttgttccaatatacctgaactccttctttatatctgaaacaacaagaacctttcaacagaaaatgtcatggtcaggaaaaggaaaaatagagaagctccttaagaaattccaacaaggttgactgaccttgccagttgctttttcaagtttatcgcatactgccttcatttctggaagataatcctttaccaaaacatcctctctgccttccaaatcatttacattattaccaaagctctcagtacttggttcccccttaatgatctcaattttttgctgtgagcctaaatgcttcgcgtagcgagataagtagactaaattggttgtcacgcttggaatgcttcttattgcctctccttcatcatcatcatcgccagcttttagtgtcttcacaacagcagattgcctcacgattaatccttgacattcaaggctcctcattacatagaataagttttttcctttaacgccaagctctttgccaagttgattttgtgtaattccattttccctacaagagcacatgattctcaaaattagtcgtttgcatcactttgcatatttgtttgtatatgcgccatacacacacatgtgcagtagaaaatgatgaaccataatgttaggcctcaatatatgctcacacaacaaatcag

SEQ ID NO: 304795 - DNA, 989 bp, Cannabis indica
aaaacaaaaaaaaaaacttacgaatggtcaaacagctagaaaacatgccctgaagagcaattaaaagattgatgatagctctgatagatctgaagatccactttcctcagatatggagctccatctaatcccacctttaccaatttacatttcttcataacattcattcttgatcctctcacaggtggccaccccaccatttgtgccctatataatttcaattcattaattaattaatcacccatacaatacatatatatatatatatatgtaaggaattttgtataatgattaatcgatcttactttgggggtggaggttttgaaacagagcttgattcatcaccttcatcttcatcaagattaagatcaatggtttctgagaatccacgtttggtgccacgtgtatcgccaggcaatcccaaggttagtttggtctcttcgaaattgagctcgacggattctgattccgacgactggtttccgtttccggctgacatttttggggtttgcagagatttttgggaattataataaaagagttttgtttggaggtgacttaactgttggtgggtttgtgttgtgagctattatatattggcaagttaaagaaggagagatattaatttcaacgaatggattcgtgacacgtgttgagtcatcgtccacgtaagaaacagacaatatatgtgaaagaagcgcgtgtgtctgatttgagtgcttcagagtttgggccctctgtcggcctttctttccttgttttatcactcattaattgtttctttttaatgacattaatatatcaaccattaattcacaaaataaaaaataaatattgtcaaaatatatatgtgtgacaacgatacttaaaaatacagtaaacctctattcaagaatacatttgagaccaattaaattatattctaattaggacgttataattaaatagagttacactaggaaaaaaaattaaaaaaccaaaaaatatca

SEQ ID NO: 304796 - DNA, 4167 bp, Cannabis indica
catacgttgatggacttagtaactgtcgttcatttactaatgttaacgttgcttgggtttaattattgcaattcaatatgtaaataatggattaacaatgaatgtaatccttgtgtaaccgattggacacctgctttgtatataaaggggtgatccaccatgaaatggcacctacgaatcccttgctacagtggactaagcagatcataatctgactgaaccgctataattctctgtctaattgttattttccagccttcgttgattgtttctcattcccagtcgagtactcgccattctaggttgaatactcgcacttgtctttacacataaatttctttttgactaacaatacaatataatttggtgttgcgaaattcactcgacaacaggataattctccaaaatataatatatattaattatattttattgaattttttttgtgttaaatttgtaatagttgattgtttagtgtatttatttttatgatgttttattctattttattatttagaaatttttttgttttaattatttaaaatttttagttgcattacattgtaatggttgtatgtttatagagtattaagcttaattaaatggtgatatttatttttttatctatttttcttcatatatatatttttatattaatattaaaattttagtgtgtaattggatatcccattaaaagatcgatccattccaattagtatttgaattgaattatattttgaggtataattaaattggatcggatgatttttcaaattgaattactaattagattggatcaaatgagaggaaaaatgtttaattagatcgaatgtccacccatagttggaaggatttagctgttaaaaatatatgttttcataacaattatatctgtcaaattaaaaatgctgagtctgtagtcatacacaaatcaatacacactcatgtatgggagtgaaacaaaatttttttatttaataaagttataaattattaatgaatggggaatcacaatgaaaaattagacataataaaagacgcaatctcaagtagctttgcggagccgttaaatgaacagtagtatctggatagagatatgaacaatataatatattcatttccctactttaatataaatatagtaaaggtagtcatataaaataaacatatttagttttttgaattttaattaaaacaaacataatgattcgagattagccaagctgtttcatatctttgccttctatacttaaatgttatttgtcttataatatatatagtggttaggatttcttaaggaactattacgtgtacagatccagataataaacaaaagctgatccaatgtaagaatagtttaggtcaaaggatttgctttggagttatttaagtagtggtgttctattaaaatcattacatatatttgttaaaaaataatgaagaaaaccatcatcaaccatatacggatgaaacattttttaatgcatcatggatatcagaaaattgtctagctaacgttagacggaagtatggagacacagagtacatatatttttatatacaaataactaggaaatgttattcttcatcccccattttttttataacaattgacaactacactttgatataaaaggatatcatatagataaaaaaataggaaaagagatgagacagggtgaatgataaaattttatgagtgtttattttaatgaggtaatctgctatttatataaaaatatgagctataaatttaggaaactaaaaaaaatgaataatagtaattacaatcatagttaactaattagaagatttagaaatcaatatttatattttttatagcactacacagtaagacaaaactcgtccaagaaaaaaatagtacagtataaaattactctcccttattttgctattcttggaaaaatcttttaacaaatttattgaccgtaaaaactcattaaccatatttctagtcggaaaccttatgtaatgaatgacataaggaagaaagagaagtaatcttaattaaagaagcttcacgaaacttagagagcaacaatagtgaaatagagagtattgtattaatatttcatattctttagttacataaaatttccaatccttttgaatgacgggttgagtattatttataggtgacctctgatggtttatgtttcaagtggtcacatgggcacaacatagtacataaatgcctgcaaatcgaaggttgtaaagaagtgtgttgacctaaaaattaatcaaccaatattggaatcgtataaatctgatgtttgccacgtgttacacaacaaaaataataaaagaaataagataaggatttttatagaggttcggtccccttagttagcgggtaatgacctacactcttttggttgtattgatacctagagataataggatcactataaggttacgaagcatggatcaagtatgcagatcactaatgagacagaggtgtagccttagaggcgtgtgagacaagaagtgagatcaatctagctattggacgtgtacaagagagatagagaagagagattagggtttcagacttttggaggctagaattagtcttaggttttgtaggttgttgttgaggcctttatataggaaagcctaaaccctaatttacaactgaaatccttagatattgacatattaaattaattaaatacaaaatactaaattgccccttgaaagtagatattttccattagtttgttgggctgttaatggcccaattcgtaggaagcttgtaatccacgtatcagggtgtatagagaattttgccaggccaatccttgccggccatacacctgcacgatatgatctggccagccatgcaagtcctacaggttatgttctggtcgaccatgctcctactaggatcctgtaggtcattattagcttgaccaagaggaggcaagcttttggatgtggaggtcagcctatggcaaatggaggacaactttcacaccatttccttgtagaggtcaggttccttggtcaaacggaagctcccttgatctggaaatcaccttttggctggtcagcttgtgcccaaatcctggccggcctataggcttctcatggccagccaaacatgttggtacaactgcttgatggctcacttcacttctttcggttgctgcttgacaattttgccatacctttaatgtatgtatttcttatatactttgtattttgcttaaatagacatgtcatgtcaggtggacgaaatttgggatgacattcgccctctaagttcctgttcaatcatttggtcggataaggactttttaactttgtcttgtttgtagtagtctccgtcgagcagccttgtctagccaagtgttggctttttgaatggcatgcttttatatcattgatcttctctcactatatatttatcatcttgtcttctttgatacctcttctatgtaccaaccattaataagtttaaagcttttaaatcttttgcaaactttttaggtctcatattagtttgtaatatctttggtatgttgatcgttatgacagttttagaatgtacaatgtgtgactttttgatggaatagatttaattttggccttcgttgttattcttgactctttgagtcataaagaatacgaggcacatattcgaatttcaaaagaaaaacatagatttggatttaaaacttaccttggctggcttgggaggttttgcttgagacctggccaaccctagggcttaatcatgggagttggccagctttaaggttttaccatataaagctagcatgttcatgcttacgtttggtcacccgtgcaagttcttgactgggttatgggaccctagctggccctttcaaagcttgagaaccttggccagcatggggcttggttccaagtgcatagccaattttctgtcctcttttgactttggcaagaatccaactctgtaggcatatacaaccttagtctcatacgtgtggttctatgaaactttatagtgagtctattacagtcgaatgctcaacttaagactcaacatgacttggaacctgtaaggaactctaccttagtcatagcccagtacgtggcccctataggagctctacctggttcttttctggcaatacagtgttgagttttatgccctaa

SEQ ID NO: 304797 - DNA, 1655 bp, Cannabis indica
tagagccaaaaccttgtgagcctaagttctttctggattcttaagtttttaacacccacactcgttgtgtggactagctcgagcctccttgcatcttctcagtgggtaagttcaaatctttctctctctcttttttgtcctttaaatttctaccattgatgagtttttgagcttttatgaacttcttgattctcatgtcttaggatagtttttatgcataataatccgttcaatagctttaggatgcataatgtgtgactctttgatgaaaaagatttaaatcttgcactttgttttgagattttgatctttggggttcaaagtacatgaagaatataggtttgaatttagaaatataagattttcaatctgtataagactctatcagatgctttgggtctattagagacactgcctggtgcttcatcctatccaaaaagcccctgcctggtacttgaatccttttgaagaactccgtctggttcttttcgggctagatccatcttggtcggttcttagtgaaccagctataggctggccgactcttggtgagccttccagaaaatggccggttcgtggctttacattaagggctatttggctagtatgtaaaagtcttggccgactgacccacgtttttatctgtatcttatttatgatctctggttgttgacctccctttgtctttctacacagatgaacccatgcgactattggggaggtgacaaccagattaatgagaatttactctgtcttttgtacgaagactatcactcatctagttcttcctttgagagctcctcgggcagctctttgagtgactttgaagtgagaagtggttctccagaacttgagggtcaacatcaccattattttgagcaaataggtggtgaaatctaaggaagattcgtctaggaacgtaaccagaggtggagatagttcttacccaagtcttggacttacattctccgtcagggtgtgcctaaaacatttcctgttggacaaacgtcttctgtgtctagagatcttcctgcagcagcggctgctgtgactgttgcctagtactctgagcaacatctaaatttgtagagagctaagaaaacgtaacgaagggcacctccaacgaatctccatattgccgagctcatggcaagaggaagggtttaccaagttgagcagattggatagcctgaggctggcttggcagaggagcctatggctgaccatgaggagaagccagaagttaatcaggctgagtctcaaattgagcctagagctgcttagaggcgccctaaggagtgtagtgtggtccaaggtaatcccttgggctcttataacgaggataaagagcctctgaacaaaagggatcaaccctcaaaggtcgggattaatcatcttgaggaggagcccactatgtcatggattttacaaatgggggaaggagatatattggtatctcctcgctccacactatcggatgccaagcttgtcaacatttttgatagcggacttgttagctatgtctgatgcattaggccagctcgagaccacctggctcactaccccagcccaattgataacatattattcccatgctgagtgtcacgggctcaccgttttaggcagcggaacacccgtgcggcaccttgacttct

SEQ ID NO: 304798 - DNA, 3286 bp, Cannabis indica
ttattttattttttcatataaaagacaatttgtaacacaaaacaaattatcattattaaaatttgttttgacaaaaaatcaattcagggtcctatttgtacaattttagaaaatacaagatcaattttatcatttaacaaaatagaggatccagttaataaattttacaaaacacaaaatcgaaaatggtatttacgtttacaaaattctcttcaataccagataaaagagtgtgctaaaatgtttgcttgggagtgtagtgcatagcttacccaatattttttttacataacctaaaaggtttcaaatattctcgagcttgttctactattttttactttaaattataatatagaatgcacggataatttccactgaaacagctaatcatgtaacatcaaaaaagcttcaataaaaaacctctatcatctgcttaggacaattctttgacagcatataatatctttctaaaataataattatatcttttgttgacaatactgaaaattattaaattcgtgacaatacaaattacatgcccaacacagtattttaatactaggtagggttgtccttggtcaaattttaaagatggtagagtttttacaaatataaatatgtaataattaaaatataaaagactaatataacaacctaaccaaagtaagttgccttacataccacgtttctttctttccaataaccagtattaaggggagcttctggctttcctagtgcttttctttttctcaacatctctttcttcaggttataaccttttacttccatatggattctcatctctttctctctaatcccactttttcttttcaatttctcttgccttttccttgagcttctcttttttcctttctttattttcctttttgaatctttttgggtttgtttttctctggtaggtgtgttgaaccagagggattgaaacggtttctttcgatacataacacattcaattcaggttttaaagggtattggaattgaaatttaacttttgaactttttggtaactttgtgagaagagaatccatttttgtccaacttctccaagaataatatttttttaagcttttgtgtaatcaaaaggcaattatggcgaacgttattggacatgtgaaggaaggtgaacagcttgatttgcctcctggatttcgattccatcctactgatgaagagcttatttctcattatttatacaaaaaagttgttgataccagctttttgtgtagagctattggagaagttgatttgaataagtcggagccttgggatttgccttgtgagtattctattatcatattcccaatcattgattttttttttgttttttatgaatcttaaacaagtaaatgattttaaccattattgctctttccagggaaagcaaaaatgggagaaaaagaatggtattttttctgtgtaagagacagaaaatacccaactggtctgagaacaaacagagcaactgaagctgggtactggaaggcaacagggaaagataaagagatttacagaggaaaatctcttgttggaatgaagaaaacgctggttttctacaaaggcagagctccgaaaggagaaaaatccaactgggttatgcatgaatacagattagaaggaaagttttcagtccataacctccccaaaaccgcaaaggtataagcctctttcccttgacttttggctctgtttttcttttaatgaacataacttaattatgttttttctttttgcttggacagaatgaatgggtaatttgcagggtttttcagaagagttcaggtggtaagaaaattcccataaatgggttgagtagattaagccctcttggaaatgaaatgggcccatttggtctaccaccattaatggattcttcatcaccttattgcaacaagtcgaaacctgttttccagtcgatgaacgtgccctgcttctccagccccataaacaacagcaacgttattagaaaccaagatgaaacaatggttgattccttgaacattaactctctatacggtgtcgtttcaaaccctctttcaacaaacgctgttctcccaagaaccccacttccgaactcgctttactcggatcaaaacgctgccgtttcatcccacatgcagttccctaactcttatattgttccccataacaataataatggcgaagaccagtcgatcctcagggctttggttgagaacaatggatcaaacttgaggcaaatcttcaaaacagagagagaaacggccgtaaatagtgaagtcaacacatctgcaatggccgatctcgaaatgggtaggagaccatttggtaatcaagttattccaactcatgcagctactgcttcagctggttcagttgatatggaaaacttttggaattattaagaagaagaaaataagaattgaaaataaaaactttgatggttaattagaagaaaagtttgattattagtaatattgttctttttagtagtattgttctcaagaattaaagcttcatggtatgtattgaatatcttatgaatctaaagaaaaaagtaataaaagtcaagtatatgttattgtaagaaaatgatatgattgataacttttttagttttgaagatttgcaattttgttttggtttgggaatttgttaggattataaagctttattatttggcattagtattgtcaattcgcttgaatacaaattgttgacatatgagtatgagattcagttggtggcaactgattttatttttattaaataaagaagtaaaaaaatgaaatttgtatctgtgaatttttagtaccttttattactcaactcttatctgaataagagcatgagttgcattactgtatttttttagtgattgattttggatttcaagtgcttgtggtggggactcattttggatatatggccatcaattctctctcggcacgtgcacgttaaaataccaaacacacgcaaaagcattaattaatagtgactctgtatttgtcaatcttttatttttctggtaattaatttcttttaaaaataattaattgacacttgaattttattacatacatggcttgcaagaattgatctcttccttctttagtaatagtagtacattttataaccccaagaagtaactagatctcttaataaaaataattaaatgattaataattaatttagaaagcaattaatacaaaattctaattaccttataagaccatctagaatacaagatataattcattacaaaaaaaaaaaaaaaagaatacaagat

SEQ ID NO: 304799 - DNA, 2625 bp, Cannabis indica
aaataataaataaaatttagttgagagaatagaaaagtagttagtaaaaaataaatataaataatacacttattatatatatatatatatttatatataaaaagaaaaaacaaaagttacgagtataaaaagaatagagagagagagagagagaattggaacagttggtgtgttccattaatactatgatcaagtatttaaatgagtattaacaaaattactggttcaattctacattctcttgtatgtatagaaacctccattaaagtgtcttactacactagtaactcgaatctaagttacatgtattcataatactagtagataatattagcaataattaatttgatgattttgtaatttcattttactgtgaactctttaagtttactatctcagtcaagatcctccaatggcaagtatgagactgagatccacattaataaattttggaattttataatatttacttattgttattttcatataatattgtctacatataaattaaaaagatgaataattttatcattattattatttgtttattttaaattacaaacataaataaaaataataaaaaaaagacaatttcacacaaagttatcaatttttagttatctttccaacgatatccatttcattgaaatattattctagggttttgaaaacccaaaataataataaaaaaaactctaaaaacctcaaaaaagagatgcaagagaataggatgaagaaaaaacacacgtaaagacttagcacgaatcgaatcgaccctgatagtcaacatttggattagtttcaatcaactaaatttgagaatctaaatttttatagtaaataaaagcaagcatgcattctagtatggttcatagagcaacaaacaaggaattgtaaaagtgcaaggaaaagttacttactcagtgctttttagttggctaaaacttcttggcaaaaacgatccgatcatagatgaacaatgtagattactcaagaacaactctttctccttgctccgaaaatcttcaaatggctaaaaaattacaaatgagtatttttttgatcttatttatgaggtcactgaggggtataatggtcattaaatttaaaatgttgatttcccctcccctcccaaaaagtgaagagtccattatacggggatctgtgtaactgtcagtgcacaatctccaaagtgcagtttccaagggaaagcagttaatgtagaaatttgaaaggacagacagagatttgcacaccttgggtaggaataacgtcccatcatgcaggcacgtgggtacaaatgcgtgtcacctagccatgcaacgtgtaagttcaggaagtacccgtacgaccagaagttctcacgtggacttggggagaaaatattatcccgaaatttgcacggataatgtgacacttggcaagatgacacgtggcatgaaagtttgacactggacagagtgttgcaccaggatgtaccgacaaggcaagacaatgccgaattaaattgaagtataaatgctcaaagtgattatcacccaagcgcgcttaaaatcttacctcgcgtcgagcgatgcaagcaagctgcgtaacgcgaatgtccaacctgaggaattcgttgaaaatatttcagtatacttcccttaaccgtttccacaaaattaagaccaatataaaatttctattttcatgagatttgactgaactaaataagaaaatcgtgggattcatattcaaatctgcaccgatctttctcttattattttgagactaaatgtattccttctcccatataaatagtgaggctaatttactattgagggggccaactttttatgcactttacaaagagaaaacactctgcaacatacttgtaaccttttagagagatattgaaaaacttacttggtgagaccttgtgatcttaatattctttcataagcaatacaataaaaaggagagtaggctattaccaaattaaggggccgaacctctataaatttcgtatgtcgtttatgttcttaaattattaatatagttattcttatcactttaattgatttaatggcattggctaaaagcgatatcaataaatattaaacacattatattgaaaatattatcataataaacatattaaattaataataatattataaacattaatagtaataataatcaacatattttaacataaacaaaatttaaacatgttgatattttttaaaaaattcgtattaaaatttataataaacacatcattttaataatatatcaaaatataaatattaatttatatatttatgtcttttaactctattcatttacttttagaaattaattaaaaataatcaacatgttaaaattataaatatatatacacatatgtattagtttaatattatgtgcaatgtacttatacttagttatattccttaatttttattttaattatatatatttttagttgtataatttagtttttttggatgttattcaataaaaaattattttttattaaaaaatatttaatttacgtgttatttataaaaataaaataaaaaaaaaacaaaatttttttttgttaattataattttagtttaattactgtaatacttttaatt

SEQ ID NO: 304800 - DNA, 2312 bp, Cannabis indica
tatatttacataattaagcacccaaaaatttaaataattttattaaaattgttgttatatctaatgcaacttcaagctaatatcaaatattatgggaaaaaacaattaaaagacattaaataaggaaaagaaattaaagaaaaccttttttattatttggaatacaaaattagtggaagattcagttaaaaaaaattcctaaaatatcatattgggcctttttaatttgtggaccctgtgcattagcactccttgtactggtaaatggccggccatgatggtaagcctttaaaaatggcagcaatatgttcttttacagaaactttgtgttcaataagtcctagacgatcaacaagagttttcatgcgaaacaaatattcatttgtggacagaaaaccttttattgaggttttgcaattgagtacgtaaaaataaatcttgccagaggtttgagtgacaaagtataccgctaatgttttcctgacttgagcagaagtatcaatgccaacaatcctagtgagaattccatcagacatgaaagagagaagccagaagtatagaagctgatcttaaacttcccactcaatgaaatgaggattggtttgaccaagaacttcatcttcttgagtaagaaatttgtgcggaggacaaaacgagtctagatttcatcttgaagtcgatatccttgaatcatagactgaacttgagggtgccagagaaggaaattattgtcatcaagttcaataaaaactttgtgagaaaagacaacatgattgaagctttgagcaggtgcagccatcgaaaccactcaatgaaaagagataaaagaacaacgaacagagaaacaagattgcaaaagtaaagagaaagagaaaaaaaaagtcactcagatactatgttaagagaaaagattgaaagaaatgaagtgataaaagtctaatttcattactaaattgaaataaagcaatacctcaatatatacaaggtataaacaattagagcaaagctaacaaactaaatacatatgtacaatagtaacacaatcctaactaatacttaacagagaagcttagctaacagaagcacctttatggacatgaaaaataatattataatttttttttcaaggataatataatattataaaatattggccggtttgatcgatgtaaaaaaaggttcatggacgagcattacatgacctccgtttgttgctcctagacgtgatatcttcttgtttggagtgtggccgtctaccaacttagatactacttaaatgtgtatatatatataaatatataaatacatgtaaaacttataaacgcaaaagatttgtatgaaatctctttgtccattttttgtttggcaaatatctaattagaatagtttattgatcttgttatagccttaggtataaataaaaacacatgaataagaatataaatatataagaataaaaatgtagtgaatttgaaatgcatatataaaaaataaataaaatgtaatagctaaacaccaaaatagtagaaagggtcattacattaaattataatgacaattcaatacatacaacaaaaagtaataaaatcaaatgaatttaattcttttttaatttcatttcattttattacatcaactaaaaacatcctaatgaatccctgttgatcaatctatagagtggtgcaattataatttatatagtatacaatattattatagatttttttaagtatattaaatatgatttcattatatatatatatatatttgtttttctactaaacattgtaatatttgttgaaaccttgaaaaattatttaatatattatttcttcaaagataaaaccattaccgaacattaattccctcgtcaaatcatttctttgcaaacaagaaaattggaaacaatattaaattaaataaattaaacaatataacattgtgtgaccaatcaatagaaaaatgaacccgaaatcaattgattatccacaaccaaaccaatggaatggagccatatatgtcttgaaaataaacaattttaagagaagaacctattcaataattatactgattcccacaacagagaaagctggaattaaaaataaatattaattttcatctttgtttgattttcattttttgttgagatctccttcatgcaatggttatgatattattatttgatagttgcagctggtacatcagctactggtgaggcaggttcaattgctttgttagtcttttcctcatccaccttcacttcctcaacattatatttctcttctttttcttctgatgatacttcaatttct

SEQ ID NO: 304801 - DNA, 4998 bp, Cannabis indica
tctctctctctctctcaaagattgagaaatgcttttatggctatagtttcttttctgtctctttctgtctcattttgacacattgcaggtgccaatttgaatgcctttgatattattcttgtgcatgaaaacagaagcattccagcaatttccattgaattctttaagcaagtttgttttcttttgagaatatttctgttcatgaaatttacaaatcaaaatggagcccttcagctctattttgggacaatgaaatttgtttagtttgaatgaaaaaaaaaattattaagcctaaacctaaatcaaaatcgaaattttaaaataattggagaggaggcaactagggagatggtcaaggacaacgagaatatcgcgaagaagaaaacaaggtcggggatggtgtgggaagaggaggctgatatttctttcttcttttcgattgcaaagacaggtacaaaccgaacaaacgagaaaggataaacggttacaaactgaaatttgggagggttgcacaacatcagaatgggtattgtgttagctagagaaaattagttatatttcttttaggtttaggttgcctaaatttttaatatcatataccacatgtttaggttgcctgaattttcaatatcatataccacatgatgtggtgtgtaaagtgagtctcacgtaagtattaatcataagagtgagaatgatcgaaattaagagaatcttaaaatcaagtatttaaagaattaaggtggagtttgattagatgtaatgaaatagaaaggaaacaatttttattctattcctttgtttggttgcattttaaagtattgaaatgacattccaataaaatgctctttccaccaaatggactattctattttaaaatgaaaggaaagaccattccaatataatgagaaaaaatttaataatttttttatcaatttcctttatgcattttaaattttattccattctattcctattcattttctcatttccattcctattcctatagtttggttttacatttccattatcaaacatacaaagctcaataccaaacaccttgaaaagaataattaaaaatttatcaaacatttaaatgtaaatttttctaaattattttacaatttttttaaagtagaaagttaatttcattaccaaaatacaggagaaaacctatattgaaatttattccaaccccaacaactttatcatactttttcaatgtttggcatgtcaaagcaaagctactaacaaaaatgaacaaaatcaaatatttttagaaaccacaactaaaattagcaattgtagattggtttccactacaaaaccaaagaattagtatcccattgaagactattacaacctcttcatttcttaatcttgttgggttaattaaatgaaaagatacaaactaagctagaaagaaaataagaaacaaaaaaaaaatagacgaggcacaaaaattacaaggtcatactcattcccacattcgaaacaggctcttctactttgccttcttcagcagatttgcagttctgaattcagcatcatctcgaacgaaactccaccaaatgtaagttagggggacagtggtggcatgccagagcgcatgggcgtcaacaaatccttgatatggtgggaaatcatagatttcgagaagcattgctagacccccggccactaccactagccacaacttccagcgagatggatggcgagtcacaccaccgaaaatagcccaaatcagtatttgtgccacgcccatgaagacacaaactatcatgttccaccctgcaagttaaacatatgtataaagactcgggataattacaaacagtgttgatgatcatttcacactagtttttaatctgaaggcaaccgaagaataaaaataatcaggcttaaatcaaaaacaaagacacaaggagaagaatataataccgtagtctaatttgtaaaaattcagaaacattatatgggtggttacaaaggcaagcaatggggcggtaaccatgactctggcagcctcatccctcacgttaaaacttcttagcacagccagaataagggagtaaccaagtaatgccaccgccgatgagtagtctaacttttctgtcaggtcaacatctctgtagttcgataacaaaacgttaacctcacaaggaaaagaaagcaatagaacaaccgaaataaatgtttcagtttctgattgagaacatagataaagaaagccgcataacgaaagcttaccggcaatggaaaacagcactccagaaccaggaattcattgttaagagtccatagatatgccataaaccagcaaactcatagtatgccctcttgtcttccctcaaagggagcttatagtatataagaatgaaaaaggatagccaaccatgaaaatgcattgcaaggttcagtgcagagaatatgacagaagcaggttcctggatatgaaaactccatcaaatttcacaaaccttagaaactatgctaacacattcaactctaaatcaaaaacattatgattatcgatattactacataggttttgaaaattctacctggattccatatacacgtttgaagggccatttaccatgatatttgagaggagcagagccgggaagagattccctttctttctctctatcaatcatacaatggtagcgacaatcactttggcaatcccattgtttccacctcaaataaagaggctcttggatataccaaggaccatcaataggggcatcattggaagagaacttgcagtacggaaagcatctttgccctacacatcccgtttctttacactctttcacacaagccctattttcattaacaaaaatacactcctttacacatagcaaaaatagcaaaatcaaataacacaacataaacatttgtactcaacacactcattataaacaatgcattatttcactttctataaatcttttcttgggaccaggaggggccaagaaactatatcaattgttatataggtaggactcgaacctcagaccttgtaaaggcaaaccaccaaaacccttgtgctacccgaagtaacttttcaaagatgatacagtagttactaatcagatcaaatatttacactaaatctccaaatcaaaactctccccttttcatcattggttataataacaaaaagaatggagaaggataataaatgttattcagaattattcaggctaagatcgatagataaataaaggcatacctgtattttggatcggcatcaccagcactggcatctataacaccaagattccatgaaaccaccacaagtaaaatgatgatccaaaaatgttgtaacatcttactgttcaaacaattcaaagtgaagtgtatcattatgattctgtaagggtgaaaattagttatatgtttaggcagatatattatccaagaaaattgaaaattgaaagtgaaagatggattagggaagaaaacaaagtaagtaagatctgggaacttactggagaaccaaaccaatctgagaattcctttggtttcttcttcagagcaattaaacagctagattaactgtcgattattgcaatcaaaatcagatcataatctcagctaatttttacaagatatcattttaaccaaaaaaaaaatcccttctttccactaaggttgatcaaactgatagaagcaaacatattcatttgaatatacaaactgattaacaatgtcactaatcaacttaattaccattctttcttatacagcttgaattgactcgctatataaattctctgagtcataaccttcaatacttgttaatctacaaatttttgattgattaataatgaaaacaaacatacaaatagaataagagagaagaacatacttctgatatttcatgtccaacattcctgatgtggatgactttagaaggctctgtcattgttaatcacacagtaacaccaacgttaataacatgaaaaagtcaaactaatttactaagaaaaaccaggacacattccaagttcaaaaatattataattacacccattcataaccaaaaactaagtaattggttttgaatttaattttcaaatcaataaattgaagataataaacaaagcaatcttgtttcaaatccattaatgaacagtaaaaaatcccatccatttcaactggacaaaactacagaggacataagaaatcacaaccaaaaatttaaaaggggattctttttttttttttccaatttctttttacaaagatactaagctaattaattaccatcaaataaatcatctccaagggaaaaacctaataacccatttcgattgaagacaaatcaagaacagggtaagaacccacgaggagtaaaggattcccaattaggaggaaaagggttataagtcgtaaagctattttctttgcaaccaaacagaccagaccaaacaacattcatccaaagaaagaagaaaagagatcaataatgagagagagaaagagagagcttgcctgatgagaggagagggttgaaaaggagagagattttaggattgtagatcaagtggttttggcaactgaaagccgtatattttgtttgccctatattaccaaataccatagtactaagttaattcattaatgttgaatttgtcaatttatgttcttctattctacttttgctacttcattttaatcgccatagtttagtcctaatttttaatgttaataataatgtgattgaattcatgttaaaagaagcaaataatagaagttataaatacaagtacaattattatttagataaatactaagagtagggttgtttattggatcacattcaatgaatttgaactcaagcgatccagttcaattattcattggatattgaattttgtctttcgatactattcaatcgaattgagtccttcgatctaatgtaatagatgtattgggttggatagatcgattccaactattggatgcattaattggttttctatt

SEQ ID NO: 304802 - DNA, 1486 bp, Cannabis indica
ctccattgttaatactacatgattaaaaatttgttactaaaagtgatattgttttgtaatgatatgaaaaagagacattaaaagttttttcataatagtcaagcatcactaatagtttcgtcactcattactagctaaaattctatccaaatacaatattatcataattttgtactaaaaaataggtaatcttaaattttgcccacaagctccaaacattttgagccttgttgttgcacaagacacaattagtaattggacctagatcaatatggtatatgaataataaattgcaattaaacatacatgcatggctgtcataacacaatccaagactgaatagcacatgactaagagatgtatttgaaccaatactttacaattaataattgtgccactatctctcttgagtgagttcatgcaacgtacacttcatgtatgactaattaaagaactacaagaactacctcatcacatgcatatactccaactagacaaataaataatgtctttcaactcatagtttaatagttgatctaattaaaaacaaggaaacgcgacgttgactagtaaaagtcgacggtttatgaaccatatttacaatattaaacatcacttatggcaatttgtgcaagttgagtacaatatagtaaaaccaatacgaacgttgacaattaactcgacattacctatattaataagttgctcactctcaaataatatcaaccaaaacaatacttgtatagtaaagtttgttgatatcgacaatatggaaatcaagcatttcagtcatgagcacccattgaatcctattgaaattaatgatgaagcaggggatgaaatcatctgctcatgttgtctactagaagtatctccaggctcatcagcattcaagtgcacaaaaaagaagtgtgacttcatcctccacaagccttgttctgagctccctaaacaaactcgacacccttctcatcctgatcaccctctcactctccactccacccctccttacatcttcaactgtcatgcttgttgtaacagtggcggaggagccttcgtctacaactgctatgattgtcacttcgacctccatgttcaatgtgtcgccttggctgagtctatcgaacgggaagatcactgccaccctctcaaccttgtgttctcattacctcccccaaaattaataggagacaataaggagagcgatcatgatacagagaaggaaaaagataactatattaaagatgatcaggaaaaagaaacagactatgaagagaaagaagaagctccaaatgagaaagaagatgaagaaggagaaaaagaagtagagtattactgttatgtgtgcgaatcacgtatcagtaagagctattgggcttatttctgtagtgattgtgactatggagttcatctggagtgtgctacaactgaagctgaagaagaggtagaagaagaagatggtaatgatgatgatggtgatgatgat

SEQ ID NO: 304803 - DNA, 2181 bp, Cannabis indica
gacaacaatcatgaattaataaatagataatagaataatttataattaaataatatatattaattctataattaattattaatggcaaaattgccaaaaaaaaaaaaacttgcattttattgtgtgttaatttgacataatgttatatatttaaaatcatctccgatgagatatataaaaattacttttttttggcacaaaaagtgattttgtaatatatttgcatcaatttttaatattgtacttcaatgcacaattaaaaacttgatgcgagatttaatatttaattaatgattttattattaaaataaaaaacaataatttatctttaattttattatataaaacaataaaaaataaatataaaaagttgataatttaataaaataactaaagtttttaataaaatattaaaaatagcataaaaataattataaaaacagtatatttattatgatgtgaatcatcatattatactgtgtaggctaactcaaataacctcaagtgggcaatgatcatagggagggtatgtggggtgtgtatgtgggtggggtcctcgtttgaatcccaactgtgcttatgtgacaaattcgaattaattttgggcaagtaaacttttatattctagtcatagatcactaatttacatctccattaaaaacggtcttcggtcaaaattagtacttgcttgccaaatttggcatttttttttcttcttaaaagtgataaaatatagaactacacccactattttagcattccaatatagatgttctcacgttgaatttataatttctgatagtaattactcaatacacaaatatagacatgcaataatcgttattatttattattgtccaaaaagagtctctctctagctaggatatatataaatatataaatatatatgtcttacactttatatatattaatgatacacaaacaaacaggtgatcttattaattatttattagagtcccaacagggctctagctagaatcacctgaaccgatcatcgactggtcaacaacacataacaaagctggtttttctgcccatttctacattatgtttacgtacgtataacttgcatggtcctataatttatatttataatagataaacatatatatatatatatatatatatatgatctagaggagagaggtgacaacaagattaaagtcttctaagctaacagctccatccccatccatatccatggaagcaatgatattctggcaatcctcaaggccaaatttgaccactcctaagctctccaaaacctgaaacagctcttccccagtaaccatatgatcacaaactccatcaccaccattattattgttgttgttcagtgcctcagctgcgttcatgagaaagtttccgagcccaccaagctccatattcttggtgttcaactccaggaactcttccaagctcagaagaccatccttgtccacgtctgcctcctgcatcatagccctaacttcttgctcacccgggttgtaacccagcgaccccattatgccaccaagctcagcctcagtgatagagccgtcgttgtttgaatcaaaagctctgaaggcctccattagaccatggacatggtttagtgtctctgtttgggcggtgagagtccccaacatctgagcaatcttttcttttatttgttagggccttaataattttttggatgatactagtgtccctgcacctcaatttatataataatagccagaatgaaggtgttaagttattctttgtgatccactttagtaatattgatgtaaaatgtgagggaaatgaacaaaagataatatggataagataaggtagattcttatgcttcctttctaagaatatttattaaaagttacatgtaaagataaagatcgaagattcttatttatatgaatgcatgcatgcctttacatgatgctcaagtctttttcgttggaaggatatataataagggaaacttacaaaaatactgaaatttgggttaatttttacaaaaatactgtcacacggaaattttttcaaaaatactgtgttttataaaacaccagtaaaacacaaagcaatataactcaaaacaacactagaacactagtaaaacaccagtagaacaccagtgaaacttaacacagtatactgcagcatgaaacttataaaaaa

SEQ ID NO: 304804 - DNA, 1754 bp, Cannabis indica
aaaaaaaaaaaaaacacaaaaacgaatatgaatattttctccttattttttatgattaattggaggacagatcaattaatatatagaattgcaaaaattaatggcatctttcacacctttcagcatctatattagtttggataatgtgattaaagaaaggagtgtccgaatgacatgatgattaaatttgattagatagaattttataaaatatcttgacgatcatgaatagtaccattatttgatattctaatcaatgtatatatacatacatcacctacgtatatgttatatatatttatagaagttagattttttgacacggtatgttatggtcggtgtatgttcaagagacacgaatataatttggtacaaaaaaaatattaatttgggcataacactatatgatgttgcaaaattagcatgatatattgatataatataacacgaaaaatataaagacatcatacgtaagcacaaacaaatcaacttaaaactcacattaattttttttgccaatatatataatagtatatattaattaataaataataggtcaatttttataaaatacagtacagaacacataattcatatttgagtcgagcacgacataacacataattcatattatgtatatatacacgtacattataagaattatgtaacttcatttcaaaatcgattataatattaataagtggatatgttcttatatatatatataactagatattttaacatttaatccaatacatataatataataggtataatatataatttgaaaaccgtaccgattccaaatggatagcttggaatatataaatgttaaagttagtgttatattttttaaataattaattaattcaaataagttgcactatctctatcccctcaaaaataaagttagacatacgtaattacttattactaattatactgaagtggggaaacctaacttttatagaataattattcaatatatacgaaaatgtctcaatttttcgtaaatatccttaaattaatataattttgttacaaagtcaatatccattattaaattaccacttgataaatcgatgtagctcaataagttagattagtttatcttgtacgtttataaatatatcatatatatattagttacaatacaatataattaacttgtcatcaagaggtatatatgtacttggggtattaattaattatatttttatatacattttacttaagaaactgactattttctgttttaattaatgactttataaatcacacctgcaggaatgcaagccaaagggtaaaattcattgaaaaaagaaaaacaaatcaacgtgacaaatgtaactttttttaaattcattaaaacgaaatctatcatttttgataaatgcatggttcatcatcatgaatatataataaacttcgaatcatataggaggagctacgtacgtaggtactaccataaatgtacaacgacacagcaaaaatactcttagatatatattaattatttgacataaataacataaggaagaaaagaacaaggatatatgaatggcataatgcatatatatagtcctgccatcccataaaatctaaatgcatttttgttgtaatgcaatctaatctaattattaattgaatttaaaaaaactattatcatctacttcaatttaattaaattttaaaatacaattaaattcagtttaattatggtaccgtttggtaacatttttatttttaatttt

SEQ ID NO: 304805 - DNA, 2760 bp, Cannabis indica
agaaaatgataatatatttttttttacacatattttgtaattaattaatataatgtatataaaattgtaaaatgcccataaaaatttgagtgtatctaatttgtgatggtgggcatgaaaatgaaacaaattaattagtttttggtttgggaaaattaacactataaatttcactttattccatatttattatttttttttggagagagtatgatgatcgtcgacgcggaaaacttccaatcaacaacttaattatctagccaaagatatacaaactcaaaatatgagattacaaacaaagcaacttaagacattattgcttctaacttagattagtggtttgtcatgttttaaatatgtattatactaataataaacattcaccagaattgtttgtttccttattacgaaactagttactactactaatatgttagtttcttctcaaaaacaaaagaaataagcaacaaaaccaacagctttcatatcaaaattgggacccaaacaactttaattatgaatgaatgttatttgtttgtttggaaaaaattttcttcttcaaatcctgccaagcttcaggaccattaggatgacgatttacatactgcttaacaaattgggtctccgagcaagcaacgatggtgctcagagctagcacgggatctgccattccttggcttttaagccaatcatacatagataccctatgcttgaccctttcaacagtatagttgagaagtgaggggaatacccataaagctgatatgggataacctagctcctttacaagaagatcaatcttggtctgaatcacactcttcgtctggttaagaatttgaggtgaaactttaaccatttcacggacctcatcatgttccaaaccataactcattatgaagtcaaatctctcttgaagctcccctcctttgcctcggaacacctttagcgccttcttcatttcattcgagtcttctacatatcccaagtttaacaaaaacttgttcttgtgcagttttgattcggagtcttcctctaaactcggaagtctctcaacttttgctcccaaaacaaagttcttcaactcatgtgggttcttctggatgtaactacaaagtcttttcttcccaacacacaaatatgtaagtaagctattagcactcttcaaacaacatgaacccaccagcagtgtgtgagaacgtaaaaaattccccatctttgttgtctccatctcgatctcattcaggaagccgaagcatctcctcaaattcgaaacaaactttccaacttgaacctgtggaaattgcagaaacatggggcctatttggttcattgagtatccaaatttcaatagaaacccaattagtaaaattgtcctgtcccctgaatcctcaaacaaaatatctgggtgctgaccaagcatttcagccatctctgcatcggtcaaccccatcttgctaaaaagacataaaagttcaagcatgcggctccaattgtaatcatcatcctccaacaaattgttctcgaaccatctggtttcaaatccaaaactcttgattctctccaataccttaataaaatctgcatttacatttccaatcaaaagataagggctagaaatgattaactttactacagttgattgactaaagcccagtttctcataacctctaagttttgacaccaaaatctgaacatcagagtggaatacttctgtagctcctttataaattttacctatcttatggcgtgcaaatccataaccacacaacacataataattctcaagcaacaaacgagcatcagttaaatacatcaaattacggggaagaagatgagcatactctgaaggttttaatcccaagctttcaaggaaaggttcaaactcattaacgggatggtaacacaaaaaccttgcaatagaccgaccaatctcagcctcagtattgacctgtttcaaaagctttgacaagaaaagaggcgagtttctactcatattctctgcatcaagaaactgtaagtttctagttgaataaaaatactccaaaagtgcagcctgggcttccttcttaacagcacgaggaattctaacaaccttgtcaatctctaattggccaaaaatttcagagtcctcggtttgagcaactctttttgttctataaagcctagtatttggagaaatgaaagaatacccagatgaccaaactatggatttagaggaattaagttggttttgaccaaaacttgaagaagcccatttcagtatagaggtgcttctgcacttttgcaaatgggtcatcacaagtttgaaaaggatataaatcaatagtaatggagttttaagggtttaatatgaatagaaatcggtataatcctctaaagaaatcttacctccgccattggtggtgagtaggttcgcaaggaagagcgtcagaatgagagaattagctagctgtgcgcgaatgtaaaaccctcttcaacctctccaccactgcaattgaagttgaaacttgaacgaaaggggttttgcttaagaagcccgaaacgacagtacttcccacaactaaacgacacgtttttaggggtcgttttggtacgtacgatatatattattgaatggaaaattactaacttttattaactatcgaacgccacgatcaaaaaaggtggctaaatcaattaaaactacaatctatatatctatatctttctatataaaaaagcgtctatttaacattatttgttggtttatttttttttttt

SEQ ID NO: 304806 - DNA, 1976 bp, Cannabis indica
gtactttcacggaatatattctgtggtacattagatgggtctttaggtacattaaatgagtgttagggtacgtttctactttttgactctaactatccctagatcaatcttagccgtcagatcaaataactttctcatctgacagctgtcgtacatcacagattacaatccgtgaaagtacaataacgggataaaatcatatccctacaattataaataaactataaaacaactaaaaaatagttttttaataaagagtattctaaaaaaattcaaagcgtaaatatatatattttttattttgacgtagttttgtaattttttcatagatttagtttattatgctgtaaaattttcttaataaaataataacatcttattaggaaaaaaaattaattcataattctcctatttttaagatgcaattttcgtcaaaaatacaaatgataacttgaaatataaacgacaatgaacatcttttttaggtgatttaatcgttaataaagcttactatacaagtcatagttagcttgcaaacttcaaattctcttggagtttgtagtttgcacatattgatttactttttacagtaattactcaactaggcagccagaagggagggatcattgatgaagtttaagatatattagagttgaataaccaactaatgtggtgagttactagataaatattagacaatattatttcacatgaattaaatttaaaaatattgagtggtgtataaaaatatgaactactcatcataattgattttaaaatagaacctcataatctcttattctgtttagagaagtatttgctcgagagcctctatatataagtaatgttcgaccatgagaaatggcaaaaacgccaagcagtgaaccaccacttgacattttgttagttgtagggaaggaattccaaggtaactatcgaaatcattagaggcaggtggacatgcgtatccattctcaccgagcataacatgtttggatttccattgtatggattcgggacattctttgcaaagaatcccttactcgggtgctaagagcagttctagtggaaggaatttaggagttgttcactaataaagtggatcttaatttaactttttagctaaaataaaaaatcttataaatagtcaaaagtaacaacggtactttattttatttgttatttgttatttatttaaattgtgatcgaatacttttaattaaatatagtatttaaaaaatttaaacaatcattaaatgtggtcttgcattgaagatgccctaaatttggacttgtaaagttcaagtgttatgtacatggagtatggatgcccaattgatttgtggttggacaccaatcctctttttcacgtgtcaaaaaatacgagcaagtagaagattttttaaccgcaaaacaatgctggaatggaaggtaaaatatgaagtaatagtttaataatcatttttaggatacgtagatgggttggacttggagagacttgagtaggtggtttagactttgatcaaatcactattcgtagtcatatagtgagtcttgtacatatcttatttcttttttttatctaaatataacttgctacatttctcattttctattagccattttggaagttttgtgccatcatcttatacaattgattatatacatgcaggcctagccactaaccaaaattgtttatttccatcattagtctgactttttcttttttggacattgggggattttaaattcagacagatagcgcctatatatgaccacacttttactgacttgcctcaagtgctatctctcaatgttattctttttatatttaatttttcattgattttccattgataatttgatcgtctttgcctatcgattgaaaacaaccctactagataacgacaactttgaatatgtggtaatacaatatgttaattttatttttggtatatttaattgacaaaaatatt

SEQ ID NO: 304807 - DNA, 2326 bp, Cannabis indica
ggactgaaagagcatatcagtgcatcaggaacctatggacaatggaggaaaagtcaaaagcatccccctactaacttaagacaaaaacttaatgatcagcacggtgacttgagaaagcacttggaaaagaagaaacaagagatacatgtgtcagaaggtgccctgaatgaagcaatcttggccgagttggcgatcctctcccaaagacatcgccacggtctcacgaagacagaagggagatgactcagagtctgagtgcaaagactgaaagccctgtgtcaggaatgtcctagaggcagaactcccctaaaatttcaaaatgccagaaatagcaatgtacacgggggactcacctcagcgaccatatatcttgatttaacatagtaatgagcgttataagagtcagcaatgatgcaaagtgtccgtgcttcccactaacattgggtggatctactgaggaatggttcaaaatgttagaacccatatatgtaaactattgtaacatgttgcaagtcaattttgacgaaagtttgtggcagcaaggatggttaaccttaaagtgagtgccttggccaatataaaacaattaccaatggagacattgaagaatttcataaagagattcaaagaggaggcttcgaagactaagaaggttgacgatggacaacagttagccctactccaagctgggatccgtaacgaaactcctttctagaacgagttacaaaaggaaggagcagctagcctccaacacttttagaaaagagtccaaaaatacattaacctagtggaagcatagatagtggcttacggatacccaacgggattgtcaggataagcaataggagcacaacttcctagagttgcaatcctgctgctcctcaaacaagcggaatatagttctccacaagttcgagatacaaccgaaactataccttggctccggatttttcacacttaaggccctcggtaaatatttcctcttggatgagcgttcaacttccaacgcaatctgcaccagccaccagagagggtatactcccaaatatacatggggagaagacaagagaaaatagagaggatatactcccaaatatacacaatacactgagctcatagactcttaggaacgtgtatattttgccacccgacaaaatacgtattatcgaaagcctcctcctttgtacaaagacagctcccaaagggacccgagcaaaaggtgtgactaccacaacgatattggtcataccacaaacgaatgcaaaaatttagaagatgaaatttaaagcttaatctgatctggccacttatatgagtggatcaaaaataggttaccacacttgaatcgagtccaaatcggaggcccagttcctcagggaggaaatgtaatagcgcctgagggttagatgcctgccggagggatgccccaccagcaagcgcctagattgtcacctcggactactaggagagtcgctatgatctttggctgtcctcatattggaggaacgactagaaatgagctaaagcattatgttgaggccctaaaacatgacaaggaggtatgggaagttactcaactttcggctcgaaggcccagggtcatggaccaacccattaccttcatggaggaagatgcaaagccagtgccttctcgcatcatgaccccctggtcatagagacccccattggtaataaagtcatgaccaggatattagttgacaatggaagctccgtgaacttgttattcaaggatgctttcacggccatcaacctcactaagagggatctttcccccaatggtttgcaactcacaagatttaatgggacgaccctcatccctatgggaaaggttaggctctcgttaccttttttcctgacaccctcaaagcacgttcaaatattgcacctttgtagtggttgactgtcccactgcctacaacaccattcttggcaagctggccttggtcattttggggcaagtacctccatctgacacatgtgccttaagtttcctatgccggaggccggagtagaaacggtagggggaatcaaggagaagcaacaaaatgttataactctgcactacacttgttggtcctaataatatgcaggtcaagacacatttttgcagaagaacaggacgagttagaccctcgaattggctttgaatttgtgttagaatccatggaggacattgaagaagtaagggtgtgtgacctcaacccgtttaaagttattcgcctagagaatagcctagaccggatgagcgcaataaaatcgtaggtcctcattccggtcatatcccgagtgccctaaatgtaagaag

SEQ ID NO: 304808 - DNA, 1098 bp, Cannabis indica
cctaaaataattttggaagttctaaactttttgctgactgacgaggtataatatagactgaactccatttttaaggctaaagatctttgtgtaggggaagtggagtgtgttttgttttgaatatgattactgatctacattgtatttacctcaatttaatcaaggttcgcaatcaagatgttgttttcggccttgctgttggcatcgaaggacgcgaactagcttggtcatggcttaaggtaataaattaataatcacctttttgggtttacaattaattatattcatgttactaatgtgcataagttataccaaccattctagctactgaattgaaactaaaggaaagaaacaaaatcattgcagtggtgcacataatacctttgatttaatactaattttaagtttcaactttccatttaccataatccttgtttggcaaaatacagtaccttaaatctgaatttgaccaaatatattttcaattttcatgcctcctttatatatttgaccaaatacaaagtccaaggtactgttttattgatagagaagttagaattggtactgaaactctatatggtacccttttcttggaaagagataaataaatatataaattaaaatttaattatgcttctcacttttcatatcatcataagcatgtcttccgttatataaatgtaggataattgggagcacatctcagaaacctggggttctggatttttacttactcgctttgtcagtgcaatcgtctcaccggtttgttcttctcactctctctctctcctcttcaaactcatatgctctttctttctctctaataatggcggttgtgtattgattgatattggaagctaataaaagagagagctttagaaagagaaaaaaagccacacaacgaagaagtactacactaccactactactactactacccctcttaccaccatttccattactggaatcaaactcaaaacccaactctggattttccatatgtgtatgaatatattctctgttaagaagagtatctaaaaccatatatgtaaattcattacgtaccttaaaaaagaaaaagaaagaaactttgctcct

SEQ ID NO: 304809 - DNA, 3470 bp, Cannabis indica
aaataaatatgaaaaaaaattaagtttcaataatacaataattagtggactttggattagaccttcacatattggacctaaataaatataaaaataggtatttttataatgtgcagtgcagtttgaaccgcatattaacaattcaaaaccgcaccgcactgcacgatttaggaaaaattcaaaccgcgactgcaccgcaaagaatttcaaatcgtatttttttatggtgtggtgcgggcagtttgaacggtttgatgaacacccctaaatttcataatagtgatgaccaattatcctttcattaaataggaatttgtaatgagatagactctactagggttttacttctccttagcctctacttgagattcccttctgatgaagtttcgccacccattcttagccttagctctgattgagctttgattattcacacactcattttgatttcagtagtgatattttttgtccacttgagcttttcttttcctttctgtttaaaaccttttgtggttgcaggattatcagagtctatagggttgccatggtttgttggtcgtctgctcttgtattgcgtcacttccaattactatttaagtttgtagtgttgtctactctatttttcagatttcagtttgttggtggctaggtgtttttgggtcgttgggtctattacggaaactgttgtttgaggttaggacaatggtagttttccagatccttgggggcagatcaatgggacattggacaagtcgatgtgggagctttcggcttctccatcttgattgcaagggtgagtttgggtaacatgatttgcttagtggatatatatagattagattcttatttgatgttattttaattggatgttgttgttgaacttgttatgctttagaattttcatttaattgttagaatctgtagcttctaattcaaagatacacaattaatacgtaaaggcaaaattatggtatttttgcaaatttagttatgcgtacacggctataaatgataaaaataaaaaactagagtctactttgactcgatccaacccaacaccacacacacaagcaaaataaaaccctagcctaatctgagtaaacactcaaaatgttcgagattcaatctagaacctcattctccctcactgagagaaccctagggttccaaatcagaaatcacatcaaatcaaacacgaaatccatataaaaaatacaaaccaaatcaagaacacaatgacatatacacaactacacaaaataatgagagctatggttctaggaaacaaatagaaagtagattggagacacaagggtttgatctcggagttcacccttactaaagggccatgtctccgtcaagctcgcctcaaagtaaagtgacccaaccataattaaagtctatgatccttacccaatatgcaatgctcacttactttatttttgcataataggttctgttcactcattagttgcaaacctctttcaccatgtgtcctagccttctatgtcatagggtagctttacaatcctcaagaaagtttgttcctgtgttgtggcaattggagactagttccccttttagatagtaaagacctcattccttgtagcccttcattatgctcatagagcccttccttagtgtcattgtacatatttcaatctttctcacaacaccaaggtgctcttaaacacttatatatatatattaagtttctggctaagttaagtacaagtcttacccctattaaaaaccttgccacaccatcaaatactctaaagtgtacaatacctgaaccctcaatgtaacatgtttgatgattgcctgaaaaggcctttccactcatagattcctcgaaattagtaagtaatttatcattattcatgtgaaaagtacaatctaaatcaagaatccattcatttttaaaatcaaaggcatcaatataaatttttccacttttataactatcacttagattggattcttggtgtttttcttttattgacgctgaaaagcgcccaacaccaactcgttagattggcgagatgaataataagttttaagtaactaatttagagacacaaaagttatagtagttcactccccatgtcgtgatggtaatggaggtacgtctacttcgagcttttatttctcacgagatggtaataccagaaaaaggcaaagtgtttaagctctggcttctagagaaagaaactagaaagagatgctttgacactatgggaagttttctaaatatgaaaaatgagctaagggagctctccttttataggtgaaggaggtccacaaaaatagaagaaaaatacaaattatatatttttgaccgtagatgatgatctaacagtgaaaattagcttctaatggtaatagtgattttttggagctcggtgagacccgctagaggtaacccggatcttattttgtaactcccttgggggtgaaatttggtatcgatagattcagaattgtgattgacatgttagatatggcttgatagatcattaaaataaatttgaaactcagttgaatcgtgtcaattggatcaatattgagtgagttatgaccgttttactgaaggcagtacatgacccatcgcctaggttgatatccagtgcccaggttacatatgacattaacctggacgttgggtaagtggaaaaacgtccaaggtatgtactttaagatgcctaagttataatttggcctcacttagtctattctttttgttctggcgaagctggtcaccagttctcaaaaatgcttttattttgcgaaaatgagagactcgaaactcttcattttcgagtgagtttgccatgttggaaatgagaaataagaagtcatgaatttcacttttctaacttcatggatcttagttattgttaaaaattagacagatggtcaaaacgaaattagaatcggataagcatagcccaacacactaggccatttatcaatctgggcgctgggtacttcattttcgagctctcgggatgttatttcggtacttccaaggttcttgaacttgaggatgaggtcttctaccttatttttcacaattttgaattcaatggttgaatcatatttgacatttgagcaatcgaaagcagcgcaccagattgattgttaacttgggcgctaggcccagcaacagataaccttaggcgctaggccctatttctaggacctcaggtttgtggttttcaccccgagtgtaatgccctaaacaattaggcacgctacccaaaatacttatgaaaccctaatccccctaatcgggattagtaaacaaaataacatttaaacttttatactaaacagaatgaaaataaaacttgtaataaatttaaacttttaaacagttgggatcccaaaaaaatatttataaactttattacaagtcttttctttctagccgatctaagcagccaaatagaattcaaaagttcaac

SEQ ID NO: 304810 - DNA, 3467 bp, Cannabis indica
cctatagcccattttaactcagggccgaccctactcttaaataacgtatatttattagtttaactataattatcacttttaattttacgtttgagattaactacacattgttgtgcagggcattattgatggtgccaaatgcaaaaaagatagaaatctttaagtcaatggaagagtggggaagagaaaacattttacctctattgaagccagtaaatcaaagttggcaaccacaagattttctaccagaaccaacatcagaggggttcgaggaacaagtgaaggagttaagagagagagtgaaggaagtaccagatgactactttgtggtgttggtagggaatatgatcactgaagaagccctaccatcctaccatgcacgaattaatgggatcaacaacttccacgacaggacaggtgcagatgagacgccttgggccatttgggcaaggggttggagtgctgaagagaatagacatggtgatcttctcaacaagtatctttacctctctggtcgagttgacatgaagcgaattgagacaactattaattatttgattgcaagaggattggtacaaatttttgttaatgtttttgttataatgcttttatgttttgcgtatatttattggttaaacattaatataaaaaccaacacaaatattaaatataattatgtataatcaataatcttagtatataattataaaaattacaagatttactttaagcaacaagtttagaagggtcattaaaaaaataaaaaatgttaggtgattctataatatacatcttaaaagggttattttggtatacttattatttatgacgatatcttgaaaaaaaattcagtcgatttattttatttttgataaattttaattacatacataatattaatctaattaccaaaactcttattatattaacggaattttaaatatttttacaatttttttaattttatttacagaaaatacagtctttttatgttgtactcttgttaatttattgttgattttttattatctgtatgttattttttgttgttgttttgatgttatttagatattactttaatgtaattttcttattgcttctataaaaaatcgtaaaaatataaaaaaaattccttaaacgtaaaatattttttttttttttttataaaaaataatgccttatgtataattatcccttttttttttacaaatacatttttgaaaaatcacattactcattttaactttcacattgacaagaaaatactttaaattaccaaaaacccatcattgtacttaaatttttaattctatgtctattttttaattacaaaaacttaatgttaatgattaactcacaattttgtttatttattattttttttgtaaggatgttggtatcggaaatgattcatacctattcgcaatctacacatcatttcaagaaagagcaacatttatatcacaccgaaacacaggtaaacttgcattcaaatatggtgatacaaaactcgcccaaatatgtggagtagtagctagtgacgagaaacgacacgagactgcttacaccaaaatagcttcgaagctcttcgagctcgatccaaacgacatggttttggcatttgcagacactatgaagagaaagattagtatgcctgctcacctaatgtatgatggaattgaccctaatctatatacccatttcactaacattgcctcacgtgttggggtttatagtgtgactgagtatagagaaatattagaacatttggtggccaaatggaatatagaaaagcttattgggctttctagtgaaggaagacaggcccaagagtatctttgtgggttggcccatagagttaaaaggattgaagagatggtcaagagtaaggcccaaatgaatgattcttcttccattcgtgtaagttgggtgttagatagagaaaaagtggttcaaatctagattatgatatgtataagctggtatttttaatatctgaacagttataattcattatattttatatgacggtgtatattgtaattatttaaaatattttagtaaaattttaaaaaatttaaaataatttaccgtacagaaaatagggttcaaacggtctattattttacattgtttgaatcttatttttagtatgtaagttattgtaatgtttctaaaaatatattaaataattataatttatattgtaatataaaataattattattaaaattatctaaatatccataatttttagagtgcaatatagacttagtaaaatcttaagattatatatgtctacaatagcttagtgttacctttcaaaaataaaaatgtcaaaaactacttctacttcgtttctttagttataatatgtaccataattttataagtaataattagtggaaatatatattatgtcctatgttactatataatgattctcttttcatttttttttttttttttgaaattttttctgcatagtgtttgaatcttttgacgattagtaaaaaaaatatatcgtctaaaataataataataataataataataataataataataataataataataataataataataatggtaagtgatgggcacccaaattttgtttctccataagaggtcaaatttttatggggacatattttatgaatgtgtctaggcgtttttattttattttttcaaatatttatgactaaaaaggatgtgttgatgcactttttatttattttggtattttaaaaaaaaattaatctatttttttttcttcatattcatgtttgtataattatttaaaatattcaacaaaattcttaatttcacatgcgtataaaataaaatagttacacgtgcaacacactgtttgaattctatttcagtatgtaaatttttctaaattacttaaaattttgcaagatgtcttaaataactataacgtacatgaccatgaaaattatttgactaaaattatttcgaatacgaaattagataagattaaattagtacatattttttttaagtgactacattgtagaattttttaaatataataaataaaataaatcaaagggtggtgatggtggacccttttaggctaactcctcccacgtgcaataatgcttattttggcatcaaaccttaatagtccttctctttctcctttcttgtacggtgtgatgcttcaatcaactttcctcattaattaattaatcccataattataattagggacctatttaaagaaattataataatgtacaccataattaaactaattattcaaatcatatttttgaacccttaattttttctaaaaacttgccaaaatatttagtataatttgcggcataaatacttaagttacatatttagaacttctataaatatttggtcgttaagtgttaagtaactatccacatgtcatttttttattgatacatttaaattaatttttt

SEQ ID NO: 304811 - DNA, 786 bp, Cannabis indica
cgtggctttcttcgtagccatgttaagatggccaaactattccaaggtttcgttgaagccgacgaaagatttgaagttgtcgttcctagaaatttcgccactttatgtttcagaatatcaccatctgcaataactaataacaatgctatactttctgagattaatggctccagaaggattagtgatacttctcccaaaaaaatggtaacagagaatgaactcaacaacaagctgatggactccattaaccgttcgggtcgggtttacatgacccattcggttgttggtggaatttttcttctgcgtttcgcggttggtgcgagtcttactgaggaatcccatgtcattgaagcttggaacgtggtcaaacaacaagcagatattatactaaattcacaccattccgagttttgaccgagttacttatgagtttcttatacgtatcattttttttttttgggtatgagatgtatcttttttgtgtacaatcttttcaatgtgttttttaattctttttctttatcaatgaaaataatgttcatttttttttattggttcacgttacatttaaaaaccttttgccaactggggtctatataaaataaaaggattatctctaaaaatacataaataaaatggattcaatcttgaaaaatttacatagactaattaaaaatttaaagaaactataaaaaatacatgaaaacggaattttttttttattatttttactctttgaacttaatttcacaagacactattttttttgtataaaaattatatttt

SEQ ID NO: 304812 - DNA, 1861 bp, Cannabis indica
atttggaatatcaaactatagatgtatgttgtttgtcttcttttattgagttaactcataattattactaattttttttgttctcacatcaaatatttatgtgaatatggcagaagtactggattgacaagatgttggataattgctttatggtgtatgcaagaaaactgtcaattacttggggagaagataatcgttattggacatggcaacagcataaagacacaaggtgataacttttgtcccatattgcccatatgatttgtattctttatattacacacaaagtcttaacccatgataccatcttggtaatagagtaaatgttgtgtttagtataattaaatttatcaaaataataataataataagtggtacagtggaatttctttaactctcttattgttaactcttcaatctgtctaattaatttctatctaattcttctgatctatatatttttattatgaaccattttactatctatacatattctttttctcttctctaactctttatttagtgtcgattatttttttgtacatttgtaagaatccaaaactataccagctcaaagaagtgagatcatgtatgtggaagaaataattatacaccactcgtgctaggatcgtttggtaaaaaattgtttcaaatcaaattcaatccaataattgaagttttttttttttctaacaaaataacagatgattaacataactaatcatgttaaaggtagttataaatatgaatttctccaacatataaaaagaaaatatgatctcacattgttaatataagaaaaaacaatagataattacataaagtattatgttttgtaaaaatttataattttacgtttaaagatttttttttaatatttaatatgatttttttataaaaacaacacaaaacacaaaaactaaataaaagtaacagaaatacttactatatttattcaatcaatattaacaaaatttataaaatgtacaataatcatatggaaattttaatatttatattctgataaagctattatttggtacaatcgatcattagttaaggaattcactgataatgattttaattaataaaataaaattttgatgttgtacagtgaggagttaatcgaggtggctcgacttaagcaagtgtgctggctagaagtaaatggaaaatttgagatgagaaagctgtcacctgtaactttgtatgaagtagcatttgtggtaatgatggatgattcagctaatggttggagttttcctgtaaacatttcactgtctcttccagatggaaccaaccaacaacacaaccaagatatgaccaaattgccaacaaaccaatggactcacatcacagctggcaagtttaaaacatctcatcataatgatcaatttggggaggacatccacttctctatgcataattatgattcaccctggaaagcaggcctatccatcaaaggtgttttaatacagactaccaattaacaccattaattatattatatattatgtttggttcatgaaacaatttatagggaaacttcttgtaataagaacaacaacaatgtttatgatccatgtttatttccaaataagatacatgcagtcaattatagtaaaaaaggtaaaagaatattttgagtagaactacagatattattgtgacaaaatgttctatcaagtcctgaaacacaatgaactcaaaccagcaaattaagaccaaagaaagtaacgattaaatatagaactcgaacaaacaattggagtttcctttacctttactttaaaaaaaaaaaaaaaaaaaacgaaaaaaaaaaaagaaaaaactaaagtaaacaaagaaaacaaactactac

SEQ ID NO: 304813 - DNA, 1006 bp, Cannabis indica
aattttttaactattttagctaaaaaaaacagtgtgtagttggaaatgatatgcccccaactctaagctcctttgattatgacatgggcatggcccatgttataaatgggctttccctgtcatactcaaggaccaatgttctctttaaatgttggcatctttacatttacacctctatacttctctgttcatacatagctaactaaataaagtgttttactcgtgaactatactaccatcaaagctttagttgctctccataatataattattgtggcttctttcattagcttaaatcataataaacaattcaacatctaaattcgataatatatcactttatatgtgttaaatatttagggcaaatttttatttttcttagttttttttttttttttgggcaaaagttttgcaatttacatatattcatgagatttgagaataaattaagccgttttttttttttttggaaaaaagtgatatttattcaagacattgcataaaaactcataaattttttcatttccactaaaatttagtatacgaagaaatgttgctaaaatgatagtaggcataatttaataattgtaaatgtcctgttttctaattttggggttgaaatcatagatatgaatggatgaattatcaagttttgtgcagagaatatatgtaaattgtttgtaatgaatgcagtggggatgtcctcatcaaattgattataacatattttttctttgcaaattgatcagtgatcatcatcgcatatcaaggaaagatgctttacatgatgttaccaactcgaggttctattcataattaatgtacattcatatataaatacaaaatttatataaaagctagtatatgttaaccaaaccaaacatacaattttgatttatatgctcagatagttaaaaaaatcatacattatacttatatatttatatactaagttaatattatttttttagttttattttaattatatatatttgtataattaatt

SEQ ID NO: 304814 - DNA, 1998 bp, Cannabis indica
ttaaaaaaaaaaaaacaaacattttctattatatcaaaccaattttatatctctttgacatgttttattttttcattttcttttctttataccaaatatagggttaatgttaggttgttgttaggttattctgatgtttgtgttacaagtcgaaagcatagaggtttgcattggaatattttgcaatgttggctggagttgaatgtgagggatggggttggggttggggttgggcttgcgcttggttaattccctttatgtatagttatagacaaacacaaactttttttgttacagatctagaaattgtttaacatttgggattagaatttagtgccaaaagattagtgtttaggtgatgctttgtgcttacagagggcaatttgaacactctaactcattgttgttcttcaagttttcctatgcattttctgttttattttctcttgaaaatttgttctataacccttgcttaataataagaagaaaggaatgtagagatgaacttgtaaaaaataataaattgtattttcttatttttttatgcagaaattttttaaaaaaaaatgtaatatttataattctttttaatttcttattatctaacacataaatactttttataatatttgaataatatttattaatttattaaaaaaaaaaaacatgtgcttcacgtccagctttgctcgactagaaagaagttttcattgtgggtcctaatatcagtctattaatgttggactaaaatatttttctaatccaactttgtttgactaaaaatacccattttatattcttggatattatgtctaacactaaaaatagaactaaaaagaattatcaattccaattttgatggacttaaaaaggagtttttgtagtagtgtcaaatagattgcacatgtcactgtgattctaattatgccgatgaccctgataaaagaagatcattgacagacgacatattcatattgttgaagggaatatagttagttagaaattgaatttacaatatgtaatggcattatccattacagaaggagagtatatggcccttcctgaagctgccaaggaaactctatggttaaagaaaatcatgattgagttgggatttgatcaaaaggatgtaactgtgcactgtgactctcaaagtgccatacacttagctaaaaatactgtgtttcatgaaggacgaaacacattgacatcgaactccatttcttaacggacatagttaacaagggacttatatcaacgttgtaaaaattgccacggagatcaaattgtctgatatgctaactaaagtgataacagttagcaatttcaatgttgcattggacttgcttggtatcaagacttgattcctcgaggtttgtcaaagtagttgctaatttacttgtatgttacactcaaaggaaatagaaaccaaggtagagaattgtggaggattcaatccctatttctctggacttttgttagacttatctattcagactcttgttgcatctgaagacttgtttgttacaacaattaatcttagtccaacttagctcaacggtttgtaatagattatgtttattctgttgcaacttatttgagctcattcactttctttacatatatttaaactcttaacttgatcaactaatagttgaaacaatgagatttctagagagaaattcagacagaacatgtatatcaaagagataattaatctgtaatgggagcttgagtagttcatttctcatttgagtatgtaacacattttcacatagtactatcaattccactcaagacactgctttggccttgaagtaggactagtcacattgactaggatctgaaccaaataaaattggttatgttcttatttgtgttatcttttcttgtatttatgttttgattaccaatagggttgtacatcggtcggtttggacaatttatcctatatattttctaatccaatcatctaaagttcgagttgctaaaatttaa

SEQ ID NO: 304815 - DNA, 1053 bp, Cannabis indica
ggtccaatctgtaacttttgcaaaacacagggtctaaaatggtatttacccttaaatttataagtacttttttagtttggacattatgattatggatatgtattatgtagtaagattatggactatgatactatgaatgaagtatggactatagtttaatttggacataattattatggacatatagttttgaactttttgcattgacttttgtattttagatttgacattatttttttttccttttaatctaacgaatgtaaattattgtattatatgcttagtttaatatatagagaaaaccatatagaattttattcttttttatgcccgggtcaacttgtgacccgccaacccggtcttctcacgagtaggtttcagattctattttcggaccccgaaactcatgaacccaaaacctggtcgatccgcttgatgttcaatcctaccttccaagttcccctctttctttctaggcttttttttttttgaagcacctctttcttctccattattgatcttcaatgaagcttgaaggcaaatttagaggcagatttaggttatggtgactttgaatgtctgttggattattggaccgaacaggcaaacaagggtggcacttatagtcatggtggagatagatcgctagagattcagccataggatatgcaactgcgactaattgtgacagaggggaggtgtgtagggtggtgagattgaacttgatagagtgagcgtgttattgagagggaagaaggagagagaattaggtggtagcgatgggttcgttaaagatagccgatgaggagaacatgagggtcgagaaggagggtttagttcaatctttttttttagtttgatacatgatgatgatgatgatgatgaaaataacaattaatttataatttatatgtatacacatattcatttgtttgagatgataatgatgattattgtttcaattcgattgatatttttttgagaggttaaattctttgggtttgggtttagttggaaaggggggattaagatttagttttatttaattttttt

SEQ ID NO: 304816 - DNA, 2636 bp, Cannabis indica
caattatacacattgtaaacagaggggaaactttccctcaagcttatagccctataaatagtgatctattctcactgggcgaaaggtcgagagaattatcgaagaaagtatactcagagatatcgttgtaagagctttaagggaaggatcactgtattctttgtccttaagtcaataaaaatcaaggggagtaggctattaccgaactgctcggggccaaacctctttaaaaactttgtgtcctttatttattttattatattacatctatattatatcacttatcacttacaattaatactcattgtcattggctaaaagtaaggtcaacacatgtcaatatggtgggctaagaagttaataagatgggattcataggtggacttccataagaaagcaaggccacttttatttccttgggccggtataggaaaggaacactcaaaactcagctgagttttgactcggtccacaacgtcattgttacacatagtttcacacagaataataaacttggtcttcttttgaacacaaatgttagcaagcaattgaaaagcccgcgggttatcaagcctacgataattccaacttatggtattcataatgattggtgggccaggacaacaggacccacctgttcttcattttttgaaagcccaataatattattagtatgagaattatttagcatgataatacaatccccctcatcaccgttggaagtagttggccctttattaaaaatattgtcccccctttttctctttaaatcaaccaaagtcatgtccacatcaaaagtgaatgtgatctcattgtcatgtataaccaaacttggttcattattagcattaacaaccttttgaccttcgacccatgaatcgtgggagacttgattatgcatttttgacttagcatgggattgattcttctgtccagtcgatccctcaaaatcatgcatggattgtgggtctgaaataaatgtaggaggaggctgttggctggtgttgttgccggatgccctaggtggtttttcggtaagtaaccaaggggaggctgttagaaagctttgtcttatcattggagcatgcatatcaatgctatatagcttctctatctcatcaggtggtgtatcgtaaagcttgctgcagacgcattccgagtgacccatataaagcaaaaagtaggaactttctcatatttgaagttagcataaaaagcatctctgtttttctttcgaaacttcatacgccttttaagaggggcttcaacatttaattgaacacgaatacgtaaatactcacgccaaatcccttaaaaattattaggatctgaatcaagaaacgaaccaatataattgctagcttgacgtatcgccctttccgtcttaaacggggactataaatcatggatttgaacccacatatcaagcttattaagagcaacagttctgggattgtctccttccttcaaacattcaataataaattgcttatgatcatacgtccatgggctacccatgattacccgttgaatatcgatttcatgataaaacttaaagagaaatccattttgttctatgatcttcacatacatccctttccctggtttccataggtatgctattatgttttggaagaccataaaatctgatactttccctgatattaatcttccaacaaggcaccatcgatcgtcgaactcgatctcttccacctcttcatcttcgtacacaacttcattatcttcttcctcgtcaaggtagatattttttaactgctattctaaatcttttgttaaaccattgcttgatgccatcgggggaatgaaacacacactcaaaattgaaaaaagacacactctatagcatagaaacgacacacatgttagaggacatgaccaactcacaattcaactttaaagagaagtttgtacgattaattaattttcatattgtccaaaaaaattaaaagcagttacatggaaggagacgaatgaaattccaaactgtctttctactgttctttgtaccgcatcagtagcactattgcgaacattttattgagcctctaatattgtgatgacggcccaaatttcattgatacatggcttgtacggtgtgactattaccaactaattataattgataaaagatatgggatgcggtatgaatcatacgagttagagtgtgtgatgttagtgatgagagaaggctaatcaactcaccaaaactccgcaacgtagcgttctggttggaattttcggccttccttcttcctttttttttttctacagtaagtaaccgttcgtttatttaataattgaataattggcattttaactttgggaattttgatactacttgctccttcaaatataacaattatataattacactcttttttgttaaatttgtgttgacctcacttttggctaacgacagtgagtctaaatcgtaagcgacaagtagtataatgtgtgtgtaatataataaagtaaatacagacacgagaatttcatagaggttcatccccgagcagttcggtaatagcctaatcctcttggtttgtattgacttaatgttgggttttgtgccctaaataaaaacccatttcaatataatcatgtttacttattaa

SEQ ID NO: 304817 - DNA, 2026 bp, Cannabis indica
caaaagaatataataaatgtaaagaaactagcgaatctaagaacatcatttcttagctcataaataccaaagtttcttaagaagagagaacttgtattaaagccatgaacaagtgagttaaatgattaatgaaattacattttcatgatccatatggcgtagaagtttaatttcacgtaaagtcctttttgcatctattctgttgtcaaatgcattaccaatcttcttaatggcaacctcctcatttgtctcggcattagtagcagcactacaaaataaataagtgagaatttagcttccttaatcgtatcaataggacaactgattaaaaacacacacacacacacagagataaggacatatttgactgttatatttaataaaaacatgtcatctaaccaaacactatattaaataatattagaaacatgaaaaggtacatctctaacataagaaaacaacaattacatttttttatctattacatgtagcatatgaactcaaaacttatgaatattgttaactgcacaacaagacagaccaattctctttatcatacagtagcaataccggaacaaaactagcttcctactttaggaaaaatagtattcaacaactgtaatgcgataacttgagccagctttaatattatccatcaaatccacactgagttgacaaaacatccaaatgatttttgaatgcaaacacatgcatcatgaacttcagtagttccaattctctctccctatagacttttaacccttctaagtactaagcaccaaaaacccactaatgttcttcaactcttcacaatcaaaaaatgaaaaaattatcaattcacgaaagtcacactagaaaattcatccccatagctaaagaaaacagcaataacaaattaaacccataaaagacaagtacacaaagcaacagtaccagctaatctacattggcctcgccaagattttcaagaatcaccataactgaactagtgtaattcccaattcaacaaaataaatgtttggtatttctaaccagaaaccaaaccaaatttctcaaaaacaaaactttcggtttcggagtagaaacagtagagctagaagtgagagataaaaaaaagggaaaaagatctgaaacacagaaaagacatcttaccaaacaattccataagcacctctaccaacagggcgaataggaggaacgtacttttttgaaacttcaaagaggttaccgtaaatattgtactgaagataccgtccaccatgagtaggaacccctctgatgtgatggtccgcagaggcaacaccggtatccatttggacccgagacgagcacagatcaatacgaccgaattgggcaacgacccaagtcaagtgagagatttattaaggagaagaaggggctgctaatgaaatctcggaaggagaagatgtgtcggtaagcataaatcttttttacaaaatttttatttattttgtgtagtcttttaaagaaaaacaaaacgaatttcttcgaagaaacggggtatgtatgaatgtcaacttagtgccattgacagtggcaagcgtgtgtatgtatacatatatacatacatacatacatacatacacacataaatgtgaggtatgaagaactttcaattcaaaggagactttttgaactggaaaagtttgttgacccgtgatcatgacatacaaattacaaactgagttttcttcctttgtccctaattattttctaatatataaattttaatttttaaattactttcacgacaaatttaatttactattactgtgaaaattatattagtcatcattgcttcaaagcttatattactatagcttttttcaagagtgaatgtttgaatgctatttttgctatttagaagaggtgtggttgttttacaaaatgtatgaaattttattttatatcattttgtgctcgagagtaataaagtcactcatattttgacaaaatttaatcgacagtattgattaggtatttttttttttttatttttttgaga

SEQ ID NO: 304818 - DNA, 7220 bp, Cannabis indica
gtctgggttcgggttcgagtctgggtctgggtccgggtcccgagtttgggtcccgggtttgggtttgggtcggagattggtattgactcgaaattctttgtaaatattataatacaagctaatacagaccatttgttatgtattaaataatacaacatacattgtattaaaaattttggtcgtaataattaatacaatatattgctttattcaaatatagtattatttattatttaatacaatacgactcttatacggtgtaccgaacgagccctaaaataatttcaagccaactaagataattagctatatcttaatgtgtttaatttgtctttcttgcaaactttgccactaaaatatgtggttcttaaactaattattgtctatagttccaaagagaatcttgatgaaaaaaataagaatttccaaaatatctttccttaagaaataaaaaagcttctttttcaatatctttcacttttccaatagtcatattcatcacgactattagtgaaagaaggtgtcttacttgtctaatcattgaaaatgaggcaaaaggatcaacactttattggtggaaatcttcactaacaagcatataattaaaacaacaatatattataacatatttgaattacacttcagttgaagatattattacatagaatcacattactgaataaataataatgaggacttaaatgtaggaggaaacaaattctaaagaaagaacaggctttacaccaccattatttaaaaatataaaaccattaagatcatgaccaccaccatataacaatatcttgattaaattactctcattttctaaaagagatcatttttctgctgcctatacttgatgtcttcctgatcttgagcttagaacgattgatataatccgcgaacatgtcattagcatcagttttcttctctgaaccataaaattcattttctttggacataatctccatgtcaccatcaccatcaccaccaccactacttgacatagctctgatcttaatcttggcatggtttatgtaatcagaaaaggccttgttgacatcagaacctgatctgttaccttgtctgtgatgagcatcatgttcaacagcagaagcagcataatgtagcatctccccattggatgcttttgcttgagattctagctcagccttgttcttctgctccgaaaaaccaattggttccgattcaggcacatgtggtgagtgatcgttttctctagaacctgaaaaacaacagaagattttctcacaaacactcgtggtgttagagccattattttccatatttaaatgtataagcacaatagactatagaggtgagtatgtttgttttgtgagctggtgaaaatatgagtttgtgaatgccattttgtgagagccatggagctcattttataatttgcatgaaagcactgtaaagaacataaaaaaatatatttataattatgttatggagaatcttcctttgatccttgttttaaaactagttaccaatgaggaaagtttggcttagattcctataaaatgaaaaagttggccattttttctaaagtgatgtgatgttttaagtatcatattccctcgttttccctactctattttctacaccaactaaaagcttatcaagaaaatggacctaacacagctcaatcaattgaaaatttacatttttgttagctgttttgtgctaaatgagaattcaaagctgagttttcaaaagaaatggaaggtggtcttggcaggcagagaagacttgggaaaaagtgtctggaaagtctataaggaagaagcatggtcttctatttggttactttgggcatagacaagtcatgattctacaacttttttatttttatcattgaatttattgctaattgaaaaaaaaaaaggacttttaatttttatcatcgagttttggttactgtattgccatttcaatttggtcatgctccaaaactcaattgaaataccaactatacgtaactggtaacttgtgctcttcttgaaatttctagacatatatatacacatattccattcaagattcttcaaaacatagaagtgtacaccattggtccattgtaagtaagatagtatcatagtacctagataaagttacagtttggcaaagctttcaaaaaaaaaaaaaaaaaaactgctttacaaaagggtttccaattaataaagctgtttggtaatagacattaaacagatttttaagggtttaagcaactaaagttagcgtctaaagttggtacaatccaactagaagaatctataattattttatgtattacttatctactatatgaattattcaaaataaaactatttaataaaattatattacaattatttctttcttttttttgaaccatataaaaaaattatttcaatcttaaatatgttttattttgttttagaaactattttttatttaataattttatcagcaaaaccactattagagtttatattatttttgtcatctcaaccaagcacacagcaacttcatgcttcagctgttttttctcaataacacagttaaagctgattgttgagtaaattacaactctatggaattgaccagatgatggctctgtttggcaaagcttaaaataagttgtttttaacttaagagaattaaaaaggtacttttgagagtctttaagttttaaaaaaaaataaaaactcatcacttttttttttatagaaactagaattcgtagcttgtcaagaaacatcttatcattattaagaatgtatataagaaaaaactttgccaaacagggaagtacattcattcagtatatagtttttgaactgaaaaaaactctttcattcattttgttgtacaataaacattgtgtatatatctaataataacactcatgacatgcactagagtatgtaatgtatgtttatatgtgccatctatacttaacttattcaaccaaatgatagaaaatcacacaagtcttttctagaccaaatccattcgagaggcgaactgttctcaatttcttcctccaaagacaggacagaacatagtttttaatgttatcattgtttgcaaacaaacaccagtgacagtgattttctttttgtggagattaaacataagatattagagatctataaagggtagtgactccaaaaatgtgagtctttacactcttctgcaccaagcctttttcgccggaataccatgagccttgaacaaggaatagatgctgtaagtgatcttgagaaaaaaatatataatgggaatggaaaaggagagaagaacactgtttgtagccatatcagcaagccctgagttctgaggaaatactgcgagtgcaccgtggacaaaagccagtgctaatcccacaagtgatagttcagtcaagattgtcacacagtatattgggtatatgaatcccaaccgcttaggccaggctgcaaccaaaaagtggacaaacatggaggctgccgagcaaccaaaagccaaagaatcaaacagaagaaacatcttgaacgcctttttctcactcgaaacagctatgccttgctcattgtatccaccaggcattgtaaaggctgctgcaaatgtgactgctgctatgattgaggatactattaaattaatgcttgacatgtttgttatgtccaagggcttgtatccttgagaatttgattctggcccgtcttcttggtacttatctgcagcataaaattcacttgcttcaaacagtttactcttgcctttgtcatgttcttcaaattcatcaagttggttcgtgtcaataaacgcctttgcttcagcagcatctctgataaccttttgttctaaacttggcagagctcctgtgatctccaaagctgccatactcagagttttaagctgtcacaaataaaccttattagtaattagaaagaataacattttcttctcttctatgaaaatgaaaattagcttacgatttcaagctccctaagctgcttgcttgattggacgatgtcaatagtggtcattccagccttgttttgagctcctttgtcaactcttgggtccctagccagaatttccaaaattttggaatggccttggaaagcagctagatgcaaaggggtattaccttctttatcttgctcatttataagatcttggaaagcaagtgtccggagtaagaatttgactgcatttttcttaccactctccacagcaacatgaagagcagttcgatctctatcatccaatgattcacaagtatcagggcattttgtgactattgatctcatcacattgacatgcccttccttagctgcaatatgaagagcagacatgccattgttgtcatttacatatgtaatggaagaatggtttatctccaaaaatagctcaacaacttctacatttcccaagtgtgctgcatagtggagaggtatccaaccaaagtcatcagcttctaacattgaagatggacattttttcagaacatttcccacaaaatctgcatctcaagaggagataattttttaaagttagccaaaagaaatgcacaaggatgagttatttaatattaatggaacttaaactttacctgctcctgtgatatttagttcatatcttgaaagaggaaacttgagactaaggtttatatatttatcaatataagggattttcttccataatgaaggagtctttttctcagttgatttaaactgcttgcctataagaaatcaagtcaatagcttgctgtaagtcatagctaaacaatgataagaaagaacaagaaaatcaaaggaactatatgatcaatactaacttttatgtgttcgaatcacggctgcatgcaaagcattcatgccattccttcctacatacgagcacttgggggcggtctcaagaatatgaagagcaaccttgtaaaatcctctgtctacagccaagaacagaggagattccccaacattgttgacaaaacatgtcaaatctcggtcttcatcaatgatcaaaatcgccacctcataatgatcatttcgaacagcttcatgcaaagctgtgtcaccctttaaatttgacatccttagcaagctcctgtcagcttcaagatcttgctcctttgacttgtttacaatcaaccgaaccatctccaaatgtccaagccttgctgcaatgtgtagtgcagtgttgccttttgtatttgtttcatacagaagcgaagaattcgagtacagaacatcttctgcaagctttctctggccagattttgctgcaacatgaagaatggtgttgttttgggatgttacttggccaagatatatatttgaaccatcttcagtgagtttctcacatagttcactgcttccaaatattgcagcattatacagctctggatccattttttgttattggatcttaagcttgtattagtttcatatacattaaatcaatcttatatttatataccctgtattctctaagagagtgtctttgcttgaatttttttattatatttttgtgtcacaatatgaccaaatgtaatttaagctaaagtgtctctttcttccattccctctctaattccacactccactgaaaatttcagagaaaatgcttcaccttactaatttaataaaacaatgatgctgaataaaaatatacaaaatatagaaaggacatgtaattggctgcctttaaatttaatgagaaggtcaactcaaggcaaattttattttagttttcttttaatataaacttgtaactcaagcttagtgctggtatgagccattttttttcaaaccaaatgattaatatgcatgcatgaccttgctttactcccatatttttcatggaactcttctctcagtaacatcagaaagaaatatgtcattttttatatatatatattagtaaagataaagtgatttaagctgtcacagcattaattgcattaatttttattagttgaagcttaattctttggtatgacattgaagagggtttgaaaaaaaaaatggcacttttattattgtttttgatataatcacatagcatgttacaagtcataatcaagagtctttgacaaaatcaagtttattaaaccaaattagatagcattgggctgattatggcctagtaattctgaactgcctgactctggccttgttgggtttaaaatatgatttggtctcagtggtttgagtggacgtttcaagctgatctttacatgcatgcctaatctccattttagagtctaagccatgtgtgaaaacaataatgaaaaaaataattaaaagagtgctatttataataaatattttagagagtacttttcatggttcaaatggttgacttgattccattaaaaaaatggttgacttgtaactcatcatagagccatatatagcttagacttagagctctctatagcttaagggggcaaatgcccttcattctttctttttttaatgaaaattttattgcgtagtgtataaaattttagctaaaatgatttatttgccctttccaaaattttaaagttgacatatatattgttttaacttcaactcatccccatttctattttgtttagtgtggacttcataaatgtttgttttctctaaactcactttctaatgattaaacttagaatcaagctgtatacacttgatttacactttattcattataatataaacaataatcaaacacaaaataaataatttaattactacatattaatattattatataccaagaaaaatgtttaagcacttaatggtcgcataaatctatttgaaattagtactcattgcattatttttaaacttgttataaacttccatcttatgtccttcattaagaggggtttggatattatttttcttaaatttagattattttttaaatcacaattaatataaaaattaaaaaatggaggctatgttgaaaattttgtatctttcctagtttgttgtgcttgtttcattattgtttgccatgaaatgctttttcttttcaataattaaagagtatttatatgggaaaaataaaaataattcagataaatataataagaaaaaatgtagtatttaaaataaaaacttaatatatatgggattgaattcccataaaaaatactaaaattcatttcatatttatttttaaaaaaataaaataaatgaaactacaatgatcgtcggagttgt

SEQ ID NO: 304819 - DNA, 715 bp, Cannabis indica
tttttttgaatttgtattatcattattatgcattgaaaaataatagtgggactagtaattataccattttttgaatactatgtaaagtatatatagtcgtacccaaataatagtatgttatatatgattgttattttagtgggaaacaatgagtaacttcaatatataaatatacatattctaaataaaaaataaataaaaaaaggctaaataagtacaacaatcaccaattgtttatatgtgctcaattatatttatataaattggtatatatgtaataactaataataatataatgttgtagttaatgtagtgggtaaagtacagcttgaattgaaggcttcaagacgaaccttgatccaacaactccccaccttctttctttctttttttttgtaataacatatacaaataattaaatattaccaactaccccttgatttgtttgatctaaaaaccttatcttaaaaccacattaatggaaagaatttcgttccctaatcaataaacttattatttctatcgaaagaaaaagaaaaaacctattttattgtagaaattaaatcatactattcatgtcaagaaatagacatatagtatatacaactaacatttttagtaacattaatgttcaccaattttataaatctcaatgagcttaatgttagataaattaacaattaacccaagatctatttgtatataacatagaaca

SEQ ID NO: 304820 - DNA, 4370 bp, Cannabis indica
tatttaggatgctaataaacatacttgtgagtagatctaagatcctggtaaaataatttccaacatcgtcatcctcaccagctacggcttcccctactgttcgtagatataagccaaagcgtccaccaagcatcaatgagattgaattccggaagatgctgaaacgtactcgtgatcttgctcgtgctcttgatgaaggatacattgatgaggcgggtgctgcccagcgcacccgccaagcgccatgatcgtcatcagctggagtgctcgtggaatagggagtaaacgagcattctgatctctctccctcctaactaggaaatataggccaacacttttgtttattatggagactaaactccaagttggtgctttaagtagaattaaaatgcaacttaattttcctaatggtttagaagttccccgagtcgagcttagtggttgtcttttgttgctctagactcatgatgttgatgtaactctattctcttataatataagtcattttcattgctatctcaagcctaataattttcccgctttttacttcactgggttttatggagcacctaatcctgctaataaaattcactcttggaaagtgctacatagagttggttccaatgttcacaattccccttggcttataatgggaaattttaatgattatttaaatttggaagataaaattcggggggacacgtcacgaggtccttccactcaatttcgcaattttcttgacaccttcgcccttcatgctatcaattttactggcatcccttacacatggacaaataaacaaaagcagcgatccatactcaatagcacattgactgggggatttcaaattctgactgggattcttcgtttccaaaacataatcttctccatggcgattactttggctctgaccatctccctcttattctgaaccttcatcatacaacaactcttcacaatcctaacccgcggttcttttttgataaactctggatgtctgaatcgggttttgatgattgtctgcgtcatgcttggacatcgtgtcaaaacagtaatgatggtgacccaattacaaacataactagaaaactcaagcattgttccttacacctcgtgaagtggaagaagtcccttgggccttccatatcttcacaaattcgggatatccaatctagtcttaagaacgtgcaaagttgcactcatctgactgactatcagcttgagcttgggtgaaaacttgaaaacgagcttgatcgccttttgtacaaagaataagaatattggaagcaccgatctcgcgtaaactggcttaggcttggggacaagaatacaagatactttcaccacttcgcttcctcatggcgagcgaaaaacaaaattatctctctcttgcgccccgatggctctattgccaaaaacactgactcctttgtgaacactattgagcaatactttgatcaactttttgcaagccagaatcctgatgaagagctcactgatcgtattctttctagtatctctgagcgaattactgagttagaagtggaatccctcaattgtccctacactgacaatgaaataaaatagctgctttccaacttgcaagtgataaaacccctgggtctgatggctttaatggcactttcttccaaaaaaaaaaactggcatatacttgggcatgatgttcttttggctgcaaaaggttttttgaacggggatgcaaacattggtgtaattaacaatactgtcattgtgctcatacctaaacactcccacccccaacaagtcactgactatcgtcccatcagtctctgtacgactctttacaaaatcatatctagagtactggtaaatcgtcttaagcgtatactcagttgcattatatcccctgctcagagtgcatttcttcctgatagattaatttcagataatatcattattgggcaagaaatcatccatgcactaacccatcgtaaaaatggtcggactggatggatggccattaaattggacatggctaaagcgtttaatagagttgaatggggtttcattcggaagataatgagtaagttcgctttccctgatcgctttatcaacctcgtgatggcttgcatttcgactgttaccttttctttctctatcaatcagcaggttttaggaagagtcaaaccatctaggggaattcgtcaaggtgatccactctccccttatcttttcctcctttgctctgaaggtctctcttccctcattactcagaagacattggattctaactctcgtaaccatggcattggccttaagattgctcgcactgccccaatcatatctcatcttttcttcgcggatgacagtcctctattcagtcctgcctctccaaatgcaactaccacaatcaaggatatcttgcaggactatagtttagcctcgggccaaatggttaattatagcaaatcatctctttttttcttgcccaacactaatgaggacatcaaaaaccacattacttcctttttgggcattcccattcgagattcaattgagaaatacctaggcctgccccaaacctttgggagaactaaaaaagaggtctttaattacctcaaagactgagtctggtcacatttgaacaaatggaactcaaagcacttctcaaaagggggaaaagaaattcttttgaagtctgtggttcaggcgataccgtcttatgccatgtcttgtttcaaatttcctgcctcttttcattctaagattgagtccatgatggcttgtttttggtggggaggaactgaaaatagtcgaaaaattcattggaaaaagtggtcttcacttagcttctcaaaatttcatggaggccttggttttcgctcaacgaaggccttcaaccaagcaatgttggcaaaacaagcttggtgcttacttcaggcaccccactcccttgttgcaaccatacttaaagcctgttactttccacacaccacctttcttgatgctagcaaagggcgccgaccttcactggtatggatcagtatctcttggggtaaggaactcctaatatctggccttaggaaatcaataggtgatggtaccgctacatcgatttataatgatacttggatcccaggttatggtaaagtaagttacctcaaacatctttcagacggaagttcaaaagtatcagatcttataaacccatctaatcattgggataccactcgcattagaactattttcccctccgatattagtcaagccattgtatctataccccttttgccttccccataccctgatacctattactggccatacacatcacatgggaactactctgtcaattctggttaccataaagctcacagcttacttttcaaagatgatcatcccaccccatcggacaccatgactaaccaaacctggtggagaaagatgtggacacaaccaatcccacctaaagtaaaacactttatctggagagctttttatgacatacttcgcacaagctataatttgcataagagaaagaccattcccacaccaaattgctgttgttgtcaacaccaaacggagaccctagagcatgttattttcaggtgttcaactgtccagaaggtatggaaattaactcaattctctacttttatatccaaaaatatgtcactaacttgcagggatatgcttcatgtggctgcttccacacttacgacaagtgaataccaattttttctctatttgctctggaagatttggcattgcaggaatgattttctcaaccaccagaagctagcaacaccagccagtattatccaaacaactacagattttatggacctatatcaacaaaacaacagtcatcaacacacctcggggaccatccattcttatgcaacctctgatagctggggcactccttcagcattccaattaaaactttctgtagatgctgcccagaatataacaactaacaagacaggttttggtatggcgctcttcaacaataacggggatttactcttgactgtagcaacaccgtggcaaggaacccaaccgactttgttaatggaatctcatgccctaaactatgctctttcttggtgccaacagtgaagcatacagccggattacattgtctctgattgtaaattccttgtggattatattggtaattctgctagtcaccatttacttttgaacaggtttgccaaggacattaaaagcttcctatcttctcttcctaatgctacttttaggcatatttctagagagcacaatgaagatgctcatcgtcttgcaaagtttgcattaggcttagatcaggaagtcttttggaaagatcaaaattttatctgtaatttgtatcctgaactttaatt

SEQ ID NO: 304821 - DNA, 1019 bp, Cannabis indica
ggatcttctttgcctgtatacatcttctacactggcattttcaacttgggggaaaggtcaagagcattgatttcagaagagaagggttatcctctcggccaatccagttaaatatttgtgagtttgggttggtgaggccttgtacgaggtttttaagttgatctatttatgctaggacaagtggacaaacatggccagtctattgaccgaccgacatgtatcacattatgatctcttagaactagacttgggagagttttttggctggatggtaggtggaacattttgctcatacagtccccttctgcggtttaaattgtttatgaggtcttgtacggtaccgagtcggtcaaacaccgatgtgccaagaggcctttgagtttgaccaacttggctaggtggttgacttgatacctctatcagagtatggttggttagctgactatttcctcctaatgggcggtttggtaaaatctagtcgtctactatttggcccataatttgaacatgtggacttggattggacggttaaccgatataagtttgtgcaatttgatcagctacatactctttcaaccaattttgagatcccaaggggatactaaaatcagtcactagttgcaaaccggtgactaaataagcccttctggtcagtagggttacctacttggagcagtcgtcagaggccacctgctaggctctcatgacttccatctcttgatccctccactctaggaactgatatctttattagtcaaaggaaagattggtagctgcctagatatcttgttggtcattatgcaacatggttttgtgaccatagcgcaactcgcaatttctgaaggtcaatatcatctctaatcagcctttgagtgtttgtggtggacaagatttcagtgccaggagtgatctgtacggccgctgcactagtattccttgcttcttgtacacttggagtgaacccaaccagaggggaagtcactccatggcccaacatcggtactgttgggttttatgcc

SEQ ID NO: 304822 - DNA, 1447 bp, Cannabis indica
aaaaaaaaaagaaaagataaaagaagttgaagttaattaagtggttatatattataagggaaataattatgatttcactttgttcacgagctagcagtagtactaccagcagttgtgttgccgtatatattctaatccaaacttatttttttgactttatatcacaaattaacaatgaacatttgaaaattgaaataataatttcgtaaaaaaaattgatataatatatacaaatcgattggtcaaagaaagctgtgatatatgtatcgataatttgtcatatatagaaagaagaaggataccccctataccttgtaggtcttcgttatatcttattatttcttcgttatctcttattattttatcacgcacgtaaccaattagtaggagtatataaatatatgtatatatatatattccaatatttattattccttcaactcctataaagtgagtgatttgactacatatttctgtgggaaatacatacatatatatatacaccatattatatattttattggatctatcattgtcaatagggtggttggcctaaagtaacattaatattattattccacattcataccataaaagtggcttaatttagtgtataaagtcactaattaatttcatgtgaataatttgagaacttagacaaaagaaattatgcactttttctttttttcttcaattcttatatgatgaagtcttgtataaaattttgatacctgcagtatgatttggcagttgcatgaaattgtgaactaagaataaataataacattaattgagcccaatttttcaggacagagtccaagccaaatgggtgtatatgcatgtctgattttttagctaggtctggtctctggtcctacatgtaatatatgtatcagtatcagtgttacttatatcagattttgaagctgaggcccctggtaatgtattcatgactgactgatcccaatgagaatacttgtatctctaacccatgcatgctctctttctttttccatgtatgaaaatatataagtcaattaagaaaacaaacaaacaaacaaaattttgtttgtcttgggttttgggttctatatagtattatatttttgttatgctttacttttattgtatttcaatgttgagaaactggagtttacaataattgaactaatatatgcatagtccttagtcacatcagcatctggtaaaagtaaaactgttaaaactaatggttaatactattttagtgatttataaaagtgactaattaaattttaaatttattaaatgatacaataaattatatcaaataaaactttaaagttcaatttttactacaatttttttttaatattaataacttgtaaagataattcctaatcatgaacaaaatgtaaaaaatataatcagttttttttaaaattcgaattattattaatttttattt

SEQ ID NO: 304823 - DNA, 2330 bp, Cannabis indica
ctaattatatgaaatgagttttatttagggcataaaacccaacagtaacttgttgtaggagaaaaggaagtaatggaaaatggagatggtgaagagtgatgtacctgagtggtattagatgtagatggggtaggcactgtcttagcaggataacaggcaagattaaagactatatttctggaaatgtagattcgaccttcagtattctcacagatgtaccccttgtgatgaggagaatacccaagaaacaagcattagtgtgttttaaattccatcttgtacctgttatatggtctcaaatgtggaaagcaggcacacccaaagggttgtatgatattgtaatctggtttggtcttgaatatgatttcatggggagaagagaaatctaatacccttgtaggaagcctgttaattgtgaaaatagcagcactaaaggcatgccactagtagctcagatgaagatcagcctgagctaacattgtgagaccaatttcatttatgtgcctctgctttctttcagcccttccattctgttcatgagtgtgaggacaagaactttgaaagtgaatgccttgatcaagtagaaatctcttgaatggtctatatttaccaccccaatcttcctggacagcctttagaggcaaattaaattgcttttcaacaaggcttttccatttgatgaaaacaggcaaggcttgagatttcaaagttaaggagaatatccatgtatatcgactgtaatcatcaagaaaatgtacatagtatttgtaaccatctttagaatcaacatgagagggtccccataggtcagtatgtattaaagcaaggggctgagaggctcgactttgggacatggggaagggtaaagtgtggcattttccctattgacaagcattgcaaaattgcaggtcattaatagatccagtatgagggatttgagtaagcaatttatttaaagtctgtgatgctggatgaccaaatttgcagtgtaaggtgttaacatctaacttagcaactaagtgaaataatgcaggagagtaagcaaaagaatgagatgttttattcatatcaacaacagtacaattattggtcttaacatcagatgaggagatacatgattttcaatttttgtccaaaggacaagtagatgtagcaacaagattacactgcaatattgttggagatgttgtagtagagtcattcccaagaagatacaggccatcctttattgtccctttaagaagaacctgtccagagtccttgtccttaacaaaacagcaatgcttgtgaaattcaagatagacattattgtctgcaattagtttagatacaataactgaattctttttgatagaaggaacttcgagaacagactgtaagtgcaaaggagtatgactaagagaaggtaaactgtatgagagattatgagttttttaccatcaccaatggctaatgtctcagaaccattgtaagtcatggtagaatcaagcttgtcaacaaagttggtgacatgatttgtggcccctatgtcagcaaaccaacttgaatcatcaccaaagtcaggtaagatctggggagagaattcttgagtatcatttctagaatcttgttcagtgagaaaggcttcgggattgtttggtgaggttttgggagtgacccaattcttgtcaaagcggtagtggcacacaacagctgtgtgacccattttcaagcacacttgacagattaatctagagtgttgattgaaaggacgaccatagccacggcaattgaaattaccacgatttggaggaggtcatgtgccagtttcctttaaatcaccaaaagtgagattggcttgcattttatcgatgagatcattgacggtgttgtgatgttcaaggcgactctcatgggccatgagaagtgcttgaacttcatcaaaagtcaagagatcacttcttgaagtaataccagagacaacggagtcatattcaggaccaagaccgtttaagagctggagtatgacatcttgctcgtcaatgggagaaccagcaatagtgatggcatcaaaaagactttgaactttgtcagtataatctaagattgacagagagcctttatgaacatgagaaaactgacctttaagttgcagaagtcgtgcacgagattgactagcaaacctctgttccaaagctctccaaacagagtacacagtattgaagttggcaacagatccaagaacaccttcagtcatagatgatcggagccatgatagaagcagtgttgggttttatgccctaaataaaactccatttcaatgtaatctattttattcaacatcaataaag

SEQ ID NO: 304824 - DNA, 2506 bp, Cannabis indica
acgtttttcgagaaaattctttgattagcaaagattgcactgtctttgaaaaagcactgtagcgtgccttagcattagcgcgttacaattgttttattgaattatattctagaaaatgaggaattgtttttggtcaccaaatataggattagtccttacctaatcctagtttctcaatccatgccatgccaaacgtgcgagggctagggttatactgtcgtttttggcttagttaaaaaaactactctgcggtgtcgtagctacttcccaacccagttcatgttaaaccctaaaccctgaacttcactgaccttcttggctccttgttctcctctcctctcatatctcagaacccataatccctaattactggcttgccttccttctatactctctgttcctaaaccctaactatggacctaaaagccactgagctcttgaaagaggtccagcttccctatttgtctgccttctcaaagctcgttgacgacactgtttcagctatcaaagactccattgataaaatcccacatgaccttcaggttacagcagatgttgctccagggtttgtcaaagacattggtgcagacaaagtggatttcatgttcaagaagccaaaagcttttgaaattggtgggagttattccataaaatgcattgcaaagcctgatatcaacgtcgatctctttcttcgcttgcccaaggtattctttaacttgatcctgccatttttttatttttattttattatgatatataattaaaccgctactccttccatacgaaaatatttcagtaagaacatatcatttaagtatcttagttgtcaagttgtagaatttgaatgcaattataggtgtccgaggctaaatgggaatcggtttgaacccaacttctatggaattttaagaaatgagattgttttcttgtagaaaagtagttctgttcttaacaaactttctcttttctaggagtgttttcatgagaaagactatctgaatcaccggtaccatggcaaaagatgtctttatctctgtgttgtgaaaaagtatttgacatcttctccattagttcataaggttgaatggtccactctgcaaaatgaggcacggaaaccgatattgattgttcatccaggtgtgcttcttcgtgaaactatataatgaaatttatatatcattgctaaacttagtggccagttacttgctaaattttaatttgactaaatatgtgttacagctacaaagcacgttgaagttcctgggtttgttgtcagattaattcctacagcaacttcactcttcagcacttcaaagctcaaccctgagcgtaacaatgttcgtgctttgaatcaaggttagtacatattcttaattcaagaacgtttttaattagtgagaattttattaatgtagtataaatatgctgatcaaattttggaacataattaaagggggaatttcacaagcaacacctaaatataacagcagtattcttgaagatatgttaatggaagaaactactgagtctatgaagaaaatttttcttggatggaaggagctaggagaggctttggttttgctaaaggttaggtatcacaatattcttcttaagaaaaaaagaaaaaagacggcaatagctttgtgacagttgtttcttactgatgtaggtttgggctcgacaaagaacttcaatatatgcacatgattgcttgaacggattcttgctttctgtcatactagccaaccttgcaagaagaaaccgaattaacaattctatgaaaacaatgcagatagttcgtgttacattgacctccatgggtatgcgttttcttgttattctagttatcccgttcttagtcctttacaccattgaaatgcatgcttgagcaatgtgctcatcaaatatgtgaaatttaatttccttttcttacatattagatctacatgtattcttctttttactattttaatgtttgtacaaacaagttatcattatttacatgcataggattacgcatatatttatttatatacaagtctaattattgatgctgttgcatattcagctactccaagtttttggactcgtggactttaccttcaaatgaaagatcagaatgctatttctaaggtcagctgttttttttgtcattatgtttcctttgttaataagtagcttcccatttgatgagtattggcaagagatgtgactttgtcccttggttgttttttgttggtttcaaaatggtgaaaattgttttggtcctttgtttggaaatgtgtatatagtctaattatgagcttgtaattccaggaaaagacgcaaagtaaccagaaaggtcctgttgtaaaaggcaatcaacatgcaacatttaatctagctttcaggatgtcaacagttggttgtatccaggtaaaaaataacctacagtgaacattttctataggctcgtttggctaagtgtctacttttgcttatagctagaagtataagataagtataa

SEQ ID NO: 304825 - DNA, 937 bp, Cannabis indica
ttttacttttccaactaaaagaaaaaagtcattatttatttcctctttttatgaatttttatctttatcttttattatgaagaaaattatgtatttttaccccaacaaaactgtcagctcacaaataacctaattggtctcataaattataatctattactcataaatgatttaactcatttctttcttatatattgttttttaatccagtcattgctatcaattggaattttactttccaaacatcaccggttaagaacaataatgagatgaagtgagcttgagtgaaattgttgagttgaataatgaattgtatttatatgaattgagtgaatcatttatgagtaatagattggccaactatgaaaagtaataaactctatcctacaagcacagctagcataactaacttaacatacaaactaacgcttaatcgtatttactaataccctcccttaaactgtatttggaatgctccagttacagtttgttacataaaaattagaatcgtggtgaagaaagaggtttggtgaataggttagctatttgatctttagttgcaatgtagcgaacttgcagtttcttttatacaatttgagctctgatgtaatgcacatccaactcaatatgtttagttcttgtgtgaaaaacaaaatttagagcaagagcttgagcactttgattatcacaacctaaagtaggttgttgtttgtgcaaaagtgatgcaaagttctgtaagtaaagatgttatccacacaagttcagttgttgctgaggccaatgcatgatattttgactcaatgctcgatcaagcaacaacttgcagtttcctggagctccaattaaccagattgcagtttccaaaagtaaattttttggagaaattatagtaaatggcctcaaatctataggagtatgttagtttatgtcctcattt

SEQ ID NO: 304826 - DNA, 1489 bp, Cannabis indica
ataacttaagtattattattgttaaaaataaacttatatatcttctcttcgaagaaaacaaatcttattctattattagaaagtaattatagttttagctaaacttttttcatttttcctcaaagttacacatctggacaaagataaggtaatagtactcacaaatatcaacaatattttttcacggtttaatgtgtttctttcctctttatatccacaacagcttaattggtgatttaatataatcattgaatgaaaatttagtagctctgtccaatttggcctagctataggggtaattcaggtgtaaaattttaaaaaaaaattataatacatcctttttagagtatttaggtacattttttagaaccaaaataaaataataaaaattaataagaaaaagtatttttaagagagagtagttgaaagtgagacatagatttggccaaccattggattaaatggacaacggtgtctgttccaattgagttcttaaagtaggggaccaaagaccaagtgagtctgcatctaatctatatcatcgaaactagatatatatatataagtaagtttatccaacaactggacctgccttttcatcaattaacaatttatataccactacctttactgtccttaccttattcgtctataaccgaatcattaacctataactttgtcttcatcttcaactacttaaattatatttatttatcttctggtttttggatttggaaaatctttggactatatatataattaagcttgtattgtataatataataacaagaataataatgcattgtgaggcttttactttactctaatggtagaatagtatgccttatagattcatttatactgcattcggaaatcacaactcagagtttcagaaaaataaacattagctgtttgtcatttttcaatatacacataacatgtgcaatttttatttatttattgttttctaaaatttgttttgcactcttttgtatccttcttgttagcaatttctgagctgtggaagatctcaggtaatgtgtttgaacccatgtgcctctgttttttttttaaaagaaaagaaaatcctatcactatttttgtagagtgttcgtgcctatgctatgtgtgttagcaatagcaacttagcattatatattcaatgagcactaaattattggaaattacgagttattagagttgttgaatctctttgcgattggaaaaagtaacagaaacagaggagagaagaaagagagaaagatattgagacagaaagaattgtcttgtttattattgataatagaatcaagtaattatacaagctaagctaaccaacccaagctgaactaacagctaacaaattgtacaactatcatagctaaacttctaacgacttaatagaaatagcaactaacttgattctcctaacacagtttgatttttagaagaatggtaatgagagaaaactcagctcaatgagcatgag

SEQ ID NO: 304827 - DNA, 882 bp, Cannabis indica
ctgaaaaagatttttcctccagccaaataatttgttccaaacccgatcttgaatagattgaaacaaactagatttactacaagcaacaaaacacgaaagacccagatacttctcatggcatgaaactctatgaacccccaaaacattggccaaagcatcccgagcccctctagaaataccagaggaaaaacaaactgaagactttatcagattaacaagttgtcccgacgcactctcataccaccccaagataacttaaaattgggcacaattgtcaagggaagctcccaaaaagaagaaactatcatcaacaaataataagtgagagatattaggaccacttctaccacacagtaacccttgaatacccctaatctgacactcattcttgataatagcagaaaaccttcaacacaaattaaaaataagaaaggagacagaggatcgccttggcgtagacctcaggaaggttgaatagaccccaccatattaccattaacattgatggagtagaaaaccgtggagatacaatgaaaaaccaaagacacccataactttaggatactcaatcttctcatcataccacaaacaaaatcccatccaactctattgtaataccttagaattgagaagtggattagcaaaaccataattagataattatgaataattgaagaattatattattatatagttcaatatatgagaatttgtttgatttatactatgttaagaccccgttggtgagccaggggcattttagtaattatgacccgagaagggtaaaatgatgaaattaatttaattacgtgctttagagactatattattatatagtatgcctgtgttatctttttcaggtgtgttctgacaggttggcgc

SEQ ID NO: 304828 - DNA, 3359 bp, Cannabis indica
caatacctcataatctttgtaaactaaaaaaaaaaaaacaatgttcaaggttgttaaacttggagtagataaaagattacggtagctaatccaaaacctttgactattcaacaaatttaagttacctaatccaagacctttgacttttcaacaatatatttaggtcacacttacgaaaattaggtaaaattgagcctctaatccattaacttataatgcattacaaaatgggcatgtgaagtcaccaatttggactctatttttctagtctaaactctaaaacgagttaaactgtcaattagcaatttcagccaactcaaccataaaagattgataagtagcagctatgttgactataattaattacttatttccaaataaaaaaggtgtattaataaaatagcagtaatgaagggtaggtttcgtgtaaagaaacatatttaatttatttttttacaattactatttttctttctaattttataatccttttcaagaagcatgttaaattgaaactagttggttaaagcaagcaatacaaaatatcaagagtcaaatttttgggtgttaagttattattgaaattggaatatccaaattaggtacctttaaatacaggcaataatttttctagctgtaatgacacttttatggattgcagggaaacccattatgaggacaaccatttggtacccaatcaagatttcaaaccacacaatcacaaataaggacaagcaacaccaacctaatatgaacttaattgaccacacctcagagctttatctttacgccctatcacacaagaaaaaatctacaccaaaagaggtatggacctaagttagaaaacataaaaatttaggctgaaatttcaagcaccaatttttgtttgtgtggattgaaagatttttcataacatggaatctcatagctttaaagctatagagtcaaaaacatgaaacaaatgatgaaaactgctttttctttacttttcatttctttatttctctttgcctgaaatgaaaacagctttatcgacaagagaaaacctaatagaatctcaatgattaaagttacaaattcaaaaaattgaaaagaaattccatttacttccatgctgaacagcttatgacaaagacaaagaaaaccctaatcgaaaatcagagattagaaaaatccatcaagaaaaataagagtaacaataaaacaagttcattgaatctgaaatctccaatatttattatcaacagaggactcatcaccctctttagcaagctatatttacagaagaacacatagatagagatacagaaaagctaataaaaaaacaaactgaaagaaagaaaagcaaatggaagatacctattagaaattatgattttcatatctgcccataattataccctaactccttaatttcttcttcttcttcttcctttacaatacaaggacatacaacactgagtcaatacccttacaaattcacatttacagagcatagaaacattaacagctccaaataaccaaacccattttcaaacccagaatagaactcgactatttcccaaatattacatactaatcccacccccataacaagtttcttactaagttatcctccattaacccataatcaacacccatgaacacgatgaaaaaccccttttctgaaatctaatttgtcccgtattttctcgaaatttcagatctattccccgttttcaaaaaacaacggaaagaatcagaccttgaagccgagagagatacgtaactgagtaaaagaaagataaagagagagaaggagaagtgagaaagttttttttttccgatcttcagatctggatcttcacctggttgatttttttattattattatagttcatttcgtgacatatcattcgattcgaagcaaacgcctcagatctcttgtagcagaatcatcaacgatagtcggaacctgcttcatcttcgagaacgacggcaaaggaagcgaacccggcgccggtgaaaacgcaaaagcagatccagcgtacacgtcgacctttccggccacaggaaacttcagatctacaatccctaccctcttcggcaccatttttggctcaggaccaatcctctgagtaccacaaacggccaaaccaccaccagcttccttcatcaaaggctcgctcttgatcttcgaatcaagcgactcaccacgcctcaaaattgtaaccttatccagcttcaccgtcttaagatcatcagagctcgacctcttcgagatcgatctcctctgctccggcttctccaaccggttccggctagatctaccgttgacgtaactgttactaccgttactatttccataataataataattattattaccgttacaagtcgagttaggatatccatagttattcctccggcgagaaaacgtcaccggtggaggaactctaatccggtcaatcaaacaatcttgtggcctcaacacctccgtcgccatagccaaaattatttaattaaattagatttcctatatataattatatataaaaaagaaaaataaataataaaaaaacaaatatttatcgtgaaaaccctccttttctttttaagtaatattttttttaatttccggtgaccttttcttccgaggaagaagaaggaggaggtttgatcttgtttttctaatcgggtctctataataaaccgggtcgggtctggtattgtaagcaacgaaggggttatatatatagagagaaagaaatgaagagatgagaacgtgaagggtaggtggggcccagtaggggagagagaggatagtgaggtgtcgtgtaggagggtttcgctgcaccgaccttgttttaaatgacgcgtgggggcgcgtgagatgggccgcctcgtttgaaaggttgagaaagagaggacaggtggcgttgctgactgagtaatggagagtgcgtgtatgtggcccacgtgaggttcccctcgggacctgagtgaggtccaggcccaggcccacaactgctttccgttacttttaacggcgaaatgagatatggacaggttgccgtttggtgtcttctgttataggtggatgtcttagctcggtttccgcgaaatgactattgttgtgagaactgttagttgtcggtttcttatttgttatttcctgcaaataattttgatgggacccaacctatttacattttctttataatttaataataaaaaatgttatttttttagattactttatttgtagttaataattagataatagttaatcatcaagtggccatagatgggtgtgtgagtgttggaggttctgggttcgagtttcagctaaaatatgttgtaatatataaacgacttaa

SEQ ID NO: 304829 - DNA, 1946 bp, Cannabis indica
agctaaaactttgcatatccttagaaactaattgataccctttaggctttatctatcactatgcatgattcaatagtaatcccagcttgtttttcatctggtgagaggccacaggctgatgatccagctgctgtgataaggtcaggccagagtgtcttcatgtcagtgtacagaacaaagatagctggtcagtgtcgtttgattactatcacttggtgcaagaatttgcttctgagaggcctttctgtttcaatccagggagtacaagaagaagaagatgaacagtaccaatgcaaggttgagctgaagccatggtacttctggagaaaaaatggtgacaaacagtttgttcttgatgggacaattgttaatgtggcttgggacttgaaagctgcaaagttcaatggcgaaaccgagcctcaatcagattactatgtggccattgtttgtgaagaagaagtggttttactagttggtgatatgaagaaagatgcctttagaaaaactggctgtcgtccttctttgattgatcccatcttggtgtctagaaaagagcatttgtttgggaagaggaagttttcaactagagttaagtttcatgagaaggcaaactctcatgaaatcttgattgagtgtaacaacagcatcataccaagttatgataacacaacagggatgattagtacagggtcagatcctgagttggaagtccaagtagatgggaagcaagttcttcatgtcaaacatcttcaatggaagttcagaggtaatgagtcagtttttgttagaaaactaaggttgaagtttattgggatgttcatgattggctatttagctctggtactagacatggtatgtttatatttagtcccatatcatcatcatcaacatcatcattagtagcatcatcatcatcttcttcttcatcaaattcgagcatcgatcatcatcatgatcaatcaggagagtgtgatgactacgttggtgggtcatctagattttctttgtttgtctatgcttggaaagtggaataatgttggtaagttcatgcaataagattatctttgaccaaaaattttccaacttcaccatggaaatgaagagaagtaagtgaatatatgatcatgtcaagaaaattaaaaagagaggagcatggaagaaagatgatgaggaaggaagaagatggacctactcagagggacataagagtattatatgctttacaattatataatatggacatgattggactatagccagataggatcacattactacataacaaatgatccttctgtacccatttccataattgctctatcatgtttgtggttgttgtggataatgtcatttgacattacttatctactcttctttctttatgttattatgacccttagtttgactttgggtgtttgtatttcaagtttgaatttgccatttgtatatgtaaagatgtttcttttcttcttctatgtatgcatagctcaagagctagtgataataaactctttattattgctgttattatgtttgttctattctaatgcttagtgctaagcactccaatgaagagtgaaaatgttgtattgctatattttaggacacttaagaaaaatattattttaatggtgttttaaaaagtgtgtcaaatttaatacaaaatataacattatatcaaatttagtttacaataaaattttaaatgatgatcaataataattaattgattttatttattttacatcttgtatattaagttacttattgaatgcacttaagattgtgatggactcctagtgatatttcaaagcattgggatcttccatattgttttgtttagtattttatatgctatgataagatcaagcttcaagtcatctcttgaaagaagttaatatctttttttttctctctttttcttttttcaatgtgacttaaatatt

SEQ ID NO: 304830 - DNA, 1423 bp, Cannabis indica
aaatttgactgacgtgacacgtcaataatagtagtaacattattattgtaaattaagtgtaaaaaatatatagtattgtaaacttttactttagatacataattttttatattttataattatgtgatgataatatttttgaaaaaaacctataatataacacattaatagttgaggtgaatttaatgaattattagggttaagatatatagatgcttccctacctaagaaaaaattaaagttgaatttattacaatcaaattcttcaaaaacaaaaattagttcaagcaccaaatttatatattttttaatatttttgttaattattttaataaaattttcaacaaaataaatttaattttatagtagatttttatttaattattttatctaatatcaatgtgggattaaaatgtctattctgggaagcagacatctgtcttttgctggcagagctcaactaatccattcagtgttacttggtcttcgtaattactggatgatcatatttattctcctgtatagcgtcacaaagaagattgaaaagctctgtacaggttttctttggggtctaaatggcaatagaagtaagattcatgttgcttcttgggaaaagtttgtctcccaaaagcttatgggggtttgggatttaaggagggaatcaagtggaatcaagctaaccttgccaattacattttgggccatttcaaccaaaagagatattctttgggtgaaatgggtcaacaatgtttatttgaagaattcttccttttggtcgtatgatcttaagcttgactctagttggtattgtaaaaagttatgtcacttgagggacaagttctcgagcgggaacatccaagctgccggaactggtgggaagttcagaaccaactggctgtataacagcctcataacacaacaacaattccattacaaaaacagtgtttggagctctttaaacgttcccaagaatcgattcatcttatggcaagttgtaaatattcagctttttgacccgagacaaacttggacaatttcatgttgatttagatactaaagaatgccctatttgtgggttggctgaggaattgcaacaacacttatttttcagctgctgtctgtcaagagaggtgatttttttggtgcataatagggttggcagcaaagcttggcccactgattttaaaggctggagaagctgactggcttggtagtcaaagaacaggaagcaaagggtaaatgttgttattttggctgctgtgatttatagtctttggatcaatagaaatagatgcatatacaattcttactcttatacgacaagagcaattgttaatgaagtgcataaagttgttatgtatagattacaatacttgaaaaataagaagttaaaagagtttgagaaagtgtatatagagaggat

SEQ ID NO: 304831 - DNA, 2360 bp, Cannabis indica
ttacttattctttgtaaaaaaaaatcatgcttttgaaattgttaattaatttcattccttatctttttatggtaatatctgcaagaaataacattacaataaaatcatgtcatttttttttcaaataaaataaatcattaggctaaatcctattaattgacttttatgtttttattcttattattactatatatatttgactgaattaaaattaacattaattgatattatcatatatgagataattgatagttttctttagtgaattttaacttataataatgaccttgtatgattaaatttatttaataaaatatgtttcattgatgtttggcattaataaaaataattaaagaggttgaaagtttgagaaatctccatgaaatcattaatacagaacaaaacccattttcttaaacataataatgcaattttaaattaaattattaaagttaagaacaagaacaaacgagaaattacttaaatactcaacatttaacttaattgaaaatacgaaacattaaaaagaaacacaaacaataacaacataaccaaagcgaaacaactccaaacacaaaatacataacaaatctaaaaaatacgaaacacaaataatcaccatgattcatggagagatatccttattccaaataattgttatcaaatggaaaagtctatttctgccaaattccataggattattattattaaggattggccaattttacttgtgtcacccattattaactcaaagagatattattacgactattgttatcaaagttagtcgcaacaacatcaaccacagtagcatttcggtctccaacaagattttcagctatgattggagttgttaagggtgttgttgttgctgttgtctcaggcatctgagaaggcttgatattaatatttatttctccaatcctcttgttgatttcttctatgctttggtcaatgagcctggtgagatcattcaaatcttcgacactcaagtcttgaaggtttgtattaccttcaagattggagtacatgatttgaatcaactccttctcacgattatctctctttagttttcttacttgttctttggccgtctcgatcctattcctcaagtactcctcttgattgaacatcttcttagtttgatcaatcttagacatagctaaaaaatttgttaccacatgatgggccttttccgtcgatggaaacactgtcggctcaccactatttggatcatagatgattgcacatgcgtcgacaccacacaatgtgcttagctcttcaactttttttagtataccattttttctcttcctgaaagtattttttcgagaagagtcatcagtgatatattgcatattcactttctttctggtcatggtggttggtagagccaaaagggagagagatggaaaaaaatgtcaaaatggaaaagagagcaaagtgtatttgtgttctttctaattttctttttgtgtctctatttatacaaattttcattgaagatgatgatggtgttttactaggggtattaatgtaaaaatggaaaatatgataatttttttatttattgatatctagagaaatttattttgttaattgtttaagtttaaacaatgagctcttagagaacatgtataaaaattgtagcataactacccaaagattagattagagaaaaaaaacaatgtattaaataatgtatacgtataataaacataatatatgtgtgatcgaatattaattattataagtattacataaatatattctatgttacgattttgacaacttcgtaaattcggactttaatttattatattaagcattaattcttcgataactatgtaggtattaattttaactcaggtatttattataactattagtacaattatttcatcgcatatgtaaatactaactccaacttattagtaagcggtatttacggtaaatatgtaactaactattaagtcaaagaacattagtaaatatttagtaaattaaccattatttagttttacctagtatttattatggaaagaataacatgaatcctttgaaaaatataaaagtcttctaaatgttcatggttggaggaagttcctccgccaattatgcctattgtattttaaatttttgtttaatataatagcattttatctcccaaaaaaaaaaaaaaaaaaaaaaactaactatcgaaaatatacattatatcatcatatttggtgtattaatcaactctaaataatttaagtcaaccctcatttatgttgaccatggatatggatatagaggaattttttcttagtaattatttggtattagaagtggaataggaaagtattgaaagtaattaa

SEQ ID NO: 304832 - DNA, 1276 bp, Cannabis indica
ttgtgatattccaccattggggcttaaaatggcgtctacctttgttggtaactcaacatcgatccaggagatgttcaggagggtgagcgagcagttcacagctatgttccgtcgcaaggcctttttgcattggtacacaggagaaggaatggacgagatggagttcacagaggcagagagtaacatgaatgatttggtcgctgagtatcaacagtaccaggacgccactgctgatgaggaaggtgaatatgaagaagaagaagaaggtgatgagatctatgagaactaaaatctcggattttaactgaagtgtctaagctttggaggattgtggatcatgtgccaatattttctttctcaaccacctgcttatatgttttgcttagataaatatcagcctgtttttgtttgctctctactcagttgttgtttgttacctttcatttttaaaagacaaccatctgttgctgtttttgctttcctccaattgtttgaataaatattatatcattattcgaggaaatgacgtgttaggttcccgtgcattttgctattaagatgttttctctcttttggggtttattaattcttgattaaatttactttccttcatattattagaattgtaatatgcagggtagtgctattggcaccggtttctaacattttttttagttggcggtcttatgattttcttaaactatatgagacttaatatttaattatactaacagtgttatgacactaaggagatactagacaccaattgatattgagaatagtccatacattttatatatggtatttagtttttacatattatgaatgttggactctataacattctttttaagattgtggttatttttttctcactaatcttccataattcaatcaaaagtggtctttttgactcaaagtggactgattctcaaggcgccatgcctcaatgcatgttggcaggccctcgagacaaaccaccaaactagcagcacatgttagatctctatctctttccagcatggtacatccgtcccatgcgcgtctgcaaactagcccacgaatgactacttgtgtcatctcgtgttgagactcgtggccaaggcgcaccacaacgtctcttggaggtttggaccacgtctcgtgcaagcggcataccgacaagctaatggaaacgtactcgttaacctttggcagcttcttagacgcactactcggtcggcacgataatgtccatgagtactccaactcatggagacatatgagtcccctcgtg

SEQ ID NO: 304833 - DNA, 4285 bp, Cannabis indica
atatttaagattgatgatcgatggtgtttggttggaaggtttcttacgaaccgtataatcgatttccaagcgatgcaacataagatagcttcactatagcgactagttctgggtatgattattaaaaaattagatccaaatcaattttgtttttcaattttatcatgaaatggatatcgaatgtgttatggaggatatccatggacctttgatcggatacctctaatttttgaaagattaaacattggggaaaatccacattttataactctgaataaatttaaattatgggttcaattctacaacaggatttctggcttcatattagaacgagtagtacaggatcttgggaattatatgggagcgtggagagaatttttaagggcgtgagtccaggtttgatttgatttaccattgaaaaaaagaaggaagttatagctgaaaaatgtcccatcttgcaatgtgaaattcaagtatgaagacttaacagctttctactttgtgtgtggcattcttggccattcgaaacatttttgcaaaaaagctttcgatacaccagaccattttcttactaaaccttatgggcttgaattaaaagtagcttcgagaaggaccccataccattggtgcgcaatgggtgaagatagaattagctacaaaatccaacagcttaggaatttctaatcccagagtatcaacgatggtcaaactagaagtagccataaatgagcaatcacgagtggaaggaattcaaagagaaaatctggagtttcatgaaaattgggtgagggagagaaatcatgaggaaataagggataataatgtaatgagattggtggaaggggaaaatctgggtattaatgaatcacgattaaggaagggggaggaaataatggctcgagatggtatcattgtagaaggggaaggtgatattgaaaaaggaaattcaaaagggatcttaagtgaggatgacatggaggaggaggtcattcatatacttagtgaccaaatcatatattgttgggaggcttctccagtggatggcttattttcaaaaattatgtgttgtttagagaagctcttagcttgggatcaaactatcactgataattttagaaaaataattaattaatgtaaaaggagctggaccgactgaagaataaaagggatggtatttctatttagtgttataacgatttgaagaagtgcttacttgatattttggatcaaaaatagatcttttggatacaaagagctaagaaattttggctcaaagaaagagaccacaacactaaatactttcacgctgggtccagtacacgacgaagacccaatttaatttagaagttgcaagatgaccatggtaattgggtggattggaaaacatgtttgtctactgttgtgactaactattttgattcactttttaactcttccacgaccaatttacaacttgttcttgagtgtgttgaggaagtaattactcctggaatgaactcagatttaaattagcctattttagatgaagaagttcgaaagacagtgtttgataatgtaccctgagaagagccccagaccggatggtatgagatcagcgttttatcaaaaatgttggctagttgttggttcagatgtggtttctatggttcaatgttttttcctgaatggtagtttcaaaaatgattgtcataaagccaatgttgttctcattcctaagaaaaggaatcttgattgcatggcgaacttgagaccaatttccctttgtaacgtcttgtataaggtaattaccaagattatggctaaccgcttgaagcctcttatggattagattctctcgaacactcaaagtactttcattctagggcgaatcattactgataacattatagtgtctttcgaaatacttcactatttaaaaaggaaaagtcaagggaaagaggggtatatggatttaaaattggatttgagcaaggcttacgacaggattgagtggcaatatcttgaagcaattctaaaaaagttaggcttcaatgaaacttggactcatttgatgatgagttgtgttacttctgcatcctatactatttttcatggtggaaaagaaatgggaccggtcctacctaagagagacattattcaatgagatccaccatcttcttatatctttatcttttgcgccaaggggttgtcacctttaattcgaaagtttgaacaaaaaggttggatccatgggtataaggtggctaatggtgcacctcgtgtgtcacacatactttttgctaatgatagctacctttattgcaaagccatgatggcagaggctaatcacattcgggagctactccaactggttgaacaggcctcgtgccaaaattaattttggaaaatcatctattttcttcagcaccaataccgaccctactatgcgtgattttttgtgttaatcccttcaaatggttatggctgatgaaaatagtaagtatcttggcctttcaagtactataggaaggaataaaaattcagtgttgggttacttgaaagagagggttcgtaatagaatttataattgggtttcaaagttcatgtctaaagcagggaagaaattactcattaagacagtggcacaagctttacctagttatacaatgagtgtttttatttttcctcatgatattagtcgtgaaatggagcaacacatggcaaagttttggtggaaagcttccaattccaaagagaagggtatccattggatgtcttggcctaaactgtgtatgcataaaagtgtcgggggtatgggttttcgaagtcttagagatcacaacatagctcatcctagcaaacaaggttggagacttcttgttcgtcctttttcattggtatcgaagatcttaaaggctaggtattaccctcatggctcttatctctcggctcacttgggtcataatttgagttttgtttggcgtagtattcgggaggcacaaagcgtggttcaaaatggagtaaggtggtaggtgggggatagccaaaacattgtcgtaaaaggagaaccatggctgcctttgtttgataatccttttatcacttcaactcacctagctcttgacacgactgtggttaaaaacttaatgctcctttaaggtgttggttgggatttggagctattgaatgacctatttaatgatagggataaagtagccattctagtattcctctccatcaaactgaatgtgagtgcctattattggtctcatgaactaaacgacatgtatactgttaaaagctgctataatatgtagtaaaaattacatgggcagtggagcattacaaccgcattagatttttggaacgaattatggcgtttgaagatcccaccgaaagttaaaaacttggtgtggagaggatgtacgaattgtttaccaactatggtcatgctcctaacaaaaaaagtagatgttaacaatttatgcccaatctgtggtcttcatgatgaaacaactatgcgcattttagtcacttgtcctctggcggcacaatattgggaaagggcaagagttacgaccactttaattgctggtatgaccttgctggactagtgtattagtactttccatgattccaatgccatgagttgttgcctcattgctactctttgttgggtgatttggggtacgagaaatgacaaagtatggcaaaataagccaaccaatgcctcgtatctttatgcatttgcggttagctactggttgggagtcttcacaaactggtttagtgccaggtgatggtgccgagcggtggtgtgcgcctaatgctaatataatcaaggtgaatgtagatgcatcaatctatataggtaattaacgttatggctttggtatatttccaggaatgatagtggttttctagtctagggagcgacaaggtcctgttttggagctattagactagaacttgcgaaggcaattggtgttagagaggtgctaagttggatcaagaaaaaataatggcaatatgtaattcttgaaattggttgtctagtagtagtacaagcaattcgaagccccattaaaataatttctttatttggtcaagttattaaaaaatgtaaaacttatcactttagaacatatttttatttcgtttattaagcgttcaacaaacttaataactcatttctttgtgagagcttctagtttataccatgattgtaattttcagtataggagatgtctcaacttatttacttccctatttggtagcagaatttaaagtttaataaagtttgatt

SEQ ID NO: 304834 - DNA, 901 bp, Cannabis indica
actactgactcccattgagaagctttggccgatttttcactagtttgtcccatcttttcgtcaattgactgaatttgaactctaatgccccgggaacctggaacaaggaaaatcaagcgtaaaaccgctccaaaagacaacaataatcaagaaaatgcttaactattagacccgagacataggctaaatataacctaacactaccatgcccaaatttcaaggtactgcatttaatgttgtgatagtgaaaatacaagaagggatatgcacgccttaggcagaattcatgtcacgtctaggatggcacgtgggtgcagacgtgtgccacaactccgagcaaagtgtaacctgtagaagtccccatacgagcataagtttccacacagacttggaaggtaaatgttatcccaaattttgcacaaggtgacgtggcactgggctaggtgacacgagtcgtacattggacttggacagagtacacctacttatagttttgtccaggttgagtcagagctaaatcagttaagtctaaacctgtagcaaccacaatcttgatagatgtgaacctcacactattccaagtagattaagctcgccgagtaagtgccattctctgaacacaagcacgcagcgagggaaaattctcagagatattttccctaaataccgccacaattatagtccatttagaattcctatctttatgggattgacttatacgattgagaaaatcatgggattcgatatttaagtttttctaatttttctcctattaactcgtgataggtgtaatgtacttgcgatataaatggtgaggtcatatcattgtttagggattccttttttatctgaaagaacagttattctacaacaaatacttgtaagctttctcgagattatt

SEQ ID NO: 304835 - DNA, 2219 bp, Cannabis indica
ttgagccacaacattagaaactttctttttcttcctgccaaatagtttagatgccttgacaagaaacctgcgaatcaattaataaagttagctataatttattttgtataactaatgaaacaatatttttcaagtactagcatatccaacagccctctccaagatgatctggtgtcctgagcgcctacgtcaggatgtaattttggtcatggacttgaacttgtcgctgactaacttgctcctctagttgaacctaatgcatttattcaagcattaaaacagtatttttgtaaacttgataccgtaaaaatgtaaaaatctccgtatcttaatattttttgtaaactttttcttattttttagtatttttgtaagttctcctaatatttttaacatttattctgattaatttaaattgggtatggtatgtgtacgtatttgatacacacttatataacaagtattttaaattaatattagttgtaaaatttaatattatatagtaaagtttgttaaaactatttaatctgtcacattactaattattttcaccacaaactttaattttgagtgataatctatttgtgatgatatttttgtcaaaagattttcaaatttagttactatcttatgattttgtgactataaaaataagatttttatctttttgtactgatatatctaagtagtgattaaagacaaacatatatagtaaaagagaataattaggacaaggtgtgagaatctaattagtaaggtagcatatatagggataaaaaactatttattaccaatacataaaaagttagttaattatactataattaataagagagagttatatgtatctatagtgagtggtgggtcaatcaaaatcacaaaagtttgatccataattttgtatccaaaaccacacgacaaagtttttcgactcttctgtcttgatctctctacataatttggaattaacctttgggtgtgtgtgtgcatgaccaacaaaattttgcaactctttgtatcatttttttgtttccatgcatttggattaaacatattattctactttcttatactaaacgacatttactttccatcaaattaagattatgcgggtgtcgttttcatcttctctttatctttatttattaatatatataatcattaagttcacagggcacttttaaaatagtattttagtagattctttatctattttagtatactaaaatacttttagtctcattttttataaagttatttaggttagtactacctataaatttttaaaattttaagtactttacaatatcaaagccaagactacatattttgtaagtgcgactgtttttcttatacgagtggtaaataactatttaaatcttattttcgacatcataaactattcataacttatttaaaaatttacaagtaattttaaatagttacaacgtatataattataaaaaaaaaaaataaactaaaaatagtactacaaaaattttcataattatatatgaccacttaaaaattttgtgaccaaagtaccccaaggagaagagaaagaaaacccacttgagacttgtatcattcatgtattgtgtagtatatatccttaaaatgtgccatcaaaattggatgaaaatgattgatccacctacccctagttccaacattaccatagaaatgtaacattatctaataaaattcaaagcaattccccctgaagaattgtgacaagtactaaattgatgctaacttttcttttcttttctttttttccattttatttttacaaaatttacaagaaaacccctacagattaaattattaatacaatgataaccccagattcaccttgattgaggtgtttggttccggaacccatgcagcttgttctcataaataaataataaaaaaaatcaatcaaagttgacaaaatgaacattgactttgaaaagaatgtaaccaaagtctttgcgggtaaaaatgaattaagatcatatcatcatatgggtatactaaactttagtttaaataaattatgttacactaataagcatatatatatatatatatatgccgacattcatgaatctcacaatcgaaagaaaacaactcctcttttaatttttcttcttccttctttgataaaggtaaaagaaagactgaatttttgaaattgtactaagtatgatgtatgactatatatatatatatat

SEQ ID NO: 304836 - DNA, 1903 bp, Cannabis indica
aataccgcctaacagtatttttataaaaaaatgacaaaaattagtataccatgtaaatttctcttagcttgtgggggttctacttctagttgtagcctcaaaccttcattttaatactttccattctatatattttaaatgatattacatagactttgcatccaatttctcacaaactaaggtggcacttggttagaggtaatgaaatggaaagaaaataattttcattctattcttttgtttggttgcatttaaaatcattggaacaccatttcgatagaatggtctttccatcattttggcagaatgactattccattttaaaatggaaggaaagaccattctaatacaagatttgaaaaaaaactaataatttttttaatcaaactttttatacattttaaattttattctattccattcctattccaattcccaatctcattcctattcctatatttttattactcccaaccaaacgccatctaaaatctttcatatttataaacttgcttatgttgaagttcaaaacaatattataatatgaagaaaaggtatgattatatattatggataagaagagaactagaaggagtattagatgtagatagtgatggtgttgtggagagggaacaagtgcaatatgtatatgacggtttgatagggctaagagacgttttggcaaacttcattcattatataatcaaaccatgtcacgtggtcaatttttacacttaaatactctttggcttggcaccacaatatgcaattttcaagttttatatatatgtcataactcataactcataaattaagaatattaccaatgaaaactgaaaagcttaaaataatattaagagtgatatactaaatactattcgtagttgattaacttaagatttacttttctttgtaaatctttgccattagctaattattatcgtttaatattaattaaattaaatgatcactgtatatatgtaaaagtaaaattttaaaactaatataacaataatttaagttatctagctgatatcttaaatttgtaaagaaaaataaacataaaaaaaatttactacaaaaaaataataaaaaattaattaaagtgtaaaaaaatcaaaaatataataaaatttcaaccgcaaataatcctaaatataaatatttgcaccaattattttaaaaactattttatatacactcaaaattaattattttaaaattgtattcggtaccttaaattattagaattttataaaaaattgtgtaaaaatttaaataattacaatatataatgtgatataaaaatatttaaattataatttttttctatactaaaggcatgctctattttcatatatatattctttttcttacatatgataaatgggaacataataataatatgctttgagatattccattgttgatgtccccagatctttgcctgactaacctaaggatccaagcataatattatttaatatggaggactatgttaatatttttttaggggaattatataagtatttatataattctataatattgaagaattgataaaacaagttaaaaaatgtgtttgttttttattttttttatttttgtcttcatctctaatatatatttctttttgtctttgtcatttttggtattcatgtatatcctcacatttcttgtttatcattttctataaggttgggccattaaattctctaatttttcacagagccttatatgtatcctatatcaaatatttgtataagtatttgtttttattaattacatttctaaactttttcttactaatatatatggttcaaaaaaaataacttttgcaattaactatatttaaagattttacgaaaattagaaatacaaaaaaaggtaaaaaaaaaaaata

SEQ ID NO: 304837 - DNA, 1629 bp, Cannabis indica
aattttatattttcgtatatattagtgacatttgacatttgcaaaaactcgattttttcagatatcttatatatttaatttgtgtataacatataaagtcattggaggttacatgtaatcactcaaagttgtaacacagagaaattacaaatttgatttagggttttgcaactcatgaatcttgcttggaaatgtgtagttatgagtacaattacatttgggagttatggattcaaattgggaagtttctaaatattaaaaacagttacaaaacaatttatatcacttaaatatgtttttggaatgtttgaaatctagttagcttgaaaaagaagttttgaaacttgattcaggaaaattaattcaaaatagaaaagaacatttggaattttttcaacgtgcagcgatgtatctcgaaaggttctttggtataattccagacgacatgtggcctcgagcctttcatgagatagatattgcaagaagttatgcaatcaatgaggaacatttcacacttatttacgaacaaaactctgatccttaactcactcctacacaattggtaacaaccactaaattgatgggatctatttcccaagcttggttctaaaaaactctataaatagagactctggttcatccattagacacaacaatttttatcttttaaacactacgctagaaaatctcttaaggcttgtttattctcagaagaattttcaattttactatgtgtgttatatggggaaatacacttttttggacaaaagtgcttaaaccactactacaaaattggttttctccaacgttttaaacagttgggtaaattattcccgtcgatttctataactgtggcctatatgatcgtcacaaaatgggcgaaataggagatggttcgaaataattgccaatttgaacttctcgattattaaaaaccgtcgcctatgtttgggtataggtgatggtttataactgtgccctatactaaactatgccatatagtacacgtgacgtgtatttttcagcgacgaatttttttttcagtcgttacattggaaaaataaggagaaaatgcagatattttgccatttttttcccgcattaatttttaaatttttttacaaatctatataataacaataattaaacaaatgctaatatcatttaaatatatttacaaatttatatagtattaataattaaactaacgctaatatcatctaaatatattacaaatttatatagaaacaataaataaactaatgccaataatcatctaaatttatttacaaatctatatagtaacagtaaattgagatctatacactaatcaacatggcaaccattgtcgctctgcttccgctttcactgaagaattcactaatcaggcatagtatttatctcgtcatttgtgtactatgtggagaacttactctgtaaaataaagatatatattaattagtaaatgcctattatcatacactatttaatacagaataatatatattataatattcattagaatacttattaattattttaccaattttattaattctggtattgaatcttctactatcatgaaacttttaatgaatttcatgacagtagtatccacattgtttgtca

SEQ ID NO: 304838 - DNA, 2760 bp, Cannabis indica
ataattaaaacaactcatttacaaaacatcaaatgattgagtgagcatattaagctgaatacattattgaccctaatagtgattactgacttttaatcattgcccggacaccagaacttaagttttgcctggcataaaagaagtttattgtcatccgacctaggatcatcctcctagacatacatcttgaattccaattctgaacgaatcttttcagcctccatataatgtctttgtctcatctcaattgtttttcaaacatggaaaacaggtaaaaaaaactatcaagatcaagttatgtaatccacaaaagtctcacggtttccttcaagttccagatgttgtgcagagattatagctgagtacctccagcagcacatagtctagcacataataccagctcataattctaccagacaagaactcttttctgtataccttttactctttaattgctaatgatactagctttatactgttgattgaatcatatcagatcatgtataaactgttaggaatatggagttttatatagttgtctagttgagttgtttccatcaagacaattatatatttaagtgctatcaggtttacatattgagaatttagaatttatgatagcccaaatagcatcctgactttcagaagaagaagagaacataaaacaaatattatagagataaagggagactgcagagtgagggcctgagggggagtgagttctcacaattttgtaggatagtcagtagattgttcgacgttttggtaggaccggagacgagcaaaaagaaatctaactccaccaggaaactaacttccagaattttaaatgaaaagtaatcctaaaaaccaaagtaaataaatataaatttattaatgcactagcacattggaaactacttcttgacaaagtctattttctatcccaacacttaaaactcctattgtaattaaaatttagtttgtcagctgaaaaaagaacaaatagtaatgaaaagcataatgtagtcatctagagtcttgaaacaactaatattataaagattactcaatctaaggaactatgctccattggatcttcaattgatctcctaattgaaatatatattgatagagacacactaaaaatccattatcttctactttaaatccccgagctgttaaaaagctagttgaaaaggtaatgtcgcaaaacaggattgagcagcaatttattagagtaacaagcaatcaaattaagatcctcataaactccacacaatttaagcaatccacttatttaccagtgacattttcacactggtgttttgcagagagtcatatactacatagtaaataactactaataggtgctcaaaacttacatatgaagatagctgaaacattggtactaaggaaatgatctgttatataaagcatgaaaatctcatcaaactttagcagaaacggatttatttggacctatacaaagcatagaccttcattcaactgacacacctaacaagttttgcgtgaactcaatcactttctcacactgaaaccagtacatttgttagaaaggacaaactcaacaaacaacatcaaataaattgaatctatttttcataatattttcctcctcggaattgtcacaatcaaaacacaggataaaacagacaaaacatatatcgaagcaaaaccaattcacttgaagaaatccaacaacagaaacaataaaaaagataggttcttactttgcaatttcttggttgtctttggcatacttctgagctgcgaactttataaaatcaatgccatagctattgtcaaagtaacaaaaatccaaatcattatcatcactattcttcgaaggcaaaaaattagcttcctttaagtaacctttcttgtacagatggcttaaaaacaacttcatatccggtgaaagctctttcacaacccttggattcttcttatccatgtcgttagggctttccgtggaccggactttattcgtaaacacagcaaataagcttttcttccctgtcgattcttcgcctaccttttctttcccatcactctgatgatcagaattcgctctcaggttctttatctctttctccagctccctcaaacctcttttcaccttattgttttcttcctcaccttcgctttcgccggattcctgctttgggtatatatctactgcctccttgaacaaaatatccagaggctttctgggtttggtggaatcactctgcttttcagctccaacagaatgtgatggcgtctttttgaatgagcgcggggagtaggatttgtgggcgatgtttcggggtctgaggagagagtaggagctccgggaaaggaggggtttgaataaagacatgggttcggagtgttatcgaataaatgagaggtttagagaagtagaagagagaatgaagacgaaaccataagttttttcattggttatttatcaatggaagtttgatggattggaggctgtgctgcagtggagagaagaaaatgtccgctgcctctctggtctctggtctggactctcgaggtttttctggggttttaggcgaagctttcgccacgtaaggcaagggtaaagtttggtgaaattctaataaaagccctgattactgtaacagttatggcgactcacaattcagtcattcacccaaaataattacataatcagaattcttgcggacaatttgtatgtgtttagttgcgagaaataaaataagaatataatgaaataaaatttaaaat

SEQ ID NO: 304839 - DNA, 2954 bp, Cannabis indica
acgttcattgaatcggatcctaattttgtgggtgtttggagagatttcctccgagtttgagttcgggttaatgtcgacaaaccaataaaacgaagaatgaaagtcagcacagatgattcctcttggtatcgggtgaatttcaaatacgaaaaacttccaactttctgttttatctgtggaataatagggcactcagagaggttttgccccaggcttttcttgaagccactacatctacaagagaagccttatagcctggaactgcgggcttcaatgtatagaagacattcgacgtttggggcacagtggctccggtcaggagcggtggcgcgggacgaaacgaggcaagcctcccacggtagcagcagtgagcagggagctatcttgattcctatgaatcaggagcaatcaaggggatcggctggcaagaatcttggctatgacattaatagtaatttgttgaatgagaggcatgcgtacagggaaaatgtcatgggggtcaatgaagaagatttgactctaaatgtcaataataatgggaatttctttgattccacaattactatgattgttgactcaaaaaggagaagacctgattgtagtgtgggtgtttccatgggcccacatgataaggagttttctggcattttagatgaaatggagtaagacattgtggggtttctaaaaaatgggcctttggcgggttctggtttccagaacccccccagatatatgagttgcttaagttggaattgtcgtgggcttgggaacccgtgggccaagcaattcttatcggagcttgtgttccaaaagaagcccaattttctatttctttatgaaactttatgtaataagattagtatggaaaacattagaacccacttgggtttcgaaggttgttttgtagttgaagctcgtggacacagtggcggttggccttgttatggaaagaagaaagagaggtggtgattcagggtttctcttccaaccatattgatgctacggtccagaagacggggtctcctccctggcgattcagaggattctacggggagccaaaacgcgagctgagatttcaaacttggaatctctttcgttctcttgaagatgatagtaaccttccttggtgccttatgggagatatgaacaacttgggatcgcaaacggaaaagaagggtgggagaaactaccctgatcgattgattgaaggattcaacaatgctttgagggattgcaatttgatagatttgcctctggttggatacccgtatacctgggaaaaaggaaggaatagtagcggttggattgaagaatggttggacaaaacgttggtgactaatggatggctgtcgttatttccatagtcgattttgtacaacctggagctttctacttcagaccattgccctttattcttaatctttaaagttaactttccaacggctactcatcattctttccgttttgagaatgcttggatccgtgaacctttatgtaagcagattattgagggttgttggttgggtttgggtagcactaatattcaagataaaattaccaaatgtggggaggtgcttgggaagtgggggcagggatatcactgggaatttccgtcaacaaattaactaatgcaaaagtgaaattagaaattcaaattggggcagagatcctattcagtacaacaacacaaggaagggaaggagaagttatttgaagtgttggcccaacgagaaacattttagaagcaaagatagaaacaattttggcttaattcgggcgacagaaatagtaaatacttccattctgttgcaagttcaaggaagaggaataatagtatcagtcagcttatggacaataacggtgtttgggttgactgggagacgggtcttcaaaatgttattacaggctattttcatgacttgttccaaacctctagtatcaatttgggttcaatattgaatggaattcgtccctccatatcttgtgatctgaataatgagcttttggtgcctgtttcggaggatgaagttaggagtgcactcttccaaatgcatccggataagtctcctgggccctacggtatgacttcggccttttagcataagcattggagtattgtcggggctgatgtagttcaatttgttcgggatttctttgactcgggtatgtttctggattcaataaacgatactcatattatcttaattcccaagaagaaaaatcctacccaaatgagtgatatgaggccgatctctctttgcaatgtgctttataaaatcgcctcaaaggtggtggcaaatagaatgaaaggtgtcttgaaccagactatctctgaaactcagagtgcgtttgtgttcggtagactaatatcggataatgttatggtggctttcgaagcgatgcactacttgaagcggaagaccaatggaaaaaagattatatgccactcaagcttgatatgagtaaagcttacgaccgtgttgagtggggcttcttagaatctatccttcgagtgatgggtttcagtgatcggtggatcggtttaactctaagttgtgtgaattctgttcgctaccatattatcaacaatggtcagaagctggggccaattattcttactagaggcatccgccaaggctatccgttatcaccatatttattcattgtttgtgcgaaaggtttcttatccttgattagacattatgaggctacaagactcataacgggttgtaaagttgctaggagtgcacctactatctcccacttactcttcgcagatgatagctatgtctactgtcaagctttggaagaagaagctagccatgttcttctactcctctagacttttgaaggcgcttcgagtcaaaaagtcaatctccactcgtctgctttcttcagttctgttgaccgagattttcggcaactattaaaatatgattatagtagtgagctgt

SEQ ID NO: 304840 - DNA, 2070 bp, Cannabis indica
cacatttatatagaatagatattaattcaagaatcaactaaatgatgttagataatattaatagccaattctaagtacatttaaacttttgttgttgttgtcttattgaaccttatttattcttttttatgaaaaaactttatattactcttatgttttagttattatattatggctagtaattattttaatttagtatattattttttgtaattcaatttcaagccatttacacttagttttatacacaataatgcgggattactttaggtaatatgttcttaattgtaactgttatttatccaaataatttaatgaaatttttttatgcaatgtttgtttttgattactgtgatatttagtagtcccgtgaaatatcaggtaagttatgtaattttatactgcacgtgaaggtcaaatgtgatgattttaagaatgtgaaagtatgtaactacatagttaaataagacttaaatggattagtggctactactcatatcaacaatgttcatctttttttttggtagtccatcacaaaagaactcaacaattaaacgtgtttgatctgaagtaattttaaaataagtgatcacaccctcgtcgtgtacaaaagctataaatccaacaaagatttgaagcaggaaaattacaattaccactaactttctattgtcaattagaatcaaatccatttatttgtctaatccatcaattgcagccttaaaaatctcaagaatcactataaaaatgatatccttttgttcagcttcttcaatttcttagtctatttttccatcgaatcaattaccttcttagcattgtttttaagttgaacacaataattcttttcaccattattaataataatattgtggatggattgccattgattcagttcaagaaaagactatagcctttttcatttttccttaaatctagtacatcttgattttgatgatgatgacatcatgagaacaaaatcatcaagtcaaatgagttatgaccaaaaaatttagtacaaaaatagttatattgttagcatgtatttcaaaatcatagtatttgttatggaacattttttttttccatatagtgatcaaaagcacctataaatatatgatgcaaatatttgcaattgaccttcaaatctcttcgaatcaaaataactcatcgtctaaccaaaaaatataatttgctaaaccatgaactgtaaaattcttatcacgagccacatgacacaaaactatctcaagaactttaaataataaaactataatatccgcaaacagaacactcaaatacacctttctcttattaatagttgttaccagagaaatcaaatctaagaaaaccccaccaattgggattccacaagtatgaagctcaatggaacattttgtttgttgtattttaataattattttatgtaattaaattcttcattgatagtttttggatacataatacattcttaaccactcttctatttttaagttgagtcaacttaaaaacacagaagagaatgaaatgaaactatcaagctgttcttcaatgtatttttcaaagatttgttaacggaagctgaagcttatttcggtattagtaagtaatttcgctaagcagattgatcaaacctgcaaagtatgtatgaactactacccgtgttcgtgagcatatttgcactgcgaaaggcgttgttcgacatcatgccagcctgcagagacgaaaggttactttatagattaaattatgtcaacaccatttatatttcgagaaaagtgaagcgtttggtacctggaaaatttcgataatcgggttctattccattgccatttatgtctttatgatttggtgtgacatacttcccaacagtgacaactacaccagatccatcatgaagttcaaatactgattgaatcaaaccctattaaagaaacaaaaggcaatcatcagaacttcaaaatcaaataaaagtgacctacattctaagggtacgcatggttggaaggaatgaaaacacaagaatagaaataagaatcggaataggaataaaattaaaatgcataaaaa

SEQ ID NO: 304841 - DNA, 1771 bp, Cannabis indica
tttcctttaaaacacacatacatgtgtagtactgtgtttaattatatatttatatatttttgtgtatattattcccatgttatgttagtttacaagtcctattatatatatagatacatttgattttctcggttatcttacctccaattatagataaattattaagaaagtccaactcaacggttgtgatttaatcaattaatctccaaacaccagaacatgttaaggtccggccttaaggaaaattaagtcaaaacagagcattttaattattatatatagactgtactggatcgatattaattaataatacttcgataatatatataaggtaaaagaaagagtgctatatgaacaaatggaggatgttaagacgtcaatttcgaataaacgatgtgataattaattttatagaatttatagcaaatcaaagggttttgggtggaatttcatcattattatatgaattttttttatataatagactaaaaaataaaaaaatattaataaggagaaatttttatttttatggcttaaattatgtatttataaaaatatagattttaataaattttttgataattttttgttttgttgttatgatgttaattttcccgttgtttttaattgttttataattattttgaggttgatttttcgtaattttttttatttttgttaagaaattatatttttataattttaaaatagtatttttataaataaaaattttagatagtaaaaaacataaaaaaaaaacaatatcttaaaaaacaccttattatgttatctttttaattgaagtcatagagtttttttaaaaaaaattgattgaagtcatagagtttaaaactatatttctcaatagtaatgtcattaataatgtgtaattaaaatcaacataatttttttgtctaaaaaaacaacataaatcctaattaaggcacattcgaacatggaataacgactgttgcactatacacaagttgaaacggctttgactagtcatgtggtcgagactagagttgcatttcaacaatattgtctctctcttttttagttatttgaccaatcattttttttcatgcttgtaaaggaattcctataaatatttaaaaacaaagtaaaattgaaaaaaataattaaataggtccactttaataagtgctacaacatatacataaattaacataacaattaattattggagggtggggttagatatatctatatatttgttttaattttagtagaaatagaaaagaattgggctaggcgtaggaggtggcacttagttggattttaaaaccatgctatagaaaagtgtaaagaaaatatctattctcaatcataggcagcatgcaaaagagtgtgagtagttagtttgtaaatgtagtaggttattcatattgttttatctgtcgttttttgttttaacattttattgccattctctatatataattcgaaattaattattatacatatatatatatatatatatatattagattggaggtgaattaagctattgagtggattcactgaatagtctctctcattttaagttcatgatacatatataactgtatcacattaatgttatgcgacatggtgggtccacttttggtataataactaaattaaatttgaatttggagtagatattaatgtgctttatgtataataataataaatattcatacttctttctaaaagaaatgatataatacttgcttctgtgattgtgattgagtgttaataaatgtct

SEQ ID NO: 304842 - DNA, 1507 bp, Cannabis indica
aactagttgttattttatatatatattattttttttttttgtagagcaagagtaaatcccctgttgtaaatattcctcatgatgttgttttggaggagattcctagtgaaatggttgttcaagtttgtgtacttttttaaattatttattttattgtttttgtctattttcgtgttatcttagagttgtttttaaaacattttgcatgttgattttactaggattggtcttgtaaatataggtgttcttctcaacattatcattccaaattaataacttctgggtattattcagctattaaagatattaaaactatctcacccgaacccaattgaaaatgttcttccaaactattttcggtcacttctttcgtaatcctgagtacattattcacttccaactcttatatggtctgttgttaagggaagttcaacaacctaatgagtttgaattctaggtttctgttgctggaaagtttcttagatttagtgttgaggaatttgcattagtgaccagtctagattgccacatcgagtctgatatttttcagtacaagcaggataagaatatgcttctagaacactattttaaaggcaataaaaaatttaccaagaatgatatccaagttggctatactgctaacaattatagggataataatgatcttgcagtgaagttgattgtattgtatttgttcaatgatacttgctgggggtccgtctggtaagattgtttctattgaaaaacttgatgttgtggatagtggtcgttacaacgagtatgggatgggcaaggagtgctttgagatgactattgaatgttttaagggtaagatcgatgtcggtattaggatggttaagaagaagaaaaggatggtagtttttataggttgttaggttttccgtaggcattacaaatttgtttatttgagtgctttccctacgttgttggggaaactttctttgtattcaaatattagtatttcaaggcttcttaactggcctaaaatctcaaagcttgataagagctttttaggctctaaaattgttgatttcttcacgattggaggatgttgttacttagtaattttattattttttcatcattttatgaataactcggctttttgaagaaaattgatttttatgagcaaaaagtaatggatttggtgttttttatactaggtgatgttagtggatggaatgacgctccaaaacaatattttcctaaagttttggaagttcatgaggagcaaaaactcgtggattgttgctacagcaagggtggaagcgagaagaagaaaaaaaagatacagcgagtcatcttgtggctgcggcaacggggcttgatgtccttatcttttatttttttgagatattttctagtactataaataagacctcttacgctacgaatttgatcaatctagagctacaaaatagagagagaaacttagagagagagagagcaaggaagagacgacaatcgactttgaagtgttcttcat

SEQ ID NO: 304843 - DNA, 1641 bp, Cannabis indica
tactatcaacaagttcaaaggaagaattcttctgaaatccaaggttctagttctttcaaccaaagatttagtgaaccttctacaagtagttctgctcatgatctctaccaagtcaatcctgcatccttatctcttcatgatctatatgaaatcaatcctgattccatgaacaacagtgacatttcttctttggtttcgggtcatagttcatcagcttggcattaagttcttgagatggcatcacttgaaccatgctatagtttcttagtttaataaggtgatgagtcttttttttcctgtaaggatatccaaaccatgcgttataataatgacactaaggcaagtctttttgtaaggtgtgtattttattgtaaagagagtaaggaaacattgacatactttgctctattgaatgatatataccgctttgatcactatgttgattgacgtgattcctctaggaatgctaaggaaatatccaaaccaatctaatctgaaatgtgtagagattcacacttccatagaaaaataactaacttaactaatttttctttgagcaaagtctccacctcaacttaattatcaggacctccagaaacatataagagcattcatactcgtggaccaaggatactcgctgatgatgcttccagataggaaatagcctactgaggtcgactatccgggtctaccaatctaggagagatatttagccagatggaactcttttctaggcaaggactagttatcctgaagactgaacctagagtggacatgataatcatccgggaactcccatccggactcgactatcaatcgacaagacaccttccgggatggacaagtaagttgtctaggaacaaggtccgggagacacctaaccttccaaggatgactttccaggaatgatataggagacttttttatttggaggaactatacctcaaattccacctagttacttcaaattaaaagaacgtcaataatgaagaaagaatgcaattctccattttcctttttcataggtcagaccataatctcatgtgcccttcaaatatctcaataactatttaacgactttccaatgttccaattccgaattggacatgaaccggcttaggatgcttaaagtgtgagctatgtctggtctcgtgctcaccatcacatacattaaacatcctaaaaccactgcatagggtacatccttcatttcttctttctctttcgtattgttaggacattgttcctttaacaaaacaatctgtctccttaacggaacggatgtactctttgtgtcttccatgttgaacttctgaataattttcttgatgtacccggactgctttatgctaatagtcccttccttccgtttctaagagacttcgataccaagtatcttttgaactggtccaagttctttcatctcaaatttaaaataaggaaagtaaaaatttgaaatttatgatgcaggaaataacatttcagatccgaaacgcgtaaaattgaagcatgatcatgagaattgcctacggtttaaaaccgtcggcaatactacaagcgatggcctatgttattgccaacagttttaaaccgtaggccattccattttaaggcacgtttaaaaaccgtcatctatacctt

SEQ ID NO: 304844 - DNA, 1300 bp, Cannabis indica
tattatatatatatataataaataaataacaatacataataaatttgttatatttgtatgtatagtacttggatactcccactagaataattattttattttagaatcactagaataatatttattaattagtaatgtagctatatatatcttacctcgacttgtaggatatgctagtattttttcttttctttttttatatatgataaagcaagcaatattatccaacacaactttcttatagcactcggataatataataataattaaaacaaaaaaacaaaacaaaaacctctacgatcactcttcatttaattcagcatatcatgtaccatggatttttgatagctgattaccccacttatttgtagtttgtggcttaaatttgtctcccacatatgagtaataagagagagaaaaaaaataacaataattataatagaacaacttaattgtagtttgtggcttaaagggagagatgatattaatatcacactagactgcaatttttttttaagaaaaatgactagactgcaattcaagaggttacaacttacatgggtgagagtaacgacatatatataataatattcttcatatattatatatgttatggagcacacataagatttcatattcaataaataaagaatttggataagccccccttcttttttttttttatcaagtgggtacgtgtactttattatcttctctcactttttctctttcttttttttttttccttttctattatttatttattgttttttttttttgtctatcttatataaatagaagaccacctcacgtctcttgaaacataccttctcaaacagctctagcaatatagtctatttctatcatataataattatcccttcacacgaaaataagttagaggaactaagaagaaaaaaaaaacatatggctggtaacaatagtagtagtgttaatgtttatgtaaaatcatcaaatgagtttggtgattcattatcatcagctggtgatggtcgccactgggaattattccataagattaagccttatttgctaatggtggggttgcagtttggtgcggctggaatgtacataactagcatggctactctcaatcatggcatgaatcgctacgtacttatcgtctatcgtaatgctgttgcagcgctcgttcttgctccttttgcactcattttcgaaaggtatatatataactgctctctccctctctctctcttcgttgttctctctctccaccacaccaagaagccaaaccggtgtgatagaaacccaccccaaa

SEQ ID NO: 304845 - DNA, 2396 bp, Cannabis indica
actttttggtgttgcgaaatatcagtaacaacacaaatcatcttacattggagatgaccaaaatacatcaaaacttaaattgatataaattaataacctttattgttactatttacaaattacaatatttcttatttccttgagactttttaggcaataagtcactttaattagtagtctttattaacaaaataatttaatactcttctcatgaatccaccaagatgagaatgatgttatattctattctattctatattctattattatatattgaaacgacaacactccaattcttgccacaatattatatatagtaatgtaatagtagtacttatcaaaatcaaagctttctttttctttctatgagcttcatcacatgaacgtaatatgatttgcaataattttgtttcaacttttcaatgagattgttgggctccaccatccctctcctcccataacatgtatcatacggttgtttaatcaatgataatatatattatctacttatatacattactaaaaagttgggattttttttttttttgtagggtagagtatttatatcggtctctaagattaatatttatttaactgtcgcaaaactaaatagaataggcattggtagaaatatatcgaaaaaaaaatttctcgatactagaaaattgtcgacaatactaaaaaaaaattgtcgacgattttgcacagtcccctatactataggtgacgtttaaacctgtcgactatactattattatcgacgattttgcacagtcaactgtgcaaaaccaaaccaaaataaaatatagaatgtcaactatggtagctgaccgaggtgttcatcgaatcacgaccaccagcgactgctcatcctcctcgaggaggcccaaggttgtcggatctcactcaaaaagtcttgtctctggcagattctaagcagtggccaaacgaagtcataattgcaggcgttaaggtttaaaaaaccaacaaccactgctcacctgcagaaaagaagaagaagaaaacacatattaaatttgtgatttgaagatgagaagaatgaatatgaaaaaagaaaaaagatgaaattgacgatctcgaacatgaagaaaagaaggagaagatgagaccatggtgaaaataaatttgagagaaagagagatgaaatttttatttggaaataaatttatgaaaaaacataaaggttttttgaaaagtgataaagttatggtccaaagttataataataataataatagtaataataataataataatattaataatagtaaagagagagctgagagaaatgaaatgagatctaaaaatttttgatgggaattctcgacggttttaaactgtcgaccaagtatagtcgatgtttgaaaattgttagggactctattttacaagtgtgaagtttcaatttagtaagctttaaaattgttgcttattttcaacgactatttaaaattgacgggaatatattcttaattataagcgtcgattttaaatattcaattaattttattagtgacggccctaaaaaaaaaattagaccgctaaaaatagtatttttatatatatagtagtgatagttgatattgtatttatttttaaaaaattataaataatttaaaacgttaaaaatatgatttattttattttataaacatgcaactgcttattttgaattttatttttacactataaattatttaaaatttcttaatgatgtgtatgatatgtctactaagtttaatttacattatcatatatatatagtaaatactattttggattatgtgttttgtaaaagttaccaattgaactttctattttgttaaatgacaaaatggatcttatattttctaaaatagtaaaaataggacattgaactaattttttgtcaaaataaaacttaataataatcataatttttcatattttaatagttttaagtatagaattataatattcagtattttatttaagttttgtagttattttaactgataaattcatattaataaattataattaagatttttcaatatattgtgtcgtgttttttggccttgtcgcatatcgtgtttttcaagctagtttgttacgtatcatgcatttcatgcttctcgtgtcgtgtcgtgcccaactaaactcgtatttttttgtgcctagacatgcttgtgccttccaggctcgtgctaatttcgtgtcatgtcaaaaagttcgactcgtgtttacaacactattcactactaaacatttatattctattttgtttatttatttaagcacatatatatatactagatgagagttacgtggcgagctacgtaaatattagttttatataagttctagtggtttttgtttaagaattcagtaactaa

SEQ ID NO: 304846 - DNA, 2564 bp, Cannabis indica
atcagtacgtactttatctaattggatcctatcatatatgcgctatatttcgcagatctacagttgaacagttcgcgaaaacagtttcgaatttggctctgaaactggcagtgatcttagccgagaaagtgggccacgatccaagttacttcaaagaaaattgtttaccaaacacttgttaccttagaatgaatcgttacccgccatgtccggttccatcggacgtctttggtctaatgccacacacagatagcgacttcctcactatactccttcagtacaacgttggagggcttcaattggttaaagacggtaaatggattgctgtcaaacctaatccggacgctctcattatcaacattggagacttatttcaggttttctttcaacctacctactccttaatttatacatatatttgtggttaattttcatttctttttttatctacaaatcaaatgtaagtaatttgtgtttaaagtttgatagaataatatataattaaacaggcttggagcaatgatgtttataaaagtgtggaacaccgagttgtgacaaatgcgcatgtagaacgtttctctaccgcgtatttcctttgtccatcgtacgacaccgttttagacagtggtctcgagccttcggtctatacaaaattcagctttagggaatatcgaaggcaggtccaagacgatgttactaatttgggttttaaaataggactccgtagatttcttaatgctacctcataatgtattataaatacgacttgctgttattagatagctagtatgcctgcagctatataatatatttatacaagcttattcataaatatatgaatattaattatacatgtatggaagttattagaagactaatgttggaacatttaattcaagtacttcaatattaatattagatatatagagaggatactcatagtactacttttgctctcggacatttttataatcttttattttggatttgatggtttggtttgtaatttgcttataataaggtttgttgcattgaatttatcctacttcaactatacatgtgtacttatttgtaatataatgagagctttatttatatcctacttaggcacaccctattttaataattttatcttatataaacaatatatagttttaattttattaaaaactgctacacatttttacaatactcaattaagtctaaaattttctacacatttttagaaaaacctactctaaattttttagatataattgtagaatactttagaattttttagacatgtgaaaaatacaatgaaacataaacatttctagaaaaatttattcaagaattttctagttatgcatgcttaagagatatttagaaatgtatgaataaaacccttgaaatagaaagatctagagcaaaaaattgtagcctcaaatgcttgaaggctaacatccatgaatacccatcaattgtttcaatttgtaaacaacaccctaaagctgaagctacaaactttcaataagaacttactactttacatacaattctttcttctaagccaaactattttatatactaaatcatcaactactcatcaacatcactacattaccataacaagcatttaacacttttctcgtatccacctattcaaaactaaattaatacaattaattcttaaaccatcagtggtatcagagttttgtttgatcatcactgggcataattttttccacttatcaacatgagtttggagtccaaccgctattctctacctcttctaattttttatggaaacaattataatttttggtccatcaaaatgaggatctattttcgatcataaaatctatgaataattattgaaggagtgatcattcttgaagacgttgtaacatctctttcgaaagaataaaagaaggcattggaggataatcaacaaacacattctcatgcactatactacttgcagcaagctatggcagacgatcttttttcgcaaattatgggcgcatcaacggtaaaagaagcatgggacatgttgcaggaggagtttcaaaaaatagttaaggtacgcgcaattagactacaaaagtttagaagagattttaaaaatattagaatgaaggatattgagaccgcaaaagattgctattctagaattaaagaaatagtaaatcaaatgggagcctttggagaaataatttctgagaagaatatagtacaaaagatactaatttcttgtacaaaaaaaatatgattcaatagtttccgtgatagaggaaacaaaagctttagaaattctatcaccaactgaactaatgagctctcactacaacaatccatgttattagcggcgggcactctccgccgctaataacagaggtattagcggcggagagtggggtccaccgctaataatgggggatttttttttctgaagagtattagcggcgggcagtccgcggcaattgctccgccgctaatactagtagcggcgggcagtccgcggcaattgctcccgctcattcatttcaaactattagcggcggactattagcggcggggtc

SEQ ID NO: 304847 - DNA, 1227 bp, Cannabis indica
aaaaacaaaaaagaactaacaactaaacaaaataaagcaaaactatgtcacagagataagactaaaacactcaagccatatcatagagatacaagactaatcgcagtagcaaaaattgaatcgcaatagtaaaacataactccgaccaagccgctcctatgccctgggaaggcgacagacatagtcggagaaaaaaaacagcttcctatagctataaaattaaaaacgagaaaccctaattttattgtttgaatattattattatctcgtgataatattaaatgctagtgtaaatttaataaaaatggaactatgttaacccaaattaagccttttcgatagcaatgcttattatcatatctctaatatgggtcattttaagtatctctctcaacacttaaactcctttctttctttgttatttatttgtctattattattatttttgaaagggactttcaaagcaacattcatttcttccttttatgactttttcttcttttgtatttgaatcccaaaaccctccatttatttcttttaaactttatcttctctcattatgactcaagtaaaaatatttattacctcttcattaaagcactctcaaaaaaaaaatacccttgtcccatttttatatatctataatacaatgacagatacataaatataatgacagtattattaactaataataacttatctatatagctcttttcctttctcacaccaattatgattagaaaaagaaaaaaggaaaaccctcattaatttcaaaatgaaaaagaaaaaatgataattttccttaaaaagtataaaataaaataaaatgatgattgatctaattaaatttatattgtttgtaattaaaatatttgatgaaatatcatttatatatcttttctatgatcaagacatatatatagatagttttttttttttaacaagacatatatatagatagttgaaacattatttcaacatattaattagttcatatatattaagtattaataacataaagttgttattacttaattataatttaaataataataataaaattaaatctaatacaatttaattatatttcttaaaatacataaaatataaaatttaatctagttttaaatttatttatttaaaatatatttaataattttttaaacaataaataagtaaataagtttatatatctaaacaatataactaataaatttattataaagt

SEQ ID NO: 304848 - DNA, 1483 bp, Cannabis indica
tataaaatacgggcgttacaatgtttaaccctaaaaattctctgcatcaaactatcaagaccacaaccagccacctttttgttccattgttccataatagtattgacatagccatgatacgaaggccaatgattcccaaattgaaagggtttaaccccaatatttctgtgcacttcattctggattaaacagaggcagtgatctgagataacctcccatttaaagtaagcatctgagttaggaaaatcattcaaccagatattattaataaaaactctatctagtttggaacctcatgcttgttagtccaagtgtagaagaatcccgagcttttaaattcctcaacttaacccacggcaagctaagattgagcatccgcaatgtcattgttccgtattggcctaccaccacatttgtcatgaaaactaaacatagcattaaagtcaccaaaaataatccacagatcattttgcatcccaatactagcaagattatcccaaagacttttgcgatcctccatagagttactaccatagactgtcgtgaccaaaaaagcatgtttcataccacaaaacttcactttacaatgcaccatctgagtattctcacttatgatatcaacccgaacccaaataatcaagatcctactaaaaataacaatgctagaataacagttccaattcggaaaattatctaacatcatttcttgtattttctcatgtttaagtttagtctcaaacaaagcgccaaagccaattttattcaatctacagacatcaagaatatctttctgtttgtctttcttattcatgcctctaacattccacccaatcatgttatttgcttccatcaaaaactatatcggagttatgacacaatatctcatcttttgctgcagcaagcaatacagcatacccatttccagttttcttcacctttggatcatctttagtcacaatagaatccatttgtctcaatgcaattctttttggagtaacccaattacctccaacagtaacacatgatgtctccctctccgttttatccttctgtccagctttttgaacctgatcattagcaacaagatcagcaatggcaagcttccagccgaccctcttcagggatcgaagggagatcgtgttctgctccattgtccgccgtagatgcaatggcaggcttccggccaaccctcttcttctttgccatgggagaagcaagggaagactcgtacgccgttactttcttaaatcaacaaatcattagtaacaaataataatcaactatttgtaattatcaaaacaaggagacccaaaagtttgacttaacaatctccccctttttgatgatatcaaatatttgattattttgaaaagagaaaggaaaaattgaagcaatatatattagattagctctcccttaatatgtgcaagggaaagaaattaccttttaattttaccttgcatgattttgtaaactccccctc

SEQ ID NO: 304849 - DNA, 3419 bp, Cannabis indica
agagagagagagaaattttctcacctccaatagttataaaagctatagattccatatctatgattagcattcccactcaattacactaccatattcccaagatgtaagcattagaaagatccacttggtcaactttaacgaacaagtcaaagaacgtgaataatacatttaagccagaacctaaccatctcaggattaagatttattgacctaagattaactaagtgatatttttcaacttgacaggagcaggggctattgcttgggagaaagtgtgtcaacccaagtcagaaggaggaataggatttctgagtattagcacttggaatagagtagccttgatcaaaaacatatggacactagctacaaaaaaggataacttgtgggttaagtgaattcataatgtctacttaaaatatgaggattgttggaaccacaaggcttctatccatagcaactagtattagaggaaacttgtggaaataaaagatgaaatggtgaaagtgatggatcctagttaattcactgcgaagacatatcatatcgcagcagagtataaaaagctacacaattctcaggagagagtccactagagtaagcaggtttgatctaaacttaatagccccaaacacaacttcatactatggttggctgtccaggatagacttaaaacaatagctatactacataaactaaacattagagaggtagatacttgttgcatctgcaacaaccaagaagaaaatgcttctcatcttttctttggctgtagaataactggaagctgtctgcaacaagttaaagaatggctgatttggcaggtctaagcaactgatttgcactctctcatcaggtggattggcagatcaaaaagaactaagttcaggagaatggtttattctgcagccatagctggtctactatactttatttggttgcaaagaaatatcaagatctggcaaataaatttagaatcgaggcaattacctgtataggagcttaagtggcaaatcaagactagaattacatgtataatgccaaggaaagttgaacaagaagatagaatttggtttgaaaatttataaatactgctatgtatagattaattctttcttccttggaaaaaggagagctttggttgtaaatattgacttagaaagatataacggtaagtttatgatatcttatgtaatgtcaatattggtccagttcgatgtatactccatacaaccgatacttgcatactttttcaatacttggaaaggacatatcacttatccaaggtgtaagttaactttatcgctgattatcatgtcagtgtaaatccagtgtactgacaaatcatgagactaaagtttgaaacatataatcatgataattttcaactatgtagacaacactataatcatgaataactatatcttcagcatttaatagaatttatacattaaacatataatcattaaagtaatcatgtgaaccatgcaacataaaataatttatgatattttattaattagtaaatttgattatattaaaattaagttttatttagggcataaaattccaacacacccaactatatgtaaagataaactagtacaactgttttttaaaaataacatattttattattattttttaaaaaaattatttatgtggagctataagagtgaatccgtaaacgaatgcaaagatgagaaggaaagctttttttttttctttcggtcaaggaagttttagttaaaacggtggcagtctttaccaggttatgcaataagagtatactgcctttggaaattagccatgatatggagcaaatgatgtccaagttctagtggaggtcattgaacaattctggaacaggtatctattggatatcccgagactcgttgtgtaggcacaaaagtgtgggtggtatgagttttcaaagaaaagactttaatcttacttttttttttagaaacaagggagcagacttttcaacattaccagatttgttggccaccaaagtttttaaagcacggtacctcccaaaagggaattatcttataatactaaacttgggaaaatccaagctttgtttagtgtagcatttgggaggcgcaacatttggtgcacaatgagattcgctgatgcattggagatgggagttgtgttgacgttttgggtgaaccatggcttcctgataataacaattcactgattatttctaatcttccaaattcgctaaatgctatagttagttattttttggtacttggtgggggagttgggacgagaagttgattgctcatgctaagcattttgttatagttaacacgatatgttgataaatatatgttttgtatactgttaaaagtgcatatactatttttcaacaaattaatgacaagtggaaattgtggatgcttcttattttaggaagtgtttgcgaaaattgaagctgcctccaaaagtgaaaaagttgatgtgatgtgttggtataaggtgccttcttactatgattcaaattttgactaaaagggtgactgccaagtggttaagctgtcctgaaattggatcgagattgaaacaagtagagtacatatgatggttttcttgactggtgtatggaactttttagacaaatgaaggctgataaaggatgtttggtggaaactatttttattcccatatggggagctcgtaacaatgtggtttggaagaggaaagtattggggcttcatatattatcgcttatgcaagaggataccttgaacaatgaaagaatgctcaaaagtctaaggtggagtcttcatgctctagtttatggattttattaccacaagtttatagtgtcaaggtcaatgtagatgcaactttatttatggaatgacatggttatggcttcaattagcttaggatgacaaatggttttcgattgaaggttacactagtttttttgcagggagttcgtgaggctctcaggtagataaagaacaaataatagaatcaaatcattctagagactaattgtttggtagtatacaagcgttaaggagttctctgaatatgatttctttgtttagtcttgtgattcaaaatgataaatgtatgtttgctaaattaagaaatatttatgttgttttcattaaacaatgaactaatgtagtggtttatagattactaaagtttgctaaagtcttcatttcatagcttcatatccctaactgagttttttttttttttttttgtaaaggaagatcgaaggctaggaaggagactaagatcttcagtaagaggaacttaaaaggttccatgttgactcttcgttcgttccaagtgcatggcgggcgagattgtgagctgtagtgtttagagaccgggaaatgtgatgaacctttacacctggaaaagaagacaaagaggagactatc

SEQ ID NO: 304850 - DNA, 1518 bp, Cannabis indica
accaataaaatttaatgtaagcccaaataaaagtctaacaatgtcaacaatacatttcaattaatttttaaactaaaatttggaattatcaatattaataattaatgatttttttaatgagaaattttacacataaaaaaatctaaatatataatatcataatatttgcttatgattatatttattttatagtgatatttttacgactgttagtttattttttatgaaagacttttataaataaatcaaagttcagaagaaaaaaattaatcgtggtgtaataattattaataaaacatgtaaatgttaatataaaaaataataatctaagtattaagattttaattaattaatgtgtgaatataaaattttaataaatcttaaaattaataataaattcaggaatctttcttttgcaattcaagttgtactcagtgctcatggctattcatgcatattggtgccgaagtgctcattttgcctaagaaagtaaagcttttctatagaaaggccaagcttgtacaacaggaccaggtttgattgcttgtgaatctttatgtcaatctaaagccgcatgaggacttgaatttaggagaattcatgaatggaaccaagctgccatggggaagtacatttgggcaatagctcaaaaacaggacagtctatggttgaaatggatcaatagtgtctacctcaaggagcatgaatagtggagttacaaggctccccctcagagtagttggtactggaggagtcttgtgaacttaattaaaggatcatttccgagacattgcaggccatcagacttgtactcagcaacaacaataccaggtaacaactggatattctcttctctgtccagttcaggacaaagttcagtggtcccaacaggtgtgagggcggctaaataccccaaaacacttctttatctcctggttagcaattcagggaaggcttcgaaccaaagatagattgagaagaatgggaattatgaatgttgatgagaattgtgaattatgctcaacacagaacgagaatgcagagcatttgtttttctagtgcagtacctctgctgcctgtttacagggaatcaaaaggtggctctcatggcatgttaaggctgttactatgctcactttaaccaggtggattgggagatcaaagatcatcaagtttaggaagaatgtcctaactgctgctcttgtttgtttggtctatattctgtggaaagctcgcaatctcagtttgtgggagaagaccaagccgactgcagaaaggctgattgaaggaataaggagtgatgttcttcacagagttgctgcaatatggccgaaaaaaggtttctgtaaaggataccaactggttccaaagtttgtaaatggtggcaaggatacatagttttgtacagattatatagaatataaaaagttataaatgtatagcatttaaacagcttaggccttttggggtgctatttgtttgtacaaagatagtgtttgagcaatcaacttttcctga

SEQ ID NO: 304851 - DNA, 2482 bp, Cannabis indica
ttatcaataataataatttaatatgaaaatttatgctataataaataaaattattaataatactatgtaattagatagtataatttattattattattatatatttacaattagtttttaagttattatttattatattgatatatataatactaaaaaaaattaaaataactgcacgcgtatattacctagtttccataagaaaattgtgaattgtagagaataataatttggtaaatttatataaactataaattaaattaaagatacagacaaatatagtaaattcagttttaaattaggtatttattcgaaaaatgatatttttctaatttgtctccattttcttattgggccataattcttatgtttagggctcaatataaaggtagcccatttaaacactgaaaaaagcagtaactgtaagaaatgaagaaaccagagctttccatccccattccaactaccattccattcttcgatcagaaaatatacaacccaaaacgtcgatcaactaagagaataagagctagaaacagagattcaaatatgggtttcttcattaaccaaaactttattgttttactctcaatttcactcctaattgtatccccttcaccagttttagcctcagaaaacgccgtcgtttctgacagcaccacggcctatgaattcatcaatagcttcggctttcccactggaattcttcccataggtgtggtgggttacgattatgatccctctactggaaaattcgctgcctattttgatggcacctgtagcttttctgtcgaaggatcgtatcagttgaattataaatccgccattaatggttatatttcaatgggagagctcacgagattagagggtgttagcgtaaaattgttttggttttggattgatatcgtggaagtcaaacgagtcggcgatgatctcgaattctcggtgggcatagccggagcgggtttcccagttgataattttgtagagagccctcaatgtgggtgtggattagactgcatgaattttaaagtaaggaagcttaagacgaatgttactctttcttcttattgaaacattacttcctataatgtaattggaaatttgtgaagttttattaaatctgtgtgttcgattacttttttcaaatttttgtgtacttgctgtattgttcttggtgattgtttaatacttcattgtgctatcaaaatgaatttacttgatacctatagacctatgtatcttaatatagatatgactaggattttggtggactggcatttatgtcgttctagatctagttgttgccctttttcttgctgaaacttaatttcaggcttttagctatgtgtttatgtttagctacatgtaaatatagcataagatggtatgtacattgctgtttacatcttctgtaaggataataagaatgaagattaggagtatattaactatatgcctttgaaaatgaatggacttaactttgcaccattgcataagggtttgttatttctgtttcttgcagcttggtttagaaaatatgtgatgagaaatgtttagtactgctggtttcaaatgtgtgtacatgtaaaaatggcattaggcattttagatatgctcatttaagtagtcttatcgtagagctttttgttattttcagagtattcatcgtaccgttgttactgggtagactatactataatgacattccgtttgatatttagattattacgagagatcaaatcattgagctattctttgacataatgttttgttggttttttaacgactgcatgaaatttatatattgatcatcttcttggcattttaaacttctcaaatatagtaatatatatgaatccttggtgttgcttttttttttttggctttttttttttaaaatgttatatatatagtatatatatatatataaagtaatatgagagcaagattggatccaatattctctgattagcggcgagcaatgaaatgccaccaactaccgtcaatgacaccataaaaatctcaagtaatatgcttgttccttatcacgacgacaacacttctttgaacctcctgatgaaaaatgtcttccacaacatccatcaatgctaaaaaaaaatgtgtctattatgatgaatcgagctatattaacaccaaagaactctttcgtcgatgaaattaattcgatgttaattgcaaggttcccgacagaagcacatcactattacagtagagatgaggctatagaaaacaccgagcaatcagttatggaagattttctaaacactctaacatcaaacgaccttcctccacatgaattgcagtttaagaggaattgtcctgtaaagaccgcttagtttaatttggaaattagcagttaatcatgtttaattatgaaaattatttatagctatttaaataattatttatactgttattattgatttctgagatgcattttatgtcatttagtagtttt

SEQ ID NO: 304852 - DNA, 1356 bp, Cannabis indica
ccccgccaatagagtaaacagaaagtgaagagaacagaaataataggttattttcctgtatttattataatatggatgtcttacatagtatcctctgcggcatgaaaaaataacaggtataattatcttttctatatacttttgaagagctatgttgggtcaaaatttaaattgagtagcagtgttattttatgcttttgctctttttaaagtatgagattatatagtgtaaagtgcttcatatttggtgtaactattgggcatccatgtaatactgagtagtggggatgagtgtttatttagctgagtataatttttgggaactagtctcaactttcttatatctctaagaaatatatgtccaatgataaaaactattatgttaattgatatattttcagtattttctttattagatttaccaagtatcaggatgtctatccactgtcagcattatgtaatattgttaataaactaataatatttagaacattagaatacactactgccgtatttcacttgaatgggctgttatcattatatttttttttgggtaatttacatatatatatgtaatatgtatatacgtggagtcatatagacctggtaagatccaccaatataggctgcatgtgaattccacgttgaatcgttctcaccatttatttaaaataataaaaaattaatcaactcacactgaccaatcatcttcttcagtcctatccagagtcaaaagtcagaaatttcgcaacattaaaaataattacgttcatatatagacgaggtctatataaatggaacaaccgattcattcacatttgataaagaagtttaggtaagggagggccaaggcattccctccctcttcttaagatttaaaccgttaatatagttgaataatttacagatagcgactttcacacgagttgatttaagactgtaacctctcgaataaccaagaccctttaataataattaataacaataataataataataataaatgtggtaggcatggaaaggcatggggttgtaaatactaatgaaagagtcacgtgaagctcgcgtgttttgtttcctgaatagaacgtgacgatgataatattaataggaaaataattataacacactcaaattgcacacttcataacacaatgatgtgtcgttaatttgaatcatacaatcagggccggtcctagacaatttggggtttaaagcgaaagaaaattatgggaccttttaatcacaaaataaagtagaacaaaaatgagcaaaataatttacttgttcaaaagtattatgtaaacatgattcgtcttgctttttgtgatgtaaatgtactaattaaacttgtat

SEQ ID NO: 304853 - DNA, 1405 bp, Cannabis indica
atttgtattcatgtgtgtattggaaaggaaaaactgttaccacacaacttgtacttggaaaaatcaagtggtaataataataaaaaaaagctcaagcatcacattcatatatttttgagtaattcgtagtgaaatttctttgtattttcttggtgacgaaactctttttcaaatgttttttttttatttttgaatgattgttattaaaacttcaaaactaatacaataatataatccagttaatattcagttgacatctcaaattttcaaaaaaaaaattaaatttaacagaattttaccactaaaataagataaaaaaaattaagtgtatatatatataaaaagctgttacgaccatacatttgtacttggaaagactatagtgatattaatgttttttttgataacaatagtgatattaatgttgttgttgtatgtgtttatataatactgttgttgtaatcaataacgtaaaaacaaagactgtacactcaaacaaaacctacttaaaatgatagaaaaattcaaaaacaaccgaatatatatatttatataatgatgatgatgatgagaggacataatggtccaaatatgtactcattcacactacactacactactctttctctcttcttcttcctcattatcatcatcatcatcacaaaccaacacatgtgtttccatttgattatgatcatatatatatttatcatgatggtgatatttcactgatgatcaaactttattgttttctatttacaatattatattagaaacttttgtttggagaacatcatgtttttcgataattctctttgtctctctttctcgagatctctctatgtatctctctttctcgagaattgagtaagagagattaaaaaagtgaccgatcgaggagaaaaagagttaattgagtgctcagactcaaagtgagcactcaataatataaactatacatttttaattaatcatacattacttaatctaatatatatatattaatatataaatactaactagatttttcccatttctaattaactaggtctaggtcaacaatttttttattattatataataaactgaaaaaaagtttagagtagacaaagtattatttaattaacttggactaattaagtttgcattagtttagaatttgatgtgatatgaacacaaacaccacacttagttaattaattgaaatattaaagttttatattgagaaatgaaatagaaaaacaagtgaataaataactttttttttcttaatcaaagaatagattaatgttcaaaaaaagaatgattcgcgagaaattaagtgcatgtttggcatcataactaaaaaactgttttttatttttaaaaacagaaaattgtttttaaaaacaatttggcttgtttg

SEQ ID NO: 304854 - DNA, 2274 bp, Cannabis indica
tttttttcaattaaattatttgtataaatttttgtaaatgtcataagaaataaataagaaactccctccctgtcaactaaaaataaattagattttttttctgaaaaatttggaaataaaaatgaaacaaagtgatgtagagaatttactcggacaccaattttgagaattttttcttaattttgctatttttttttatactttaggaagggaactatttgaaaattaacaaatatattaatagtatccaaaatcaccctaacatatttattgttatttgggtaatttaatatcgtgaatcataattcatttttaatagaatttgacaaaaaatgatatggtgtgtggctcaacataggttgatttcaatctgtaactaaaagtgaatgccattcctttcacacgtttgcaacatattaagtgatagattctcaagtgtatatcacatactatatataaggcttcgaatcttctatggtctgaaatcgggtccacattttcttattcttgtttatacaccatacatgcatacacccacaacaccatcttccatcttttgttatttttttcaaaaacaaacttttatccaaaatctcaaacatggcaactcaaccaacatcaagtgcgggacacctctctatgcccatctccaaggaaccccaaaccagaaaaaccgcttaactgcggcggtgacagtagccaggggagtgagatggcaaaagggtactcatgtacaagttaagagaaatggagtggtaagatgtggcataggattaggagatttcattggaggagacttggtgaaacccgatttggggcgttggctttcggacgtggaagaacacaaggctttagctatttactctcctcatgaaggaggctatgaaggaagataccttaatcgtctcatttacaaaggctactactttcttgacctctcagctcgtggccttggtgatccagagaccacacttaccaagattcaccctgtttgcccagtgagttttattgctataaatataaatatgccattatggtcaattgggatttcttattcatctacgtactctcttggtttgtaggctcatttagggaagcaacctatagcaaggtggtattttccaccagaggttgattacagactcgaagcattgcctcctgatgccaaaggattggtggtgtggattattgaagccaaggtaaataaccgtaaaaggaactgtgtatgatcttaatcaagttaatataaggttacccttttttcattttggcatattattcacaggttttgtcaaaggcagaactgcaatttttagcattgcttccatctctacgaccaaaagttagggtcattgcagaatgtggaaactggttggtggactaaatcacatgatctgtgctattgtttctgaataagtttgtgatcaaaaagtggagtttttgaccaaacactgcaatttctgctttgatatgttgcaggcgtaagttcatgtggaagccactcaaagaaattgcgggactaactgaaagtgaggactgagttggaacaacaacaataagcaagcctacacagcattcttgaatttcaaatacatttcacaattgtatattcatagttctcatcaataatttgaccattaaatttgttagtcctgctttgcataaaaaatgcatacccttgttcctagaactaatttcatacatttttgcaaagactaaattgcatatacaatagctttagataacttgacttcactataatgagattactacataataatggtaaatataccttatattatatattggaggggcttctagatttggttaaagaaacatcataagtactaataagttgtactaagaactgtacagcatccccaaaagtttgatgcataagacaatgtttagtggatataagcaaaggttaagtccaaaattcctaaactagagaagctataattactccaaacctccaccatgtctggaactcagaacagaagatgatatgtgacaaaaaaatcagtcaaacttgaatagctataagtaatacagaatgtcaaaacagagcgcacaaatctgagtgataagttgtattggtaaaatattttgcaacaagttgaagtcgttaatctcttgaagctacacctctaagcaaatcatattatcatactaagcagtgtgaatgtcaattgggccgggccggcccgactcttcttttggcctagcgggtcaagcccgacccgagataatcgagctgggttaggcccgacc

SEQ ID NO: 304855 - DNA, 1442 bp, Cannabis indica
ggaggaatgtgggatcgagattagtaacacatatgatatgattaaaaatatatatattatttataaaactaatacaataccattgcacaataaccatatagtacaatatactataaatacaaaacgtgtcaaatgttcccttaatgatattatagactactccaattattcaattaattttgagatagaaacttatacttctatccatacacactactttttaaattatatatttccacattttttaagcagatagttctcgtgaccaccaaccccttagcacaaatccaaccaggctagaaacttagccaacccaaaccaccaaaacaaaacccaagtaatcaaataattttagcttcgacttcttcggccagccttgctaagggaaaacaaatccgagagacccaaacttgtttgcccaagatttttccactaccatttaaatttccactcaaacctacaaacatagaggccaacatcttggagcaagtgcgcaaagcggacatctatttaaaatgtcatctcactgaggagtgcaacatcgtccaatcaaggactgaccgactgtcagatgtgaaaagggcttaaataattgaggggatccgtaacccaaggcactctactccaatcatggatttccttgcccttagtaacagcttgtgccctgcctgggtagggaactgacaccattcaacgctgacttgttggaggacttaacagtcagtgtgtgcgaattgaccactaaaaagcgagtaataggtagcaacactaattccatacttctggccaactcctcgatgcaacaggctactggggtatctttacctctgaattgacttttcttttttgcttgttgtaagttattgctccctttctaactcttcccctcttatgtcagatggcatttctggcggaatagacctgcagagaagtcagctctatggcagtccaacgggacctttccttggccacctgatgaaatctagaggctcaaattaaggatatcaagaaggaggccatggagaagattgataagaatatccaagaggccaagcaatactgcgctgaagcttatgccaaggccgataggaagtacttggaaaagtacaatgaatataaagcgacctttgagaagaaaatggaggagaaattcaagactcagggagctaagctagaagcttccaactctacccttgcccagaagcttaaggaagccaagggagccaaggaggcccttgagaaccaaatgtccatcaaacttcaagagctcttaagacaagatcaatatcatcaaagggttggaggccaaggttaactcgactgaggcactttgtcgacttactgaagaccaggttactgttgggttttatgccctaaataaaactcatttcaatataatcagattaacttattaatatagatcagaaataacatttaatgtt

SEQ ID NO: 304856 - DNA, 2716 bp, Cannabis indica
tttaatgtattttttcactttttattattaatttaaaactgtttattatttttaatcgttaattatttttttatcttatatttaaatatattacatctgtatattttaaatattattgtttataattagaatcttattatgttttttaattattaatatataaattttgttaattagtaggcttactcattaataccatatcaattagtcataaaaaaaatagttatacaaatctaaatatagaaagttgaatcattaatatatctattataatttaattaaaaatatgtatgaatttttgtaaatatgttttcaaatgtgtacatttttaaaattgtgtttttttgcacattttttgtaatataattgtttttgttgtacactaatgaaaaaacccctaaaataaaagtctttgcaaaatattgcacctttttatcatatcatattataattaatttattaatttattctttcccggcctaagaagggaagggtcgaggaagttgcaaaaagatcataaagtatagagttcacacacacactatattgagaaaaatggttcatatttattataatttgccactggaaattgaattatttgaaaaatatagctaattgaaatagtctatatatatgtttatatattatatatatatattaaaaattaacggcttacataacaaaataaaaaagaaaagaatttcctaagtctaacatgatctaataaatatcgaaccagcaagtggcgtgttagatatatactcttaccgcatcgcctatacattttttttttatatatacatatttcattcatcagttttcgaaaatatcatatatatatatatatacccatatataatatataaaattaatcattcttttatatttcaattcagaagtaaactatatacaatattatataatgtgccataaagaaatttcattatatatataataacgtaatactttttacttagcatgcatgcataaattatatattatattattacccgctttgctctattaattaatttcgacaacacaagtaaattaataatatattagcacaagctatagttttaagttgtaaatagatatataaatttgattataagtgatgattcagtgagtgtacgtatgtaaaataaggagacgttttgtataattttggtaatataattttaagtttgggtaaataacattttcgatcttgtgttttgtaaaagttattaattagactctctgttttgttaaatgacaaaatggatcatgtattttttaaaattgtacaaatatgatacttaattgattttttgtcaaaataaaatttaattataatccgatctaaaagtgttattacaaaattatttaccttttctgtatctgttcgtattagaaattattttcaagttgattatattgaaaaaaaattgtcaaaaattaagcttgagtcatatttctattattttgaaaaatacacgatgtatttttatatttaacaaaacacaaagttcggttaacttttgcataaggtcaaattccaatcaaactatatatacaccaaaacaataggattgtacgaagtacgcgttaaataagtatagccaggtcaccaccacacgcttttaatcaccattgacgacattattataaataaaagaaaatctaacacaacaacaacaacaacaacggatgatctccattggtggtacttaattagaactagctagctagcttagcttgagtctcagcggatcattctggatcgatattcgatgacaatattattaggtgaatcatcggtgggtaatttagacctcgagtctcagcatagtagtagtagtagtgttgcgttgctaccaattaggagctgtactgatcataataatactccggctacgagaaaggctgggtccctctggcggcgctgctttcacgccatcgttcaagtgaggaaattgctactcttggtaaaccaaaacagagctcgtaataatggaaaccaactactgctccatcatcccttagcagatgttccttacgtcgctatctccattgctaataatggtgttattgacgtaagtacctgtactttcttctctactctagtctctctaactatcattatttttttgatctaaagttaattggtgtatatatatatatctactttttctttattaatattacactaaaacacgctaattaatttaaactctagctctcacttctgtcgtacccagctacagatgcaacaacatgtttgtccccggccgcctgacctattcattctatataagaccacaccaccaacgtgtaattttatttatttattttttaattaataaagtacatgaaaatcattatactcctaaaaaaataataacccttatatatatactattataggtcaggatgataacatcaacaatattaatacttatgtggatagattgagcaatttgtatgtgttataccgttgttgaaaatttctcctactgtttattttctatttcttcagttaaaaatgagtatttttacttcttaaaatttgacaaaattttaaacccttttattaaaaaaataattttaaaaattataatcctctattaattctgaaaaaattattaaaacggataaaaatattaaattaaagtattaagtttacttaaaaaaacttaaattatttgtaaaaaaatattttaaaattttattt

SEQ ID NO: 304857 - DNA, 2340 bp, Cannabis indica
aaataaatgtgtgataattatttactttaaattctttggatagagcttagctacattagttatccagacttctaacatgcataaacactgcatttgacaaattaacttgtttaatctaatccagtcttgcgtaccaaatgggccttattaaaattaaaaatgctataaaattttccttcaaaaaaaaaaaataaaagaaataattgccaactttttctgaaagcaaaataattgccaacttactaagttagtgcaaggagcttcaaagaaaatacatttatgtgttatgacaattttgccacactaaacatataaatcaaataaaaccggccacaaaaccggtttttctaagtaaaaataacaaaaagttactggttgtaacagtatattattttgtgtcttacttgaggtaaagtgaggtactaaataagtaagtcaccttttttaaaataaaatatcctttggacgttgtttattgtctaaaggaaaaaaataaaataaaaaaagatctcataccatctctgcaatttcatttcattccattctgccccaaaaaccctagaatcccaatttgaaatcatccgaagtgatcgccatggggaacaccgagaagctgcttaatcagatcatggagttaaaattcacagcaaaatcgctgcaacgccaggcccgaaaatgcgagaaagaagagaagtcggagaagctcaagatcaagaaggccatggaaaaaggaaacatcgacggcgctcgaatatacgccgaaaatgctattcgtaaacgaactgagcaaatgaactatctccggctgtcttcgcgcctcgacgccgtcgtggctcgccttgacacccaggccaagatgaccaccattaacaagtccatgggctcgatcgtcaagtctctcgaatctactttggctactgggaacctacaaaagatgtccgaaccatggaccaattcgagaagcaattcgtcaacatggaggtgcaggctgagttcatggagagcgccatggctgggtcgacctcattgtccactcccgagggtgaggtcaacagtctcatgcagcaggtggccgacgattacggcctcgaggtctcggtggggctaccacaaccggccgcgcatgctgtgccctcaaaggagaccgagaaggtcgacgaagacgacctctccaggcgtcttgcggagcttaaggctagaggttaaagtatttcaatattttatcccctgtaggaggaggattatatatatatgtatatatgtgtaccgattgcaaatattgactgcatttcgagaatttagaactttatgtgtgtattcgtattgcatttggatatatttttttttttaatcttctttttcataacaatcgatgaacaatgacatgaaccatttttccgtattggtgttgacgccattgtgaatgttctcacgtgtacatgatttgtcgttgtgatgtgaatgatttgcttggagcatattttatatgagtttcttttcagatttagctatggcgaattgatatgtaatgaaattgtgtactatgtttatcggcatctgggtgttgatgtgtttcactatatatgccttgcattgattgattatcttagacttcaaatttttcctatggctatagtgttatatgctaattctcaatacagattaatatgaactagttgtcttttattgaaattcaggtttgcaacatgagtatatcatattctgcttcataacgtatatagtgctaaccactaacgtatcttgccgagttcatgttttcacgttctgtatattatatgatatacatcttctgttttctttataatttttctccaggtgtttttgtgcgataatttctgtctaaattagtatctttatttcgtacatttgtattaagcttttaacatttggagttttaattggatatgtaaatcaaactttattttgtctagagtctgtcaaaggtttgttctggtacggtcacttttaaattttagtgagaatgaaagagagattactctcggatacttagctgtgattttgttgtctccaaatgttgtaaggttatggggtagtttagttaagtttcaaggaaaaggaaaggataaaaaagcctagaggaaggccttgtaagaagccattagtagaatttatagtgatggcgcttggtgatggacttgttaagatatgatctcatattgatgttaggaaaatgaaagatattcctcttctagaaaagacaaaataagggcgtctgaaaagggcaatcaccaatagtaaaatgtacacatctgatgcaggacctaggaagaagatttcaggtcagcaaatacaaggtaa

SEQ ID NO: 304858 - DNA, 1141 bp, Cannabis indica
tgacgtactcgtgtataagagccattattccgtgagtgtaagggcccaatggaggcttgaagcggggacgttacaaatttatatatttaaaatgaatatattatattaaaattttaaaaatgtgaagttttagtaatgtatttaaagaaattggtgtatggtatatgatataatgtaaaagtgtgttgtaaaatagaaaaagtaatgataatatattttaaaaataaagtaaacacttaatttaggagaccgaacaaaataattttctaatttaaaaatacacatatttttttattgattttaaaaatatactacattttcctaaggtccactaaaattaagagccgacttgaattagtttcttgttttattatctgttttcatgactcgttatttaattacaaataacataattaattacaccaaagccttataagaggtgtttggtttttatataataatagaatgaatgttgtaatggtaattattatatttgttttagtgtaagaatgtaatagaataagaagtttattataatcaaagaaaaagtaaaatagagctttggcatttatttttattaaaacattttattactttcgtaacatagatattgtaataagaattacattagtttttacatgtaattatcattacaatattcaatataaaaagtaatggattattttgcaaaaaaaaaaaaactggccatagaatatatgttatgaatagtctttatcaagaacatgcatggtgtccttttggagatttgaccaaagaccgtagattccgggtcgacctttttatgacttttcatataattaagttatgaatttgatgtttagtgatttgaggggctagctgctgccccattttttgtgaggttgatcgatcgagtgcttcaaacttcaataattttattattaagtataatttagtactattgaaataaaatatacgctaattaacaattttattattgaattttgacatatattaaatgatacttctgaattgttttgaccgttaaaaattctttccgaattattgagattgttggatttaaggacttttgtctaatttcattcaattttactgttatcgattgtttatgtactaaaccatgctccccagactttgatat

SEQ ID NO: 304859 - DNA, 2405 bp, Cannabis indica
atatatatatgtaactatttatatattaagtttcgaggacctattcaagctagcaagatcaggtctcatcttctttactctcgtagaagatacccaatattgtttgtttggcaatccaccaaaaaagctatagctctacaaaaatggaataacatacgccgtatttatatatatatatatatgtatttcaactagttattacgtacgtgtcgtaattttttgtatccttatttaatcaaattaaatccccaattaatatggaaagttgattaataaaattaattccgaattaatgtttgaacagtcagctgcatgcacgtatatcctttcatttgaaacaaattaagaagcttttagacgtggaggagtattggccaatttgttagccacataatcctgtttttttttacacattaatttcttcttttgcttttctctctgtctctacattttcttccaagctttaccatcttccgcttctgctttcatcttccataacgacggtacaatttttaattttatattctattttaatttttcttcattaattacgtactatgtataaaaatgtatatgctaatagagagatattaatagattactgttctaaattccagttcgacttatatttgatagtgtaaaagataattggtcgatcaatcaatacgtcatattctagtcacatttcatattaaatattattggtaatgacatgcatatgccacttttctattgaaacgttacaattatattgtcatggattatatacaggggaaattaaagatataatcgatagccttattgcacaatagatcttgatcttatggttataattaattcttaattattcattgaattgaattcgaattctgcaggtatatcatcaaaccgagccaacgtccataccctttggttagttaatattgatcaatgagtactaataccgaagaagttgaagaagctttgctttcggaatctaaaaaatatgagtttccttcctttccaagaataagaagccgtcttcaagttcaatataataatagttataacactattgcatgtacaccttttgtggacgcaaactgctcagatcagcaaatatatggatctgattatgcaaaacgacaatttaatatagttcaagtgcttgtcgttttggctacttacttaggtggaggaaccctttgtttcttcctcatcagagaccaaatcaagggtcaaaaaacaaatgggtttctcgattcaatgtacttttgtgtggtgacaatgaccaccgttggatatggtgaccttgttccaaatagtatactagcaaagctacttgcttcaatttatgtgttcattggtttatttcttggtggtctaataattggtaaggtggctgattacatagtagaaaaacaggaaatacttttggtcaaagctattcatgtgtctgaaaaaattggtccagttgagcttttaaaggacatggaaactaacaaagtgaaatataagttttttacagccatggctcagattttggtgctcatcatagtagggactgtattcttacacttagttgaaaatcttgagttgatagatgctttttactgtgtttgttccactattaccactctaggatatggggatgagagtttttcaagtaaaggtggtcgtgtatttggggttttttggatattgagcagtacaatttgcttagctcaattctttatctaccttgctgaactttacaccgaaacaagacaaaagtcattgatcaaatgggttcttaatcgaaagttgactgagtcagatcttgaagcagcggatcttgatcaagacgaagttgtaaggtatgagaatttctcaaaccaaaaaagaatttaatattattacatatgtaataatgaccttaaatcttgcaattaccacaattgcactgtctctgtccccgtgacaagcgtcatctaatagttgtggtagtgtatcccatcattataggtatttaccgtgcaatttggtattttcatatttttgaaagaaattatacaaattttgctcttaatattattaattaggactagtaccatatgtgtatatttgggtgtagttaacttaatttgctttggattctgatgcacatgtttgatgcttggcaacttttttttttggcagtgctgcagagtttgtcctgtacaagctaaaggaaatgggaaaaataagtgaggaagatatctcaatgctgatggaaacatttgagcatcttgatattgatcaatcagggtctctcacaccagctgatcttttacgtccttaatccctctaaaatcataccatatatatatatataatcttatggaatctcttattatttattctctctttctcttgctatttatgattttttatagccatatatatta

SEQ ID NO: 304860 - DNA, 1597 bp, Cannabis indica
aaaaaataagatatctagttaccattagttactcctctggctactatctcatttttctatatatttctaacttttttttttaattttctcaaaaattaatatttttcgtataaaaaaaatgatatttttacaaaaaaaatataaaaatccataagatttgtaattttcccttattctctgtaaggagctgagctcaatattattgagatttgataacactatgaagttgaaataaattaaaagtaacaatagtatagtcaaccgatgtaagtatatatgtatggattaaggaatgttccaataattaatttatagaaatatactacaatagtactagaatgtttttctttggaccaatgcttgtctttgttttctaactttttctgtaacaattcatttgatttaatgagatatggtactttcattaaaaaaaaaaaaagaaatatactacaatattttttttcccttcatttttatcatcacattttatcttatttatttaatttattgtttgtagtgttggaatcttatataagcattttcgtcttaaccattttgtcatgaacacaagatcatttttatgagaagacgctgcaattacatgaaattaataaaagcaaaagtatacattaatcagttctagtcaattattagtacaattttttcatcatctattactatatatacaaatgacacatttgacttgaataataattattaggtcaccatgtggttgatggtttattgattggtaatctctctattatctaagcacttttgtcatgtttaatgattagttatttataaatagatttcaaataactgtcaattaatcaactactttgtatatactatgtatataaataaatatgcatatatacaggaatatccatttgcattcttttccagaccacaaactacaaagatgcttgtatatgggtatacgtatagttaagaactagtctagatggcttttagcttggccttttattgtaacataaaataatataaagtttatcgtaaaacgaaatagactacactaattctctactaccaaacacatattatactaatattattatagctgccgtcctaagtggattattaatatatagtaattgatcaaaattaaaacaacagcaaaaatccaaagttgtataataactataaaaggtggctgaccaatcctaacccctacgtacgtaagcatactatgtaataaataatataaagttctcaataatagtagcattaggcaccatctcaagaaattatatttcaaaaacaaaattttaattaaccttcttttttcttcatctttttttatgaacacaaaatgatattttagaatatgttgattatattaaagtaaacaaacacaatgaaatgttgataataaatatataggagtgggtatctacgcgttttgttaggggaaatagaatagaatagcatggaaatgaattgccatgatccattatttttgtttgattgtattttgaagtgttggtgtgaatgactattttatttaaaaataaaagaaaatactattctaacataagatgtataaaagaatttaatatttttttttttgaaa

SEQ ID NO: 304861 - DNA, 1866 bp, Cannabis indica
aaaaattttatttttattttgtgattaaaaattagaaaacaaaagtgttaccaaacggcacctaggttaaactattggttgacataaatatttgtttattttttattatgttaaaacaagaacattatttatttaattgttatatatgtattatatattatagatgatatattgatatttttttataaaatattattatttaattttgtgattcaagtttttattatgttaaatttatgttataatttaataaataataaataattggctcaagggaaggtgctactgagccgatttgggctgaggcatagttggctcctccagatccaggttaggcttagcaacgtcctgagcatgctcttcttcaaccctgtcagaagacacctcagcttctgcgaactcctaaaaacttgagacctcagcacttatttcttcatcgctaacactatcaattgagaaaggaaactcctcgagatatgtgttatgttcaatagcaagtactctcctactaacatcctccctgtctgcctcgtcaataagccaaagtatggaaggatccgccttccataagttgtgaaggaccacagcataggacacctctagggagcgaatgcaatatttttctaccttagttgttgccttagttgatgccgtaaccgcgtcctgaatgagttgggggcagtctccctcattctatgcatggcagctaaagcaatgtatgccttcacaccattcttttgactctggtcgactctcttttacaatctatcaatggtttcctattgacagtcacagttacgacaggccccttggagaagaaggctcaggttgccatgttgggttacccaggactccgcccgtttcttctcattgttgtgttcggcttgaaggtccttaatgagtaaatccttctttcggatgtcctctaagaagtggttgacttgttggatttgggcagagataatcttagactgaagtagcatgcggccctcaactatgtccttctcctttgtggccttggccaagtcctctcgaagagagcgtacaattccctcaacttcttgcataattttagctttgtgatctaagtacattttttggtatttggcgtcccacttctcctcctcaaccgtcagcttggccttgcaatcttcctggatcttttggctactggaagccgcctgggtcttgatttgctcaactttagcgtgtaaggccccgtttttgatggtcaaggattgaactttggcacggagctagtttaattttatggccatattgcccacttctttggcgatcctctatgtgaacaatgccatttggaggaaggaaagtagagagaaattattaggcatactttggtaataaaaattgtatctcaagtaagagtaaattaaaaaattgaggcttacccccgcggcctgttgtttggcagccaccgataaagtgtatggattgacattgctgctcactacccacttctctgatgtaagctcgctaacactaaggctcatgctttccaacatgtctgcagcataaggggcaatggctctgcccaccttaggtattagattttggctcactgcagtcagatccaacacaaggtcggggataaaggtgttagcccaagatatggtttccggggggggggggggggggtgaattggaaatttaagttaatttaagaaatttaaaaattccaaagacaattcatgcaaatattcgagtttaatacaataacaaagataatcacaagtataaacaaataacaaactagaaatgtaaagagtttagggatagaaattacaaactctcaatttttacaaggttcagtagaactaagccacctattgttggaaattattt

SEQ ID NO: 304862 - DNA, 1344 bp, Cannabis indica
aaattaagtaaaaaaaaattaaaaaaaaatagtatatgaggtaattaccccaaaaatgagactatatttatatatttttagtaagtaaaaaaaatataatttgcaaaaaacgcaataagaatagtaaatctgtaaagatgtaaaaattttattatatatatatttaggaaataatctcttatctcttttagcttgaatgttaattgtacattgaatcacatttatgcattttctccaaatattccattcttctctatttgtaggtttttttttttagaattatcttatatattattttttaactttttttaatttatagtttgagttgttccgatagtttatatttgggttgttatataaatttttattgcaatttagattgtttcgttggttgctataggggatcttatgtggatttctgtaaaattacaaaagaaaaactattttaatgtaaaaattaaaaataaaaaaaaaacttttttatattttatgaaataactattcaaaatttaacctttagaattggtagctaattacctaataattgtttttagcacattaactactcaaagtaactaataattctgttactttgaacgatcaataattttaattaggtggtgattaagatgacacgcgtttaaccacatcataaatgtttacaaagttatccaattttaggtgtgtcatcttaactagtcacggttaatagaagttaataaatatgaaaactcgtaagattataattttagtaacttttgatgattttgtcgctaaaaaaaaaattttgatctactagttacaaaatatataattatgaatagttattctacaaaacatctctttttataacatttgatatttgtttaaaacataataaagtatatgtgcttgttgacaatttgtttgaaataataatgagtagtacttccaatagtcaatggctatcttcatttctcacaagtttttgtatggataagttaagcccccttctttttttgtgtggcaaagataagtttgcccaaattaaccaccaaagactaacatgttggaaaagttatttatcttctattgttataataatttacaatgagagttttagacgacgatgattccaattgtgagctttcgcacacttatgattctttgataataaattataattagaggtgttcatttgatctaatctgcatttttttagtcaaacaatattcaatctgcactaagtgtggatttcatattttggatccaatccgaatctaaccaatccaatctgcaatagtgcggattggatcaattattttggatcggtttttttttttttaataataaattatttaatat

SEQ ID NO: 304863 - DNA, 1733 bp, Cannabis indica
atgcaaatataaattagtcggagtttttagttttctttgaactctttagttcttagagttcgggaactccaacatttttctttaatttgtcagcttttaaagctaatatggctattttcttgaagtggttgcacgattaaacctacctcccccaatcccaaatatgtaaaactaactcttttctatttccactgctgaagtctagaagtggctaacctactttgtgtttgccatattcaaacaagattcagtggattactacagtatccttgtctatctgtctcattgtgtttatgactatcgaaataatacgagagttgcctccttgaacacacctatgtccttttaagactaatattcatgtaactttggtattagtgtttggtgctaatatctttcatttgtaaattcacttttctgaactttttttctagggcatgctatggtgtacttagatttgtgatggagagtggtgcaaagggatgcgaggtgcgatgatgaagctattgagtattttcctatattttttcattcatctaaagttgtctactttgttaaattagagacttaaatgttttacaacatgcaggttattattagtggtaagctcagggctcagcgtgcaaaatccatgaaatttaaagatggatacatgatatcttctggtcagcctgttaaagaatatattgattcagcagtgaggcatgtgcttcttagacaggttagcctattctgtcactagctcaactattaaggcaatacaaggcatagtttatccttcatactagtaatgtcagttgagtcctctgattgattaaaatgtttgcagggtgttcttggtatcaaggtcaagataatgcttgattgggatcccaaaggtaagcaaggccccacaacgccactacctgatttggtcacaatccacccacccaaagatgaagaagaatatgaatatgaaaggccctcttcatatgtggcaacagaaataccagtagaagtagttgctgcatagattgttattctcttgctattttaagattgcacattcgtgtctagggctgagttaaatacgtctgtctgtagacgtttcctctttatagttattcttatttgtttaattttgacttggtctgttgtggttgtctaattttacttgagacatcattttaaaccagtaggtgtgctcgatggattatccatttatgagcaaaatcttagtgtgtctcccatgagattgtataggctccagggcacttaattttaggtcaaattcatgcaatatttcattgctgatggtctgattgtccttgtaataattttcagtatgttgtagaaaaagataagttattcatacttgacacttgtgggacaatttagttacctggtttgagtactaattaatcataagttattcatatatttaattaattttaccatttagtgaaatttacgaagtcactttcatcatcttcattgattattgcattgccaatatcaccatttatgacctgtagatgttaaatgctcatgctcatatagtaaggcttgagagtgcaaaggtagggctgtacagtcgggttcgggtttggggtccggtttaccctatattattttacctaacccaatactaaaggttcgggttgacttaaaaatttaagtgaccaaccccgccctaaatttaaaaaaaaaaaaaatctataaaccaaccaacggtttgggcggtttggtcgggt

SEQ ID NO: 304864 - DNA, 2667 bp, Cannabis indica
attggagcacaacaatttttcaatagatacttcatcagtatttgtgtgatattaattgtcataatatttttacaattaattcaaataattaaattgaataactgaaatatttggtaaataaattgttaccataattagaatattcttaattaattatattttataaatcaaatcattgatctattactatatataaaatattataacattcttccacttgtcaatatttaaattaatttaccatttaaaacccaacgattatccttagatgagtgctaattataacttcctattacaacctcttaatcaactattatctccaaaatcatatgccaaaatattttttttatagtggtattcgttatagttacaatattatccctgtaaatttaaagaaattcataatagttaatttacagtatcgaaaatagagttcttaatattccagtttaccatgtgtgttcaaaaaacttcaaacttattgtcgacactgtcaactattcaaaaatttacaggaatgatgttgtaattataacgaacactgtcatgaaaaaaaaaaatgaacaaaaatatttcgacatatattttcaggcataaaggttgactaagaaattgtaataggagattgttatccttgctatataacaaacatataaatcatggcaatatatcttcattgtatgacgagtattatctttcatgtattacgatatatttattacataacaatatacttaatgcaacaatatacttaagcaaaaaaatcctaaaccttatgtttattctggtcctctaaagataattttctcaaatgaaattaagctgcacatgaatatgagaaaatatcgaaaatagagtttcattgaataatttagttatacaacgaaaaactctataaggaaaaactgaatctcatatttactttacgatccttgaatttatgttgcggcatgcctttagtcgaggatattgcgatcacccaattcagtcttgcatgcttaatgacaacttatgcttctttatggctaaatagtcgatgtcgatatgctaactttgactagaactattatatccataaatactgtaactgaatttatcgcaaaattttcttaatagtctgaaaatataactctaaactcttggcttagtatgaaactctataatacaccatactagatgtattttcaaaacaataaatgcatctaacttttataatgaaaaaaataattaagattctcaacgatacaacttactagtaatcttaaagacgtaattaaatgttgattcacgtgaattaacatagcaatggagttggaatctaaataggtaactatattttcagattgtcaattcttgatctcaataaattatgaatgtagtctttaatatatctcaagaaagatatttcatcactttctataaagtggtcttaacttaagttatggggatactacttaatattcctaaaaaaatggcaatgctaagtcttatgcaaactcttaaacatacattagacttctaaaaataaaaacttgacaacgtaagaggtctcaagagaatataattttaggatcccttaataatgaaatggatcactatttattggagaaaaatacattaattaagtttctcttaacaattaagggatcacataatagggatttgatttggataaggatatatttatggcaaatatccttgaatatcttattctgtgtgatatccttctcagaggatttggcttcactggataataaaaatctttgcggacaatcacgagcaggttctatctggattaattctttcttaaggcataaacttacctgttttaagcatagagttctctggtcgggtcgttgaggaaaaattatacatccaaacttttctatgttctccacgtgtcaccatgctagaggccacatcaccctgtgcaaaattcggataacatttttataataataaaaaaattaattttatttatttaatcactttaggccaaaaaggctaaaaatttaccaagccaaaacctttgaaatttttctgggtttaggtacattaaaaattagctctctgtaaatttttaaaccatttggacaagtgcaactataacaaactatttttacaattcaagaacacatactgtctagggacaaatttttgtactaactttgcataataaacagtaccaaactatatataaagaataaaaatctaatattttcacaggtgaatattacatgtcttagaagtctacaataattttcccaagatatgtccccaattatttttacaaaaacgttacttaacccagatttcaaaaaaatggtgtaaccatcagttttgtaaaaatcataactggttcattttaacacatttttaagtgattacaaagctaaaaatactctactcaaaccaaattaaaataaaaaaaaataataggggaattaccccatatactaattttttaaactttttttttaaaaaaaattacggtttgggtttctaaagtggttgcaacgctagttgcaataggggtttctatacgattttttgttgcaatttaggttgcagggctagttgcaataggggtttccatttagaattctgtaaaaatgtaaaaaaaaaaaaaaaaaactgttttgaagtataaaaatgaaaaaaccccta

SEQ ID NO: 304865 - DNA, 2856 bp, Cannabis indica
aaaaataaatgatttaccaaaacaagccaacaaaatagagccttttgttaaattaagtcacaaggcaaaccaaataggagccaaaccaactggtagataaaaataaatgcaatgtaattcaaaaactcattacgaaacgacacagtttcgagaatatgaccgttgcacttggcgcaacgttcgaaaatttaaaaaagaaaaagatttcctcttactaattgaccgttgccaatatccactgggcaaataaacccccagctcaaccacatacttcctcatctccaactatggaaagaaactgttaatcttcgatccaagatcgtcatgaatcttgattctctcgaatcttgatcaaaaacctcgatatctgttttgggttttcttttgttttcgattatctttcttctaacagctctgttttgattatcatggctgctttagcaccgggaattcttttgaagctccttaatgggatgaacacagggacgaaacccaccagcgagcaccggaattcgctcttacaggtgactgatatagtcccggccgatctcgacgagaagagtctctggccaactcaaggctttttcattaaagtatcggattcttctcactcaatttacgctagtcttccttctgaacaagatgatattgttcttagtaataaaatgcagctcggtcagttcatctacgttgatcacttagagccagggtctccggttccgatcattaaaggggctaaaccactccctggtcgacacccatttatggggacaccagaaccattgatgggtcttagagagagaggtgagcaaaagtctaattcaaaggcttcagcttcatcaagaaggggttcttggggattaggcaaaagtggagtagaagatgggatttcatcaccctttgttctaaagcctgttcctttagatttcgaccagtgtacaccggtgaaagagaggcaggcgagagctttgagtagtcatccaatgtctccaatgatcagaggaagagcaggaaaggatggcggcaactcaagtgctaccggaattcggtgttcttatggtggtggaattttgggtaagatgcttgattctaaaggtgaaagtcctgcattgttaaggaaaagttgtgttgttccttcttctaatgggaaatttccaagaagcagaagtgtctgcgaaagagagccaagaattccaattagtcccttcaactcagctgtaggtacattttccccttaaagtaaatattggtattgaattgatggtgttctttgagagctcatttgtgtacattttgttttgatactgatgttgttgtttcaggatataaaaagctcaactcctccaccaagattgcgaaatacaaaaatagcaactcaactcaacatggctggagagtctcaaaactcatcatcgaacacaaaatcgtctaatcagccacagcatgttaataacatatcacctgataataataaaagcacatgcctatctatgaacttgccaggaaaacttagcattttgggcaaggtgaattctattctatgtttcgatacattctctttgaactatgtattaagctttaccaatttgtttacccttttatctttgatttttataggaagctgttcagcaaagagaaatggctcagaagattgctcttcaagcactaagagatgcttcagcaactgaggccttagttagatctctcaagtaaagaacactctccctagtgctgaaatttcttattaccaagttctaaagatgactgattttcaacaatgtgatttgtttaactttgcatgttctctaacttgaccaaatcagcaaaagcagagaacccatcagcctgcttcgataagttcttgaattccatcatcaaattgctcaagcagtagctgaaatggtgtcactacaagctgccacttcaactgaaatgtcccaaaactctgttgggattaaaaggaaagacaaggaagaagacaacatcccttctgttttaaacgaaataacacacaattctgctagccacaccgagttaaactcatcaaaaaggcggtcagcgttgcacaaatcagttacaggcaattctgagaagagtgaagaaaaaacagctactgccagtggcattggaaagctcctgagatctagcagtgtgaaaaaagcttcttcagagagaaaaacatgttcttcctctaccccacttggaaaattgtctcttgactccattgctgagaatgatgaaaacagcaaaccgggttcttcttcttcttcatgtggcttaagcaatacaaccataaaattgggtaaacagattgaaacagaatctgggaactggtttatggagttcttagagaaggctttagaaactggtttaaagaaacagaaagggaaaaaatcagcagatggggaagctcagaaagttcctcagtctttgatacttaaggtcattaattggattgaggtagaacaaagtgatagtagtaagaggccagtacatcctaaagctgcacaaatagctcgaaagctcagaatcaagatgaagaatccttaagaataggaataacattttcgattagatttacatttttatatacgttgattatttgtaatgagtttatggagtctctgtgtgtcttgttacgcattatttgtttgataatgtccacgaaatatataaatatctaaatttgtttgccgtttgagattaattctagttttatcgacatgaacgacatgtcgtttatatgtaaaacgacatatataatagagcaatttgcggcgaaacccccttatgttttgatttttatacacttaacccccttatctttatttttggtggcaaaacccctttatgttt

SEQ ID NO: 304866 - DNA, 1590 bp, Cannabis indica
aagttagttggtttaagtgagttggatattaagttagtttagaggatcaacttctacaaatataaaaaagagtaatataacaattaatccctaaaataataatattattaaatgtgaaatattttggcgccactatatcaagttaccaaaactgattagaacgataaaattaagcaatttgtaccgcatgtttaaaaataatattatatataaccgaaccaacattatatatattactttcttccatacataaatttacatccggaacctctatatatatacatatttaatggagaatattcatttgaatgataggcttaaagtaaacaatgccttgttttaaaatttacccaaggtttagaagcaaccctgattaataatgattttaaaatgactattgatcatattttgcttgtaatgactggctatttcctttaactattgtcctagagaaactaatagtgttgtgctgccactcatggcaaaattattacaatgattaaacacatatttttttttacactttctccatcttaaaatacaatgaccaataaaaaaaagagcatccaaggctaatattaacttagtactttttcaaatcggcaatttaaaagtagccgtaattttaactggtgaatgtttgtttgtttgttggtacatagacaaaactttacaccaatagtatggatgcctttctaggggaaactaatttgtgaatatccttttaatattgttctttctaaatttagatttatataccgcatttaatattatacaaaatgctaccttcaacttaatattcaacttctttctttatctttgtgttcaaaaatataagtcaaaatatataatatataacctgtaaattttaaaaaattctaaataatctacattactgattatagaattcctaatattccaatttactatttattcgattttaaaaaaaatactgaaataatattaaaattatagagaacattgtgaaaaaaaaaatagttgaacatcggacggattgaccagatttcaggtctgaaaaatggaacctaaactagcatgttcaaaggattcaggttcgcgggttttgcacttacgggttcgagttgacccaatcaactctcagtcaacagtttcttttaatcacccaaattttttagagaaaaagaaaaacatttaaaacccaaagtagaaacgtaaatctaataattcaaaatcaaacaaatcattcgttaaacttatgttaattgttcatgaaagaacataataataaaaactagaactgtcaaaataaattgtaactaaaaatcaaagtccatctatacatttcgtagttattgtccacgataatccatatatatgatacataaatactattttggatcctgtgttttgcaaaagttaccgattggaccctctaatttgttaaataacaaaattgaaattctgtattttaatattctcagtttgattatttaattaatagattaattaaatgcggaataatgaaactggtactgaaaacagtttttccgtagttacagaatacaactctgtaactccagagaaacccagaaaaacaaacagtgcata

SEQ ID NO: 304867 - DNA, 2026 bp, Cannabis indica
ataataataataataaaagaaaagaagacacattgatttgatttgaggctggacaaacaagtgggatattatttatcaaatatagtttagaatttggataccatcactataaatgagtgattgtgaattgaaaagtacaagtgtttcatcaaaaagtaattgaaaatagagattcattcaaatcatattttcttttaactattttgtggaaaaaaaaaataaataatatttttattttatgaatttttgatattatttgatcatgcccctacaatatatagcttgttaaaattcattaaatgcagtaatttttttatgatttcttgttaagcaatctacttttgaataccctaagattctagttgtaacggcctaaacctttcttgttaagcaatttactttttaggttcttattaaattgtctactttcgaattttttgaggttccagttctaatgacttgaacgtttagattttgcctaatttactttaacccgttaactttttagtggaaatttttataaagttaatttactcatggtttcctgaagtttcggctccaaaaatttggacctcttggacttctattttttaatttcctttttaaaattttcatatcctaattttctcgaagcctaaacttcttttaatttttaacttgagctacttataatttattgatctgagcataatttttacttatgagattatagatatttatttttaattattaattatttataagaaaataaataaaaagtaagttactgtcagattatagataatttattaattattttcaattgatttctaaactaatcaaaattatttaataattattcaacaattaaaaataaatataatgatgatatagttacatttaatgtaacaaccctctccatattttaacctaagaaaacaactatggtaagattgatataataattagtttatctaaagacaaaaggtaagatcaattcgatcctttcattttctacttggagtgccgtgaatagagactagagagagtgtttgctaacttattttatttgtaattactagtttttcaataatatttaataatttgtaaaatataatatttaatacttacaacactcacaataattttttttagtagagattttaaaatatttaaagtagtcgttagttttactaattttataactgagcggtcggtcacaatttttattttttaaaaattgttaaccgatcgtttataaattataaccgtttaaaatcgaccagttttcggtaacttttcgatttgacaagttttggtagtttttggccatttttgacagtttttttgatttatttttttttttcaaaaattgaaaccaaccgccgtgtcaaaaaaatcgtaactgaaaccgaccactaaatttgatgatgacgtggaaccaaaaattcgattacagttggatcagtttcggtttttcgatttttatgaacacccctactaaaaacacactacagtagatgttataaatttctttttcattttaaagtttctttaaaatttactattgatactttatatttataaaatattatttattgctctaaatatattttattaattattttagattttaataattatttttgtatgagaatatgtatatatactaatattatatatttgaaatgtaaaaatatattaaaatttttaaaaagtagagttttagtaatgtattttaataatgtatgatgtaatgtaaaaataaattgtaaaataaaaaaaataaaaaaaaaagtatagttttaatggtgtattttaaatgatagagtaaaaaagttgttagaagtgccatcaaataaacacaattctaaaattttaaaaatataaattatgcataaagttccacattgtttagagaataaaatttcttctaattgcattcaatataagctcattaacttaacataatgtaatataaactttttaaaaaatgtcactaagaaaagaacatttagcccaaaaaatctcaatcactacaaatttt

SEQ ID NO: 304868 - DNA, 1893 bp, Cannabis indica
ctaagctagttgttaaagggggttattttagttatttttcagttacctttctttcttgcttcttgtaataaccaattctgttatattggtttacttctcagtatatattcagctctactaagctcattgttagttagactgaattagagagagaaagagagattcttttgagtgagcttgagagagaaactctgtactgggagagtgagatagttctgagaattgttcagaagagagagattgagggagctttgttcatggctgccttagtcgatgtaaactcgagcttggattgatcttagcgcataacactgaatttgtgattggagttcagaacaagaggattagactttctgatttggaggaagttaaaacctctatagtctataattatggtgttttgtttcttttctgcttttgactatgttttcactgttagttctagagttcttgttctgcactgtgttgttgtgtttgtttgtgtgtgcaagtgatcgagatcgtgttggataaatcccaacattctttacacacgctcagaatattaagctcacatttaaacaaaattatccattaactaagtgagacggatcagttataataatccaaaacacaaggaaaataattttctgaaaggaattgaacacattttcttatcaagcttttctcttctgattaatgtcaatttctttaccttaaatcatataaccataaacaagtcaaaacaaaaatgaaaagttccgaatacaacatgatagcaatgtcaaaaatagtacgctgaaacaattgagatagtaaagttagacccatattggtattgtggtaaaataccacacatagataataaaacgatttctctcagcagccaaacaatttcatcaaaaatacgaaatggacaaagaatcacagccaagataaacatttccaatcattacaaacttcctaaccaaaagacaaaaagaaatcggaagtggaaactgaagcataactatgtacgagcccaccaccgtcgagtttcccattaccacataaataatcaaaaggaacacaacattcatttgtctcaccatggtgttttttcttttgtaattttttgtcgagctggaatgggagcagctaaaaccaaacacagattctgaccaatggaaatgggccattctcgtttgattatacaatggtacttttatgctttctggtcagtgagaatagaataaaaatatataatttgattttgattatattattatcaacaaattacagcactgttaaataaaaaattacatctctgtgtggtccaattggaaacaagcgcatcatgaggaaaaaaataaaaaatgaaaactgtgggccccataaaagaacgttaacttttttccaaagtgttttcaaattcaaattcagaaaccctattggcctattccgccttctcttccctttacaactcttctcctactttgttcatgtccaaagctcctcctaatcttcttcttcaaaactccattctcaaaatgaaattgatttgagatttttttcgtctcaggtatgtactcaaatttactatatcatcttttatcttataggcaatatgagagatagtatactacacagtctcctatatatgcttctttcggggaatgattaagatatatatttacgagatacatttctctgttctatcttctgttttttcttctcattatggttgcaaagatttcatgcttgtgctgatgtttttttgtctgtgtattgatttgaatttctctttggaacaaaccccatcaatacagtttctctaatatctttatatattaaaagtgcctatctaacggcatttcttggtttaacattcttggtttaacagaatatacttaaaaataaaagaatattctgtta

SEQ ID NO: 304869 - DNA, 3281 bp, Cannabis indica
aaaaagaattggtacacaaaatgtgagcagctggacatgtacactagcaaatcagctcacaaagcaactttcaaaacaaaccgacaaataatttactaaaagaatagaaacaactgatggatacaacagtgcaactacaaagaaaaaatacactgacatgtaatgtgacgattgagcatattaaaagttctaaatcaaatgaagaaagacattctaaaatgtattacgttgacgatgcacatttcttctcatacattgactgtgaaaatgcagcaagcagtactgataatttttgcactttgtcttatagttaaagttacaaaataatgataatataaaacatttaaacaactattacctcaagatattcattaaactctgcttgcttcttggctgcttcagctccccaagcctgctgaaacatccgaccaagaacaaatacgcccacagcagtgtatctgcaatagaaagagatgtgaagcaaaccacatgttaacattaaataaaccaagaaatgaaagaaataaatctgagtatatgatgaaagaaataatcagtattctctacaacatctttatcaacaatttaatgtcaaaattcatttcaaaacatgctcagctatcagataaacttgactataagctatcaaagtgtggaaatttgctataaagatcagatttgaaagactatactaccatagtgagtcaataagaattatttagccacgattttgtgtttattttcaaactttaagttgtaattttattataaggattcgccatgtatatccttgattttcaggtattaggagatcagattttcattttctggggtattttcgtacatatatctagcttgcaattggttctgatataataagaatttcagagtcttcttctctaaaatcttcaattaacaaatgctcctatcatttgggccaaaaagaagaactttatattccattatttctttttatttttctgatttgaaaggatattgtgtgatttatctttattgttagctagtcttctccttgttctattctgtcttcagttttgatgttatggtgagatgtgggaatgtttttgagcatgaacctcaagacactctgatctctaggtctggaagcattctcctctgtaacaagttcaatgatcagccatttctgtcattttaatcgagtactaacctgtaatttggtcttactgaaaaagtaggagaaagattatgtagctttatatcaaagtttttgatatatgtttaaacaatttatcatcctcctgagtttatggtttttttttcttcttcaataaagcttaaatctgtcatcgacaaagtacataatatattccttcctaacaaaataacatggaaagcatttaaattttatgtctgaaataagaaagaacatagacagattcaaaagcttaaccatacatattgccgaagctgtttttcgcgtatgctccaccctcattaccagcatacataaataaagagccagagtgtttaagtgaaacctgaatcatttccaatatatccaagtaagattaacttactcaagcaactagtataatttatacaacaacaaaaacaagaagaggctatttagttaatatcaacattcacaataaagccacaaaaacaatccagagatctaaatagtctctttcttactaaaacaaaaactcaatgaaacaagttacctccatggtagccaatccttttgataccatttctatcatccttgtccgaacctaagaagatgaaaaccttatccagtcaatcaaacttaacattcatgataagtccaagttggaatagatattctcatcaacaaaaagagcacataacaataacaaacacatagtgaactaattacacagacagcaagagccttcaaataaaaatgtacccggcaaagaaaatcagtaaactggcattaaagaagttccaatttaccgaatacggttgaaaatgaatatctgaaacaatcagggtatgcaactaagtgatagaaaatgtaaagaaaacataattcacctcctgatcagacttctcattttcaaatttgggatagaaagtagctcttatctgtgcttctgcataagtagagttgtccactgtaaaactttccaacaaattacccttgaaaaacttactcaaaccaatgctgtttctttgagtaagtgaggtttgtcctaccccactgccagggttgagaaccacagttttatcaacaggttttttttcaacctctactgcagtgactccactggctgttccataagatttaggcttccagattgttttttgaccttgctgattcccctgatgaacattcccaatcagcccagtctgaacaacagacgcattaactggtccactgcttccactgacactcaacccatcaagtctcttagttacagcttccacagaagaagccgatgaaacctctttatctgcagctaacaactcaggtttcgacttttccctccatttctgctccttgtgattatccgtatgctgaaagtttttatccacaaaagtcaaacaaagtaaaacacacctaaaaacccctgctttttcatcatcattagtattggcattaaaaatacattcaagaatccaaatttctccattgatcgattaataattacatgttaaaccatcgcaaaaccaattagacaattactgatacaaaaaacaaattagcaacaattccaaagataaactagctaagaaaaagttaagaaacaatcataatcatcatcacatgaagaaatggctagtgaagccgaatctcccaaagtaaaattcattgatagaatcaaacaacaaaaaagctcatagaataataagtaccttgttgcgatacataggagaagagaatgagaatgagaatgagaaggagcgaggtagggttgcgtaagaaggagatgaacgaaggaagagaaggtgtctgaatttgagtaaagcgagagaagaagaagaagatggagaaagagaggagagaatcctctgcgatgctgacattcagtaagtagcgtagagacgcaacaccattagtaagactagtgtagaagaaagtggtgaattttgaaggtggctgctgtgttgtgttgtgtccgtacgtacgtagctttattcattttattaaggctaattagtaattttttctcccgaactttaacatgtaataaatcatgccctctgaacttttttagccgttaaaaattctccctgaactattaagattgttaaatttaaggacttttgtc

SEQ ID NO: 304870 - DNA, 3884 bp, Cannabis indica
gaagagcactaacaattttataaaaatactaaattgcatcaagacatgaaaatatactctagtagtagaagtaattgcatggatataaattaaatgaaaaatatgaaaatatcttattagaacaactcgtgttattagctgatttggtacttaatattatatattactatactttataattaattattttttgtaattatttgggattcaaccttgtaaatctagttgcaaattgacatatggatgccacctcctcctaaattttttcgctctagcgacggatgcttcaatggtctggagaggactttgtcggattgggaaaacttgtacgaaatacagcaggtgtggcttagttacaattagcgtagtcattaagtgtgttaggtgatttttgtgctaatgtgggagagctctttgccatttatgtggaattgattcttgtgcatcaatttgatttttattgtactgtggtcattggttgtattgataatctttatattaattttagtttttaatctaatttattagatatctattctttattagctgctattagtggtggttcttacagccatttcgcaatcgacgaatagtgttatccacacactagcattctctattactaatttaagagattgtgtttgaataaatgcttatccacaattttttgattcttctataacaacaaatttatcttaatcttaataaattaaaactttcttaaaaaaaaaaaaagaaatattgtattatttacttaagtttaaaagtataggactgatattgatattaagatgcacacatattaatataatgattatctaaaacaaatactataccacttacaaataagctatataagtttgaccccttgttacaaaacaagaaggctttcaacagaatacttgatagcttttgtagaaacaaaaacttttgggctgtaactttttaaaggaaaacaaatgaaaaactagttgcgtgcgtggtaacattcattcatttgaactttgaagtgatgggatggatgaaggaggaaggcagcagtagaaacaggaaaacgacaaacgaagggttatttgatcaaaccaaggattgacatgacacgcacgcgctttgaacagagtggatagtgggagtgggtcttaaatttctagtagtactctcttttacaatttattacacactgctcaaattatcagaaccagtttcactgttctaccaccctaaaaagggttatgtcattatacctatatccacacgcttgcctcttagtcaccctgaccatgaccaatacctctcccactctcactcgcgcgcgtgcaaaacatcataaaatctttataacaccaccaagaaaatatataataatagtaataattaaagaaaacgcatgtatttacataaagcagaagtagtagatgtacactaatatatctaggctcccgatgatcaagttctccaaaaatatcacaaacactgatacatacactgaactaaaacgacgtcgttaagatataccatgcccgaaaataacaaactgggactttctactttctaatgttaacaatttatagccataagggtggaggttcgttcagatcaatggggcagccgcgcctaacaagacccaaaaatgacggcgttgcagagagttccggagcggggcacgcattaaggcctccgactgagtttgagccgtgactttcgcgcctaaccccgtgggacgacgactcggctgccgttgcggtggaggagttcatgtccttcaacacgcctgtatgtaaaaactctccaatgacaaggcggttggtcgtggaactccagtgagtaccggtcggaaggttgaggtccagcgagagaccggctgttaccggcggcggaaaattagttttggccttggcaccgcggagtgacctggcagctccgtcgtaggcgagagcagcttcttctggtgtatcaaatgtacctaaccaaaccctagttttcttccatgggtctcttatttcggctgcgtaacgaccccaaggacgctttctcactcccctgtagtgcccttcgcgagaagaagaaggagacgccattgagttgttatatttatctataagcttgtaagatattaaaaatttatgaaagtgagtaagatgaaaaagaggtgtgaaatagggagagagagaaaaataaacaaaacaagaaaagcataaagagagaaagagagccaactcggtcacccgtaatcgtcggctagacggcacggctttttggtttatatatataggcaaaaacgaaatataaatgaaaagattaaaatgagaaagccgaaaataatataaaaataaaatataaatataataataaaaacgtcggatggatcgatagttaatcggacggtagtggaatgaagtttgagaatacacgtcagacaaaaagtggggccccgacccgagtaaaaggaacagagccgccgcctgattagacgtatgcgcagagattaggggggaactgtcatgtgactactcttggcgccgtggggtgacgtaagccctactctctatccttttttatttatttttttaattttaattttctgtacggcgctctcacagcggcgcctgccatattaaaaaatgtaatattttatgatttctttattaaaaaagaaaaacaaaaaaataaaagtgtaagggtgcgggatatgttcgataaaagcggcaggaggagaggtagtgacgtgtcgatataagagtggaggggagttttagatgttttggttttagagtgagagggtgtcagaagacgccccacgtggaggggacgtaggtggtgtctgagttgcaggggacaaggaccgagttgggccggggcctggactactgtgtgtgtatgtgtctcgggagtgggtttggaattgggattgggcctctctatatttattattattgttatcaaaataaaattatatttttgtatattaaatgtggttggcgtgtttgagttgggatgatttgggtaagaaaaaaaaaaggtggtccatagtttgggaagtggaaagagtagtaaaagaaaagagaagactagacagtaataatagtaaaataaatcaagcaatgtacgggtaagggagtgacggtagtgacgattgaccattggtcatttgtttgaatgactctagctttttgattttgctgctgctgctattgctgcagccagctactgcccccaaaccacttcgtcacgtgaactctatgtttttcaattacttctgttttttttttcctggaaattattattattgtttttgcggtgaggtgaggtgaggtgaggtggtgtggtttggatttttatgtcccttttgaatgaaagtttgtagtttattaattgctctaataaatagggtgttataaacgtgtcatcttagcaaggtggcatgcgtattatgagaaatgaaacaccaaacacacttgaccggtttgtgctcggtgtatacatatacatatttttatatgggaaatttgaatttatatccatgttttgtacctaaattaattttttaaactaatacttatatctattgaaaaagtaggatcacttttccctataccctaaaatacccctctcattattttcaaccctctctttcttcctcttttctctgtcaaagaaagcctcccaaccgtatgcacaccaaaaacccaacccgtgaggctagatcgcaccacccaaaactcgacaccacccacggtgaaccaccgcacccagccaccgcacccaccccgacccagcccactctctcggaccgcccaaaagtcgcaccccgaaagccttcctctctctgaaatcgcagaaaaaaaaaaaaaaaaaattgctccgtccgatggtcggaccatggg

SEQ ID NO: 304871 - DNA, 1272 bp, Cannabis indica
tttctttctttctcttataagataatgtaaagtaaagttataaacataaagtacatttagttttttcttttttctcttcttcttttattttttccacacaagagagagccaaaatgatagtggaatacttagcactctttgttgtcatattccttatagttcgaccaattttaaacaaaattttccgaacaaacaaactcccaccaagcccaataggattaccaataattggccattttcacctccttggacccataatccaccgttcattcaaacaattcaccgatcgttatggccccataatttcacttcgcctcggttcaatcccatgcatagtcatatcttcacccgaactcgcaagagattttctcaagacaaacgagcaatatttttgcgaacacaacgcatccatcgcggtaaaccggctaacctacgcctcatcggtagccttcgcgccatatgggccctacttcaagttcataaaaaagctcactattaatgagttgctgggcactcgcccagtcaacagttttgccgcgctgagaacaaaagagcgcaataggttcttgcaactcttgagggaaaaatctcagcgcggtgaaacagttaacctgactgatgagttacctaagctttccaacaacatagtttcacaaatgattttgggtacatctaatgatggtgactatgctgatgaggctaggattgtgattaaagaagtgactaaggtttttggagagtttaatttatctgattttgtttggtttttaaagaatgtggatttgcagggtattgggaaaagaattgaggctacttttaagaagtatgatactttgttagagaagattatttcagaacgagaagagctaaggcgaaaaagaaagaaaatggcatcattagtcaataatgatattgatcaaaattatgaaaatggggtacttaataataatgtggaggtgaaagattttcttgatattttgcttgataatttggaggaccacagagaagacatcaaattgtctagggttcacatcaaagccatcattgtggtaagtacttctactttattatttattgtggtaagtacttctactttattatttattctttttagggcttgtttggaacgccgtattaggtcgtattgtattgtattgtattatattgaattgtattttatgcaatatttttatataaaattatatgtggtattaacttttatagacacctaaatgtataatattttagtataaattaaagtttaacatagta

SEQ ID NO: 304872 - DNA, 770 bp, Cannabis indica
cggtctcagcctcagccacaggcgcattaggagacgagcagggcagaaatgcagcgctaataacaatattacacgtcgtgatcaagaacccgccattgcgaaaaggaaggctactagtactactactcgtcaacgtcatccaatcaaaataactcacgttgaagaaccttttatacatattgcaaaaaccgaggaggagtatcgggagttagtgataaagctcactggtatgccaaaagaaaacaccacagcccccgcccccaccattactacttctacaactgtcgctgtttcttcttctccttcgaatagtactaatttacagtgtaatgacttaatccctaattcccacaatattactgctactacttcatctactactttctcttcttataattcttctccaccaactattttggaatatattgataatatgttccctaattcctacaataatagtactactactgcttcttcttctcctaattatgattttcctatttcctttaataataataattacaacaataatactagtatttcttcttcttcttcttctgcttctattatttcatcaagtagtttattacaatatcctaattacaataatattagtactgattttcaatataacgataattatttccctaattcctacaacaatattagtactactactaccgactcttcttattcttcttctcctaattatgatttccctatttcctttaataatagggaaaaaaacaggaaaattccaaaaagggtaa

SEQ ID NO: 304873 - DNA, 2977 bp, Cannabis indica
gaacgcgtggtaccgtttcgggtacccccaacgactcgaggacttacgaaattaagtaaaaaaaaaaaataattaatattactaaataaagtagttaaataagaagaaaaatttaacaaaaattgtaatgtgtagttatgagggattgaacttttaaggcccaaatttaatttccgccttaaaccccatatatcttaagaccgaccctgtatatatatatatataatatatacatgtcatgtacctatacataattataatacattaattaacaatacattatatctaagcaattaataataataattaagacaaattcatataaagatttttataatttttttaaaaataaaatcacatttttttattaatttcatgtaactagataattaaaatatgaccctttttttttcattcaattaattctggacaaacaaactatataagagatcagatccccttattcttcattatataaaatttaattttatgggcacacaacacaacacgcacattgactaattaagtattgcatttagtacccaattttccaaaaacaaataaaaaaaaaggttttaagacttttggttttgaaataagttggattatgtctcctatagatcccatgaaatagatatctttacaagtcaaattattagttctagaagtaattccaaaattgccatcataaatatctaacctaaaataatacataaagaatgcaattatatatggtccttgcttagcattactagatatatatataccaaaagatcgaatatgtgaaaatcacacatggatcccattctaccaccccttctattattattactattaatataaaatatttagataagttaaataatggggtgagttgatttaaatgtataaattaatcttcaaaaggggtagcaagaaatattactatttattatataatagtatatccataccttggctcttcccaaagccatagtgaggacactatagacaatttgcatcattgctagaacaaaaatgaagtaattgagttggttcattccaccctgtgatataaatgaggtcttcccctgtatttatttaataacattaattaatgacaaattatgtaaaataagattgaaaaacaaaaacaatttttttattcattattatttactaacactgaatggtcttgtaaatgatcactaatatttattatacttaattctatggtattatagacatttatttaatttttgtttatgagcattactataaggtactattaatgtttaatactattatgagatgacgttttgtgaatagttaataatattctataataattattaaattaaattatgtgagattagatactttagagagtgctaaatagttactattaattttttttttagtatttagagaccttattattacatactacagtggtactcaacaccattataaaaataaggctttatgaatagttaacgatatttcataataaattaattataccaatcaaatgaaagatgaaaagaaaaaataaatgaaaaaaaagaatatatatatatacctgtgattcacaataatcagccaaactagattcatcatcttctcccaatcttcttcccatttggggttcaaactcatgaaaatcctcaaagaaggtgttggtattaatggtgttgaaggagtttgaatgtaataacacaccaatagatttaatagtttttgtgtggacactattccggcatggaagcatggtgtaagctaacttagtgggtatgcaaaatttagagattggtctttgagttacagccaagaacagagacatgagtcccaaaagtataagcactacacacacattaattattccaatattaaaaaccccaaatcagtaaaaaatgaattaataaaatcccaaaaaaaaaaactcattctgatcacctgatttgagcttctccacagcctcatacagagcagtttttctgttccttttcaaccactttatcaaacacaaaattttaagtcacaaatttcccaattaataatcaaattacaaaaccaaacttatttatataaatacttacagtgcagagtatatggatcaattgttcgatgaaaattgaaatagaaatgaaaacaagacaaacagtggccacagcccaagtgggtgtgtattgaagagacctgctttcatgtggtgccatagccaatttgagagaacaaagaatgaacaaaaattttatttattttttcttaaatattggtgaaggttataactccaccagttattatagatgtctctgtctattttattatttgacacgcctgactttttagactcaattaagtgtagttttgattaattaaataattggtgatactttatttttttaacattagaaaagaaagattgtaaatttggagtggtcgttgtcttgtcacgatgaaaagttagtagcaatatttatggattgtttgctggatcaagtgtgtattagtgttcttgtttgatttgggtacttttctttattattgactttaaagttttgcatgggatgggaaagccgttggagctggggcattaattttgttgactttttagaaaaggagtcaactaactattttcttttttgtttctttctaagggtaagaactgttctctatatatgtgccattaataacttgctgcttagccttataaatacaacaccaatcttcggccaccggccatggccgccgcggttctcacaataatgttattaggtcggtaagaggattgttataaggtgtttagtagtacctaatatcacttatagcatagtttatattttaattttttttttaataatatgagacatattagaggatgctagacactacttagaattcacaaaacgggtcaaacacgataacacgactaaatttggatttgctttaaataggttcaggtcgtgttcgggttgactcgtttaacccgtttaat

SEQ ID NO: 304874 - DNA, 1782 bp, Cannabis indica
aaaaaattagcataaaatttactatatgtgcctcgtacgtaactttttgctagtatataaaattttataaaaatatatatatttttgaatttcaaagtataactattcttttagtttatacagaattgtcctttctcctaaataaattaaaaaaaaaaacaaaagttgtcctttatatattatccttatttagaaatattcataagagattcgagttctatgtctaagtatttatggtcgaatgtgctactattatatactaaatacatatatgaatggtaatttaattagcaagatagctgcctttttcttatatgattattgtggggatcaattttttggcttattgcattgatcacattcaacatagtgagttcaacttattgattttccttttaagtttacaaatgcattgaattgttcttaattcaaaattgactcatgtcaaaatcgttgatctcattttgtacttggtatatatataaaaattatatgttgcattatttgtaatttcatcagaagtagtaatcaacacttctgacatgtcaatgatagttaatagtataaaaggacaataattattgtgtacaaaatatataatagagaactattactgtggtgcttataactataggaggttttgtattgttattagtagtaagtttaattaagtgacaaggcacttttataattgtgtgagatattactaatgtctaataatatatataattctgtgaaagcatatagtaagtagcacatatttaatattgtggaattttaacatgtattacagagattgaaaagagttagagacatatattttcactgataataagccaaaaatatgaaatttgttttgagtatagagaagaagcaaagcaatgtgttacattcactggatacagcacataggacaattaatgaatgatattgaaacttaaaatgggcatataacctactcctatcaattttctgtttcagccacacggagaaaagccacatttattttgtttgctctgctttttcattttctcatcaccttgtggttggtgccttaattaatcatacttttaggtaaagaaatatatactaactttttatatatttaaagccatccccatctatgatctatatgtgttaatgcacgcacatgaatttttggctttgcttataaggacacatatcaaacctagctcctttctcttttacaattacaaccattactagctaattattttgggatatatatataaaacatcaaatcaaaaaataaagcactgtttaattaattggttaatgaaaaagaaaaagattagtgaatgccagctaacttaatcacatcagaaaaattaatcttagggaaaatgaacagtgtttaacgtgctcaccaccaacttgttgttatcttttttgttaataaaataaatattaaactaaatcaacaatattgttaatttgtaaggcagtaaaatattaaaaacgtaaaaggaaggattaaattgaaagaacagtaaagatgtaggggttaaaagtaaaaatagcaatagttttcttttcatcgtaaaaatagcaatagtgtccgccacaagcttccgacaaagcgacctccgttccgggaaaatcgggggtgtactcgcacgttcccactggtgggcccgcctccacatgtgagcccgaaattccaattttgggcttaaaaaatatatttttttatggggtaagttgaaaaatactccttttattaatcaattaatcaaatttacctctaattttatatttatt

SEQ ID NO: 304875 - DNA, 676 bp, Cannabis indica
caaaaatatttttataaattataaaatattgtgtttcagtaaaataaaaaatctctttgagaaataccaagtcttgcctcttgaattatttttgacgtaaaaaattctacctaaacttttgagaatattaagtttgtgctattctgtcttgttctattcatttttaataacggtggattgacgcggctattatctatctcgcgtggtggtacacatatgaaatatttagtttttttttttcattaacaataaatcatatggttagattcatggcttttgaaatcttattttgctcatacacaagaagaattttaccctttatttttgtcttcttcctcctttcttaaatctttcttttctcccattcaagcccaatctattgtgggatcactcaaaatcgaaggactttgaaaggttgaggtgagattttagacatttgttttgtgttttctgtttttgtattaaatttttttttacttagttttaacaacttgatttatctttttgtactattacattgtttcttcatgaaattataaattgaaaaacaattaaaaaataatataaaaataacaatataaatgcacatatatacaataaaaatattttctagaataaactgaaaatagatacgataaaaaatgcacataaactaaacaataactgtacaaaaaaa

SEQ ID NO: 304876 - DNA, 4742 bp, Cannabis indica
caagttaactcaattcggttatctttttctattcttaataagcacttgaacttccgaactcataacaataatttattttccccttttgggtgcagactgctgatcatactatggagacaataagtggaaagataggccaactatatggaggattaactaaatttgtaatgaaatgtttgttcagggttatatctgttggtccggtgcctgaacatatcgcctttatcatggatggtaaccgaaggtacgccaagaagcagaacgagcgcacgatagctggccataaagcaggctattcatcgctcatctctatgctaggctactgttatgagttgggagtgaagtatgtaacagtatatgcctttagcattgacaatttcaagagaagccccgaagaagttgagtgtttaatggatctgatgctcgaaaagatgaaggggtttctcgagcatgaaagtattgtgcaccaatatggtattcgggtatattttattggtaatttgaaactgttgaatgagcctgtgagagttgctgctgagaaagtcatgaaagctactgccaaaaacaacaaggctaatcttttggtttgtgtggcctatacgtcgtgtgatgagatcgttcatgctattcaagaatcctgccaatccaaaatttatgacattcaaacaagaaatggcagcagtgataagaagatgaatggttttgttgttcatggcggtcttgaagaacacgaagataagccaaagaatcatgaagctaaaccttgcaatggcttgatagaagaaagtgaagtatgtgagaagcaaatgaatcttccgactctaaagttagtagatatagagaagcacatgtacatggcagtagctcctgatccagacattgtgatacgaagttcaggcgaaacccgtctgagtaatttccttctttggcaaactgccaactgtccattgtattctcctactgctctgtggcctgagttgggtttatggcacttggtttgggcagttcttaacttccagcgaagctaccaatatttggagaagaacaagaaaaagatataacagatacataactttattggtttccttcctatacattattattattcatacattgatatacataataatttactcaaattccctgaaaatgtatgtgttatctttccttgctttgtttctttctcaatttgggtattaactttacttgaacaacctttgtttacgatagaactatatcataaagatcagtcagtgctgttactattataacatatttatttgcaaagaatctaaaaaaaaaaatctgatgctgatgatggtgatatgaccatttatgtaatctcctttgaatgagtcaatctttagtttctcaagggaccattttgattggctttgttgtttgtcactcatacttgtgaatggacccttttggtggctgcttttgaaaagtaagcttcaacaaaaagctgtattgtttttctttcacggcttccaatcaatgtgaataagagacctgttttcattcaatttaactctaacctaccccaactatggggggtcttgatcaaacccctgtaccagccaaattttacatctaagggcatagattgtgttgtgttgttttgaacgagtcaagagttcatattgagacaagaaatttatctccccaactaccactataaatcttagtaaggctgagaaacacttgagacattaaaaatggcttctcctctcccaaaatacttacttcttctacctctgatgttagctcttttccctatcgaaatcatctccacctctcaccaccaccaccaccatagccatatcaagtcccttcactttgctctcttccaacacgaaaccataaacaaaacagggtacatcatagtgaatggggtggctggacctgatactagtcagacaacaacaccatttggcaccctatttgctttccaggatcccatgaccgtgacgcccagcacgtcttcaaaagtactgggaatcgcagaaggaacctccatcacatccggcttagatgggcttcgaagcatttccattgccaagatcaccttgaatctgaagaaccacaggggttcgatttcggttgttggtggcacacacaatattaagccttcggatcatcctgtggttggcggtacaggggacttcaccttcgtccaaggctacgtaagatcctcaccggtcaatctcaaaggcatcactgtcacttacaagattgaatttcacctgtactggcctccatatgccactcagcttcttcaagctgcttagaaggaaaatctttaccttttgttgtttaataaaagtccacactttatgctttaatgcattttatagatatttattgagactacagattgacataaaattgtaaaagcttgactaattatagatagtatgaaaaggtcacaacaaaatcaatttatacaaaaaagaatgttaatgttaacattagagggtactgcaaaaatcaactctggcaatgagtgagtctcttccgtggactataaattatgaaaatgaactgaaataacattaacgagtaacaatcacagaaaagcttggcattggaaaatagaaactgaatttaatggcgtggcctgtgtagacgagggcggttgcagaaaatccgtccgttggccctcacaaatgctgctaaggccacgctgaggcttgcccacattattgaaaagaataagtgtcgaaggtcgtaccgaactgcataagagatgaaatgagcaccagaaggaaacgaacaagataaatcattagtcatgattttgggtttcttttgttcacaattctagcattagttttaataccttgtctaagtgacatggtcgcaaacaggaagccaaccaaaacgaatgcgaaagccagtggaaatgactgaaatcaaagcaaacatactcagaaaagagatattgatgtttagtaatattatctaagtaaacaaacatttggaaaactcacggctacagcctctaggcctcctttttgaggcgaggggcttatgtctcggctgaccgaaacaatgtaatgtccttgcagaagatcaattgcatcctttgtttatgagccaaatgaatccacacaccaaatattaaaaaaaaggtcaatataactcatagcagaacaagaaccaagttctgtttattaaataatgtttgttcaatagtagggtgttcatggatgaatgagaaagatgtcagatttaactttaaaacaaacctgctttgctccatcctgaaagttgtttagatagtagcgtgcaagggaattccatccatccttgagaattccatgaactgttctctggccatatctgacaatccaacaccacattgagcaattcagtaaggaagcaatgaaatctaagtcatctcataacatgcatgagtacaaagctaggttccaaaattacctgacaaaatctcctttcaaagcaggagtaccggagtattgaatgcttatgtcatccccatggttagcccacactaaagacatataaacactcaacaggttagaatagaatgcttacaaaaagacacgtttatttaatcagtaacatgatcatgaaaagcataataatagtagaacgactcactgatcttaaagctttcatcaaagtttgaatgggagctaatagtctcgtcagcaccgaaaataccaagcctcctaagttggcattccaacatctttcgacctatcatgctctgcaattgtaaaggtgaccaatatatgatgtacaatgtgagaattattctcatgccagaaagaacaatattaagtatataattaacgtatacgtgcctgtgtaacatttgtacggtctaagcaatctatacaattgcttctaacaactccaagctgttccttcattttatcagccttttcattcaacaagaaatacctattgaattcagtttagaaagttaggagaaaagatgtaatacagacatatctaattcagtacattaatcagctagctatgctcataagccataaaatcatacccatttctgtcgagaaaatcagaaatttgttcgtagagaatagacaagcgctcaaaatgaacatgcccgcaaattttatgaaaatcgaaatgcaaatatctgcaatgttccatagctatcacgttaaaaacaaactaaataacttaaagaaacattcttaaaaagaggagaggaaaataaattttacctcacgtcatcactactgataggttgcatggcagctgcaaacttttcgcacaagcgtccctcacctccgtgctgataaaaaatgaaaatgtcatttaagtgaatacagcaatggaaatcaaaccacaaacattagttctaatggtacaaatgcaggtgaaagttttgatggacagtctataatatgaaaagtgacatacttaaatcgcttgaaaaataaagtatgcaccttgttgacaagatcaacagctaaaacggccccatatttcttccttaagtccaaaaaatgtcgctctgctactttgggctgaataaaagtttaatgcacaggtcaaatgccgagtaaaagcagttaggtgtggaatcaaactgactagtaaggaaaaagtaatcacaaactcacagcatcctctactttaacaagctcaaatttgggcttgtatgtcaaatccactacttgctcccaaagcaatggaattgaaccccgaacctgcaaatcaaaatcaaacatgataag

SEQ ID NO: 304877 - DNA, 842 bp, Cannabis indica
ccctaaccgccgcggcgctgactgcgtcgatggtcgtgccggaagttgctcaggcagcagggacgatcttactccgtcgttgaagaatttcttgctttagcatcgctgccggtggagttgttgccactgccattattggagctgttgtcggtgtttctaacttcgatcctgttaagagaacctgagaaatcgacgccgccgtcgccgttgccgttgaccgttgccgtcgccgacgtatttaaaggtgtattttgtgttttttattatgtataataatactaataataatactatttttgattattaatgacactttaatttgattctttaattgagtcaagaaccaaatttgttgtttgatttaatggcacaattattttgggtgttagtttgaattattatatatttaatcttgaaaattaattattactacaataaattgtttagcaaattaagttttattaagtttacataatagaattttgataattaaaattaaatattgtatttgatgtaattaaatatatttttaaaaaataaaatcaaatgcttaaaacaaattttgtgaagtgtaatttgcggcaaattcccactcaattatcaatttacttgcaaaaaaccatttaaactcatattttggtgggaaacccttttaaagttttgttctgtttacattttttgggtgttgtctgtccaggctcgttaagttttaattttgcccacgtagcaatgacaagtcactaaaaaattatcttacgtggtaatattttacaaaattaaaattaaaattaaaataaaaaatttaagagtaatttgcggtaaaactcccccaactatcaatt

SEQ ID NO: 304878 - DNA, 1593 bp, Cannabis indica
aaacacgctggaaacactcgtgttggtttgtagggtcagtcatcagtccataaagcagctagagtggcgtactcgtgtataagagccattagtctgtgggtgtaaggatccaatggaggcttgaaacgggaacgttacataaacaatgtgttcagccctgcatctacatttattttgaccaccgaaatagggggaggagaccatctgaccgcctcctttttgttcttagactccaagcactctcctttaaaatcttttaaaagctcgctgcactaatccaccaacgcactagctttttaatttcttccttcaaaggtccacttgtttctttcttgccatattttttaggcaataaccataaataaattgaattcatcaactgagaaggaaagcaaacaacactcaatgagcaagctttggttttcagtgatatttcatttgactttcttccacaagttatcttttttccaaacttgagtagctatcaggtaggtccaaactacatggatcatatcttcaatgcacttatctccacatcttaagcatcttggattgataggcatcttcatgcaaagaaaaaagttagttgagaaccacattttcattcttctttatctctcttcttcttctctgaaacatcaaaaacgctttttccttcttcctttcttccctcttcacctattttctagaaatagaatggcacaaaagaaaaagaaatggaaattttgtgctcttgccgataaggtagcacagaaatctagttagccctaaataaagggctcgaatggcaaggccattcttgagcgagtccaattgttcttactatttaaaatattttatgaggatcttatttactatatatcacgcattataataattagcctaattattgaagcgatgaagcaacagaacaatgactcctctcattcagtcctctaaccctcatatcttttctgtagcaaaggcactataagaatttaagatataattgacgctattattaatgacaaaagaaagttatcactgaaggtagggttatcagtgacaacaatgacaagtcatcactagtaaaaaccatttcttttgtatttttattaaatgatttattagtgacaatggagacactttagtgacgacaatgtgattttattttttaaaattaaaactttgaaaaagagacaacattttccctcacaaacatcagtgttgacattgtcataattgatgtttggcattgattgaaaaatacccgacccttccctttccacacagaacaagaacacaccaaataatttgtcagtaatcaaatctctcctctctcactctaataatctcttcctctctcactaaaagtcaccaaagcttctcgatggttccttactccctccagcaagttcactcataaagctgcttagccctgacccaataaggttctttcttaaattggtgcaagccgacagagtacagaccgacgtggcttcgacaagatggcgcaacacataatgtaacttctcccttttgcaattttacaatgattattgtaatcagatctaagagaaataagagagagcgagagagagagaaagagagaga

SEQ ID NO: 304879 - DNA, 3356 bp, Cannabis indica
ggtcggtcggagctgtggggttagctacctcgagattttcgttatctttttaggccacgctataacaaagatacgcctccttggtttcaccgaggtaattaaagtttctctctgggttggccttccaaaattcgtagaaaacctctagggcggccgtctccaaactttcaatctccttcggaagcagttgctcccttgtctgcctggatttgacgtcctcttccaattttgtcttctccttggttaacatggcaagaagagatcggagacttttcctctcgttattcagaccattaacctccctaaatagagcttcgacattcgcttcaagtggggcggtagatggtatgtcttgaatcttcttttgccactcctcaactttcttgttggcgaccaagagtttcttgttcacctcgtccaactttgcccttgtgacctcagcctcctttcttgctgcatccacctccttctacaaattgctggtggtagttatagttttcaaggcactggacttggctcgggagtaagtgtaggccatctttaagttgagctgcacaggaaaaggttaaaaccttcacggataaagggacaagataaaaaccaagggaaaatacttactcgggttttttccttcaggattcaacccatcaaaagctccacagacatctcgttcgctccgaatagctgatcatttacctcaaggagtaaccgatccttgtaattttgaagcatctctttgcccttattggtcccagggttcagcacaatagtagtatttgagggcctgggcagaccagacccatctgtgcttccacccttggcacccttggacttagaggtcttcttggttattggctccacctctgacgccacctcctgaaagacatcaatgggtgactcgacagagttcttctccttcagcgttatctcatcaccctttgaccgtttggccagagctatcacccgacctcttctaaaaggcttggaacaccttctaagacatagctgcatgtgaacaaaacaagagggttaaagacaagcacgatataagccaatacatatgaaaattaaatgttaattaaaataccctacatgtagacaggagcattctcccaaacaagcagagatgaaggcttatcgtctgaggaatcttcctactcctgctccaccaaggcggcctttccctttcctaccattagggtggatggtcgagcaactcatttaggttcttccctgatcttgataaaccgctcaataagtacttggccgcttggaagagccttctgtttcctcttcttgctcggtgtttcctatctgagcacgaccccttttgatgtcttcacagccttttgtacaaaattggctgggaaaagattgtacttgacaaaattggccttggtagccaagagggagatgttccgtgcagcaggaggaagttgaatgccttcttttggagctccaatgtgaatagagtacagtagtaggacaacacctactagaaactggtgtggacagtgtccattacattgacaagatagtattcatccacaaagcccccaatcttagtcacttccgtggccatggtgcccgtcaaccattttttctcaatctgagaaaaataaaagtattccgacctgttctgcttgggattggactgtagatcaaaaagccaattggtgtcatgtcgggagggctcgccccatccttgtgaggaatagaggatgaacaaggcaaataagtacttgaggtccttgagagtgaactgggtcaaacttatgtgataatagtctgctatcttcttgaagtatgggagcaagggtagcatcggaccctacttggtatgaactcctgaccaagcacagtaaccttcctcttggttagtcgcaaagctggtcgggggagggaaggaagcactcgacattcccgagttaaccacaattgagcaaatttttcatctttgacatggtcacgacagatggtggacaaatccatcgaactcctaatgcaccttgcctctttaagggaataacctcgatgtattcctcaataacatagccttttccagcctcagatatgggctttccttcttcattgtagccaccaaatggtagccctcgagctactccctcctcctcatctccttcagcatcaagaagagtagcaagacagacctcgccttcgtactccacatgttggacttcaacgtccccaacagtatcctcctcttcagtaacaggtagggactgttctgccctgggcaaggtggcaagttaggcaatgtgtgaatcagacagtgaagattttcgtacagttggcttggtttgcgccatcattctacgtttggattgcattttatttgtgtacctagcaatggtcatagaaaaagtggcaacaggtttacccccagctgcagggtttgagcggtcctcaagcagagtgttaactatgtcttgacacactatatacgtccaattggacgtgagatagcatctctaccccttcttaagctcccaaatgaagcggttgtgtccttgacctttgatctggtcaggatagatgtgatgttgcaccttgggttccagggatggtgtgtgttcactacttatttcccaatcttcaaagctagagttagaaaggttgtcactggacgaagatgggctggcatggagatgaggatgatactcgtatagtagttgaagcagatcctggtcgatacagtgttttcctcctcaaaattcaccagggttcatctacaaaaagtaagagataaggagatgaaaattggttagggcaacaaataaaaaataggttgaatgtaccgaccaggttcgattgaggaatcaaaaatagtaatttcactcagaaatagaattttcagcccagaagttcaaaacttcaaattggaatctaattctcactaaacacctaatggataagtgaaaatggatatcgtggggttaaaatcaaagggcagttagaatcagacatcatggttaagtttaattgagatttctagattttaaacctaagatttctatggttatcctagaatagttcacgaacagtcaagattcgcagacaggaacccaaaaaattaagcatctaagggtatgaaagaaagaaataaaaaacttactcactggtttgaagctgttggttctgctcggatggtgttaacaatagtttcctgggaattcatcgaagaacatgagagaaaagtcgtttgaaaatttctttgctctggcttttctagaataagaatgacgaaaaggagtacctaaggttttcaatcctatgtataagtagttcaaaaaaggaagtaatcatttcaaaatttaaatttctcgaattccccc

SEQ ID NO: 304880 - DNA, 1116 bp, Cannabis indica
aaaaaactatttgaaaaaaatattgaaaggtgaaaaaactatttcaaaattttaattctcaattaataaattaaaaagtgaaaatagttttataaaacatgtttttgaaaagtattttcacctttctaattttaaaaatagaaaagagttagaaaaatattaccaaaccacctaataaacaaacgggatggtattctgtttagtgataataaaattataaaattatattaaatttttaattttaataatatttttttaattactagtaaataactcgggcttcgtggcaaatatttaaaaaaaaaaatatatatgaaaaaaattataacttttatttaatgataattaaataataaactactaatttttcatattgttacttagatgtacaaatgggtcgacttgacccgtatttatcgaatctcgcttttataatagaagcttagtacgacccgtataataatatgccaagcttgacccctttttttagagtgagacctaacaaaatcaataaacataaattgttcgtgctgagttcaggcctctgcggactttagcggccaggatagttatcaataattagcgtttagttaaatattattctattttttaaatttaaatgaattatatttaaatcaaatagatatttcttaatttcttatgcataaaatttagattaaaaacataatttttttaaaagatatacataataatataatggagatgaattctaccgaataaccagaccatcttattcatcatatcattgttaattagaagtaaaataaatataatacattttcatatttaatatctaggaagaggtttcaatggttacatttttattgtaatcattatggttacatttttttaaatcattggattactattaaatggttgtgattaatttagaaattaaataaaataaataataaataacttgtaacctgaaagtaccctaataatttatgtccatataaaactttaattaagattaattatatttgaaaattaaattaattataattattaattaatttttttcaatttattactatataaggatcttttagcaatttattttttgtacttaaattatttaaaattttatagcaa

SEQ ID NO: 304881 - DNA, 2269 bp, Cannabis indica
aaaaagcatatgcaaatcctaatgtaaacgtgtcccgcacgtgcaggtggaccatcctacattgcaaacgtcattatatttggacttatagaagaaagaaaatggaccttttttaatttgtcggacaaaaaatgtacttgtttagcaaatttgaaacatcaaaatggtgataatatcaaattatattaattggaagcataacaatgtaatgtgtgtgtgttagaagatttgagttcgagtcccaattaaaacatagtatattaaaaaaaacgcataacaattttgcttttatcatatttatggacatgtaaaaacataaaaaatattatatggatgttttataatttaaataattaacatattaagaaaccttttctaatataaagaaaagaaatgcatttttcttttctctcaaactttacacaagaaactacagttctctctcacaattttgtttacttttattttttctaatttggccttttcctttcacacggaaattctaggaaaaacatcttaattaatcttttcctaaccatccagtttccagttccacggtcaacaaatttgtatgggaataatctttcaaagacttgaatttcacactttactattattatgcttcctaaccaagttggtcaatcaaaatctaattcacaatgaaaaaccatggcacatctttcaaaaaaaaaaccagccacaaattttcattcatcatataatagagtaacaaaaaaataaattttatgagaacaataataagaaaatcaagagaatgaataattaagaagaattttattagtaaaaaaaacatcatatagtatggttcgagcgtttgtttacccaacttagtgctgtccccccaaaaatatctcacctcagagaaccaatatgcatgagaatcacaggttcttcaaatatactattgcagcaatcagcctgagcttcgccatggataactaaattttgacaccttttgatatgtaagtcgattaaagcttttaaattttaagcctcgctcccagcaatccacttccaaacaccaccagaaccttgcctctgaggagccgaagtatgctctatatcccgttcgaatgctgacttttgattccggagtttttgtacttcttcctcaatagactgcattgattccagaatcttctgtaattcattgatttgggcctggaaagttcaagtttaaataaagaagcttaattactaggacaccatccaataataaagcaatatggagtttctttttcactaaatgaagtaaaaagcaacctctagtttaaagcatcttgatctctcagataccagttggccctggactgaatgtagttcctgaaagaatacatttaaatcaatgaattttacaacagcagggtagagaacgaatatattttgcaagtgattttgttggtaaaaaaaataccttaaccaactcgccatgattactattgatgtcttcaatagcccctcccaacttagaattttctgccctaacttctgcaagtgacaactccaacaaatgttttctgctttagctgcctcaatctcaatcttaagatctttcctaaaattgttgttttcatttctcttggagtttgactctgcacctatgaaatccaatttttcattcttgcttaaggcataagcagcagtcacagaagctgcagctgcagcagctgctggtgactgcaaaatcttgggccgcgaaaagtctggttggtttgggtctacaaaacaaaaaacctataaaaaacggcaggcacaggataacaaaattatgaaaaataaaatgacaaaatacagattatgaaaagagaaatcttctgataacttggacaaaagtcagcaaaggaataagattgagatatcaggagctttagcaggcaaatgatacaaagcttgctatagaaataaatatgaaacaaatgaactaatgcattaaaataaagattgaagtttagtacataagcagaaaacagggtttttctaccattatcttcttcatggaatagaagaacaaaacaataactgaaagtagttttgaaaaaaaataaaaaatgaaggggtatccgcttgattccatcatcaaacataatattcctagacaattatatgcttaagccaatgtccttgtctaggagaagaaaacctcaaatttccaagtgacatctttaaactatctcatatctaataactcattatcttctaagaaatatgccgaaagctttttctcttaacgctactagcatgtagcata

SEQ ID NO: 304882 - DNA, 1962 bp, Cannabis indica
tttctaattacagagattttattgaattctatatatgatgtatataaattttggtatttttatgttttacgtccagtttagtggaagtcgacagtgtcacttagatacagcttagtatcttaaaattagcgggataaaatttatagacagttagaatattgagattgtgtggggtaattgttatgaccattttaccctaaatatggggaatacttaaggaggaagtaaggggcattttagtaattttctacccaaacttattctagaattctttagtgaattatattgtgatttatgggatatatgcttcataattaaactagaataatcaatagcaaaaacaagataaacagaaaagtaattctctcttttggcccaagaaataaccatgagaaacaactattttcagaccaaaaaatcctccttttcaaagaaatcaattagaaaatcaagtagaattagaatggaagatcaaagctaacctagcttaactcttttcttcaaatttttttagttaaagtttgattttaagcatgaatttgtggatttcgattctgtcggagattggggagtttaaagattattttagaggttgaattaggagtgcttaaggttaatttgagaggtttttggcagttgtggtgagagttgagcaaacttgagcttttaaactcaagcttagctcagcaattgtaattttattttcaggggcttgatgatgtgtttaattataggattgtgtttagaacttgacattcaggtgttttataaaatttagtaaagtttgggttgaattaaagaaggaaaccttgagtttgagatttctgctacaaaatagtgtacccccaagcaagacccagggaaacagtgaaccgttttgggatccaatccactaattaggggtgattttttgggtacctcaattttcacattttctcaatatttagagtatttctacggtatttatcgataagaaaaattttagttttgaatttaattttttgaaagtgttttagctagatacttactcattttacatgaatgtgacttaggatctcagatcgtcgagtagtattttccactcaggttgaccgacacatttgattatgtagttgaggtaagattggtataacacaggcacatatgcataggtttagcgtacatgcttatgtttgccaattagataacatatcagtaagagcggtatttgtgtacatagagttgcacctagataccgataggatatatgtttgacaatttagtaaagtacgaatcgatgctaccacatcagtaccactagagcactgagtatatgctggtattatggttgattgtacttatactatggattgatgctatcacatcagtacgacgagagtactgagtataggctaatattattatcaatcatattatagtcaagaacgttcgagactcatactcatcagtcatgggttaggcttgtgaataggtgtattggtgcttatattacaagtcaagatatatgtttatattattagaatattttatttatggaaattattttctaattaaggaaatgattttctatttaaggaaataaataaataattgattttctgttaaatgaatattttatattcattgaatctggacaaaatcaattatgtaatattctatatatggtcagatttctatattcattacctgatttgatttcctgaattaattgtcaaaatattctgacaattaatgtggcgcagatactgatggagtatctcacctataaatatagggtctcggtccccgagctcctcactcattctgttcataacagcaaaatccatctaaagagagttgagagagcgaggaagcccgattacccacatcaaccagtttcctttgcagatcaaagcttatgtgggtttgaagctcaagaatcaatggctggaggtatttcgatccttaaattatatagtgtat

SEQ ID NO: 304883 - DNA, 2494 bp, Cannabis indica
caaatcccagatgagatttttggggtttaatgaagggaattattttattttattttttacaaaatcattccctttgttttttttcattattttaatttgtatcaaatatttctgttgtgaaagaaagtagtattattcatgatcttcttctagtctatgttagtgtgttgttttaatcttattaattcatttaactttctagaaaaaaaaaacagggttgcttacattttgattagtatattatgcatggagtcaaaataagagatccaaacagatttgagtttgtcatttgacgtattgcattccagttggaaacattataattaaacttattttttaaaaacagaggttagtttttaccttgacaaagcttggaatgatatatattaataatatattatatgtgtataatatcaaagtatgaaagtggacatgtcatggtgaaaggtggattatatatatacaatgcttttaaagacactttcgtgtcaatttcttatttatgaatagttcagaaagctcaaaagcatttggatatataaacagtctacggcaacaaagtacttaactatacaaaaatgataataatctcttcccatatagattgattcattgaatctgccccatgtatcttctgatgatttctctttctattcatgctataattatatatagggatattggcgcttaaaccactcaaattttaaattttttaacacttgatcacaaaaattaattttttagggtatttttttctttcttttttctttttcttttcttatgtaacccttgacaacaactccttctccttcttcttcttcttcttcttcttcttcttcttcttcttcttcttcttcttcttcttctacagtcaagacttcatttctttgctagtgatgaaaagtccgagcataactatccagtgctttgcttatgtccctaactatgtagggttcacaaatgatgacctgtaaattgccaacaatcggtggggggaaatgggttgttatttttctggacatgtgtctagttttggccgggttggacataccaacgtaaatgggagttgttcctttttattaggaactcaatttcttctttcaagctcttacactcattttggtgttgtagccgaaatctttatggaatcagcaaaatttggtgacatctcttttactgatgtctttcttcattggagggagtttttttgtagaaaacaatggcctatgtgtccattaggatagtctcgggagtgttagtcaggatactaaggcatgtgaacttcttctccttttcccaagggtgttgttgtgcatggagattattgaatttccctttcttgccatttccttggctggaatcgttattgttctattttcctccattattgttgttggtctgtggctgggcagtattatttggcccagcagtggtaggtgtgttgttgggggcagttgttttttgcccaccaatttgcacctaccggacaacttcttcaagttttataaaatctttggcccagtctaaaaagtctttcatattggtggttgatctttttctcatgtctctccaaaggttgttcataggcaggatacctcctaatatggttgtataatgcccttcttccatcagacctttgacctttgtggtttaggtcatgaacctttggatatagtctttcaaaggctctcctagcctttattttatttcaaccaagtcttccaggtaggatggtacttcctagaggataaaaattgcgtgtaaaacttagcagtaaatgcttcccaagaatcaaatcttcttaggaatagcttaaagtgccaatactgtgcggttttagataaggttgttagaaagatcctacaatggacattatttatcaccccttgcagatctgtttggatctcaaagtatttgatgtgagccaaaggatcttctttcctagagtacatttctaagctggtatcttgaacttagttggtaggggcaatgcattaatgcatgcagagaaaggtgaccctcaagccctgtcaagttccaaattagaaagctttaagcgagacaagccttgtattaggcttttaagttgatccaactgtgcttgcactgtaggatcaaatttggtcgtcccttgtctagccaacccttctcatgggttggcaggattctggtcatttcgaggcaggatgtttccattccgattaattcttcttcagttcaagtcattctgaaggtcttcttctaccctgggacccattctatcaaacatagaacgtctgggccttggattataatttgccaagtattttggtgaggaatgtcattattgtgctcggtgttgttgttggtttttatggtactacattatataagcagtggaagagttcatattatctaattattattgtaccatagcccagtagatctccatatgtgtatacattaaatcaaaatataaaatacaagtaaagaatatatacatcttgatgactat

SEQ ID NO: 304884 - DNA, 1704 bp, Cannabis indica
aatattcatccttagtaaagtagattttataaataaatgtataccagttagatttgtggagtatatatgtatattagaagagtttgaatattttaaatattcatctacagtgaagtaaattctgtaaaaatatatcggatgggtagacattacttttttattgttctgaattgttatatatcttaattgtatgcttaattttttcgggtgcgtctaatatatagtcgttattctggtaaaaatttcagtagaattaggataaaattttttatttaaattattttaaacttgtaaggattttatttaaaattttctttatgaatagatgcatgtgtaattgtttttatatgtttaataaatgtgtttattatacattgaggcaccgctcaactcatagaggcatggtggctctttgaaaggatgtggtatataattcaccagttcaacagtttctatttagtttagtggtttaccatagcttgattaataacgtctactatttacatatttgttgaagaagaaaaagaaaaggtattcaagatctagcccgccatcaaatttggatacagttctgtgcaaagaagaaggtcctagtaacagacttgaatagggaggttgtcgtgaagatagtaagcaatgtctaacataattcaattacaataaataggccgaactcgagcaaaaagtgatgttgggtaaaatttcagtcagtggtcagaatgacatattgactcgacacattatggaagctctaaatttattcattattatagatgaaaatgtattataattaatttatttaagtacatttaactaatatactaacttataattaaatagtaattaatttgtaattgaattttacattttgaaagaaaacctacttgcaatgaggagacggactggcgaccattacaacatgtgtggttagcgaaattgacacaacacttttatagttagtttttagacttagactttgaattttagacaatacttattttgtgttctacataaatttatcaatgattagacttgaaacatagcatgttgtagacttttaacattattataatataattaaattttattttattaattttaacattacaataatataattaaataattttttatttcaaactaaatcttgattcttataattaatttataaatatttaaaaaattaatatataatcattaacaaaaattaatatataataatttaaataaaaaataatattaaaaattaaataaataaataaaaaattaagagagtcctatgtctgcaattattacataataaccgaagacaaaagttccctatatctagggtaattcccccacatgagtttgaaattttgttccacctatgtcttcggtcattttgtgataaccgaaaagataggtcctcattacgtcttcagtattttcgaaacctacgcatcatcgcctcagacgacttcggtagcaagtatatttaaaaatgatgataaattggattaaaaaccgaagagaaagataatttttctagtgctgtatgttgacatgaaattagccaatgcattatggtttgtttgctacgctgtattaccccttattgtatctattctatataaaatgtggctatataatagaatttttggtttatgagaaattattgggtaattttttttaaaataaaaaaaataacaaattattagattt

SEQ ID NO: 304885 - DNA, 3450 bp, Cannabis indica
tcctagctttcttgttctggaacaagcgtaattggagaaccaaggcgccatccttttcttcctcagctctcttcccgaagctgacctccgtcaggctaaagagggtcagctcgttaagattacgtcgggtaaccctctctctctcttccttttcatgtccttttagctaattttatcatatgggtgggttttcctcgtaatgtctcttggggtccagtttaattataaccatttgtgtttaacgtcttcaagtttgttcttttgtgattaaaatggaatactatgcattgggtcctattgtgggttggttgctgaatgctgataaaatttaggaagaaagaattggaaatgaagtgatttatgttattattttcatatttatattatgcgcttctcaagaacaaaattctttaatactcattgttttatttttggctcaagaataatcattgaaaatttgatttacacttttgttacttactaaactaccctgattttaggtttggttaattctattggcaatttagtatgtctttttccgtaatgtaacaatagtagataggtttggtgactttccttcgcttaagctaagtttgagactttcaaggtccattctttattgacttacctatttgtgatgactaaaaggaattgtttgtttaaaaatacattgagtaatgaaaaaaggagaaatttctctttcactttcattctgcattatacatttgggattttattttggagaatccttcacgtaattaataaaaatcggaaaggatgactcattttgcgaaggaacctctttttaagcaacgagattttgcaccataatcatgtttcatggattgtgctttttaagacttgtttgaattgaactatttatttcacagtttttcactaagtttagttataagcagttctgtggtaatatcttctagagtttttctttggtatttgattgtgctttcgattacattccattgcttgtacttctacatacgtatcttttggtttaactctatcctatatactctcaatcatttccaatgaataccacattttaataatcttatcatatcaataataaatcatatcatttaacttcttttgttcaatagagagcttatcctgctttcataattttcccggtggttttagtttgcatcatgtgggagtgtctctctccggtcttcatatgaaagggctcccagttgtatttatacatcaacactcttatacgagtatggaggcttgaatttaaatccaaggaaggtcaatggatcatgcttccaatggggtctgacatattgtgaggtatggagactgttctactgtatctgtctttttcttttttcagcttgattcttgtagctataatgtttgacccgtgaattagcttgatccattttattatgaatgtggtagttatatcatatgcactggttgctataacgttttatctttgtaaatattaactcttgacattactccttttatgtctaaatgtgctcacctccattgttttcatttctaagttctgttattttatttttgctgatcagcatttatcattactcatcatcattacattttataaatccatgtaacatactaacatgtacaaagtaccttaaatagtttctcagttaatatattatactgcattaactaggcataactcatagcccgcttcacatagcttaaccacccacaggttaagcatgttactgtaaaatctggattgagagcaatccaatgaagctaaaaacttcaaacaactcttttaaacaatgaactgcatttaacgttaatatgtttaatatgtcattcggagttgtaatcttatacaatgagatttgaacctgacagaggttctccacagacttttacataactgataagaagtctggcctcagagctgtcgtcaaagctggttctgggtgtagagtcacgcccttggtttttgagagtgaacttgtcaaaaccacgagaagttgtaggattctctctcccccactaaggaaatggctaagagagagaaacctctcagatgaagcccgtcttctgcgcctagaagaagggtaacaccaaaaactcacgtttattgatttcttgtcgttagtcttttattataaatcttttcagttatcacatcacatcacaagaactttgacttggttggtatctggcatgaatttgagtttggcagatatgtacaagaagggagcacagtgagtgtggttggaatagttcatagaaataatgatgtgactatgattgttcaaccttcagaagttgtctctacaggatgtttatggcaaaagctgcttctcccagttgacattgatggagtcttgcttagtgtttcacgaatggctgtggctggccattcaatcagccgatagcccggccaaaacctggcctggactgctagtgtctgacgtagctaggacttataaacagtgtaggagagcttctgctttaacatcaagtctttttacagggcatttatttgactcgattattattattattattattattattattattatgatccattttttttcttcttatttgtttcatttctttgttaccaaaagctgtaacaatttgactaagttaaggcttgaatattatctatgattcattaggatatttaatgctttcaactttcaagtttaagttgactgtgattcttggttactcgatttgttcctttcaactatatagtcgttaaaaatagtttcttttgcaagtttgagatgactgtgacaccatctcaaagtgccatataccatataacgacactctagaataaatgttgaaagaaaatatgaaacgacattagaaaaaaaaaagaaaagaaaaaaaaaaacagtgaatgcttaaaacgacattgaaagctattaaacgacagaaatttagataaacgacttccaattaaaaaacgacaattatattagaacacgacattaaactgtaaaaccacatgaatcttggaaaatgactttaacgacaaaattgaataatatattcaagaaaatagataaaaacaaaaaatgatcttgaaaaatcgacaaaatcatgtttgacaaactaaaatgaattaggaacaatgacaaataagcttatttataaatttattttttatatatataaaaattgaaagattatcctattttccaataaaaagaaaaaatgaagtttgctccatcacttgtttaccaccttaccagaagctgtaactatttgatttagataagacttaatttttttccttttctttttgtctatgttatctgttttaacttgactatgattattagttactcaagacacgtttggaatgtcgtattaagtggtattgtattgtgttgtaatatattaaattaaattatatatcatatttttatataatactatgttaaactttaatttacactaaaa

SEQ ID NO: 304886 - DNA, 656 bp, Cannabis indica
catgtcaaacgaatcacaaccatagaaggaactaacatgagtcaaatctaataatcaatgattagacttctaccaaaaattgtttggataccttgatattaaatcctgcttttgcactagtctctatgaacataactccaaactcacgggacttggcgtctccttcctctatagaaacttgcctgtttgtataaataatgatgtattatgttatgggcaatagaataataatgacaagagaatgaagcagaaatgattaaagtaataaagcaacaaaaacattatgtttctagttttgtggtgagtgagtggaccacaaacttggctcaccttttatcaacgagatcagttttgtttccgacaagaacgataatgacatcagtaccccgctctgtacgtacttcctcaatccatttgcttgtgttaagaaatgattgtctatctgcaccatgcccatatcattgtgatttgtgagtgaggaagcaaacgaaaacactcacatgaatacgaaattccacacaacccaatgcaaaacaccaacctaggctcagacattgctgtcgtttctactttctattatgaaaagttgaaaatagaggaagacccagcaaccagttttcttttttttttttattctacaactaattaatcgaaat

SEQ ID NO: 304887 - DNA, 6538 bp, Cannabis indica
aatctataagaatatgagttaggccactctcactctccttaatttcacatgtatggaaagcaaactttcaaatgcagggttttgaaataccgcaaatcataaatatctgatctagcattaggaccttttatatatacaactacaaactagccacataacattacaaactaagctttaacttcctggtttaggtaaatatgtggcagtcaaatgccaaaggagtcaattttcaaatgttcattgtaaattgaggcacccgaaagcctgtgaaaaggctcgtgaaatatggcaatgcaagtgtaccgttatgtaagaaatgttaacaaagactgacaaacaacatcaatgaatatctcaaacaaagaaacaaaacaaatgaaccagcaaagcaaaggatattctttacggcgtcctttttcactagctcgatcacgaagatggctaagccggacgatttctgactctagccactgcaaaagcacaaacaataaaatgcattcattaaatgtcgtgtaaaaaaaaattaataacacaagagaaaccttttttttcatactaagagattacatgtgatcatcatagaagatgaaaatgaattccaatctcctaaccaatgcagaaaacaacactccctcaacaacctaatattgcaactatgacactttgaatggggtaatttagctactttagaggagcgagaaatgaacagcagcgctagaagtaatgttgagataaaattgagagctatatagcacatgggatgaactggaggtttaagggaaatgagtatatgaaggtttactgtgacaataacacaggcattgccatctcataatcatgttcatcatggtagaacagaacatgaagaagtggaccacaattatttcaccaaagaaaagattgatggcattagtgttgtgtgtgtcttcatcacattaagttgctgattttttttccttgaagaatgttcaagtcagtgctgagaagttaattgacaaggtggggactgggttcataacattcaacctgtttagtccaacttgaggggtatacagtctcaaactgtcctaaactttccttatttctaaagtaaaaattatgcaatctgaaaggatagtaacttacatctttaactctgacggattgaagtgccattgctttctcttgaacatcaccctacatgcaaatgcagatttatcataagagtagtagtacatttggcaactttcagaaatttttaaaggtaaacagtagtattaccaccgtaagccgattgataagtccacactttatgctctgacgtagtctcttgcattcatcctaacaaataaaaaagacacaaactgaaatgtcaacagacaggggaaaaaaaatatccatacacatgagaaaaggtataaactatccatatcttaataggaacagcctttactatgtaaaactttttttacttttattttgaggagaacaccttaaacaagatattgaaatagtaccataccaaaggtgttttgaatatgtttcaaattttggaataaaattttacgtttacacatctaccaattttaacacatgcagccattttggaatcttctttctaacaaaaatcatgtgtttctcttaataatttaaaaagattgaaatagactgtcaagtggggaatgataagtagaaaaggctcgggctaaatcacctcagtgaattcttgatttgagatgatatcaattgatacaacctcagtcttgtttaagtttaaaatctctagcacggtatctgtggtctttttaccaactttatatggctcagcagctttggttgtacctgttcaaatatcattaaaagaaatgaccaaactttacagtagtgatttgtttcactcattatataacgagccaaacgaggacaaaatacatcttatttagatatttaccagtaacttggaccagcctatacaagtcttgcttttgaccagtaccagaaattctaattcttgcaaatgcaccaactactttatcatggaagtttgcagtatcgtcaatcaggtcctcaaccaaattgcgtctcaaataaatcaaattaatgttgtggttatcaatagcagcataatcatcaagattagattgaggccctttcccatcaccctttctacgcgatttacgtttcttgtctttaccactttttcccacaccatcatcattcccgtcagcttccaactgacttgcttctgtatcgacgacactcccttgaagatcgtcagtatgggaatcttcctttgcaagaaaatgagattcgagaagctttaacatttcaaaatggccaacgcgtggctttccaaacagattctgaagcctcgagtcacaaatgatttgacttttcctgcgaggatcgcgaagtttgttcctttttatgtattctagcaaaagggcttgcacatcaaactgagacaaaggagatatatcaccatttctcatgtgcataacaaactccaagagttcttttgatgcccatgcattgttgtcaccagcagattgccctcccgaagcagttgctctagttgcctttcgtgaatccttgtctttggtacgggacttcacgcgttttttggtctttctttttttggtgttgctaggttctactttatcagaggaaccatcactgtctgagccaacatcatcatttgcattataaggttcatcagctgactcctgcttatgagaatcagatcctataaatggatttttcgcctcagcaagttcctctaatgttaaagatagcttctcctttaagtctatccaataatctttaaagaggtattcccagctacttctgtcatcaaaatctatattatcctgcccaaaaaaaaaatcaacagaaaaagaaagcaaaatatcaatgcaagacattgatacaatacaaaatatgaagttcaaatctcaaaggtctgttccaacaaaattggaaacaaaaacaagaaggataattgagtagtgcattgttcctttaaatgggttttaaaaaaaatataagaacagaagatgggaattaaaattaactgtctcatgttttataaatgtaactggtaagaagtcagaaaatcaactcatccaagttttttaaaatcatctgatatctatgccaaaacataccaagaaaatccattctctattgaaggtaaatcgctttaactaacgacccgaaaggaaacacagaaacatttagagaaggagctaacataccgcattcttctttccttcattcttttcaatcagcatgacagttttcatacatggctcacaaagtcctttgttttctcgaagacataatatagtattacttttaatacaccccttgcacaaagagaaggtacatgtgtaacaccagaagtgtgcatttttctcacagatgctacaaaggtgccaaccttaataaatggaagataaaatatacacaaattagacggcaaaaaaaaaactaataaagaaataatatcaattgcaaagggatttactgtaaatagtaaaagtttccactattagtattagtattgtcaataaacagataatattttgccaaaaaaggagagtgctatagacagagaatgtaaaatatataaaacaaaagatagtcaagaactagttataaatgcttgcatcacaatccccttaatcttttgaactaaatatccagatatatgagtacttaatttctataaacaggtttatattcataaatttaacatttagcaaaccctgaactcatcagttctaaagcataaatatctaaaaacaaaataggtacagattgttccaactgcctaacttatttagctgtaggttcttccttgtctaggtgtaaggctcaaaattacatacattagaagcacaaaagcattaccagaactcaaataactgaatgatgtccaaaatctacaccagtaataaaagcatcacttttgctcaataagaagaaaaattatcaccctaaacagaaacttaccacaattccaacgacccttggttcgaaaaaatgcttcatcacggttaacacatgaagggtgataagctttggggcatcccctgattacagccaaaaaaatatctcactaaattactcaaccaaacatagatgagcaagcaaacataataaaagtatatgacaaaatcatataaaagccatgaaatgaatgaagcatgtaaaacactgacctccggtcacacaggacaagctcacccccatcaaagcaaatgaaacaaacatcctcttccaattttttccttgagttgactttggcaggagctttattatttttcccccgtttccttttcccattactgctcccacgaccaacttcctccacaaccacctccatggctgtagcttcatccacattctcagttccctctgcctcggttgtctcctccatagcatcagcaacatcagcttcctctgctacttctgtctccatagccacaccctcatcctctccctctgtatcaacatctttctcatcctcctctccttctgcctcaatatcctctttctcatcctcctctcctgcttcttcaatgtcctctttctcatcttcctcttcctctgcatcaatcttctctttctcatcttcctcctcctctgcatcaatctcctctttctcatcctcttctttctctgcatcaatctcctctttctcatcttcctcttcctcttcctctgcatcaatctcctctttctctgcatcaatcgcttcttcctcttcttcctctgcaccaatctcctctttctcatcctcttctttctctgcatcaatctcttcttcctcatcctcctctccctctgctataatctcctctttctctttctcagcctcatctccctctgcttcaatatcctctttctcatcctcctcacctcctcctcctcctccctcaatttcctccctttcctcctctccctcaatctcctcctcttcctctacttccacctcttcttgcttaacagttccatcttcaacgtcagccactttcaccgtctccttctcctctacctgctcagccaaattagtttcttcctctatatcccccacaccctcgtgctcctcaacttcaattttcacagcatcattctccatacccgactcctccactaaatcccctaaagcatccttttttacaacttccatctcatcttctttccccttctcctcggctacctccggctctttctctttctctttctcacccgcacactcaattttaacctcctccgccacaccaatatcatcaactaccggagccacctcaaccacaactgtagattcctcttccacctttacttcaaaagccaaagctttctctccctccccttcttgcatttcaaccatgtcgctcttcacttcttcctcatccattttctgttgggccgactcattattggattcggaatcgcattggaaccgcgtagctgagggttcgaggtcagactcgggcatggccgctgttccttcttggagctgagaaagaggaggtttattgacatgtgaagcctcttcttcatcgccttccatagcaattaaaggaattgaaaattgagaagctagggtttcgaagttcagctatggcttcaatttataaagctttcttttttattattctaattttttatgttattgttagtctgaactgaaaacacagaaccaaagagaagaagagaagagttttggtgttgttgcgagttcgataggcaagaggggtttcgtttaggaccgaaaatgaaaatacagaaatgcccccaaactccctcatgcaactgtttgtatctgggcctggacctgggcctggactgggccgaggattttacaatgggatttttataaaaatattggattttatgtaaaagtttacaattttagtctcatacggcaaaaattacatttatattgtcctcttttttttattttatactgtaaataaaaaaaaatgagacatccacccataaacccaaataccagaacagttgaaaaacaaccattaattccgataggattgagcaaaaaaaagtgaaattaatgtcaaataaataagaatggaaaaataacagtaaaataacactaaaaaaatcaaataaaaaatagacaaatagattaaaaaaattatcttttgcacagcctcaacaccaaatgcaatagcgcctatatttgcaagtccagacctgaaaaattataataagaaaaactactaaaacaaaattaaaataacacaaaaacaaatgtaaaataatgaagcagatataaccatttataaaaacataaaagaaccacacacctcaaaactcttctgacagtgagctcgtcaaatgtatttataggagaatcagaataaaaaattacgaaaaaagccatagagaaggaagaagaaaaatatttatagtctccatcttttacacccacggacagaacagaaccaccacagcaacacgagaatacccaaaaaaacaactattaattttgtaagagatagagtaaaaatagtgaaatcgacgtcaa

SEQ ID NO: 304888 - DNA, 2510 bp, Cannabis indica
catagtgtgtaagactgtgaagaatctagaatcaagagaaggacattcaggctcagatcttggtgatactctgctacaaacaggatacaagggttagaaatctgaggagaaggagccattaatattccgctccacccaatgtaaggtttcctaaactttatatgtgtttatttacattgttttagatattcatatttaggatgttaaataacatacatggtagtaaatctagatcctggtaaaacatattccaacagaacccccaagtgattgagggggaaagatccctccttcatacataacagccccaatatgcgatctttacaagcgctgtccacaccaccaaagttgagtcacttaaaactttaaaatcttcatacacatgttcccctaacctttcattacctttgcaaaagataattaggtcatttgcaaagcaaaggttaacgagtttgagagacttacaaagagggtgaaacccgaagactttcaaattggatctctgaatcaagagtgtagtcaagtactccatggtaaggacaaataagagatgggacattggatccccttacgcatgcctttttcacctttgaaggagtcgtggcatctcccattcatcagaagggtgtaagaagctccatgaagatagcttaaaatccaagagatgaacttaggaggaaaacgcaaacccttcaaaagatcataaatgaagcaccaatccacagtgtcataagctttactaatatcgatcttgaagaaacatttggctgaaatgttctttctcgtgtaacctttgaggatgtcttgaaaaatcaaaatattatgagccagaagtctattctggacaaaggcgcctaggttatgatgaaaccaacttgggagaacttccaacactctagtacagatcaccttcgagatgcatttatataaaatgttgcagcaggctattggtctgtacttgaattcctggggctatcctttttgggaataagagaaatggttgtctcatttatttccttatgcagggaaccattttggaaaaaacccaacaccgcactagtgttatcctctccaatatcatcccactgggttttaaagaaacctaagcaaaatccatcaggacgcgggcttttagtggactgaatattgaaaagaatagccttgacatcaaatttgttaaaaggacgaataatctgaacttgctgttccaagctaagcttatgtccattctccaaactgagcagatctatccttctagtggttgaacttttcttccccataaagttatgtaagtgttgaagaaaatggttaaccactaaaggataatcctccacaatggtatcatcattccaataggaaacaattttgttatcagcttttgttttttttcatgacagcatgaaaatagcttgtattctcatctccaaattttagccaagtaacttttgactgttgttggaggtaacttttgtactgttttcgggcaagcacgaatttcttctgcatatctttgtcaacctgtgtatgaacattacatgaatggttagtagcacgcatcttttgcgcattgttataaacctcttagcttctttctacaacacatgggggcttgtgtcttctttgcgccatcttttcaaagcatgtttaacactgaggagtttctgattaaggctcttgagggtaaccggccttgtgtcactccatgcatcaaggatagttgctttaaaatcacccttgaaagcctagtagttacaaaaactaaagggcctagtaccatagttattggcttcaagaaacttgatgaggcagtaacaatggtctgaaatagtctcccacttgaaagttgcagcagtgttcagataatagtctagccaagtttcattagtgaaaaccctttcaagcttggagaaaattctcactcccatttcatgtttattagaccaggtaaagtaggttccacaacaattcagttgatccacatcacatgaacttaaccggtcttgagcatcttgaatctccatagccttaaccagacgaccccctattctatctttgtagtaaaacatcgcattttatttcccgaggataatctaagggtcatttacgttccccaaactatccaacttagcccaaagatcctttctctcaactattgagttgctcccatagaccgcagttaaaaagaactcagccttagttccaataattttcagtttgtagtgaacaaactgcttgtcatccataataatctccaccttaaccaacatgtctaaccaaacaagaagaattcgataggataaatttttgctagagtaacagctccaacgaagaaagttattcatcactttttggactttctcatgggtgattttggtctcaaagagagcaccaaaacccacattattcactttacaaaattcaaacacctcacactgtttttctatattatttagacctttaacattccatcccaaaatgttgcttctattcattatcaaggccatggtttt

SEQ ID NO: 304889 - DNA, 2423 bp, Cannabis indica
aacataaaatgttatttctgatctttattaataagtaaatctgattacattgaaatgagttttatttagggcagaaaacccaacaggtatgaccgtcgatcatcagacaattgttgatttaaggagtactcatttatatttcttattttcttttctactttgtgctataagcttactaacttgattgtcagagtaccttcagtcggtaccaccctggtgacgcaaggtttcacgaccatcctttatctttgtcttgtaggttatcggtgcccacgaacattaattttggtcattgtagattttagcctctacaatttggtgcccactgtggggccctgacaaactgacagtgagcaaggtgatctatcgttgaccacacttcagatggtagaagaaggagagttcattgcccaagatcaacctaatgtcaatgaacaacttgccataataatggcctaaatgcatgagatggctgcgcaaactagagttttggaacgagcaaatgtaacatttaagaaggagaacgcattgttcatgagtgaaaatgctgcaataaaatcacaaatagagtcactgaaggctaccatgacaacttatggtgttgctcaaacttaattttcagttccacttacaccaatgggaccactccactcaactctatagaggacaatgacccaagtctctcaccaacaaatactcggagggacatcgactgcaacattcagtaataggaggttctcaacctcaacagtttgagcgtactgatatgcatacagatgggacagactctagaggtctaatggacaactgtatggcatccgatttgcctacgaccaacctcaaaataactgacctacctacggtcaacctcctgacgactagcaacttaggggttgacactagaactaataacatcttctctagagggactgccataatcacatgtaactaccacacaggtaatggtaaattcagatatgattccatcttttgttgatgcaggtcagaccactactcctactccaactcgggagaatttgattgaacgagcgatcattcagacatttaaagggatggaagtaatgattcaacatatcctaggggttccaacactaataaagaaagcctgcctagcagtttcgctttcgttgacgccattgtgttggtggagatgctaaagatgtttatgttcccattgataagaatatacgacagaacaaccgatccaaatgatcatatagacaattattttgaggttgtcatcccttccaagttgcacgaggcatgcatgtgtaaggtgtttgagtttatcttggtcggcccaaccctccaatggtatgaaagtttaccaaataatttgatttcatcttttgctcaactaaaggattttttgtagaacaatttgcaagtagcaggaaattggataaactctcaaatgacctataccccatcaaacaaaagagaggtaaatcgctacaagactatgtggccatattaatgctaaaaaagtttccatcataacatgcaatgtagacacaaccattaccgccttccataaaggcgtacaggtagaatctgacatttacaatgaattgaaaaaatatccatgcaggacaatgtagggtgtgcttgccaaagcttgggcacatatcaagtgggaggaagatgaatccaatatacaatcaacatcttactcttactctcgtgatagtagaaggccaaagagggtagaatgatggtcatcctatcattacctgaaaccttatccaacaaacagatcacattcatacttgaataataagaagtacacccaaccacacaaactaagagattacactgcaaagtcgatactattggttttatgatactaaatcaggtatgcaacagaatagttttgtattatcagattatcatcgtaccatagcccctaggatctccatatgtgtgtacattaaatcaaaataataaaaatagttagtttagtgtatacctcttgaagcctattagggtattttttggaacttctcgtaagttatatcccttaatccagttgatgagaaactagcaatttggactcacaccagtgtcttccaaatcaattcaccacacacaaggaatattgtgggttattaagaacaatagaaagaaaaaatagtttgccttttctctttagggtattcaaaaatagcagagtaaagtgatgttctgatttctcaaatcaagctcctatttatagtagttaaatccctttaattatatcattatttaattatttaaataaatatctataaccgaattcggttactgatatttatgagagaatctctcaactacttgagagaatatctcaacaaccttgaaatatctttaaccactttttaaattagatatttacatattgaattaattaaataattaatgaa

SEQ ID NO: 304890 - DNA, 4405 bp, Cannabis indica
gttgcagcagtgagaaagtagttgagtttctcatcgatcggatcatgatctgcaatccagagcgagtcacacgagatgtgattcagttaatggagaattgaaactcagcctcaaagatttattttccctgtcccttccccactgagtgattctgcctcaagagtagttgaagacagttgatgtggttcattgtaatagccacaatctatattattacttttaagaatttttttgtttcttttaattttcccattttgaaaataatatatactaaaataaataacttttaagtttgcatcaagtcacagcaatgaaattaagccatgttaatttggcaattgagaataattggatgattattgtttgcatatccattttttaggatgaggctataagcattaagcagtttcttctttagtgtctcttttaggtttactagctcatatcattgttttgttgcagtatcattattttctgatgatcctatgttcttcttcttcttttattattattattttagtttggtcaaccacagtgagaaatttgaacaaacatacctaataatgatatgaatatatgtaattagttaatcactaatgttcatgactcctgagcataattgtagataataatttgttgaagttttatttaatcgcaacaaataattaaatcataattatattggataatttatcatggtttgctgatgcatgcacaagtcattcactgccgtttaaaatttttaatgtttttctttttttttgaaaataaatttttaatgttaatttttaatgttttaaaaaaaaataaataaataaataatagtacgatccaactataagatttccacgtgtctacacggtattggtcatacccgaatccgaacccgcatcttccacattttccccaactttccttctactattggttcctgctcctgttttactggattttctcgtcacccaaacacctctgagaaaatacaatcaacaccattaattccgatatgtctgatctcgctggttccctccccgcggcggccgccggtaacatacatatctcttactccttcgcctgccttcactctctctctcatgttgcatctatagtatgtacttgttaatataaatatttatctatctttattgtttgttattgatggtacttgatatttcaggagataagtcggctctaaagttgggttttctcgggattgggataatgggttttccgatggcacagaatctaatcaaagctgggtatgcattgctgtggtccacttactttacttcttatctactggaaatgttgatactctttggtagttcatcagattatgcaattttttggatcaagaatttgcctttgagtacttttctgggaaaatactgtggttaagggttactgtgccaggattaactaattagttatttatgggagaaacatgaaggtcaattctttgtctctgaaatcaagtttttattgtggatttggcaccatgcaggtacaatgtgactgtttggaacaggactaagagcaagtgtgatcctctcatcagcttaggagccatgtaagtacttgacatgtgatttcaaattcgaactgagtttaataataaaaaatgttagcttagttatattttgttgttattttcatatacaaccagtaaccaccatttaagacgattttacctggaattttttcagtactttactttgttttgtgatttttcagatataaatcaactcctggagaagtagccgcgtcttgtgatgtcacatttgcaatgctttctgatcctcaaagcgctgtgagttttgtttacgttcttgttttttttccttcataacattatatagcagttttggcaacttacatgtgttttttattaggtggaagttgcttgtgggaagaatggagctgcaagcgggttgagttctgggaaagggtactattttcttgtctttagagaataggaatttttgtttttggaagttaacactcacagaatggtaatcgagaaaggacttcgttcaaataatgaatagactaattggtcttttatatctattatgcatatgcatactttgaccatgtcaaagttaggcgcttcatagctgatatataagtagtaatatgatagttattgatgcacatcttcaggtatgtggatgtttctacagttgatggtgaaacttctcaattgatttctcaacatattaaagctactggagctttgtttttggaggttaaactttttttttttctaatttacttaaaaagtgtttcatacattagtaagttctactacttacctttttctttttctttttgtattagagtattttgagtcttttgctttggttgttttttttttttgttatctaggctccagtttctggctcaaaaaagccagcagaagatggccagctcatctttcttgctgctggtaggcaatattttgtttgtcatgcttaaagtgttgtgaatcatcgttacataaagttcatgttttgaaaatttcagatttcttttctgctacttaatcaagtataccttcagttaagattttcatccatgctaagtgttctactctgagcttatgcaaatcttgcgtagttagtgaataaatggctaatagacactaaattactagcttaaatttttcaggggacaaatctctttatgattcagttgctccttacttagacatcatggggaaggtactgttttgatttgtcaaaactagaaagtgcttgtttggtttggtcaatagagttacctatttctgattttgctcatgcatacagtcaaaattctaccttggtgatgttggaaatggggctgccatgaaacttgttgtcaacatggtcatgggaaggtttggcagatctcgactcccaactaatcctacattcttctgtattttgtttagactgttattctgatcgtgttttccttttatcacaacaatttttagtatgatggcatcattttctgaaggattgcttctcagtgagaaagtaggacttgacccaaacgtactaattaaggtatcttccagggcatctctgtcataagtctcatcttattcatctttggtttttgtttttatcaaaaaatgtatgttagtaacttgatccttgtactctttcataatcctaagtatcacaggtgactaaataaactgacctagtcgatttcatttcttcgtgcgtccatggtattacaggtgatctcgcagggtgccattagtgcgccaatgtactcaatgaaaggcccatcaatgattcaatccgtttatcctactgcatttccattgaagcatcagcagaaggtgtgtaaagctcctccttagatggctaacaagtaatatctcccttcttacaacagcttcttactcttatcatttgttttcaggacatgaggcttgctttaggattagcagaatctgtttcccaatccacccccattgcagcagctgcaaatgaattgtacaaagtagcaaagtctcaaggcctcagtgaccaagatttttcagcggtcatcgaatctctgaaaggaaagttgcagcagtgaacaaagtagcccagttactcatcaatgacacgatggctgaggtttatgtgcatcccaagcccccatatgtcgtgactagtgtttcactctctggagaagtgaaaactcagccttagagtttttttttttttttggttgtaatgttactgataaatttattaaataaaccagagaccaggatgagtagcagtaattataaggtcttacttcttcaattttaaacaaattacttctatgttcttctgtaatatgctttctctataaaataactattgtatgtataactacaattgcaaattgcaatgcatgggcgtgtgcgtgtgtggatctatttctattaatttagcattagacaattaaaataatattaaaattctaacttaaataaataaactaaattagattcgaatttaaaaacatgcataatattattttgcataattttattgaggaaaccaatagtcaaaatatttgtagaatcaaattaaaagcatactacataacatgttttaaattattttttgttcatgctctacatttaaaaagttttaaatcttaattttatttttatacgtgaatatgtgtgtacatttacttatttaaaataaatataatacactatgaaaattaaagaatgtaaagattttggtggtgtgcagtgtagttttgaagatatatttttaaaaagggattttttattataacattaattgtaaaaaaataaggggaattactctatatatattttttttaatttttttttaaaattttacggttttggatttttagagtggttgcaccgctagttgtaatagaatttttatac

SEQ ID NO: 304891 - DNA, 1089 bp, Cannabis indica
agaaattaacattaggaaaataatcatattaggccataatcaatagatacaattgaaatcgaagccctaatttttattaactgtttatttccttaaattgtttctcctatcactgtttttattatttttctagttttaacctattcttaatttttatttaaccaaatagaagtaaaattttaattttaacgtacttaactacaatcctcgtgggatcgacctcactcctggtgagtttactacttggaacgatacgtacacttgcgtgtgcaaaatatcacaacactggtgcattcgagttgatcacatgatcgagcttggtcagatgtcccttgatgactctactcggacatcctgctatgtatggataacatagacctttctactaatccttgggggctgctaggagtgtaaccttcagcctaggtaggaaagtgtgagacacgtgtcatccaactaactaccacgtcatagtgcaaaaaataggataacatgatttaaatttgtcaatatataatagctatacaaaatggaaaatatttcaactaggaatacccggacctcttcgtgcaccaccctaggcctgcgaatcaggactccgaccaactccaatgcaagcctctccaaacccaatctataaagaagcgagacaaagagatagagagatatgttatatagataaagagtgaaagggaaaaccatacctgagaccagtgccattaacactggtgtcttctccgatgtaatgagaaaaatacgagtgagtgactgagtgagagagagaagttcgcaaagttagatctggaattttgtggggaggagagcttgattttatggataaattcgaccaacatggtcgagatttggtcgtgtgtcaaggtcgagagagagggggagacacaggtcgtgcgtctaggcaaagatagaaggggaggcgttctgtgtgtctaagccgtcagagagaaagaaagagaaaagagagggaggcgctagttgtcgtggcagggcggagagaaagggaggtcactggaggagcttgctgggagttttggcagcagctaaccgaagagaatagagagagagagagag

SEQ ID NO: 304892 - DNA, 4055 bp, Cannabis indica
atataattatatatagatgtaatgagtttgatcatgcaaattataatttacccaatctacaggatctatgttcattgccctcaaggcttcatcatcaactacacttccagagactccagcattattaacctgtgatcaacaaatattaaatccactaaaagtagatgattctttaaatctacctcaccattacataaaaataaaaataattaataatatacacaaatcaaacatattatatatatagtcagagactcagatagtaaatggatatgtatgaactttaattaaggttatttaccaagtatattcaagtctgccaaatttttgggtaatgaattgagccaaggcctggacactaagaggatctgaaacatcaagttgatgaaaagaagagagtctgagctgagacctaactgatgcagctttgaggtagcctctcttcctcttttctcatctctagcagttaaaaccacacacactccttctgagctcagctgcttcactatctcatatcctatccccttgtttgctcctgtaaccactgcatacctatatacatatacatattcaggaccatttcttatctcattattattattattattattaagataaaaatggtaagaactaagaagaatgaagaatgcacacctttgtgataactgagttgccatttattggtgtttttttatgttatgatgagagctgtgtagctgtggtaatgctactgtgtacaattggctctgctaaataaacagaagtgattgaattagctacttgattagaagctctgttgctttggtaggtaagcttgattcaaactcatacatgtatttcctttgatttttgttctatcatggttctgttataactttaaaaagtatagggtaatctcttaaaatacatatactactacacaacaaataacatattatagactatccatgcacccttttaaaagattaatgtacttaatgaaataataacaaaaccatccacctttgtttgtttttagaatttactaaatcttatcttacaatttcaaattacaaaatattaatagtatgaacagatagtgatgatctttgtagattatatattaaatgtagttattatgatgataagagtagtatgcagcttgagtcataaagaataaaagtcaatacacttaaaacttcaatttcagggtggcgatttatacttacagaagaaatggatcagtgtaaaatatgtgtgtgtatatgttatgtaactccttcgaaaaagtagttgagattgtatgagagagaactgaccctgtatgcacactagatatgatcataagacttgattgagtcactatttaaagacaaaatagcaatcttagtacaaaataagatatattggtcctatgttaattcagatgtcaaaatcatgtttgcccatataatatacttggaataattctaatgatctcagcctggagactccgcccagtttgaggataataagaatataacatgtattagaagtaatataatgaagaatattacttttaattgtccaatacctgtgtttgttttaatgatctaaagaaaaacagtggctacaaactagattacatctttgtaaatttgtctatactttcataagaaatgtaagattcttttgttcaaagatctgtgtttgtaaattgtaatatactaattgctgtttctgtttaaattagcttattgatattaactttcactactacagtaattacttttgctgctgcattttttttcagcacaacgagcaaagatcaacaagaatcttagctccattacctgtcgatctaacaagatataactgtctctgtctctataaacctgtcattaaacttgtcatacgaatatgaccaccatatctggtttaaaaaagctaagacatttctcaggaatggcctcacagtaagtaagatacttaaataaccgtaattgccatgatcatcatccacagcaggaaaacaaattcacaaactctttcacagcttattatgactaaaattgcaaaatatttttaagttaaaaaattatcaatcccaaaaatattatcttctaagtttttcattgaactaaaaatttgataacataataacaacattaatgcaagaaactaatgtgaaattaaattggaagtccaggttttgtttcttttgtctattataggaaagaaagaatacatcagagcctaactaaatgccaccaagaaacaaacaaaagtttcaaccatgcttaaatagagaaacattttcaaacaatacaggaactaaaacaaatacccaagaaaaacaatcaccaatcaactattacagggcctacaaatggttcttatgtaatatatataaatatatatatatatatatttaattagttcttgacaaaccaaattacccaaacaaccatttattacactttgtttttttttcctaaactgggtcaattattactttcaggcaacaaaaagaactatctataattaatattttcaatggagggaaaaccaaccaaacaaaagagcaactatttccgaaaaactcattggtcttttataaagagagtaaagcagcttttgttgtttcagttcccaaccatgagagagagattccatatcagaaattaataaagaaaaacagagcttggtttaacttcctctaagctaaatcacttactctgtatagcctatagtattaataatcgcaaaacagatctaaaccacctgaaaaagataaaactttacatataaaaggtaaagaagaaaaatatacagtacagatataatacttattacaataattttgccctataattagatcattagttacaatcaaaattctttacaaatcttctcaggcatttgaatattacaatacatttcgaatgcaatgctgatgtatatattttatgtgtgtgtatcaacgttagttaaatcgatttgaaaatgaaaatctaaagagtaattacaaatacttacatatgttgatcttaaaagtgaagatggaaagcttaaagagatatgaaatagagagaaataaggaggaagatgttgacttgagttgagagagagttgactgagagaggagagtttgatatatagaagagaacaaatctaataaggctgcggtggggcaataatttaagtacaagaatgaatgaagggtgggcctatgatatgagcattgttaaattgggcacatgtgagatgtgacacgagtggtgagagtttctcatacttaggggtgttcgcggtgcgggtagtatgagttgtagcttttttattttttaaatcaaactgctttttgtaatttctcaaaccgcaacagtaccgcatgatcttaaaactgcaaaaaccacactgcgaaaatacggtgtagtgcggtgcggtttaaacagtttacactatcatcattatcaaatattataatgaaaatttaaaaattaatccaataaagttttaataatacaaacaaaaatcttattaaagttttaatatcttaacatatatactaatcatcaagttattatattgaattgtctctaaaaaaaaaaataatataatatacacatattgcatatatttgtttttacatagaacaaaagaataaaaattatattgtgaaaagtgataactttgtaatatataatgcggtgcggtttgaatcgcgattattcaatttaaaaatacaaattgcactgcaccacacggtttggcaaaaatacaaattacaaccgcaccgcaaaagatttcaaactacattttttatgcggtgtggtgagggcagtttgtgcagtgtgtgcggtttgatgaacatccctcatactagttattaagagcatcttcgatgtccaacaatgcactattttactaaattggtgaggaatcttcacattattttactctaatgacacattaaatgatgcaccaaattagtatacactaaattctacacattaatagtgttggattttaaatctataccaatttgatgtattttttttttttgcattctaacccttattttaatttatttt

SEQ ID NO: 304893 - DNA, 749 bp, Cannabis indica
aaccaagaaatgccgttagataggcacttttaatatataaagatatatattatcttttatgtaacacattgcttcaattggcatcttctttactctgactgactttttaaataagttactacagtctatacaatctgtcttgtagtttgatattagtgagaaacatgttccttaaaaagaagcataacaaagttataaaataaacattttcaaccttatacatattaatttatatatgtctactaatatttaaaaaatgcatttaataattatattttataaatggatctgatcatgtatcagtgttttggaaaagtaccctaaagaagtagttataattatttaactaaatgcaaggtgtaaattgtaactaaaaagtgtagcttaaaatagaatcatcactttagttccttataataggatccacatttaatgtatagtatttctaagtttaaacttatttcctccatgaagttacatttaatgaagcctatatattattttatatatttataataaagtcccataaataattttgtaccttttccaatttccactatcacctgccaatttggatttttagtattatttggagttaaagagtgtcgaacatgatgaactatatttagaattaccaactttttatacatagattacacaacataatattgcaaagttctatatgtttggtgtaatttttttaaaaataaaataaaataaaaaattgtgtgttattttacattgttcat

SEQ ID NO: 304894 - DNA, 793 bp, Cannabis indica
aaggtagcagttttttgtagtgcttgtttagatccaatacactttggctgtcactaaggaacaaaattgggatcggccccaaaatctcttgataatcacttttgccatatcaatacttccttcacaattttagtacaagcaataatatctgcttgcttctgatattgataaatcaacaattgattgaagagttactttccggctaattgcgcacccttctaactggaacaatataactatatatatataatcaatttggaatctccttatgcctaagtcacttccatactctaaatctacaattgtaatcaactcaatctctctagctatgtgaaaccacttgctaccaatcttgctttctgtcttgcctttgtacttgtttatccacttacatctaacttgacgtttacaaataaaaacttttctatcaaaatccaagtcttgtttttgtcaagcccaatctcttcaacataagatcttggttcataatcatcactaagtcttgtggggccttatcccctgccaatcagtaactttgaatatttgtttgcccacaaacgtctctttggcaaccctcagttggttaacatgcaccaaactctataaaattccaagccattggtccatcctttcagccaattcatattgcatggttgtacgtggaactgttaattcactaaaaaaacttgctacttttagtgacaactttttaatcacaacataatttttttgtgactaaatgtgacttttagtcacaacaaaatatcacttgtgactaaaacataatatttag

SEQ ID NO: 304895 - DNA, 2386 bp, Cannabis indica
tgaagcttgatatgagtaaggcatccgacagagtggaataaagattcatagaggctattatgaggaaaatgggtttttctgaccaatggatctctcttattatgaaatgtgtcacaactaaccatttcacttttcttttgaatggcgaaacaacaagttctttaaccccaactcggggtctccgacaaggttgtctactatcgccatacctttttccgatttgctctgaagatttatcacggcttttgaaacatgaggaagtattgggacaactacaaggttactctcttactcgacgtgttgcacctatctctcacctatttttcgccgatgacaatcttctcttttgtaatgctactgagagttcttgcttagcaataaagagagctttaaacatctaccaccgagcctcgggttagatgctaaatctagacaaatcagtcatgtcattctcacctaacacaactctaacagcccaagtgttcttccgtaggcaactttacatgcctatttgcgaatgtcatgaaaaataccttggccttccaacatattcaagacaagataaaaaaaaatgttcagtgacataaaattaaaagtttggtgtctcatgcacacatggaatgaaaatattttttctgcggggggaaggaggttcaagtagtagtgaaagcaatactgacatacacgatgagctgcttcaaattaccggccgctgtttgcaatcaactagaattcttgatgtctaacttttggtggggttcaaatgagacaggctcaagaattcattggcgaaattagaaactcctttgtaaaatagaaaatgagggaggcatgggtttccgctcttttatgcatttcaatcaagctgtacttgcaaaacaggcttggagacttcttgagaagccttcatcactgcttgttcagctacttaaaagtcggtatttccccaacaattccttccttgaagcttctcatggtcacactccatcaatgacttggcatggaatcatttttgggagagaattacttgttgttgggttgcaatgggaaattggtataggcagaaatgttagttgtagatcggctccatggattcctggctataacactttcacaccagtccattatatggatccaaaaaactgcagtggttgctaatctcatcaccaaagagcgacaatggaacactgagttgcttgctgaatatttttcaaagattgatgtgagtagaatcttaacaataccactcagcttttttcacaacgaagacaagttgatttggcattcaggttattacactgtacagtccggctatcaccttgcggcttctttggatgaatcttctttttcatctggctcatcttcggttacatcctggtggaaatatttctggagactaaatctaccacaaaaatcaagatctttgtttggcgtgttctacatgacgccctccccattgcaacttcacttgtgtgtaggaaaataattacgaactcaacatgcttaatttttcatagagcttggaaattgatagggcatgcactctttagttgcaaatatgctcgagcggtctggcgctcctcacaatcgtcattcgactggtacaaatcgactactatgcataaaggagactaccttttacatctatcctctctttacactaagtttaaaatggagcagattcagtgcaccttatggtgtatctggactgaacgtaacagagtggtacatggtcatcagacaaaaacagcagcaactcttgctggtttcagtaggaattatatcaaaaactacatagcattctaggataaatatcgcccgcctgctactactgatgcaaagaaaacttctccgaatgttcatgccgtgcctaaaccgtgccagcctcctcctttgggtgctctcaaactcaatgtcgatgctaccgtagatagtcaaaggaatattacaggtattggagctattatacgcgatgatatggcataagttgtagcagtccttgccttttccattgttggaaatttcacatctcatgagatggaagaaaaggcaatgtttttggatttgaatcggtccttacagctgcaattgcaagtatctcaaattgaaacagatgctattatggtgtcagatgctacaaatgcccccttatttgcaatttcatcttttaaagatttaatagttgatatttcaagtcctctttcctttctccctagtgcaactattgttcatgtaaaacgtaaagctaatatggctgctcacagtttagctaaacatgctctagggttggatgaagcttgatattggttggagtctgttcctctacctattaactctgttattataaatggactttttcattaatttataataataaagtttttat

SEQ ID NO: 304896 - DNA, 3207 bp, Cannabis indica
aggtcctggtaaaatatattccaacagtctgctccgcacacttcgccaatacaacatcaaccatagctgaatgatcaaccacttgactaactgatttgtttttcttattcactgtttgtattttttcaggtttaatttttcgcttaccactgccagtttcgggacttagcttttttgaagtatgagccaacaaccggtgaaaaagtttaggactaaggggatttgagctaccccccactctacgagccactatatttttatttcttttccaggtcttctttgaatgtgctttgatcaatggttcaaatgtttgtttaagcatctgaccaaatgagatttcctccacacatgtgctattaataatcatttttcctttatcaatcattgtctcattcgtcttcactaaagtatcacgtgcagtgaataatctagctgagtcagcattggcagtcaacatactaactacctgaccttccaaagtaggagcctccacaacaacatctccactaactatcgaatttctcaaatctaggataaccgtattggccgtggccacctggtgcaggtcatcgaaaaccgtctctgtcataacacccctagtgcttgctaccagagatggatttttaagagtattagaaggggcaatatcagcagaagaacgcaggacctgctctttatcttcttcctcgcgttccctggctttcagaactaatgtcgcggctagttcctcctctatcaggcctgagtatctattgcgagcacgttcaactgattcaataattcaagaggcctctcccatgctcataatggggcagttgtagaaccaccatttttcaactgaagcgaactcaatcacggggaggcaaactcgaggcactcaaccaaggtccataacgatcttgtcttgcatcaaccgcatcaccaccttcaacatctcttaatggacagtccagagatttgtgtccaataatcccacagtcatagcaaaactccagtagatgttcatattagaggataagcgtgacctcacgtcctattgtcatcaatcgctcgccctgaacccccttttgagaggttctatgatgttgattcggactttaacttcatgactccattctgtattttgatgtcttcaacattgccaatgcctgcaccccattctctagcaaagaaatcagacatttattgattgaaatccataaagatgaatactgaattttttttttagatatttcacaaaaacccgtaggccttttttttggaagaaaagcgtatttgttataagataataaatagttagacctcatggtcattacatgaaaggttccccataatataagaccgggatatcaccaaatctcaggtgagcaaacgcccacttggccacattatgggctgcaaaattacatgttctactaacattcaaaaaaatacaactaaaaaatgagggagaagatctattacaaaaggagtgatagttctcaagggcccaatgaggatccttcccactaagtgcaatgatcaccacactcaagtcattctccacaataacaaacttggcaccgatgtccagcaccaccataacagccaagcagtaggtcgtcgcttctccacacaacgcatcagaaaaatccaaccgatctgtatgaatctggattactctgcccaggtgatccctagccacaactgcaaaacagatgttatctaactccactatgatatcacagttcagcttaatccagtcttgaggagggggactccaggcctccatgcagcatggggtaggaggagagaaaagagaagcatgtaaatatgcaaaagaagtacaaatagagtcaatacacttcttcatatcaaccggatagttagtgtgtaccttatcattatgggtctgccagatggtttcaaccacgatcgaagcataaagaaaaacatcctcaacattaatacccttgtgcttcagatcccagatgaatttcacccaatcccaaatacaaatgcatgtattgcaaataggataaataccctatggagaggaccgtcacaagtgaaacgccacttcacaagaaaaaaaataagtgctcaaaagattcctctcccgtaggcttaatgaaacaaataagttgtttatcaaaagactatggacccccaccatagaccctttgtcgatcttctttactaccaaaggaaaaatgaaaaacgttctgagaactcaattccttcacttagaaacggtgactaatcttctaaatccccttcatagccctttcaatttcatctttattggcaagtcgtggtccaagaaccttgcctactaaactcaactccattgttttcttcccttcagtcacgccttctgtactcaattgtaagactggtccatcctcttcatccaaatgtaaaacttcagataaacgcttaaccaattctaagtccatcccacaccaaaattgtaatatcccgataagtctaatagtaattaattagggtttatatttatattatgtgttaatcatgtaataagtgggattatgatcctactgatttatttcagtataaaatttaaattttgctataagtgagtaaataagcataatttataaattacggagatttatatagaatgtgtgaatgtaataatatgagctatatgtggaataaattattttcaggttcggtaaccctgaagacctgattagtggataaataagcgtaatttgttaattactgagatttatttgaaatacgtgaatataatacgagttatttgtgaaataaaaatattttcaggttcgacgaccctggagacccgattggaagccaaaaatgtcacaacagtgttagttagaaatattgatggaattattgggataagttaattttaagaaatattgaggtattttaggatactcgaagttggccaaataccctattattattattatattatataacgaaacgataagtttcgttagttttgatatatatatatattaagttttaagatatatcagagaagaacgaagaataaatccttgttctttctctttcctcaaaaccttctccctttatatctaatttcttcaattttcaatccgaaacttagcgatttaatctccggtagtaggatagcaaatccttaaaaagggaaagcttaaggtatggtttaatttcgttttaagtttaaaaacaattagtttcatatag

SEQ ID NO: 304897 - DNA, 2941 bp, Cannabis indica
tctcatacatttgcctatgaatgaaacaaagtagcaaaccccattgaatatttgctaatcagttttagaccattcatttcaaagcaaggcataataatcatgtaaagcagcaaaacacagccgaaaagagatgagcgtaataaagtaagtgaacttacttgctatgccattcacctgacatgaagctcatcatcaagcaagtatgaaaggagaatttcattccatacatcaggtacaccaggtaggcaccagtggctacaatcaggaacagacgggttgtcactccactgaccaacatgtgcatcacttcgaaaagatgacattgaagtaacatgcaacacggttacaggaagtgtcatgttctttacaacgtcgaaaacagtgtcagagaatatactgtgttctctgccttcggtttcaaacacagggtgttgggtcacattgcaaactcttcgagtgaaattactagcacaaaacaatcatcatcgttagttaatagttacgcagatgctcattgctgtatcaagaaaaaactacaaaagaaaagtcaattttcattgcaggatgatcagcacacgattcacatatgcactcatttttgagttagtgacatttttttttatctgctctctaaatacaatgctacaagatcaaaacgtttatatttgtataccaaaacttactagcttccagatctggtataggaaaataaacagaactttaaaagaatctgcattttacacataatgaacttgcaaaaccaactcgaaagatgcaaaaatttcatgagagaagaaattgaaatagtcaggagatactactgataatgactgactacaaagccaagtgtttccgtctctagttcatacgagcatttcattctgatatacatttactactttagaacataataataataatactgtaatgataaccaaagtttagaaatctgttataaaaaatattaaaaaacaaaatgtacaaaacatcccattccaatatccacacctgaatcaacataaattagatttttgttgtttcgaatatctttctccaagataccctagccactaacgctaacccgacgattgtagaatacattgaattaaaatcaattatttaaagctcaatttttttattctcagtaatcctagccccatgttaacaacaagcagttagtggaaggttgcacaaagttggtacttgggagtcaaaaggcagcacttaaatagtttcatgttcatcaatgggaagatattagaaaacaacttttcaaaaatagacaaaatccatgttttccactggcaacggataacaaaattctcaagcaagtttcccaaaacaacaagaacaataaatatggttcaaaagataatattccactccaatatcaatgagtacctccagtgtgacggttcaaaagtacgaaagaaaatttgcgttcgatttgtatcaatacttttctctacccacgatgcccatgtgtctagtgctgttctgtaggcggtaggaattgacattccaagctttaggaaatttcccacctgaaaatagcaaccactgtccagaatagaagctaatagtcaatataaatgacaattatggctacataaatcaacaactaagcttaagcatgctagatggaagtaattagtaactttcgacagagattcattcatcatgaagctaatatgtacattgatgagtatctatttctaaatctaaatgaaatgactttttaataaagtgtttattgttgtacacaaatatatgacatccggagtgttgaaagtaaatttaagcagtcaaacaaatgtaagtctcaacagaatcatttcaactagtttgaaatttcatttcttaaaacaaaataaccatagaacctacattgaagatcaagggagcttacattttgaaaagtttccctggaacccaccattgacctgtattgaaaatgagaatatctgaatcaatccagtggttactaatatcatccaatttgtccaacttcagtgtagacttgacccttttaggagcatgttttggcatagaaccttgttgcaccaggaaaaccgagcgatagaactcaatagtaaaattaaaagaaccaaaccgaacacctaaatatctaatttgtttggtgatctcattcccattgacttcatacacactcttcttgtcttgtacaccagtcataagcaagcatataagagactcccattgtgttctactcatagaatcaccaacaaaaacaacttttttacctcgaaaccgttccaacaatctttgcacattaaatgctgcaaaattacagttcctaggcttccaactccacttaagataatcatcatcttccctaccattacgcaagcaatcgaatcctcgttctgcaaagggacattctgttgcattgtacaatggataacgattgtctaagacccaatttccatcaagcacattgcaactacttccactttcagaattattaaaagtggaaatattaccatacacatttaaggctgggagcaaataatggtaaccacaaagaaaggctataatgaatgaaagcaatgaacctatcactacaagtagcttgaataaacgagagactgaattcaaccgattgatccttgggcttcctacattcaatgcctttcgattgaatgaaacattcctattatatgacacatttctattcaatgaaatactcctgttgaaagtaaccatcttaatcgaccagaccaccaccaaggtttttggaaactattcatagtgagcatgataataccaaatcaagattcaaaccattgcatctctccacaaacagtattatcaatcccataactaccaaaccccaaaactatcatatcaaaatgattaaaacttcccaaaacacaaaacccacctgctcaaatttcgtgaatctcaaagaagaacaaac

SEQ ID NO: 304898 - DNA, 1778 bp, Cannabis indica
taaaaataaaagtggttatagaaaagttattttttttttcaaaataaatattttacttttattttataattaaaaaaaataaaaagtaaagtattatcaaacggtacctaaattactagttcaaaaacacattattaggctcccatcaatctctatttaataattatccattatatatttgaaaactattgattaacaatatcttttccctttacttttgcactttacaaaagtcaaaaattggagcttggatggtgaatggatattaatccatgatgagggcactttttttcatcttaaaaatctattgacaccaatagttcttttattatttaggatttacatcaaactagtgccagccatcaatttatgaaagagtaaaaaggtccaaaatttgaaattgaatctctcaccctgatgtcaaaaaaaaaaaactagaaaagggtaaaaatataaatatttcttcaaaaattgatattaataaagaaaatataattttgagggtaaaaaacaaagaaagataaacttttaccgggtaaaaataaaaagaatcaataagatttttttactgaattataattgtaaaatatcattacgctacactaaaaaaaaaataaaaaatttcactgaattatgactcttctaaattttattccctaaacatagttttgttataacaattttcctcgaattatacaaatcgttaaaaatatattctttcagttattatgctatttttaaaaataatttacatatgtaaccatgagttacatttatagttacaatatgagatttatttaatagctttaaactaactaaaattctacttattaacattaaatatgcaaacataaattttataaaaccatatgcatattctcataatttattattaaactactatttgtgcattttttttaactcttgaatctatataatctcaataattgagagataaaaatttgcacagacaatttaaatttagaaattacaaatcttaattaaccttactaaaattgagccactaaaacatatgagccaaatttgtagatagtgttatagccatagttgaattaaccttggaagttggaaatatggctctctcgaaagttggagagccaaccaaaagaaaataaaaaagaagaaagcaacttaaagtgaaaggtttattttgctttagaattttgttagatgcttcatagttgatacccatcgttttctctccactcaaatcttaaatggaaattactttattgaaagctttatccatttcgtgggtcatctattctaatgacctatatataatacaaaacaatacgagcatacatcagttcaagtgagttttaacaagtttttgattttcaatttcaagtttttcgagttcagattttgaaatcttaggatcgaacccacccatataaaaaataagtttttcaaattttgggctcaagtgggtcggattcaggtgggtcagctaggctagactttttattttattttatttatttttttaatatcacttttttaacaaaaaacttaaaaatagtacaattatacaatatgttattatacatacatattacataaactaacacattaataatttaacacacactcacaaattcacaattaaaaaaaaaagacatatatataatataattatataatataatatatatatacataaaaagaatgctaaccgagttttgggttttcaaaaatattaaatccaaacttggctcagtacataaccaagtcatacctgaacctggtctact

SEQ ID NO: 304899 - DNA, 1640 bp, Cannabis indica
aaaacgtattcaaagctcacattgctaatgatctaacacctatgcatgtagatctcatactaaacaggtaaagaaacaaatcaaaaactcaagctatgttcgcaatcaatggaatgacaataaaattgctaagttatacgctaacttcaaatgaaaacaaaacgaattggaaaatgaactgacctcgcttcgacattgtgggttgctgctggagacgactgaaagtgatgctagggtttttgagggtatttataaagagagagaggtattagggttcagctagatcacactttctcatattcccaattagcccttggtcttttagtcgaataccatttttttactgggccttataatagatgggcctagatggaccattggttgtctttgggctttctttcctttggaatttattaagaaattatttcacaaatacacaaaaacaacaaaaaaaaaattacaaaaatacggtttcacggaattttagataattttacgattttttttattttatttacagaaaatgtggtcttgctatgttgtactcttgctaattttttgttattattttgatgttatttagatgttatttttaagttatttttatgtaattttcttgttattttttcgtgttgtttttatgaaaaatcgtagaaatgcaaaaaatatatatatatattctttaaacgtaaaatgtaatttttttacaaaatggtgtcttatgtaattatttcatttattaaattatttttttaagctcttttgttaaaaaaaagaaattatggtattttaacttaggatacttctacaatgttagggggttcgttgatgcacccttatttgtttcaacatctgaaaaaaaaaaatttagtccaattcttttcatggtcatttacgttgtagttatttaaaacatcttgcaaaattttgagaagttcagaaaatataaaacagtcgaaaacatggcttaaacagtctattgcacgcgagattttttattttatacaagtataaaatagacttcttaaactctattttcggcatattaaattttttaaattcttttaaaattatacaatatgtcttaaataactataatgtaaacgaccataaaaaaaaattagtcaaaaaaattctcccaaatattaaaaagataagagtgggtgcatcggtgaaccttaagcagatacatgtagaatttttctttaacttgtattattgctaaaatatagataatcttgtaaaaagtttgctctatggtgtaccaaaaatttatcaaaatttatcacattgtaaaagttgatacaatacatacaatcatacaatgttttatatttacttttataccaattttaatattagatgtttatataatacactccactaaaacagattattatcgccaaaaattaaacttaaatatttacaactataagttaaacttaagtatttatggcacgtattactctttttaaatttgttgtcatgatcaaagaattatttacctaaacacattacaataagcaaatttagatggtatactaacttttgccatttttttacaaaaatactgtcaggcgatatttttacttttttacttgtattttttataagttcatattgcagtatactgtgttaag

SEQ ID NO: 304900 - DNA, 1840 bp, Cannabis indica
taataaaaataatgaatatataaatctaaaatcaaatataactacattacatacaactacgacctaatacggcgttacaaacgagcccctctatagtataaaaattatacattatattttcggctctacttacgtagtagtgtatttataaaaatatattatattaaatatatgcgatacatatttaatatactaataataaaataatatatttaatagtacatttaaacacttacagttatcttttaatatttctcgtagtacatcgtggaattaataagaaccattgtgcttaagtacttgataatattttagtttttttgctgagataaaaacaaaaacaaaaaatccaaattattccaaagaaatcttgtgaattgccaaaagaatagagatacaattatggtagagatgatcattattcattgcctttcacctcacgctttttctatatttctttaatattattttcatttctattttctaaggttccatttctaaaaccctattaagaaactttgacttaggtggctaaaaggaaacctaaataaggtacctttgaatacatgattggtgcatgaatccacttataataatacaaagtttgcattactaaatctacctttttaagattgtgaattacaatttaatttaattcatctgtccatttcaaaaacttccaatcatataatataatacccttttatctttattaattgccttatatgtcttttatataattgagttgtcttgtcaattttgtgtgttgtttctccagcacaaatttttggtcattatcttagtggtttttagaatattagacatttttacatttatccgaatgtaaaaccaattttatgttattttattttgtttggacaaaaaatgacaaaccaaatttagtttacacagttcattggtttatcaatcatgagctatatctatggagacatttgaggcttgcagtgaatggtgagtggaacctctcatttagatttcttcaaagtttttaattggagttattttatatattctcactttaacttgtctccccacaacttatataaatatcttaaactatattttattatatttaatataatttgttttaataaatattatcatgcccatatttcgagtagcaatatggtcatatacaaaacctaaaaaatgaaccagctcggatattgaaaattaaacacgttatttatgttgcctcagaaaatactagtcatgattataaattggagtctttcttagatgactaaagataaattaaaataataactcactagtagtagaccaattaaacttaacaacaaccatctcgggaaaaccgtacaagaaaaacaacacaaaagactttgttggtcgaacaagatagtataaaggagttcgacctaaggagcataaatgaatataatttgaaaagcttacttaaaaggttttataagaattatccaaaatttcatcacgaatgatcaatgaaagaagagtgtgttggaaattattttaccaggatcttagatctactcacaagtatgttgattaacaccctaaatatgaacttctaaaacgattatgaaataaacacatataaagtatgagaaaccttacattgggtgcagcggaataatatgtctccttccgttcagatctctaacccttgtatcctttctgtcgcagagtattatcaagatctgaacctggatctctttctctccttctttagtgctgaaactccttcttgttgaatgtctttcttcacgatcttcctcactatgattgaggtatcacttgctgtgtgtgggcactactctaatcactaagtggttcgaaa

SEQ ID NO: 304901 - DNA, 3040 bp, Cannabis indica
atgagtctaaagctaagggtgaacattttacatatcaagacaattagacttggaatgttcagggtctttgggacaatttaggttcccttttgatagtcgttggaagacaactttttatgtacaaatattttgtaaacttatgtaacttttaaaatgggatctcggattatgtaaataaggatttttatttattaatgtttcagttatttaagaaaactataattatccatgttttttaataagcctttggattagaaaatccacaccaaataagagaacatggtaacacgcctaatctagtacggtgttatgcagctggctcacattgaagcactagaaagtgagcaaagagaagccaaggaggctcaaaagaaggtagtagagaaccttgctacaactagggacctcaaggtggaagtttttgttgagttgtctagggtcataggagagagggatgaagcacttgcacagctggctaaagctattgaggagaaagaggaggtctcgcaccgtctttgaattgctcaaaaaggtaagaagaaacttgagaacgaagttgctaggctccaatcccgtgttaaggagttgtagggggagataggggaggtccatcggggattgatcgctcatgacaacaagattatggatcaagctctttacaatgtatggtaggcgaaccccaacactgactttagctccttcagtcctgaagcctattttcaatgatctggcaggggccacccttagtcctcttaagtcatttgttcgtttagcgccctttaggtgtatgaagatgggtgcttttattttacatttttggatgaatgtatcagacttatttgttatgattcccccctttttatcttatctttatgggtcttaactacctactgcttttaagggagtgcctgacccctagactcactcaagcttttcctaggctactcctcccatatctttcactggtttgtctttgaactatgttaattatgttctgttagatgcttgatgtttgttaagggagcgttaatgacctttgtagtgtactttctattctcaacctctttttaaagggagataatggttctgtgaaccaactcgaccttttgcatgtatttattgcttgcttccctacacgcgttttgaggcttgtgtgctctaatgaccatttttttgtgtgcctttactgatgggattaccactaagctttctcttttctaggactagtgtgggtagctaatccccatagtctcgagagttttttttatatattttatccccccaagcgtatgttggcattagtgtgagaagacaatacgtatgtttttttttcaaagacactgcatgtgttgttctaaaacttgtaatatcatatatgatatcaaagtttcacgtaacatcataataaaactacatgcgaatggaagacatttcaaacctcttccttgactgaaattaaacagcttaaagataacaaacttcttacttcattctcaaaaacggtcattatcttttcattggtaatacttctttaatttctttgcattctacgctctcaatatcacgaggtcatccatgcgtgtcagcttatatgttccatgtggaatgatctgtgcaattcgatagggaccttaccaattttccccagcatccttgccgcgaggtctttggtatttcgaaggatctttctcaacactagttctttggtctaaactgcgtaaggcaaagagaatagggagtacaaaatcgcacgcgtaagagaaagagaatagggtttctctagtagtattacgaagagttattctacaagcccacaacacattagggagctcctcgatccacgatcctttatttttttctagcttggtcttgaggttcttcttaatcactttgttggtggcctctacctggccattggcttgggatgcactacagctaaaaaatccttttgtattcccctttccacaaaatatttgcctagtatgaccccaaactaagtgccatatcagtaatgattttataaggagctccaataggcatataatgaagttgttgaagaaggagactacttattgggtgggtatgtgaactagcagttctgcctccacccacttgtgtagtagtctattgtcacaatcgggtacttttcccctaatctacccaattgcaatgctcctattagatccatcccccatatggaaaatggccatgtgctagtcaggttggtgactttggttggcagatgctagctgaagtttgcgtgtttttggtacttatcgtaccttttggcgaattccatggcatactcctctatggtgggccaataatatccttgcttgatgattttgcgagacatggaatgccccactgcattataatcacactctccttcaagtatggcggataagactttttgtatttcccttttgtcttgaaaatcctcttttgtataatgctccatcgactaacacataacgagtcgccttatacactatcctcctggcctcttttcctctgcgagcaactttcattcacggatatatctgaggtatggagccatccatgagccttcgtcagtcaccacacacactcgctcctccttggtggtcagttatgcaagacattctacaagtgttaattctaatgtttaatttccctttttgatgccaacttttccaatgcatcagttttggtgttattatctcgtggtatttgttctacagtataatgttacaggttctccaagtaacctttcaccttagctagatattccatcatcttatttcccctcgcctaatactcacctttgacttggaatacaatcaactaggaatccctaaagatataaagcttggtgattttcaattcctttgccaaatgcaagcaagctaacaatgctttatactctatttgattattggaagcctcgaaccaaattatactacacaatacattatctaccctttagaagccatcaacaacacgcttgatctggctccaccgtcattgcatgccccatctgttgggttttatgccctaa

SEQ ID NO: 304902 - DNA, 1710 bp, Cannabis indica
agtgtttgattaaagtttcaagtttcgtttcagatgattgtatgaaggataagcagtacggaatggtaggggatggggattcagtcttcttggaaaacatggcaaatataatcttagaagcgatgttaatattctgggattttcttaggaaagataataagaccatcattaaccaaaaagtaagtcacaaaatggagattggaccagctgactctaaactcttgatagacatccaaaaagacttgcataaggttagatagacttaatgaaaactttcatattttactcaaaagagtttggtttattgtgttataatctaatgcctaattttctattttgttgtgaatgcagaaggatagaaaggtgaaagatgtacagaggagcgggaattgtgtggttaagaagttccaaaagaagcaagagcaaaagggtggccttgaacaagcattgtttcatgcacaagttgagttgagattgatagctagagtgctaaacatgtcgaggttaactagagatcacttaatttggtgtcaacgcaaactaaatcaaattagtttctttcatagaaaggttcacatggaaacttcgtttttgctttttccatgttaactcattagtaataatcttatatttgttaccatagtttctataaccttaaacaaatctttgttttgtctgattttagtgtacagtaggtttgtttatagagatgtgagcttatttaggccaaataatggtgtaatcatttatacactttgaattgatcaaagatatttacaggcacgtgaatcaaacaaagattctcaaacatttttgtttgttttttattttaccattactgtttaatgtgtatttttccaaaccaactactttgtatattatgtacggaaatgtgtttattggcccaaatcctctgtacaaattagtttcgttttctagtttttgtctcttttatcgttcaaaaactacaacttttgctttttaatgttgccactgtaggcagcccttatgtcacaagatcaaagctttgaatttcttgattttcttgaattgtacctcatttaatagcttaatatttgttctaattttgttttaaatagttgctgcaaaaaataaaaggaacgagtttttcaaggtgagtcgtggacttttttaaaaaaattagagttaataattttattttctttaaataagtgtgactaatgtaatttttatattatatatttgtttttcttaatatttgtatggtattggatttacattttttacttaaaaataataatttatcgtattagtaaaactatttcttttatttacatatattttacattttaattaacttatattaataatagtgtaaattaaacaacccactcgaaattatattggagctctgttgcacacgataaagaaccgtcaaaataccacacccaggatgagaaaacgtgacaccactcccgctagctcactcatgcgcacaaaactgggtaccccttaaggccccaacccatgttctaaatttgaacattatatacacttttaatgaagtgttcctatcccatttgagactcaatacactcacacacttcacttctaataaaaatatttttgtaacatttcattaaagttccaacaatcctccacttgatattttaaaaaaataatttctcgagcagtagtctaagcaataagattgagcatagacaaagg

SEQ ID NO: 304903 - DNA, 2164 bp, Cannabis indica
tagtggttttgacaagatcattctctgcaaatagtcaatatactaaaatccacttaaaagtaagatctgtatttgaacatatggatgtacattcaggagtaaatatgagttattgttaaattcttaaaggatcactctagattttaccttatgcaaaaaaattttgaaatttttgaaaaattttatgaatttctagtaattaatgatggaaaaccattaaaatcggttaagttatctaattttataatatataattaaaaaaaaaaagaacacgatacataattattcttaaaatagttgcccagaggccacattattaaaaaaggaaagtgtttaaaaaaaatatattaaattaatatttaactaatacaagctcactatttaactagacattatacatggtctagttacaccttgtttagtgagaaggaaaaaaaaacaagcagtaacatatttggatgaatttggcaatatcaaattgatcatgaacaacttctttgtagggcaacatttatgaaaactaagagcaaaaccctactttaaaattttggttaacttatttatcttcaccttttgttctgtgacctttaccaactgattttgtatcaaacacgaatcgaagatactaatccttaatcaaatatgaactgaggaaatggacgaagcaatatcaatggttcgaggatcagcagcctccaaagaaacaccacgaggatcttctctgactaacatggcgagaacattctgcaaactccatgactttatgacatggttgcttgagtcccctaaagtaacagcaaacactgcatcgaacccacctgctccaggaactccagcaaacaatactccttccatattcattgtagaatccaaaagttgtgtttgggaacgaggttcaatctgcaattttcaaagccccaaaatctattaggaaaatagttaaactaatagtacaaataagattgtgagcgagctcagaatgccaatcaagtacataactacgtgtgtacacttttttttcttccaaaatctaacaaattacgaggtacagcatcctttcaagtgtcatattaattaagagatcattccatatattgtgcacttgtatctctcacaacagtttatcgtcattccgaagagaaatatattttatgtacatgctattcatggaagggatctctgcctcaaccccattattatatacacactaaattctaaaaacatttcaacagcaatctaacaagcaactaagcacttaaataccatcttctttggaaaaaatcaagcaccatcaatatatgttcagtggaccaagacatgtacgacatttgtgtgtgacagtgtatgcatttgtatatgtgctgtttgttgacttgaaagtttaacatgaataaagttgtaaacttgtgtgtggtgattatcttactaaaagagtaaaaagtggaacaataaaaatcacactgaaacccaaaactgaagcaagtaaactgacaagaatccaataaaagacagatcaatataccggaatgcctgcagcctcgcccatcagacgcatatgataccggatcccaagcatagcatctctggcgcctaataaagctttggcaatgacctcttgactttgtttagtggcttgctccatccactatcacacgtatagaatggtaaaatataaattttttaaggacgactaaatttcattaagaatgaacagatgcaacatccaatatgattttatcataattgacaaaaagaggtttctaacatccaaatagaagacgatgaagaaaacctcactgaaaataaaatatgtagtttgctacatgaaattcaaataagacatgcaaatcatcatgaaacagctttggatgtgtaacaatatcaagtttacaaatcttttctcaatgttgccccaaaagtttagcaacttatttaacactcaacagtatatacaattaatttgaatatcttgcatctcactgttcattcttaagaactctggtgaacttcaattatctggaaacaactttggtacaacaacaaaactggatttgatgaaaacataattaaatgaagtgcagaaaaagtacaaaccagcacaaaggactatacctttctctcatccctataatcaaaaactaaaacacacattcaaatgaacttg

SEQ ID NO: 304904 - DNA, 3380 bp, Cannabis indica
gccttacacaacatttggagatcaacattccataacctgagacaatgagatgtcattatggctgaaataaccttttttttttcttactcttcacaaagacttgaatttagtatcaaactacacatctgactggttcacttacactttaggatgagaccaacttcattataagcaatgtttaatggttttaaatgtagtgtagaactcatcactaaaagttttttttataaatttaattacaccaaacacattattagctcaattataaaattttatcatggggttaaggtttggtagcggttaaattttttattttttttaaagaaaaagacttgtgtgtgttatgtcccacatctcttattacaaaaatggtttgtataatttgtttgatttaacaagtgacaaaaattgcaaaagaatcccttctttaaattttattaaagttcaaataatttggtatacatattctcttaaactttatagttaatataatgtagaaattttaagagttattatattgttcttcattcaacaaaagcaaaaaagatgtcaaagtagttaatgctagaattaattcaaatcagcaaagatatcaatacaaaacacatacaacatttaattttaatttcgtctctctgtttgtccaaatgaaaagtctgtacaggtcactggatatacgagtttcggcaatagaaaagttgaaacaaaatgaagttgtgtcttcattatctgatgtctctattatctgcattttacatcagattaaattagttcttacatttgaacttgttccaatattgccaatgtacaatgcatatgcatttattagtaatttttgtgggagaaagaaatacaaatatgcatcacttgttaatttattgccttacacaacatttggagatcaccattctataacctgagacaaattacacatctgaattccctttagggtgagaccaacttcattataaccaatgtttaattgttttgaatgttattagagtagaactcatcacaaaagtctttttttgataaatttaattacaccaaacacaacatttgttctatcactaaaattttatcatgggattaaggtttggtagtttctaagtgttaaggtttgaatttaatgtagtgtttggtgtaattaaatttataggaaaaagatcaaactacacaccatgtttaatggttttaaatgttattagaatagcaacaacctcattcaagttcaaataatatgccgggccaatattgttccaaaatgttatttggttcattaccaaagtgataaacaaaacaatttacttcatttactactcattcctatcattcattttgatgaggaatcctacaacttctctcattgaaggtctcatagaaggcaatttctctgtgcattcaagtgctaaatcgagtaaacttagcgccttttgttgctcgttttcatcccaatgacttatttcctcgtcgaataagcacaagcaatcactgctttcctctaagctcttccttgtccatgacacaatgtcaagaccttcttcaaagcttggatctactgccatctttctgtagacaagctctagtaagatcactccatagctgtatacatcacatttctctgtcacccgagttgagtatgcattctctgaattgcaaaacaaaacaatacatgaattaagttttgaatcttcttacataaaaagtttggattgattgagaaaaacagttttacctggtgcaatgtagcccaaggttcctacaattgcagaccgagtagagcttgtttccaaatcactaactagtatccttgctgtcccgaaatctccaagcttaggttccagttcagaatccaataacacattgtctgatttaacatctctatgtatgatttgtgggacacaatcatggtgaaggtaagaaagtccttgtgcaataccaaaagcaatgcgaaatcgtgttgtccaatctaaaaacaaatgaggttcactcttgtggagtgcattatagagagaacctccaggcatgtattctgttacaatacaaccatagccatctttgatgcaatagcctgtcattctcactacatttctatgtctaaccatgcttaaagttctcatctcaattataaagtttctatcagacaaattcaccttctttactgcccaatgctttcccgagttcttcgattgtatcttgtaaactgttccatgctttcctctaccgatcacatacttctcgttccatccttcggttgcaagcacaatttcttcaaagttcaaatcttttggcaagaattcactttttggttgacattcaggcagcaaagactcatcaagattatgtttttgtgtcaagacgcgaactgctaaagcatagatgacagtgcaaagaagtgtcaccgagatcaccacgcctataaccacaccgggaataatttggcttcttttcatggaaactttggcctgttcacagttcttaacctcagttcctagtaaacaaagctcttgattgccaatgaaagaacccggatatgaagcaactagtttcatccaagcagaggggattttcccagtgagatgattaaatgagatgttgacaaagattagggagatcatgttactaagttcagttggtaactcaccagagaagttgttgcttgagatatcaagaatttgtagcttgtctaagttgccaacacatttcgggatttgaccagagagcccattataactgagattaagaattgtactgaaatggtgaagttcagttaaactacaaggaatggagccttgtaacatgttgttaccaagttgcagctcattgaggctgtgaagagaagagaaagtgtctggaataggaccggttagtctgttctgttcgaggagaagactttgcaactttgtcaatgatgtgatgatctctaaagggatctttcctgaaagattgttcttgctgaggtcaagttttatgatgcttctgcaataagttaactcagtggggatgcttcctttcaatctgttggatgaaagtctaagaatttgaagattctgaagctttccaagctcggaaggtagagacccggatagtttgtttcttgacaaatcaagcattgtgagatttctccaatcaccaaatactgaaggtattgttccctcaagcaagttatcttgaacctctaagaatgaaattcctgaattatgattcatatcagctggtatagttccttgaagaagattattactaagaaatcactcttttgagtgatgaacatgctgcaatctgtcttggaaaaactcccattgaatcggtatgtcaagggtcaaaaccgagaggtatcccgttgcatatctcaaaaacgggagtcaaatccagttagc

SEQ ID NO: 304905 - DNA, 2781 bp, Cannabis indica
aagttggttgcaaaatcgatgctggtcgaacattgtaatatatatattgttcgaatattccatcttattcttcaaacaagttgtttatgaatgataaataagcttgaacgacacatcatgaaatgcactgcccgtctagatcataaaatattctccatgtcatccagataattgccacgtcacacatgttcgttcttcgtgccatgtcttgatccaatttgatgcaatgaaaggagtgaaaatatgattaatttttcaatatttgggaatttaatgccttgtcttgaaaaatgaaccttgattggcatgcgtgcttgacgtatgtactcgacatgcgtgcttgacgtatgtactccccaatatgtgatgattacacttttttaagaaaaatccaaaatttaaattccaaattactaaccgccattctaaccacctatataagggtttaaaaattattttatactctttcaaccagttttattctcaaagaaaatcatagctcaacatttttttttctctctaaaatctttgaagaattcttgcttggagcttgatttacaaaagtcatccaagtgcattcaagagcttctaaaccgtgagtaagtcctctttcttctcttctatattctttaaatacatgcattattttttaattgattctgtgaaatatggattttttgaggttgttctttgtcgattgagattaggagaaactagggagaatatgcttatggcttttagcttcccaaatttccatcgattttctattatttttgctagaaactattcgaaattgtttgtttgaagtttttgggaattttccaagtttatttcctttctttaaacctttgatttgcgaattttatttttggaatgaaattttatcctttttcgtttgaatctgtctggtcggcatatcagacgtgttttgtcgttgcaaaagaaaatcatagctctgtcaagttcttacctctctgtcttcccgcttttgtagatgaattatgttgattactggggatgtaaccaccggatggataacgatttacttcatcttctttacgagaaccaacccagactccaaaatgcctcatcttcgtcgtgtgataattcattgacatcgatgagtggaggttacatgtgactcatcgaagtccctagagcccgtggtacaacatcaccattaccccgactaaattagtggataaggatacagctggttcatttgagaagtaaatagaggctggagacattacctgctcgcttcgtggacatacaaggtccggcgaacgtcttagacacactgccagaaggtcgtccagagccttcaaagaaaaactctgtactagtagaaatctctatctctattgtgaagtgtacaactaaatcaaacctcccgtccagttccaggcataaggtgatggccaaaacaaaataaagttacagaaagtccttagctgcgaatctacactttgcccgactttttgcaatggccaatgtaaaacaagttgaatcatcataggatgttgaaatggtatatattatagtttggagaaaaatatctcttttattattctaattattacatttttctgtattgtttttgctattttacattacaattgctattattattttacagatgagttttttttgcaactaaaccctctcaactatcgttctacttgcattgaactttttaagctcaaattttggtggtaaagccctccaaacggctgaactgttaacaaatttaaggtgacatttattttttacaattaactgtcaacatggattgtttatgtatacatttttatacatgtggcacgtgtatattagtacatctaatattattatttcaacattattaaaaaatatttcaaaatttatgatattttttcttttttaatattctattttttattttttataattttatttaattttaaaataaattttgaaacaataatattgggtggatcaatataaatgtctcatgtatacaagagtgtacacataaacagtccatgcatgatggcagttaaccaaccaaatgacaccttaaatttgctaacagtttagtagtttagaaagttttaccgctaaaactttagcttggagggttaagtgcaagtgaaacgatagttggaaaaatttagccgccaaaaactcttacacattaatggcttgtttggtacgtcgtattatattgtgttaaattgtattagtattattttaatacaatactatatttagtattgacttgtattaatagattatataaaattataatatattttcaataaactcaactccaacaccaactacttgttgattccgagtctagctcagagattagggttgactccaaattctttataaatattataattcaagttaataattaatacaatacattattttatccttgtatgctcacactgttcataaataacataacaatagtaaaatcattttagtccggataatttataaaatttgagtaaattattattaagatagaaatgaaagttactaaaataatttttatttaaaaaactgaatatatctataaacctcacaacaaaaagaaagctttgattgattttaaaaaaaaaaaaaaacgctttgattaaaaaaaaaagaagaaaaaagaggcttgaccgaataaggaagattatctccacgattcttctaatattatagtgaatcttttcaaataaataactttttttaaaaaaaaacattatttgaacagatagtataaaattccataaaatttgt

SEQ ID NO: 304906 - DNA, 3229 bp, Cannabis indica
gaatatatttctaggcattatcacgaagcctaatgctctgtcatttaattcattgattgttctaactgggcgaccctgaagatcatccctcaattcgcctggagagttgttaattaaatatactatcattcaagtttcttacttttactgctgttgtactgaaatgacttagatgagcctttaacaactcccctggctgttgcttaatattcgtcaacgaggatgcttctaatcttttgtaaatcgcaacatgaattccttcttaaattcattggataactgctcccatgaggtaatagaggtattggtaaatttatcaaactagatgctcactgccccagtaagaggtggttgggataatatgcaacacaagttgttggaaacatttcttgctcgcattatattgttgaaattctttagatgtgcaactatgtaggttgttccatcatattgcatgacatgtggattcttgaatccttgagggaattgggaattgagtatattagggtgaaaaggttttgtctcctcatctaaatcataccttttcaattttccatattccccatcttggtgtcgcttgaacttatcttccaactgaattactctcagtttaatttgctccaaggttgggtgctcgacttgttgctgcacgagatgtattctgatttagccaatcttagagatctagaacattacagttcagatgctcatgtaagtcaggttgtctaaagtttaattaattattcacgaagatcagggtcgcgtcgccttttaatcatttggtcgtaattacaaattgaccttattgtagagtaacatttagattaataactctgagaatcgcttatgctctcctgttcatcatgataatggcaacttgtatcctccccactccgtgtttgtctttcatgtgcatgagttctggtcgatctactctgaccacgagtccttgacctcaacccactgggaccagtacttgatcctatttcttggggttcctttcgcataggcctacgtcttcaaaagagatttgacacacgtcccctactaaagtaggtatacgtgctatctctatcattttggtttggtctctatgagtgtcttggcagacggcctgacatgcgtcatcctcccatacccctcacatcatgttgagtgaacccctagttcttaggtcgtgtttgcttggcatctgcgttcatgcgagacgactctgggttgtcaggttgcacattcccacgagttgtgtttctgcaggaggttcctagttcattgggtagagtttctctattgccggtgtttccctgacattgggggcctccttcgtcaactagaatatcccttgtattccgtggtaggtcatcatggggattcgtgggatttgcgtggttatcgcctctaggagttttcccatgtctcttggttcttaagcctttaggtctctcccaaggtttcctagtggatgtgtttggtttgttcggaggtgcatcgccgcgtgcagcccatgcagccatagcctcgcattctaactcagcattcctctaatttgattatgcaaatcattgtcggagttgtctattttccaattccactaatgacacgtatcttatgggatcgtacgtgtcctcactatgtgtttttgggattccacccccaatttgtttaaatcctccttctccatttcctcctcccaagtgatgagtctcagtcgcatttgtcctatgggaattctggtgttctttccttggacgttgagttgtctctcccggttgattatcttcattttaaggagtgtcatttgccatggatggaagatttgaatatattttaaggaagcttttttttcttgagtttaattctcacaaggctttcaatgaaagcactaaactgttgatgtagatttttcgttaataaccaataactgagccttaaagtaataaataaactcaagaataataattaatgactataaataaccagaaggttcttacgtgggtttgaagtaaattcttcatactccatgagtccatcttatttctgggattttatagaatgcttacataatataagataatatttgtataattctctctatttctccaattgattgtccctgttttcccttggattttctccctattcataagaattgtagggtgacaattattccctcgatatcttatctttgtaaccgctcatgaaacgtggacaatctccacgtttcatatttacatcacatggataaaaatagataactactataacagctcttatctttatgtataagtggttgtgttgagtgtgctttttctcctcgcaacgtagatgattatcttatgatgttttactttgaagataactttttacgcttaagtataatctgagaagtacttctcgcgtccttctgtaatgttgagagaagcaaacacgaggcattgtcataatgcgataattctgagatgaattatatcgtatgtaattgccttagtctttgaacatactcacgtgtatgtggattaataggctgcaagctcttaaagaattcattatctaccctttccaacatgtagttgtttagttgtatattctgagtatcccgagatagaccttctacattgattatttatctcgttggtttcacaaaatggtagttattattcacgactcacccctatcttcggaaggacgagttagaatatttctatcaattatattatcagaggcgagtttattaaacgtaattattgctccataacacgagctagtttattttttagccttttaatacgtgtcatcactatattgctagctcaaatatgggtataacatatagatgtttcaaaaataattacgaaactaatattaaaataagcattgaaattagcacaaagtaatttgagattttttttttgaaaaaatattgacagtaatttttaaaaaattattttaattttttttaatattgggatgtacttttcattttatggggtacaaatacaactctccttatgcatacgtgatagattttagtcagatttgttttatgaaattttaattttaggatttaaaaccccgtctagaatactttattttatttactttaaaacaatttttttggtattattacaaacatcatatagcaaccaacgaagcaacctaaatcgcaacaaaaatccacataacaacccacatagaaactaccaaaacaacccaaaccgtaaatttaaaa

SEQ ID NO: 304907 - DNA, 2395 bp, Cannabis indica
ttttattttagttttagtaaggatagaaatagtacattttaacatgacataattaaactaaaaaaaaatatttttacagataccaaattaattttaatttgagaagatttttttgtttctctttatacattttgaagtaaaaaatacaagaggtcatacttcttttatcattaatatttaatacatacatataatagctataaataaaatgttaatttaataatacatctaatacaaaaaataataaatttttacctttaactcataataatttccataaatactttagtttagaataatgcttactttttatgttaacaaaaagaaaaaatcaaaacatcaagagcttgttttactttttttgaaaaaagagattgtcttagactgacccctatctgttatatattgaaatccctcacttgtggcggaggaaaaccaaggttacaagaatcttagcataaaacatactaaaaacacgcacaaaaacaagaccggaaccgataaaaacacaacttgttagttctaaaagaaaattgcatcaaatttctccattctctaattaagtctaagaatgagaagtgatcaaaatatttagtcttgaacacccacgtggctgtccaaaaagtaatcctttcccacaaatcatctaccaggctttcagatccttcgaaaattctattatttctttctaaccaaacagcccacaacaaagccatgattgttgttctccacaaacagacctgagccaactgcctcccaccttactcactatcatttcggggactcacacgggcatgacccattgaatttcaaattccatcatcagcttaaaccatagcttttgagcaagactacagtttaggaacaggtgtgccacctcttccccactcttggtctctttttttgcaacctctcatgaatattaattttgcctagagccaccagccacccaaaaactttaactttcgatggacctaagcttttccataaggtctttgtccagaaatattcacctgaagcatggcctgatgtataccagccaaacgctgatttacacgaaaagatacccccccgcatcaggtagccaaaacctgctgtcatctagaatgttaagcactcagacatgttccagctgttgtagcatctccaacaaacttggtattcatctgtccatcaagtttctcctaaaattaagattctaacttcccacagtttcctacttcgccctcatcttcaatcagctcctggatactctcatttttagctctaaatatcacagctaagttcaaaaaccggttcttcaaagatgattccccaatccagacatcaagagcttgttttattgctaagttttcctcctttttcccttttttaagaaacaaagagatattgaaccctccatccatatctacaactaaattttccttcgtatagtagttttatttaattttttaataatctgatttacagtctaaaatgctaatatagtaccacatgcaatcagggttacctgtccaagatctactgcagggttgagactttgtccacagtcataaataatatccgatcgcaaaatcgaggtttctcctgtcagaagatttatctcaacctgccatgagatgtattcactgttcagtaacacagactaaatatttctcattagctaaagactggaacaatcatgctgataatcagatttttagtaagataaattaactgtttgatgtttaatagcgaagaccagttataggtttaattgagaaattatttcatgcatgcaatcctgcaacttaataagaagtttcttgcaaaagactcacctcagtcactgctatgccaaagttcaagtatcgcatggaagacatatctgggatgaagaaagaacttgatgataaactaatggattgtgagtaaccctgcattgaccaaagaccaaggaaaattgaagattgtgattaaatttgagaataacacaaacacattaaaaataattccagaaagtttctgttaattgaggaaactaaattaataatagtaccatgattagtaagttcataagtcacgaaaatgaaacaatgaaatccaactagatacctgagcaatcagcatcttccatttgatagaatcagagccaagtgattcctgtaacttctctttaataggagttaatctctcaaccaagacatcacagcatagtctgactgccgcacagcttgactcagatgtagtgctccctgctgtaaaccccccttggatcaagctcaaagtatcagcctgtatgactcgcactttatccagaaagttttcagctccatcagcaatgattgaaccaagagcaaaagcagctgtctgtttcacctttgtccaaagcccttggccaagctcaattcctcct

SEQ ID NO: 304908 - DNA, 2434 bp, Cannabis indica
ggaagttatcacacattggttatgaaagtaattaattcaaatttatggccgttgatgatttgtaagagatgatgtaattttaattttaattgcttatgagtgcaagcaatttagattaaaagagggggtgagaaagaatgaataccaaagaaagcttattgaaattgtcttattcatgggtttaaagtttaagcaaccagaaatgggatttaggtttaagaggaatgaatgagaaagattttgggaattgctttcatgatgggtgcaagcaatctagaatataatgtacagtaattgatcataactcaaatgctcaatatgtattttgatacagtaaccggcataaaatagtaaagatcctttttatatttaattttattttttggaaccattgaaaaaacatatgcataaacaataggtgtcattatctatcatgtatcaacaaatgtatttgcttaaccactttaacgcatgttttgggtcagtatggtcagaccaaagaataaccttgttttgctaattttaaaatttaactgaaatttttgcaggatacttgtagccattctatcagtgctagagagagttggggacatattcatttcatggtatatatattacctataaattatcgttcaataaactctgcatctgtggaatttattggatatctgatgctgatgaatttttttttttaaggttgcccatgtatggagagctcaagctggcccttttcatctatctttggtatccgaagaccaaggtaaattaacagattcaatttagagaagagagttaagatgagaaattttgataatgataaatgtattttctgtatatagggatctgattatgtctacgatgccatattacggccttatgtcacaaagcatgaaatagacattgatcataagctactggagtacagagcaagggcctgggatttggcacttttctactggaaaaactgtactgaattgggccagacagcattctttcaagtcatacaatacgttgctgctcagtcgggaaagtttggcagccataatggtactgaggtagatttctagttgtcattttccttctttcttttattctcaactaatctgttcatattaggtaagaataagactaattctatattctatggcatagtactaggagttgggagaccaatacttacctgctcacatcaaaatatccattcacggattacttttgatagtttataggttccctagctagttggacagaatcacgagaagattcaagaaacttcattttctacctcattccatgtaacacaaattgctgcctaggaaatctgagtctgaaaatatacataataaccgaaccactaatcgaagtgatatgacttttgcagaaaaatgatgaacagagaaacagaacaaccaaccatgccacatctgatacaatgaaatctaagattgttcaagtccaaccccataaagaaacagagtatgtacatattgtaaaagaattcatggctgaacctggtgctgttaaaccagatggtggagtttctcctactactaactcagaaggtggtctttttaaccaagctcgccaaaggcttaggcgattcaaaccactcagttagaatttgtaacacacaaatacttgtacaaaaaccaacaaaacaaataggataattgggttcaaaacttcttactcattcaaatgtagaaattcatttctttctttcttttttttttattttatttatttttattcctgtaatatatgctgatttccattttataaaatcaaaaaaaaaaaaaaaaagaatggcttctttttacttagtgattttcattacaatttctcacccaagcaaagaaaaaacagagcatgaaaacgtaattagaaattataatcaccgttatctggccgaacggactcgaagggcaatgagaatccgatcaacggttctgatcaaagtaggaactacgactcgtctgaagaaaccgagacaagccgtgacggggttgtgaacggcggcgagcctgacccagatacggccgaggaagtgtgagccgttggagctgggagaggaagacatgggctgtaggtaagcccaagctgcctgcttcacgagccggttgcggatagagatctcgtagccggaggaaactgccgtcggcgagttgatcccgacggcggaaggggaaaagggtaagaggtcttttaatgaagtgtaaggttgggaagaagaagaagagttcttgaaagagatgagctcgaagtctagagatggcggcggatgagccgcgtaaccatttcggttttggattgggaagcttgagctgtggcgagacttggcggcggcggcggctggaagagagagagtggctgggatgactgaagaagtggaaatgagttacggcggcggagatttgaagttggtggtggtagc

SEQ ID NO: 304909 - DNA, 1083 bp, Cannabis indica
ggcgttcacgtgaggcgtcctgtcttgctcttgcagatatcatccaaggacggaaattcgatcaggtgatttaccaataaattcttaattattatttttcaaactaacttatttggcataagtacttgagtttattacgacttataaaacactaagacttgtggtggctgtagaacatctaacccacatatttaaatttggcttataatttccgagaagctttcactaataaatttattaagtgtgagtcatcttaactccttaaaaaagtgtaaacatctatttctttttgtcagacgcttcacaattgattgtatattatacgtctacgatgtagatgtttttgagtttccattttatatgtcaggctaaatgaaattctcctttgaatactaaaattgacaacctttttatgtactgtatttttttaaggttgcacgtttactgcaccctaatgcagttttcgtattattttcacttacattaaataatttaagcaacaaattttttgtaaatttcttaaaagaaaaaagaaacaaagaccagaaatttacttggaaaacctgccaaaatttaaaagagcactccccttaaattttgaaattttgatttaataaaaagaaatttgtttgcatttttaaaacaaatcattagttttctcctctagaaaaatgttttcttctctctcctccttttgagagaatcaagccatgcatggaaggggctctgagaattttaggacaagaaaaacgttctgctattgatctcttagagccatcaacgaccctggagtttcagaacagagcacaaggtattcatgcttaacaaaagacgacaattcgatcagaatttgtgagaacaagattgactggttatgagattattataacctttgatgcaactccagatttggtagttcccccagaagttaaatgggacaaagttgatagaagatttaagacttatattgtatatcacaaaaggattaaatgaaatactaggtggatgtttggcagcataactaaaaaactattttttgttttttaaaaacagaaaattgttttttaaaaacaatttgacttg

SEQ ID NO: 304910 - DNA, 1523 bp, Cannabis indica
acatacaacaaaaaatgcacatgactccgtacataaataaatgtcataccaaattatgtgaagaaagattgacaccaatacaatgtactcgactcttccccaccacgtactgctggaaaaaaaaaaaagggggggggggggggggggagggggggaagggggaagaagattacaagttagccttagttcacctgaaaaaacagagtcatacactcacaacaataaacatcataacatgaatcatatggcatacagtattatgatggttacaacatccatggccagtgtgaatgagactattttggatcccccagtcccgaggcaaacgaatggaacccgcatgaaccatcatgagatccaggtgcagaagccgctaattcttttctttactctttttttttttatttattttttgcaatcacactttgaacccaattttttatttgggatatctgataagataaacaagttgaattcagatatcaaactcttagtttatgtaagcaacgtatatcatcacacaaataagtaataatgcaaaaatgaacctctttttcttaaccccctcccagaaaggaacacaaaaataggatttcgaccataaaaaattcactacttaatttgattaaataactaaaacataataaccccaatttaaaactttctacctaatctaaataagtacataaattcaaacgataataatttgatttaaaagttctaatacaaacagaacgagtctgcaagtaactaaacctcaatactcacgatgaactcccatactctaggaccaaattgaaaccctaaaattaaaattaactaatttcttttacgaagctagtatttactataaaaacatacaaatgttaaagattaaacaagctaatcataaaattgtagagtttataacaacaaaataaccagacagaaatgaattattaaaaaaatgtagatttacaaacctgaaataataaaaagcaagcaaaatcactagttatttctcgttttaactataagagaaaaggaaaaaggaaaaaaaaaatgatcccaaagaataataagaatttctaggcgagaaaattgtgaacaaagaagcgaaaataagaggtagttagaattggccaatttctaagaactttcctgttgtagaaattggttgaagaaactggtgaagacgaagaggggtcctgtttggataaggctaacatacgccgggtggcgtaagctcatgctttctaggccaacgtggtcaaatgaatgcatgtgttgtgggaccctcggttaccctccctctcttttttcacagtgcaaattttatgtggcgcctggaaggagacaattcgcccagggtcgatttttacacattcctcactttagccaccgcgtggattaagttggccacttgtagttgtggaccggttgtagatgagaatgagaaatgtcaaatgccaaatgccaaatgccatatgcaaccaaaagtgatacattattaggataactaaataaaataactaaaaaaataa

SEQ ID NO: 304911 - DNA, 684 bp, Cannabis indica
atttcgtgattaaaaaattaaaaaacaaaagtgttaccaaacgtcaccttaataattctaaaattaaaattgatattcactctaattatcttttaaaagatctgaatagataatactcattaaaaaatattctatatatatacatatatgggagcatattatttctttattttttgagaaaataacctcataaaacaccatcaaagataaataaatctcaaagaaatcgaaaactaaaggatttattgataattaacatcatccaaaagaatattctaaatgcataaggataatcagaccgccaaattgtgctagaagtagcttccatagcatattttagcaagtgtatccgctactaccttaataattttgggccagtaatcgaaaatcacaatggtaaaattaggatataaatctctaatattatcaagaagtaaacccaataaagaatctaaaaccattgaagaattgagcttatggatcaaactttgacaatcggattcaacctaaatattgtggattccaaaagagatgcactgtgagagggagtggcgaattgcgagagcttcagcccaagctagaggatggctgtcgtgagctttccaagcagctgaagcaaggaccttaacatcatgatctgtgaccaccaaaccaatgttagaatatattttacaaggatctaga

SEQ ID NO: 304912 - DNA, 2690 bp, Cannabis indica
tgggaattccccctcaggtgagttgaacatggctatgcaaaatataaacagggcttgggatggactataatggaacacttgtaagaattatgaatatttgggatgatctcaaaagaggaattctatatagtattgcttgtaaggggattgagtttttccctagcatagtaaaagcaaaatagcattcaaccttaaagagttaattatttgataattatgcaattgaatcagttataatttagttggttacttctgtgtaggtctcgagtgcaacagccacatttgcaatgacgttctcctcttctatgtctgttgtagaatattaccttctaaaacgttttccagttccctatggttagtgtcctttacatatactcttctttgatcattatctaattttcatttgttcttttgaacacctttacagcagaaccgaatatggtactttactaaaacgtgatgtgatttatttgcagctgcttactttgttgctgtggctactgttgcggctttcattggacagcacattgtaagaaagcttattattttgtttggaagggcgtcgttgatcatcttcattctagcctttacaatatttgtcagtgcaatctcattgggtgagtattcattctaccataccttgttaataagttactatgctgaaacaatcttttaaatgaactaaaacttgaattatttctcatctcttttctaggtggggttggaatctcaaacatgatcgaaaagatttcacagcacgaatacatgggctttgaaaacctctgcaagtacgaagtttagcattctcattttgttgtttggattcttacaaggttctttgcagcatttcacaaggctgcaagtgtaccttaaaactctgtaacaagtcctgggttctgtagtagcagatgagtaatattgctctattaattcctcagcttagtgaatcgatgttttttctcctcctttttcttcttcttttgttactcgtgtaattttttcatttgaaatttcgggtcgggtgtaacaatgttgcctagattacaaatgaaaagatacaaagcctttcaacaattttgttatttggtgtttcgtttttccttttctcaatctcttctgctacttttataccagctctagaccaccgatcggtgttaaccaatattgaattatgtatacccaacccaacaagggaagatttggttggcttttcttgacttgataagtcaatgtgtttacactaatcttaactctgaccccacttagtttcatttaattattttcattcatgttcaacaattcatagccctccattaatgttttcattcctactatttatcaattgaccatgaataggaaaggtgtttgtggtgtgatttgaggtcctttctgcttttcaataataaaagggatatttgaggtattattgttgcaactttttacaaagttaatgaatttttgacaaaatgagagtgtcctagtgtgtgaaataaaatgagttccacatgggatatgagctcttgttgataaggttatataaggtacaattttggcatttgcgatagggcctccaaagggtacctgggttaggacagtacacacactcaccacgagtgcgtcgtgtgttcgattcgagattggttagtgtggtgtgacactttattttttctagaaatttatttaataaaataattattttaattatttaatttatttgagaaacttttttagttaaagctgattacatattttattaatctatataatgcgattgaatcaacaggagaaacacatcttttcatatcgagaaaaaaaaactcaaaaaatccatctacgatatctattttcagggtgtatacgatggttccctaatttccttaaatatatatcgcatatagaattttttggtagtgaaaactgaattatttttcttattatgaaaagatgtgcactttatttttttctagaaatttatttaataaaataattatttttattatttaatttatttgagaaacttgtttaattaaaactaattacttattctgttagtctatataatgcgattgaatcaacaagagaaaaacatcttttcatgtcgagaagagaaaaaaactcaatttttaccacaaaaaaaaatccatttacgatatctattttcagggtgtattcgatggttcactaatttccttaaatagatatcgcaaatggaattttttggtagtgagaattgagttttttttttctcggtatgaaaagatgtgcactttatttttttttgaaaatttatttaataaataattatttttattatttaatttattgagaaatgtgtttaattaaaactgattacttatctcaatagtctatataactattgaattaacaggagaaacacatattttcataccaagaataaaaactcagttttccctattgaaaaatttcatctgcgatatctatcttcatggtgtgtttgacggtttcctaattttattaaatagatattgcagatagaattttttggtagagaaaactgagctttttctcggtatgaaaatatgtgtttctcccattaattcaatcgcattatatagtgcagtggtgttccgatacagtgtacaacaactaggttgttttctcccgctacagtgtagtggtgattcgaggttggttggtgtggtgtgaca

SEQ ID NO: 304913 - DNA, 1379 bp, Cannabis indica
ttattttcttgagcacttgatatttaactttcataaaaataaattcaacattacatatatgtctatattaacatgcttgactttttttttccattttttttaagatcatgacctagatgaattttcggtctaaaaattttaggcactttctcaatagtttactagatttacttattttgtttttattattattatgagatttgtatttacctttatattcatttagaaaggaaagaagaaagaacataacataacataacatcttattaatgagaaaagtatcttgagaatttatttttttgtgagagagtaaaaggaaaagggtaagaagaaaaaacaaaaaacgaaagaaccgtgagagagaataaagggagatgtgtatatatagatatatagccctagccttatagttatatagctatatagcttaccttatctttcaaaggattggaaactgaaaacttggtttcacttccaataatttcatatctggtctcttcattgtaagcaaatgaaaatgagcctttggggattagataatgacatttcatatttcccaacccaaccacatcaaaatagaaactctcctttttttggtacaaatttcacttccaagtttccaaattaaactaacttacacatgcgtagagtgtatacacatctcactatattagttaaccaaattatttaagtataattagagtcccatacactattaattatttatatatatattattgacctttgtctcctcctttgtctttggagtacctagttgcatttttaattttaaatatttatttaataatttagcaaatttgtgcacaaaggaatcttttagtaacaaagttgaaaaagaaaaagaaaaattatatatattgattgcttttcactacttgttccagctcttaaagttaaaccaaagctataggaaatgccaaaaagagaatttgaaaaaatgttctttattttcaactataaattaagctttttccatgcctagctaagattttttttctttaatgtatttaattaattatatatatactagcatgcatatgattataatcacttaattaattatttattaatgcatgcttttagaggctggaaaaattttaataaggtttgcaaaaagtgtataggttgagaattttgaattttttttttgaccccttttcaataaatattaaaaatatatatatacaaaaaaacaaaaaacaatttagctggaatgatgaactttgcatgtgaggatggaatctcaagcagaacaagttttggaaaggtttgtgtagagagtatagtagtagtagtactaacccaataaatacatataacattaatcatatatattatatacatattatttttttttt

SEQ ID NO: 304914 - DNA, 1737 bp, Cannabis indica
tcttcctcaaattctttttctttttcttctcaaaatcatcatcatcgtcattatcctgaccactatcattcttatcttcctcaataaaccagtcccagttcttcacatcacgaatcatgtgcttgggataatagtcaaactcatgtcccatcacaaccaaaccaaactctgcacattccaagaaaaatttcaaataatcaccacaaggaattcaaatggaattaaccattaaaaaaagagcttatattaaggttatgatatatatatcattattcaaacaatttcaagtcaaacaaagcttatgcaaatacctcaaaaattcatttcctaaatttctaccaattatcaaccagtactttataacattcgaaacacaacttgcatccatagtccataccacatatcctaaatttaactctatttaatttttgttatcattaaaatagagatagaaagtggaaagaaaatcaaaagtacaatgattttcaaatatcccgtatcagaatttcaatttcagttgatttggcacagaaaaaaggtttgaatgaaagtagttcacaaaatgtcactgtagcacaaattttaccacaaatcgttcaggatattattattactattattttggctttgagcaatatagtttagaggccaaaccttttacagggtcaatgcctgaaacatcaaaactctcaaattccgacccacttcccaaactctccgtcaattcactctcactttccaaacccatcttcttctctccaccttcaaccccaattttactcaatttgaaccaaatgggtccctttccagacacgcagaaccaatcccccggggccaactcacccttctccgatcttgtgaaaaccctaacttcctcctcactcttgctccaaacccaaacagggttcctccccagcacctcaaaccaaaccctgggctccgactggatggagtccggtttaacttcgagagcaaagtgacgacgagagaccgttcggtcgtccgtactgatcccgaaacctctaccaaacacggtcttgtgatcatcatgaagatcgattttggctccgtcttggccttcgatctccatggaattggaagtggagtagagttttgcgatttacggatttacccccaacccaaaaacaattcttacttcttttttttacaactgaacagaacaatgtggatatcacgtggtgagcacgtgggataagatttttaagagtagagaagaagaaaacaaacgacaaaacgacaaccttttatcgcttctggtgagagagagagagagagagcattggtatttggtggtcgtaaattgattactttgccttccatgtcctttcgcgctcactctacaaatcaaattttctttttcaatagaaaataataatctcctttctccaaataaaagaacaaaaaataatttctaatgtaaaaataatgataatgcaatatgaatggtaacgtaatataataaaaattaataataagagtgatattattatgacgtttgatttgatatttttagtaaggatgaattattattatacaaatttatatcatattgtaattaattttgtaattaatttttgttctattatctctgatttctctaatggtaaatgacgaaaaggaatggtttatgtgagaggtgtggagcaaaactaagtcttggactctgtttcaatatgcggctctctatttaattcttcttcttcttcctagtttagt

SEQ ID NO: 304915 - DNA, 1326 bp, Cannabis indica
aattcaataaatgggaaaactagtattagaaattagtcatacccccaaccaaaaactcattatcgactccaaagttttaaactaaattgtttatccaaattgaagcttttagcatgtgttacgtgttgtgttacaaaatatcaaatagacaaagtgacaaaccaaccacgccttgcccacccctcccacaccaaccgtacggaatcaaccaagaacgagccccataccactcactaagactagccttccccatgatcacagccccagcccttctcaacctctccacgacggtggcgtccctcggcgacaccgacccaagtagcgtgtaagaccccatcgtcgtgttcagcgcgtccttagtcgctatgctgtccttgagcagcaccggaacgccgtgtagctctcccagcaacgattttccgtcgcgccacgtggtgctctccctctcccagtccgcctcgtcggccagagaccgcgcgtctgggttgatttccagcacgctacgaagcaggggattgagcctctcaatctggtcgatgtaaaagtcaactaactgcctcgacgtcagcctcccgtctgcgaaggcgagttgaatatcagcaattgtggcttcgacgatggggaattgtgagtcatttgctccgttgatgaagcttgagagcagtaagatcaacgatagaaatgagagtaaaggcttagtaaggctgaccttcattttgttctctagagctatcggctaggctgaccttcattgtaatattatcgtataacaataataacaaataaacaaattacttaattaataataataatgatgatgatgatgataacaaatataaaaattaattaacctttaataattaattttgtcttctagatttaagattagtagctcaatcaagaaaatatattataattagctaagagtttaaccaaaacataattatctgtccgacacattgaaaagcacacgcactcgctttgctagagggtattaattgggctcgagatataagacttccactcaatgctttcttctctaatatctttgaggtaatgatactatagttaggattgtttttaattagaaatttgtggacaaattcctttatatttgatttgctatacatgttgttacaggataagaatatacagggggtaatctagttattaaggctctccaagtttgttggagattgaggcaatcctaagagcttcttcaaggaaacggcattttatataaggctaattagtaattttttccccttgaactgaactaaatcgtgccccctcgaactttgttcgttaacgttaaccgttaaccgt

SEQ ID NO: 304916 - DNA, 2789 bp, Cannabis indica
taaaataatttccaacagccgcatgcaggggtcgtacatcggaaccgtgttattaaagtcatcagtgatcatccttctctgacgccggcatatggattcgtcgtgacccacaatcccacatttgtaacacacatatgggagatgttcatacttgaaataacatcaaagactaaccccttcttccattggaagaaataacccaacaaaaagaggttttagaagagaaatactgacccttagccggatatattcgtttgaaggaaatccgttacgccacatgcgatcgattgagatgaccaaaccaatcttgttagctatagctgtcgcattcttctgagtccagaaccgaggaggaactacatagacccttacccagatcggagaggagtccatgtccaccaaaccccacctaccatcctctggcattggtttgaccaccaagaagccatcacacaccgcccatgggccatttttgacaatgagttcagcctccgcttttttagttaaacggaggataaaggttttgttcccaacttcctgaagcttccacccaggagccaacttccattttttacccagaaccgagcgaagcaaaccgttgaaaataggacgcttcgatatgatctttgccaccaccgacttcccagcagcttcacttcccaaatcaaggttagcctccagcgatattgagagctcctcaaccccagtcaccatcatattctcagaggtctcattcccatcagcaggcatcgccatgaattcttccatctctcaatactcacaaaagaaaacacagagggacacaacaaccaggtcacaaaccaacgaaagacactcactaaagaaaagcacagaaaactacgcgaagcaaaaactgaaggagagggaaaaaccctaggccaaacagattaggcaaaaacccacaacaggggctgaacgtacggagaatattcagtacggatcaaagggagtactattgaattgttaattgtcacttccaaatcacttttattttgacctaataataataataaataatagaattgaaataaaaataaatttaaattcttataaaaaaaaaatgaaaagacatatctaaaaacgaataaatataagttaatagagaatgtggaaaatgaaaatagaaaaaaaaaaaaaactaaataaaatgaagaaacaaaaagaaaaacaaattacaaagaatggaagaaaattgtatatagaatgccacctgaataatagaaactaatatagtcttattgtctaccaccaatattttttctctaatgaatgtattaggtacggttcttaggtggtccactcgattagagttcattgactatcacttttttatcacctataaatttatgagaaatattctatcacctataaatttatgataaaaattttcatgaaattatatactaatcaaccattatataaaatacattatattttaagataaatcaacaaaaaattacaagaacataatagttaaatgtttcatcgtatacatgtgttgatactcgaaattacatcaattagtaagtttttactttaaaataatcaaaaatataaataagtatacatatacaaaatatggcatacaatattttcttcatcaaattaaaagactttgtaacaagctcccagttgggacttgcttaacctcttattatatttgatgaattagattaagttggatgtgcttcaccttgttgatgagcaccatttgaaatacatccttgctcttttcgtttgtgcccacaaccaagttcattggttagatcaaatatatacatttatatttatagctataaagtgagagagaaagctcttttcgtttgtgcccacacaaccaagtccattagttagatcaaatatatgcatttatatttatagctataaagtgagagagaaagtgtaggtatttggaagaagatgaaaagtagaatgaagaaaataataaaggagacattaatttttttttttcagttgttatatattataaaaattaaatattataaaataagagttataaaaatgaaaagttagaattagaattaaatagaataacattaaaatttttagttattattttttttgtaaaatattatttaaaataaatgttatgaaaatgaatagtcaatattaaataataacttacaaaaatattaaatgaatagttactattaagtaataacttacaataggcattcaggaggtattgagttggttgaaggagaatcgatggcctcaagtttacatgtgtggtgcaagctattcatagttccatagatatgatttccttgtttggtagcgtcattcaagattgtaaaactatgcttgctgctcttaataatgttattgtgtctttcgttaagcaatcagctaatgtagtggcttataagtttgctagaactgctagattatatcctgattgtatttgcagtttggagactgttccaaccgagttgctgccttgtttggtagcggatgtaagggtttaatttcaataataagatgaaatttccattcaaaaacaaaaaaaagtaataacttacaaaaatattatttattgaccaaaaaattaacaaaaaagtaaaataatgagagtgcaaacaaattaaaaagaagttcatagaatatgccatattatcatccctaacaaaagaattgttggggtatgtgacatgacattctatcattttagtattgtcatttttctattttatgatttttttaaaatttatctatttttatctatatttttatttatgagtatctat

SEQ ID NO: 304917 - DNA, 1395 bp, Cannabis indica
aatatcaatatcatcgcacctaaggttggcaaaccaaactatatatatataaataaatatatgcgctgtgccggctaagaagatcaaaataacttgaaattatctcattataactattttctaatatatcactttattcttgtgttattgcaaagattttattcttatcaatttcagtttatttcaatggggataatattctactgagaagtcgtgcaatggttggcagtattaaattaatataattatgacatataaataaataaatatgtatatttaatttaaatgcttcaaattaaatgaaatttcctttgatcttcgtttggaaaaattagctcaaattctaagccaaaaacttggaaccgagaacagcgccagaatctcaggtaggacttgtttattttttgatcgatcgtgcactgttttttaggtacggttctttttcaaactggttttctcttattttatttaactccatattcatgccattgcctagctatggaatatcaacttaaataatattgtgatagaatgtttgattaactattctctaagggttaataatagggaaaaaatattagggtttttcgttcttaaatttatagttactgttgatttttcttgagcttaggtgtgacttggtcggttttgatactgcgattagtctctcatatctgtgatatagttttgagtattttagtcttgtctctgtaacagagttttaagcgttttcgatttgtctctgtgacatgatgagtattttaattttgtttgtgtaacatgattttgttttgttttgttgttggtttttctttgttcttcgatactcgccatcacatcgttattagtggttgagaataacaagtgttgtaagtagtgcaattacgaccttacacaagagttgagtgctcaagctacgaggttaaataaacctgctgcaacagtttttactgtaatctactgagcgaatgatgaaatagaatataagtgttcttaaggttaattgtgatgctacaatttttttcatgtgattatattttaattttttgtaaaataatttagaaattaaacggctgattatttgattatttttctaattcttattcaggtcatgtctctaataaggagatatctcagctattattttagttgtttgtcattaataaaatttcattatttattaagaaaaacaatttatcaattgttggttctaactattgaaaatgttctaaaatttagcttaaaagtataacaatgattaaatatagttaaaagttgtaaactataacaaaagaataaataaaaaatggctaattaggattttttgcccctgaactttgacatgtaccaaatcatgtcccctgaacttgcaaggtcgttaaaaatagccccatg

SEQ ID NO: 304918 - DNA, 2595 bp, Cannabis indica
ttagggcacaaaacccaatagtgtcatcaagggacaagcgagcacaccggttggccttcaattggatggcatggtcagagcatcatattcagtaggggcattgttgcctttgcacccctatttcagggacattgctgcttacttcggtgatgtttattctctatgtagagctaggctagcctcaacctacttcatatgaaattgtattctattttgacttgaagtctgctctaaagcaaagttggacggggtacttatacttcagtgaggtcggctatcagtggttgggtgacaccaacaacacgcccttatcaaaagtagggggatatgaccagtacttcattgcatgggacatccagtaggtttggcactgccattttcagcgagtgtccacctacaagcgctccattcctaccctctagatgagagatagggtaaaccacatactgtccctccccgttgagaggagaaatatactaaggttggccagcgtggacaactttcagagatacggcttgtagcccctcgcgtctggagttgcgggagctaagggcccattaggtggtttatatgaagccccaactattgaggaggcttgccctagtggtgggcatgctcctgacatggatgattatgtacctctatcccatatagctaggaatttggagaagagagagagggtcctctgccagcactgggctcacaggggcaccgttggggatgctactttgcgaatcaggcctggaggtcagagttctactgggcatactcacctcttgcctacatctagaggcaagggcaaggcaacagttgaagattcaaatgattcctcttccgaggatgatagtatttgatagttgattgcaacatcttttatattcttgtcttgcattgaatatttgtaacgtgtatgctgactttgttactttcttcttgcaaatatgtcttccagattcagaggcctagttagaggtccttcaaatgagccttcgagtcatcctagggtcaaggtggctcggaccacttgttctagtcatgttgtaggttcttctcttcctcctcctcctgaacctgcgccatgtaggcaacccatgatcattgacccttcgttgaggaggaatcgatcatcaagtaagggaacatagaagcctagtcgaggagcaggtttgaccatggggcagagagccatggaagcgctttgtaggcgtctggacagggcctttcctattctggataatgagctttaagagcttggtaatggtgagtcagagaggctatcttctgtcaccctctaggagttggccttggtaagttgcacatttaaatttacacacttttcaatattattgagggtttctgaccataggggttgtggtatgaagttggcttgccattgtagtgtctctgagaggctagccggccttggtagcaccatagagaggttggctaaccaatgttgtcttttggcactaatcttgaccttgttttgtttttaggcctttatgaagcttagatttttgcatggcaactccaaggggtcctcgagtgctctttgggagacggtaaagaccttggaggctgagctcttagttaggggtgaggttgtgacaaacttggaggctcttatccaatagaactgggacatgatttccgatttagagctcatgctcaacactagaaattaggagaacacctcacttactgctgacatctccaggctagggactaaactcaagagaagtgatgaaaagcttaagcttgcccttgatagccaactggtcataaaggacgagtatgttggctttttttagagctcatatacgagttcaagctgcataacctcagagttaatctttcttatatgggggttcttctttccttaagagcacactagcccaagggaaagcactatatgagactaggttggaagcaaactagaccactgtccagccagaaagatcgtcatcaggaagtttgatgagggcatggctagcccacccactgaggaggtggccaaccaggactttaaccaggtagttggacagcctacagaggctatgaccggcccacagttcggtgatttggacactatagcttccgacacagccccacctgcacctgaacacagtagcgtcactttattagtatttcagctttatgattttattagcatagacatcttatttcatgttctgtgtggcctatttgccttttacttttgaacactactcatttttagccttagggctttcatgtttgtacttttggcctataggcactctacttttgaacattactactatttagccctgaagctttttattatggatgtttgaccgactagacggtatttaatcctggctatcttcttattgccttgatatgtaagtattcagatttacttttttatgccaagctaaagtatgcttgcacttgacttagaagcaggtttagtagcttatactaagggttaaaatttctctgcataagttctctgtactagtttgatcattgtacaatgtaggtgcccccaagtgagcacgcagacttacagtctcttggttacttacaattcaccaagtttcatagaccttg

SEQ ID NO: 304919 - DNA, 1878 bp, Cannabis indica
ttttttttttttcgttttaacgtcgttagaaaactatatactacgtaatatagaaataacaatagaagttaataaataaaaaaaaaaaaaataagtacaaaaaaatgtaaaaataacataaattaagtatgaaaatgaatcatacttggtgtaaggaatcatgaccaaaaagctctctcagcatagcccagatcatggtcctcttacccgcacctgctggcccttgaaatatgaaatgtccacattctcccctttttgccttcatccatttacaaattaatattgaatattaattatcaagtaagtaattaattttaaaaaatatagttatatataaatattgatgattaccagaaggtggagctcatttgccttgttttgattacatatgaaatgttccaaagctttaggccgatacttgtcagcccattcaaatactctctttgcttcattggacaaaggaggctcacctggtcgtcctccttcataactctccctcaatggcttctttatctgatcaccaccaccattatcaatacccctactctccattattgacaacaacggagaaggtcggtcaacgacgacgtcgaccacaccaacactacttctacttgaatcttcagccgtactgtttgggggcaccaccggatcattctgataatcatcatcatcatcgttgtttttctcgctttccttcttggtggttgatgatgatgatgtttttgactgaaagcaggaatttcccagtgcttcttgaaccctgataaagatggtggaagcgaatgatgagctgctaaatgcatcaggagaagaaggtacggcataatgggtctggtcggcgggtattgaaggcgaggtgtttgctaaaagtcctctgtagtaaggactgtatcctttgcggttatttttttggttgtcatcataataatcgtagtagtcctcttcttctgctgctccatcatgagctttgaggttttctttagccttgtatctgcgctttccaaaggctaaacaaaatctcccaaaagattgaagaggacgatgatgatgatgatgagaattattattattattattattattattattattattattattattattattattattattattattattattattgggttggaataggactttcttggatgacgatgacgatgatgatgattggtgcaggcgatcgcggtggctgtggtgacgccagcgcgatcgcctggtaccgagattggacaatttgggagagcaagataatgaagagaaggagggtggaatcgaaactgatctcggcattggatgatgatcagtataggaaggggggtgtagtagtatatgtaatactactgtttcatcataatgaataatattagagagaatagagatcagagatttattattttggcgaagaaagctaggaaaagaatggtcaattcgtagtacgtactgttattaatctaaattaagccgtccaggccaagagtttattcttgctttgcttctttcccacgtcacgtacatacatactgtataaatatacatacatacacaacacacacaacacaagagctattactattcatgtattatgactcatcactaattattataattcgtgctcttcaatttatcaatatagtttattatatgtatgggtgcacttttaatgggtattatttatgaatgggtaaaattagaaaatttgactttttatgcttaatttttctatctaattaaaaaaatatctcatttttatatcatatgggctgagattgttccatcggtaaaaaaaattttaaaaaaaagttttttagcaagaaaaataagaaaaaaaaagttgagtttgagttaaatatttttgtatgaaca

SEQ ID NO: 304920 - DNA, 1217 bp, Cannabis indica
taaacagcatttaaaaagattttttccaacagttataaactgtcatttaaaataacttttcccaacagttataaaccgtcttttaaagttccgtatttttatgacacccacatagccaacggttttaggaaccgttgggaaatggtataaaagacagttataaaccgttgggaaaagctaattttgtagtagtgcacatggactatacagttgttaatcccttattatggactactttcttggatttaataactaattaataaccctaaaattatatcacttagtatggggaaatcttaattaaagtcacacttcccatgaatggcctcacttcatcacgtgctctaaagaagattgtcattttgttgaatataaagcagtgggttctcatgatataagtagtgggtcaattctccatctggcattggccaagcttcttttcaccatataataaccacttatatcaaattgcaagcaaccacctgattctctctcttttctttttatgctatatattaacagtactaattataatcaaaatgtagttaattaaatattaaagctagattgattgggaacgggcaaaaaaaatctgtgtatagctagctaggggcagtgtaacttttttgcatcatattttagcctagttaaaaggaaaacaatatagctagtttgacccaaattttatgtaggttggtgttcccatatatttgtttaattattaattattatttttaaaaaaatagaaacagcactgtatgtaggatagcaaactatatattatcagtagtataattaataatctgtaataatcaaactgatcgattgaaataataataaattaaagttgcatgatgcttattttatattcaagttttatgtattgtttgttaaggttaatatatagtttgattttgatgatcacattatattaaaataataacaataatatctcgagctaagcacgaagaaagagaggaaaaagataatagtagaggtaagtaagtagtgcaaaattaattaattatatgttgtgacagtatatttatatttaagtatgggcacatggctaaccagaaaatccagttgggctaatgactatatcattttcataggcccaattacttatttgttgttaatccaatatgtgtgtatgctcatatgagatcaattacttataatatagtatctctatatatgatcactcttgtttacac

SEQ ID NO: 304921 - DNA, 1535 bp, Cannabis indica
tatggcacaggtcacctaaggcgaacctaggccaaagtgactttctcacttgtccttgctctttgatgtcgagagaacccgttcggacacttttcctcccatgattcgcgaggagtgacctgtgccattctaccatggtagaggtctccaaaattggagagcactgccatttccttatggcacaggtcacctaaggcgactcctaggttagaaattacttttgtcacttatcccgtggtccttgatgtcgagggaacccgttcgaatacatttccttccatggtttgcgaggagtgacctgtgccattctcttatggcacaggtctccaaaactggagagcactaccatttccttgtggcaatggtcacttattgctcctttcttgtggttttagagctattttgactttatacataaactcgagtcattttcatgcccaaaccagtcaattccttattggtttctttggcagattgaggtccctagggcgaaaacactcactcgggtccatgaaccctagtttgggcacacttgggtgtgtgagccctggtgccgaatggttggttgacgttttggagccctctagaagtgccatggggccctcaagaagtatgtcttgatttatttgacatttatgagtcttggtcaaagtcgcaagattaactttagtggcttcatggtactcttggcatgtgggtccttgtgcaagagtagccattttaattttttttgcaaaaattgggtataacacaataatatcgaacaactttcgagaacatgtcgaaaaaccatcgaaagaaatgacaaaccagaacataccaaaaaattagatctcgtgatttcatgccaaaaaaaaacagaaaaacaatacaatacaatacaaatcacaaccacatagatttactagaaactagaaagagagagcattgacgtttagtgcgaaggtggatgtgcgcaatagccgatgtgagtaggcaaatcagccacagtggatgtgcaatgaccatgtggaacaacaaatgttcgacgacagaaaagttactggtggttctggcaacttcgtggtggtggtgttttggagtttggttgatgagagagagagaattaattgatgggtttgttgttagagaggtaaaatttgtataacatataaacttaactatacacacgtacatatataatattaagtgtacatttttttcttctacatttaaaacacgatgttagctctaccccaaaatgcatttttgtatgtcctcatatctttatatatgtaaaaattaaatttatattaacatatttccactcgtcatcaattaattttgtgatataactccatcataaataaacaaacttatatagtgtaaaaacatataggtctcactgttggattaaaaatcttttgtgggcacatatgtataatgtatatgctattataaagtgtgatacaaaattaagtgaccaattatgttatgggtatcaaaagggtattaaagtgtcatggaattaatgtgtagataccataagttaattt

SEQ ID NO: 304922 - DNA, 2535 bp, Cannabis indica
taggagaatccaaacaacaagaaggagaatcaacatcaaaggaatgagagaaagagattcagattcagatcttgattatgctctgctacagaaaggaatcaagggctagagatctgaatagacggagtcattatattctgctgcacccagtgtaaggtttactaaactttatatgtgtttattttattgttttagaattcatattaggattttagtgaaacatacttggtagtaaatctagatcctggtaaaatatttccaacagaaactaccatcctagttaatttctcaggttccaaatctctaagtaccgttggatggttgataagtggtttgcctttgtatcctctctaagttttctttgcgatgatcactgattatgcaaatacattacataaacagagtttacaagccatagttcacctccaacaactcattctctttctttaggtcctcgagatctctcttcaaagcttcattctcatccaacacactcttgattctctcttccgcgtagctttttcaacctcaacagtggttcgagatttggcttcctcaatctcagcaaacagggccatgttttcagtgtgcagttgttggcccttaacgttagcctgctcatgctccatgattaaggtgcctacttctttagtggccctttctgccaacaatgaagtatataaaacaatatacaacaacgggaataagggtgaaagagtgaaatcttacctatatctccaaggacagccctgacgcactgttggctacttggtctaagagttctccaacaaagggtgatgtttctttccccaccttgggtgctagccgcttctccaaggcctcaatgtctaccattggcccaactaggatagtggcgatcaaataggccttcaaaatctcagccctcttaacgaccgaaagcctgttagctctctttcacagagttctcctttcttcctcattctccaaggcatttgcagcctcctgtgctctctgcaaagtagcggcttaagtggaacaatcttcatggggaatttaaagcctacagaaggaatctcgggtaggaaagtaaactgctgagtccatgattgatgttgttgttggtattgctggttgtagtgttgctggggttgttagatgatgacggccgattgggtggagctaggacattggctcactgagaattatccccccctttgggacacatagtttgaagtatgctattttttcttttccttttttcctctaagacctcctccactagcgaagcctgtcgggtctatttctcttgatgagcccaacattctcgctttaggcagtacctataaacacaaccaacacaggatcagtaaatcaatccaaagctacaatgtcatttactcattttttattttttattttaaatttaccataaaattatttctcaatttaaaaaaaatggacatgaacagttttgtgatgtagaggtataagattaaacaggggtatcaattgctattctctgaatatgataaattgccttggtgtaatctagtttgggatagactcattattcttaaacatagatttatattttggtttgtattttggaaaaggctaaactcaaaagagagagttagcaaatcttatatttcatgtaattttacatataataagtccatgaaaaatatattgagctgaaacttttttttaaaagaaatatattgagcttgaccggcacaacatggtgaattatatatttcaacatataaggtatattttttaagctgattagtataggtgtcgattggtgtaacacttttattttctaattttttaatcacaaaatgaaagtaaaatttttatttttgaaaaataaaaatgcattctgtaaccattttttttttaattttaaaaatagaaaacaaaagtgtgttatgcaaagttcacttttattttcattttttgattttatttaagtcaggtctaggtccggggttagattcggttcgggacagaagtcgggttcaacgccaaggccgtaggggggattcgggtctgggtctggtcagagtccaaaatattcattaaaaaaaaactgtttaaaaaaatattgaaagtgactgtttttttttatttcaaaattttgattctcaattaaaaaattaaaaagtgaaaaataattttatagaacatgtttttgaaaaatatttttacttttccagttttaaaaacagaaaactgattaaaaaagtgttaccaaatgccactataatgaattaattttagacatgacttattttcttaaaagaaagataaggatatccatggatctttaacatacatatacattgaaagacttgtgtgaaattaaaatttaaacatatatattttatatataaatgtgattgggaatatactcatttagtaccttatgtttttatatatgaaaaacatatttggtaccctatgttttcaataatacttaattggtacctcatatttttaaattgtacatatttgataccttaaaataaaatttaatcaatacaattt

SEQ ID NO: 304923 - DNA, 3825 bp, Cannabis indica
aaaatggaagagataagttatatgtgaacatacttggagatctagaagaagagggacttcagtttcttcaacttttgcagctaaagagagacaagttacagccacgagctgaaccatccatggcttatcactctgaaaatttaggcttgagagaaacctgtccaagtagttaatggctaaaacagcagtgagagctgtgaaaccataatgggcattgacttttagaacccattctacagcctgacgacgaaccagactgagtgtagaagaagagtgtgggaatagatagtaatgagtttgtttaagctgctcttctttagaaaaaagagagagaagctcttcatcttcccaaaacaggtcttgttcaagtaagaacagaggaaacagagaagggttattatcgtcattatcattattagtgctgtaaacttcactcttatcatcttcttcatcttcccatttctcttcttcacagtagagagtgtcaagtaaagatagagaagggttttgttgctcttcttctacattcattgccattttcttcttcttcttcttcaaagagatgaggtttcagagttctctctcacactcactcactctgttttatgttagagagaaaaagaaaagaaggaaaaactcagtgttctttggttcttctcagtctcatctcttctctgagtgtccctaactttctctctctacgtctaccgagctgagactccttttattttgtagtgcagtgagtgagaaaagagagggagagagataggcttcaattttcagcagagaggttttcacgcttgtccttttttacgaaaaaagaaaaataatgtaataaataagttatttaagatttttctttaaattgtgtttcttagttactaataatcttaaactatttccagtattataaattagttattttgtcaaattttatcacagataacaaataaaataataacataattgcttaaagcattttcaatgatagcatcctttaagtatgctaaaaatctacacatcatcgaaaaatataatattttatttcatctctctttcacgttattttttatattcttacttcaaaaaacactctaatgtatagcatttttcaaaaatactataattattatctcacacataattatttaataatatatattctaatttttagttttaataactttttagcttcaattttttattaaaataaataaatagcatcaatgctaactaatgacatctttttctctttaatagtatagcatctcaaaattttattatataatatgtctacttcagtaagtattctttaaatttttagcattagagatgttgttaaccaattgtcacgtcagtaacatgtcaaacaccatgtgtataataaattaaaaaaaatattttagttttacctaaatttttcaatcaaattttagttattgattttttaaaaatacataattttttttaatttaaattatatatataatgttgacatgctaattaacttatatcattattttatttgtcacatggaataaaacttgaaagaagaatcaatttactttaacgagctaaaaaaaatttagagacacatattcatacaaaaatgctaaatagcctaataaataagaaagaaaagaaaaagaaataaaattgtgttgaaaagatagaccgtccgattagattgatcttgtggtgccacgtgtaatgtactatggcatgcgacttttctcttctttctaatttctatatctgtatctgaagatatggctaaaggaatggagaattttgtctttggacttatttaaagaaaaataataataataaataattaaataggaaaacaataagtcataatttaatttaatttttttttggtagtaatttttgtgctttcggtgggtttcgttggggggcagaagaaattagaagggcacacacaccaagttgggcccacgaaaacaacctctaatacaagccaaataaagtcactgtgctgttggaaacacaccacaaaacaactcacccattagtgtgtgtgtgtgtatgtgtgactctcttatgctttgtttggtaagagtgattggaagattaattatgaattgatttttttatgtgttgggctagaaggaaagggctaaggagggaaagatagtattgattgcaaatctatttgagtccacaaaaactataagatgtgaaaatgttgattttatttgtgattgtaattatatccttgaatatagtgttgtgccagattttttaatacgatacgaaatcggtacgagcaccatcaaacataaaaaatatggatttaggtaagacataaaaaaaatgtagatttaagtacgaaaaacatcgaaaacagaacaagtaaacacaaataatctagctcgagtgcaatacacattaaaaacttataattttaatagtaataataataatttgagtatttcatactacatattcaataattgtaatgatttttcaaaatggttttctataaatattattaaaaaaataaataagaaaatttgaagctataaaaaccacatatagtgtaataattatttcattaattataaaaataaaatataaaaaaagaagtacaaattgaagtacataaaagaaaatgaactaactcaaggaaagtacagtacaaattcgagcatggtgacacaactcatatttttttatgatgcgacactataaaatttatttttttatgacacaacacaacacgatttatatttttttataatacgacacgatatgtacttgaaaataaactataaaaataaaaatattatacccatgaacacgaatttattaaaacttattttattaagatcttatttactaatacgtattccaataattaacttaattattaaattacttataacatgattttttaaaagacaaattaaacacattaagtttagtattcttacattgggaacaaagcgaatattatgactcttctatttaagtaatttaatcctcgtattatttttatagcagagtattgtaaagtactgagcccgaaaatctctaaaagctgaatagttgacttatgatcttcatagtcttcctcagtgccctaagtatcacacaagacaagtgtaggcaaattctcaatcactaaatgtagtgatggtcgaattttataaggagagattatgtgtgttttgaaatttctaagagagatagagctagagttttcattttctttcagttagaatgagagcagtaaactgaaagtctctaaatttctaaattattccacgtcatcatggctacatttggtgtaaatacgatttaagcatgatttgaattgagtttaggtaaacttgcttttgttgagatttgttttgtttggggactgtttttagaggttgttttgaggttatggttgctgtttttggtagattttgctggttttatcttgggttgagtttagctaagttttgaagctcaagcttgactcaactatggtgattttcactacaggggctagatgatatatctatgagtcgaattatgtttatttggacgttattaggtgttctcgaagtttgcatgaaatttggggtagaattgagagagagagagaagttgagattttgaattcctgcacggaaacggttaatcgtttggacttgcaggaccccattaaactgtgaaccgtttagggatctggtggaccgaatggagtaactttggaagccatgaaaatgtgagaagtaagagcaagagagaggtagtggcgatgccatgaaaatgtgagaagtaagagcagacaagagagagagagagaga

SEQ ID NO: 304924 - DNA, 2294 bp, Cannabis indica
atatatatatttttattaatatcttttctcaaaactattcccagccaacaaagaaaaaataaaaaagaattgtgaggttgtttttacacgtgtgacactctgttatattgaataatctcctctacttgtgcgtgacttatattaggccacctaatccttttcaaatttttttccctatattcacatatttttgcaaataatgaattttaaaaatagtattttttgttaagataaagtagtataaatgtttaattttttttaagagtagaaatgtttattttagatagttgtagcgtgaaataagaaaacatcctaatgataataaaataaaataaaggaataattacataagacactattttttgtgaaataagttacatttttacatttacataatttttcttacatttttacggtttttcataagaacaacacaaaaataacaagaaaactacataaaagtaacatgaaaataagatctaaataacatcaaaacaacaacaaaaaagaacatacaaataataaaaaatcaacaacaaattaacaagaatacaacgtaaaaggactctattttatgtaaataaaattataaaaattattaaaatatttacaattccgtgaaatcgtatttttataattttttgttatttttatatatttgagaaataatccctaaaataaatccttacatttctactaactcctataataaaattaaggcctcattacttttattgaaaatataaaataatgatgatgataatgtaaggataaatatcaaatttaataatcaaataataattatgcattttatttaatacaaatgagtatgtcaactaaaatttaaaaataaaatattaaaaaataacataatgatatatactaaaatataatatttattgtgatacaaattttacattatgttatattatgattcaatttagattactttttattatgtgacaaatttacaatacaatttagtacaatattagttgaagtggattttttacaaagtgagttatatttaacatgcattatattttgttctaaaaaactaatgtaacaggtgtatataacatattcatttttctgatatctaaaactttatagatttaatttgcatgaatatcgaactttcattcacattcttttttcgaaagtatccaaattgagcatttgacatgcatgaataaaacacacgagtacgtcactagtaactagaacattagaatcttaagacagtttttgataaatagtgacttgctggaaaccataattagagacataatcacttattacttaccataaatttttgagtaacatgctaattaagctaaagctgtcgtaggacaaatctcctttggcaagtacaggataattacaagcttgtacatacatgtacatgcattgctattgctagatcaatcatatatatcctaaaatacgtgccaaaagagataagccctataactggtttgcttaaagattacaccaccagttgtcttcatctccaactatgatatatctcagtgtgtgtttagtgcaacacattatgaatccttatatagaataaaattcaagcctcagttgatagatgtataatggaataaaccttagaagcaatggtatatgcttatattaggaattatatctatggaaagacttctctctttagtggcggggttgggtccgaatgcttttggacctttactcatttcaagaatatggagattttgttcatatatttccagctgagaaggggataataaaagcagttttacaagaatgagaaagatatccttgtagcttatgttattgacaataaagggccttaattaccagtggcatatccattcatagagtgaaatattcttgtctgtgttttataagcctttaaatatttcatgtttatttcattgtaacgaaaccatattttggcacaaggagtcaaaaaaaattaacacatttttttgtcatatatgtattaattttttttttttttattctgagtacaatattaaaaaattactcacttacagatataataactattcaagtattatattttttttttattgtaataatgataattacattttttacttatagcgacaagtttttgtttttttgtgagacgtgtaataacaagttttaattaatagaaaaattttacatttagtcacaacaaaagttgtgactaattataaattattattcttatgttgtgacttataaattgtccgtggcaaaaactatagtcacaaaaattacaatttgttgtgactaaatgt

SEQ ID NO: 304925 - DNA, 1912 bp, Cannabis indica
ctactgaacttttttagccgttaaaaattctccctgcactattgggattgttagatttaaggactttttttctaattttagggggcttgatttggtacatgtcaaagttcgaggggcatgttttggtagatatcaaagtctagggagcataatttagtacatgaacaatcacagaattagtaaaattaaatgaaattagataaaagaccttaaatctaacaatctcaatagtttagggggatttttaacagctaaaaaagttcaaggatcatgatttggtacatgtgaaagtttaggtggaaaaaatcttggtataataggcaatctattcaaaaaaaagttggtatattttaataaaaaaataacatgaaagtatttttaattaatgaataaaaaaaaatatatttttcaacttaccccgtctataaatactcaaatattcacatttaaaactctcaaaaagtcacctttaatgtgattagaatccttgacctctataatgcttaggccatttggttggtggtatgatcactctaataagttacaactaattaattggtaaccaaacttttcaaaaataccaataggagtgttctttttgacaagtaccaatcaaacaatcataaattagttttaatgataactatgtaaagtaacttaattatctcttgcagataactttgattaataataatcataacaatagtaactaggattagaatatatgtaactaactaaccttccaacatcaccagggttgattaagccatggttgattctaaggcatggaactgaggcagctgttttaacggtcttaggagcctcaatgaccacaattggagatcctatccccaattttttcgaatgcccaattttcttgggatcactaatctcatcttttgaagaagaagaagaaaattcagattttattattatggtattatggttattactattaggtgaagaaatgtaaaagtagttgttgaatttgaataagttattaggggttgaagttgtttttgagaaaggagggagcttcgtaactattgaaaatgaagatgttgccatattcatatttttgtggctctctcaactctcctcacttaaacttatgttatcctttctatctatctctctatatataatttacaatcattttataatactagaacacttctcatataatgacaaattatcaaattttattggttttatttaattaaaaacattaaattatcaactattaatatatttttttttcattaattttttaactagaaatattttgttaatattgaaaattgtatccagggtattttttttttattgaggactagtagtgcttactacctaacaccttttaaaggtgcagtcctgcgattagttagcgatatattttaaaatttattttattaaattatatgtgatttcatatttaattgcaccaatagcaatatgacacaaaaaaagtattggacaccactgatactttttaacatttttgtatactaatataaaatatgcccactttttatttaatgaactgtgttcaaggtatttgaataaagtggttattttacaaatacacaaaaataatagaaaaaaaaaataaaaatacggttgcacggaattttaattatttttatgactttatttacagaaaatacagtcttttatgtatttttgttaatttgttggcattttacaaatacacaaaaacaacaaaaaaaatacaaaaatacggttgcacggaattttaatcatgtttatgattttatttataaaaatacgatctttttatgtatttttatgttgtatttttgttaatttgttgttgctttgattttgtttgaatgttattttatgtaattttcttgttatttttataaaataccgtaaaaatgtaaaaaaa

SEQ ID NO: 304926 - DNA, 1903 bp, Cannabis indica
aatcatagtgtggaagattgtgaagaattttaacacgtgaaggagatccaagatcggatcttgttaatactctacgatagaatggaacaagggttatagatctgaacggaaggagccataatattctactaccaccaatgtaaggttttctaaaactctatatgtgtttaattcattgttttaggaaattcatgtttaggatgttagattatagaatataatcaaacatacatattagtgaatctagatcctggtaaaacaacttccaaaaattatttgttaagaaggaagacaaaacacttcgtatgtgtattgactatagagagttcaacatgttggcaatggtgtattttcatgttatttattgatatgaaaacttctagttttgagtttaagttcccgaaagtgagttagagattcgtttacctgttttgcatgattgtgactttgggcctcagattctttgagcagtgtttccactcgggttgattggcaaacctgattacgaaaagtaaggtaagattagtataaaggatggacatatatacatgttagcatgcatgtttcaagaagtacaaactcattctactaacattagtgcatgtggtatagcggtggtttgtgctactaatccttccaacactagtatatctagggtatcgagtacatgtggtacagtgatttgttaggttaataatcctaccaacactagtacttttagagtactaagtgcatgtggtacaatgattagtcgtgctaccaatatatactactgaaactagtatttttggggtacaaagtgcatgtgatacatcgattggtttcataatcaacactactaatactagtaccttcgaggtactgagtgcatgttgtatagtttttgattgtctagaacgttcaagattcatacgcattggacgcgagttatacttgtgattaggtgtatgggtgcataggttacaagatagattatatgtttatgatttatgcttttcttactgagtctgtcatctcacatatattctttctctatgtaggtaaaggtaaggcaaaaactgattaacggtgagtctggagcataataaagattgtacatatatctagatggttagacctaaagtgttcagatctttgagacatcatgagctcggttttgttagtcgattggcgctgccatttgtttggttgtattttgtaaaatgaatttgagatcccaaattttgtaaattttatactttgtaaatatagtaaagtttatgtttattgtaaaaaaaatttaataacatttttcactaaatccttaaattagcaaaggttagtacggtaatttaaaaattactgtagcgcgcctaagctagtaggatattacaatttgtttgctaagtagaaataaagattcaattatttggtacttagctacagtccttgtggggtcgaccttactcacatgagtttattacttaataacgatacgtatacttacatgttaaaactttcataacaattatgccaaatcgacagctataacattttaatcgtcagctatactatagccgactatgcaaaataataactattaattccattttttgcttatttaattgacaaaaatattttattatttgtcgtatattttcggctggagtgtttaaattggtgtccatattttgtgtatctaatttttgaaggaaagttgtctagctttcctatttatagaaattgaggtacaaatggtaagtttgattacacaattaattcttatctaactagctggtatattccgatcttgtgtgaatttcccattttcttagatcagatttctttaaaagaaaactggagctaaactttctttttctataaaaggaaagttgtacttactgcccacgattctataggtaca

SEQ ID NO: 304927 - DNA, 7445 bp, Cannabis indica
ttgaactttatactaattaaaaacaaataaagaaggtcatcaccgatttgaatatttgtatccattatatcttgtttcattaaacaatagaaattctagtgctactgaaagtactagtaattttattgaataagaatttagtgataggaaggaagctttccaatactattctttttacaagaatgagagtgccgaaaagtggaacagttggtctaataattctaataattatagttggaaacatgagtacaactataatccattatatgagtagaattatgaagagaaagatccctggtgtaatcacagtagttttgatgatcatagttgaaaaactaagtacaactataatccattatatgagtggaattgtgaaaataaaaattcttggttttctcatgactttcaatatttatcgaactgttccctagatgacactattgttgagttacaagaatctatggcgacatattacaagatgataaaagacttacttgttgagcagaaacaagttaaggaagaattgaacaaattatctagtcacctggtaagttttcatgctaatggttttcctttgcaactggtgaatgaaacattgatctccactaccacctttcacaattttaacgaggtaactatcacctctacttctagtggtgaaatttttgaagaatcgactctaccaagtacatatgagggttatcataatgaagtggtacccacattattcatagaggagaacagtaccaccactattcaaaaagaaactctttcccattctatcattcttcccctcactgcagatgaaaataaatactatcataataatatcatagataaagtcattgaggaaattagaaaattatttccacttagtcatttacaatatttcctccacgacttacacaaatatcattttctttattctaaaagtttaactaatgcttctattattaagacacaagataaaagaaaattcatttttgatgctggatagtcaagaaaattgagttggtaagccaacctgtggagacatgtctccaatttgcgaagacaaatcatattttatctttcctcagtttctttcttttatttatttttggtacgtcttaatttttcttttgttagtttatttttttcattttttttttctaagaatcaacatcatgtcattttttatttgctcgctctcttaatgttctcattttatacacttcatgtatatatttttttaacaataaggatattttctgattttagttggggtggtaagcatattcaagtactgtcatttgcattttgtcatattaataatttcattgtcaaatttttcgtattttgtcatattaatactttcatggtcaaatttttccaaaaattactcatttattcttgtaaaatattattttaagctaatttttgttatctttattgcttaaaattttttagagttataaaatgcacatgcctaactctatggtaagatggttattagcacacttttgcttagaaaatttgtcaagttcatgtgttcatattttttgagtggcgagatttgagaaaataaattttaaattttcattgattcatagaaataattataattattttggacatggtactaggatttgattagatgtttttttaagggataagtttctatagacaaatcttattagggagcttttttataattattttcttttttataaaaaaacaaaaaaaagatacaagagaaatatttccatcattatatgttttttcttagtcaaaaaaaaatgcaacaacaacatttctctctatttgtctaatatgttgcctcttgttcaaaaaaaaaaacgtgtagtatttaattttcatttattatggctcttagaataaatgtaaaagattgtatatttcctttcaaaatcccaaaaagttagtttgtggtactctttatagtggtttgtccaaataattcataacatatcttttttttctttataaatcagtgagttgtattgcacaaatatatttacaccctaatagcacccacacaagggcctaaaaatctatacaatgtatttctcctttcttcctctactcaactatcttccatttttacaattcatctataaagcataaaaccaatccttatctacacttttgattttctttggtaaaaacatgttgatccgagtcttcaagttccatttgatgtcttcaacaacctggcacttattcaccggtttcccttgccaaattacctcatttcttgctcgccaaacatggtacaccagcgttgctacagcagctgaaaaaactagctttttgaactttgaaatctttgccctgcctatccaccaaactagttgaggaagagacacagcctttgctttccattcaagccaacttttgtttctctccaaacagtacccagcaacacatcattcaaagaacaaatgctgcccatttttgacatgtgaatcacataggctgcagtgatcttgcaccaggatgccatacctcctcagtcgatcttttgtcttcaacttattgagcattgcaagccacaatatcacattgtgctttggtgtgttcagtcgagcccatacctctttgctccaattcagtttagcttggggagaattgaacatcttatagctgattgctatagtatatttctctctctgaaatgaatcacaatcagttataatgctgatttggttcttgatagctacaagcttcttctaataccaacttgcatgaatagaagcattgtaactccaccaattatgctctttgatgtagacactatgaacccatctaagccaaagactctcttggttatttgaaatagcgcacacatacttactcatggctgccttgttccaatcttcaagttttttaattcctaagctccatgtagcttttggttgacaaaccatatcccaagagactgtccctgcaccatgaaataaggcctgtcctttccaaaggaatactctgcagatagcttcaatagatttcaggctattctttggcataagcattatttgactccaataagcttgaatagctataagaactgaattgatcagtgtgatccgtccagtaaaagataggttcattgaactccagcttttaatccttgttgtcattctttcagctagcaattcacattctttccctgctatcttctttgcacaaattgggattcccaaatatgtgaaaggaagatcctgtcttatgaacctcgagagttgtaatatcttgcttacacatccttgaggcatattgttgcactaaattgcagtcttacttgcattaggatgtaagccagatgtgagagagaagagcttcaaagcctgtaacatatacaccacacttttgaaatctccatgacaaaaaagtaggacatcatcagcaaaagctagatgattcaatttgagaccagcacacctgtcatgaaaaaagaaatcatctttgtcaccaatcttccccattaatcgagatagatattccatacccagtacaaatagtagaggggacatggggtccccttgcctaagccctttcttggattcaaagaaaccatgcaaggttccattgaacataagagagaacttaggagtagagatgcaattcataaccagatggataaagcttctagggaaattcagacctgttaaaacctcctcaataaattcccattcaatattgtcatatgccttttggagatcaagcttgatcatgcaacttggcttgtttactttccttccatagtgccttaccaattcctggcagatcatgatattatgccctataaaccttcctttaataaaacctcattgggattgagatattatatcaggaatgatgttactgattttagaactcaagagcttagttgcaattttgtagataacattgcaacaggcaattggtctaaaatccttaacagagttagggcatttacactttagaaccaaggtaattatagttgaattaatgtctttaagaatgttacctgattccaagaatgatagcacagccgcactgatgtcacccctatgtactcacaattgtcttgaaagaagctgctcaagaacccatcaagtccgggggacttgtttacagggattctaaaggtagctttcttcacatcttctaatgtgaatttttaagtaagaaggttgacatgatcaggtgttagaataggacctctagccagaatattagtctctatcttccttctattgtccattttggtgccaagtagcttgttatagaattccaagaaagcctttgttatcttagttggatcattgaccctactcccatcatgcttctcaatagaaaaaatcctattctgcctctgtctctgtttaatacaagcatggaaaagggttgtgttacaatcaccactttgtatccaggaagatttagctttctgttgcaggaaagatgtataatctccttaaactttgattaacttctctctagcctctttttcctatgtatgcagattagagtctaacgggttctgatgaatctgattctgcagagattctaattctagctttgccttggaaacagcagcatgtaagtcatggaacccctctttattgatctctttgagcttgagtttaaactgcttcatcttagagatgacttgaaacattttagtaccaaccacaggtcgatcccaaacctctttcaaacaactatcatacttaggatgtgatttccacatcttaaagtatttaaatggttttttcccactcaccaggtctggatgaagagacaaaatcgcaggagtatgatcaaataatccttcgtttagatacacagcctctgcaagttcatatttgttaatccatgtttggttggcaagtattcggtcaatcttcgaaaaaatcctatcctctccatgttgtttgttagaccaagtgaaaaaatttccacttgctttgacatcttgtaaaaggtaggaatttacacaattcacgaactcaacatgggggtaaaatttaaccctgtggccaaccctttcttccttagctaaaatatcgttgaagtctcccattaaaagccatttcttagctgtgttcaggtccatcaaatccttccacaatatccttctctctactctgctatttgaagcatacaccacagttaagaaactgtcataaccttcaacagttgacaactttaaatgcataagttgactagtacatttaaggatgtcaacagtgaacctccacgggttccaagcgataacaatcttaccacctgcatgtcatgcaatgttagaagaaaaacaccaattatcaaacacattcgagtacaaggtaccaagttttggagcctttactctagtctcaaggagaccaacaaaatcaaccttctgagaattaataaattgctttattagttgttgtttatgttgattgttggctcctctcacattccaacaaaggagtttatccattagaaagagagggctcccccctcctgtgttgaccataattggatattcctccactgcttcaagattcacatcctcttcaccaagtgcctgaaaagagttttgcacaattttaccacttgccccatctgaaccatttatagtgcctcggacaaccccttttctggagttggtaacttttgtaaggccttcatcatctacttgcccttgcttcctattatccttcttaataatccactgttgtgtaccattcgagttcttcttacactcagctgcaaaatgccccacaccagagcaatgagagcacgaaacaggtttccattcatactttatcccaattgtcgtgttcatgccaaactcattctcaaagtctaccatatctggcaagctttgatccatcaagacttcaattagaactctagcatagttcaatctctccctcttctttgttacattatccaacataattggcttcccaatctgcccaactatcttgaacaatgacctttaaccccaatatttcaaatccaagtcctccaattggatccaaataggcacactcttcacatcctctttcttaaagttcacattagggtcccatggtttcaggataaccggtcttctattgatgaaaatatatcccccattcggaatttggtccctgtcttcaatcgaatggaatcggataataaagatgccatatgaaagcatcttcacacaatccaccttgcccttccagattgtatgcacaaaaccatcaagaatatgcaaaggaggattcacccctagtacataacaaacaatcgatggtgtccaaaataaaatcttatcttctatgtcatccatagtaatcttcaccttgctctcattatgtccagatttcttaaacgaattgtctaaactgcgaacaacagaattagaacgtaaaatagggggaatcgagttctcatcctgagtgatgtcactgttacattggtcatttgcttggagaaactgaacaaaatcactatgaacatcttcctgcctttgaatcgcagctagggaggatttgggagacagaggaggctggaaaacatccttcagagttggattgtcctccatcagttcttcctcatccgagacctccaaggctttgatttcagagatctattctataagattgaattgaatagcatccttcatcactttcgagccattcttcttcgtgaatttggtagcagatttggttctcccctgaatctttgatcttgttttagccatggcaccagctaaaaccagctgcaagaacacagacccaaagagatacgattttccactaagaaattggcatgatattataaagggcttattatccttcataacatatctttgcttcaatatttatttaattgtttatcctaaattgatctattcattcaagtgctcacttttcaatttctaactccatgagacaaaattcttagccatatataaaatatttttcaattacctgtgagattaatggagttgagacttttacttagtatgtttcttgaaggcttttatgtgctatggtttgcgataagaatatttaggtttggtgtacacactcacaactttagatttatttaaggtaattttgtatagtttttattggcttgttactaatattttatttgaatatttgtgttatttttagaatttttgaccataaaatattatgttaacgttatattttttagtttgaattgttagagactagcaataaattaaggagttgtgattaatatgtaaaattaaatattattaagagtcattgggtgaataattagaattaaattatctatttgtatgattttaagtgcaaaaatttagaggaaattacacttagtatgggattttaagagttcttatgataaatatggcacatttaagtttgaccaatttatatggtattttttatttttagttctttgtatggtatttgatatgt

SEQ ID NO: 304928 - DNA, 2394 bp, Cannabis indica
aataccaatggcttaggcaccttaaaaatagtcaatacctccggacttgcataaatatctcaaagtcctaatgccaatggattaggcgcaaattcttaataccaatagcttaggcataatgtcctaatgccaataacttaggcgcaaagtcctaatgccaaaggcttaggcgcaaagtcctaatgccaatggcttaggcgcaaagtcctaatacgaatggtttaggcacaaagtcataatgccaacggcttaggcataaagtcctaatgccaatattcaaagtcctaatgccaatggattaggcataaaatcttaacgccaatagcttaggcaccttgagaatagctaacacctccgaacttggcgcaattctctctatgtcctaatgtcaatggcttagacacctttagaatagtcaatgcctacggggttagtgcaattctctccaagtcctaatcctgtcatggcttaggcacctagagaataagtacaagacctacaggcttggtttaattctccccatgtcctaacgccaccaaggcttgggaactttttagagtaaaaccaacgcctctgggcttggtctgattcacttcaagtgccaacgccgctagcacacttaattaaggaagtcgttcccattcaagactttgttttctgattgagattcttccacctcgggaataagagcaatgtcttcaggctttgtacaaatatgtctaaaaccctaacgctcgatggacttgaacactagtgaatgagaccaatgtcctctaggttctatccaactgctttttccgagagtcaccacaataatcacacatcctcaaagcaaagaagataagtcgtaaatcttcattgaccaaaggccgaataaagacttctaggctaaatgttgtccaaatttttgtcaaacaaggacaaatgatggtccactcactaactgacacaattgccaataaagttaatgtgatatgttaggaagctttcacaaaaaagttgaagagacaagacaagacaagctcatatgcctacaattatttctttatttatgtctcaatgtatttacttccatcaagtaaagcattttagatgaataaaagaaatgattctcatgattgcctataaataggaccatgagatcctgtcaaattctagaaagagaatttcatcttctctatctcaatacaaatgattcatggattaagatttattaatacccaaccacctaaaatatattgtcttctactcttttttcttaatttaatttctcttcaagtacaagaaaactttaactatgatgaataaattacatcaaaattgtttaaatatgattattgaaaaaagtatgtgttgtttagacaaaggacttaaggttttataagtcattagtgagctgagtttgtagtttgtaatcaatgtggaatgtagtgagacacctattatcaatttatattattagtgtaaacttgccattataaaataaagtacgatgattcagcaatattgtagtcttttaaaagaaatcttaatccttcttagttaaatttaagtgaaaaaaaaaaagtggcaatgtgaaccaatttctattggagtttttacaccacatactgaaattttcaacttttttatttttttactgtggggcagaatatttttcaaaaaaaaaaactgtgtactgtattaagctttcaccattgttccatagttgttttttaattgttccactgttgttttaattgttctgttttttttttacagttattttataaaaagacagtatttttgtaagaaattccgtgtaacagtaaaattataagcttttgcttaaaatccaatatttttgtaaaaacctcatttctattcttgtagccaatctatttagataagccaagcccaaaaccccatacgtattttttgaaatataaaaagcccaatgaaaatcgtacgtgctttctatcatatatataacaagcccaataaaactatacgtgttttttgaaatgtatatataaaaaagcccaatgaaaaccatgcttatcaaacatccgataaattgaaaaagatatggtaaatttaaaattaatttttataaaaaaaaatgagaaaaatcatgccactaatacatattttttcttaataatattaaaatttctgcctttttacattaccagtatcaaatttaaattcatgataaaaattttggtaattaaatgaaatttatgttctgtgtaattggtatactttaggatgttgacaatacatgctttgggccttgatgctagcctaaggggtatattgagaaatacctcttttatttatcaattaaccaaaactacctctaattttatatttaattgaatcatacatctttttatatgtattgtacccaaa

SEQ ID NO: 304929 - DNA, 1478 bp, Cannabis indica
cctaaaattttataagaagttttattgaatcaattaaagtatttaattatattttataattattttaaaatttatcaaatttaacattaggagttttttttttaaatatatatattctctctttttttttaaatattccttaataaactttttttactaaccaagtaaatccaaaaattacttttcaccatgtaaatcgatggaaaaaaaaataatatattggctttatatagatatttagtaatgcaataaaatttactataggctatagcatatattttgttaatttgtctttaattattgggtcaaatcatgtttttgtttttaaatagtaatattcaaaaattgagattaaaatatgtgacataggttcatcacctcacatatgtcacatatataatattatatttatatattactttttttgttataagggacaaaaaaggcaccactcaatttttaccatttgcttctttctttcttccatgttacaatataattggttcttagactagtcatagatgtagatgaaattgaaaagcaaaggtcccccaaatcttagtaaaatattcatgaaagtggcatatctattatctcatgcccttttcttagtgcttttgtgatgcctcgttttcaccctatcattctcattatcactaatccatttatttccaccaattcactaccttaaatactataacaaatttatgtggttatattaattaatacatgaagcttaattttactaatacaaaagtaagctttgtaatattagtttagggtaaaattttgtattagaaatgtatgtctgacacaaatattattcgtttaataatcgtgttaaaaattaagactaaaatacaattttaatcagattcacacatcaatctattattcaattaatataaatataaatcaaatttcatatttaattgtattaccaacaatttcaaactttaatataaatatatatgtgaaattaaattatagttgtatagacttttcttagattagtaccttggcctatggctaacttatcacttcattgtcataactagtaaaacactattacttgtacatttttttctcaaatatttcgctacacaaattatttatataattatatgaattaattaatagatttttttcaattattatatagtaaacttactttttaggagaattataaagtaaatttggaccaataatacagattggtcgttttgaattaagtcaattattttgttttcccttctagtgttgaaataatggcattgggcatctccttcccttgactgggaaattttttacatattttaccaacatataaattaaatattcatttatcttcatcaaattacattttatataattaatgcatgtatatagttactagcaaaaagttacgtgcaaggcacgtatactaaattttatgttagtttttttctacgatattaaaaagtgatacaattaaattt

SEQ ID NO: 304930 - DNA, 3477 bp, Cannabis indica
catgcaaatcatttatggttggagcctggaaaaacagagtaattattttcaactcaaaaccaaaagcatgcacaaataatagaattatttgaaaatccaacaatatttaagatttaagcaaatacatcccaaaattattcaaaacaaaacatatatatattttaaaaaaaaaaatccaaaactggagctatggatatggtacataatatagtagttgtcattcatatttttcttttctgtaaattatttgtgaaaatcttctcccaaaaccccttctttctttcttacttgatcgagcaaaaatatactagttttgagtagacactaaaaaatgaaaagaatatcacaaaaatccattattcaacaattcatagattgtggaattagtgaaaagaataattaattaattagtataatcaacaacaatacatgcatgaattttggtatctcaattttgttatgtttatatctgttgtcataattggttatctaatatgtgtttacaatagccatacaaatacatagttcaactattcctaaattgtggaataatctctatgtaaagttagctaaatttccacaatctgatgaactttgtattatgtgtggtcacaacccttttcgtcccatcagccaaacaagtgatgagaggtcgaataattgtcagaacactgtcaatgtgaatatcttccgcaagcctcgctcctcttgttctcacaactactccattcttgtctcgagagctcgaaatacttccagccaaaacagttctagaaacaacttcacctgtgttgtggttcagaacacgcagtataccgtctatccctcccacaactaatgttgatgattcatttctcatcatcctgcagaatgtaacagagaatgaaaaaatggttcatagatttcaaaaatgatagaaatgttacgaaatatggtagaaaagcatttgttattaagtgagagcgtggattgtaacacaaagcgctcaagtctgatttgaaaagtttttatagattaaataaaatttagatgttaatgattgtctatgaaatgaggaattaggcagagcaaaaaagtgattgatagtcaaaataattggaataaagctgtaaaagattgtaaacatgagagaaataacagtaaggtgaggaaaattacaaggaactagatcttcttgttatcgacatatatattggggatgtgagcaataattggccagtcctcccctgtctccctctggactcgtggttcaagcaatggacaattgatgatatgaagatcagaaagcaaactgggaagttcttttggcaagcattgaaggttccaacaagattcaattcgcaaattctcaagggatgttaggtgctgaaaggcctcctcgtctaagtgtatcaagtttttacagttgtaaatcacaatgttctttaaacccaatggagcctgcatgagttgagctcttgggagtaatgatattagttgatcacaatcctctatttcaagctttgtcaatgatggaaaataatctgctaaaaatgatgctttgagtttcctgcaccactttaaacgaagatacttaagacgaggaaaaactccaccttcgacaaatgaccactcttctagattaggcaaatagtcaagtttcaaggtctccaaagatctaaagaatggctttgttattgcaacagatgaagaagaagaatcagcagtagtagtacttgatgtagaataataaaattctgagcctattctaaccatatcatataaacggtcaaaacgaaggtctttaagagaacttagctgtcccaacgatggaaagacattgcaataagagcaacataaaatctccagccttactaaattagacaagcagcaacaatctcccatccaatttgggaaactggttcctttgtaatcgaaaatctcaagttccttcaagtttggatgaggttcaagaccaccaagtatctctttatgcaagtaatcagtttcaaagcaataaccccaactcaaacgtaggcgactaagaaacttgaaactctttaatggtgcatctgcttctgaaatttcctcaaggctactaacattttgtagtccctcaatacgaagactcccatgtagattttgaagctttttcaatagcttaatgcctgaatctttatttttccccacaagaaatttattaagtgttttcagattttgtagcttacccagttgcaaaggcatttcttgtaatcgaccggggggaactctaagatgtcgcagcttgattaaatttcctatatcagttggtagttgagtaatcgaataacattcctccaacaatagagtctccaaattatacaacttactacaaattgaattgggtatctcttcaatctcaccacaatctaacttcaaatatcttaaatatttcaaatttcctattgaatcaggaaactttgtgatcgtcttgtcctttatggatagtactctcaagcctgggaatgacttatgcaagtgctcaatctttaacaaactgagatgatcatcggttgaatcttgatgccacaatatggtgcgcaagcacttagcttttaataactcctcaaattccatagagtcatattctttttcacaatccggcatgtatgaaaaatgacgaaccttgtgagaggatttattgctattcaacattaagcaaaactcaccagagataaatattgctaaatcatgtataaggtcgtgcatgagaaaacttagcttgtcgtcatcacatgatggttggaaaaatgacttcgaaattagactttcgaaatactcttctccaacttcttcaactctcttttcaattttagaatataaaagaccttcggccttccataacaagatcatctcttctttttggaatttataatcttttgggaatagagagcagtaagcaaaacattgctttaattctgaaggtagataaaaataactcaaccataaagctggaagaattttgacttcatttctttcatacaactcccatatatcattttgtagaattttatcccattcctcctttctttgcttccctcgtaagagatcaccaattgactttattgctaatggaagtcccttacacttgtcaactattttttccccaacttcttggagatccaagtaatcatttgagtctacaacaagtgaagcatgttttgcaaataatcgccagccagcagactcgtttattcttcctagttgatacgttgaccctgttttcataatcgatgcaacaactgtgctccgtgttgtcacaataatcttgcttccagactttcctgatttgaaacaattgtttaagacatcccacttggcacgatcttcatcccaaacatcatcaacaacaaacagaaacttcttcacactcagagccttctttacttcttcttgaaggtcatatgactcctcaatttcacatttttgtaaagtgaccttctcaacaatcagtttcat

SEQ ID NO: 304931 - DNA, 3798 bp, Cannabis indica
accctaaacaatcacgattcttaaaacttatctttagagtgcttgcttttatgtcatttattttttttaaatgttttgttttgtgtcatatatggttcttagcaatggagatgatattaggttgatgatcacttgtgggagtatattcattgaatgtattgagagtgggagtaattcttcgctacgctaaggacgaattagagatgagatggtttgatgtaccaggattgaacataatgctaaaaattgggtgggtttgatggtgatttggattaggggatttggatcatggtgagtttgatggggatttgggtcggtggttttcagaggtaatcgttgattgcatgattttcagaggtcattgtcgaggttccaagcctcgtaatttttagatctgggcattttcttttgttttaaatttttttgttgagtttgaatgtatatgaatagatattttggtttggagtgtgtttgccctattttggggcacaaaaatgggtgtttgtccttttcttttattcggatctaataaaggttgttggttgtaatgtgaaggtgataatggtgaagttgtggtagtagttatgctgatggctagttatgaagaacatggaaggaagaaataataaaagaaaggaaaataaaatatatatatttttattaagaaaaggtctgttattataaattaaaaagaatcatttacaacaacaaagaaaatagcagaaggagtttcctctaaccatatacaatcattatccaacactaaagcttgtttagcaaagccatgcgcggcttggttagcatctcatctaacatgagatacacaaattgaagagagataggataattgatgtgcaacatccaacaccaaatcttgaaaacaagagaggtttgaagaagagccatttagagaattagcgagagtcaacgaatcagtttctacaaagtcaattggcaagccaagatgtctagcccaagaaagaccataaaacatggcctttgcttccctttcttgagatttaaaatttccaataactggtttggcaagagcagcccgcacctgtccatgggaatccctaataatagcacccaatcccgttttgctcctcaaagaatcaaccgtcgcatcgacatttaattttaatttgttctctggaggaggtaaccaaggcttatgtgcagctggtacattctggtttattgcatcaggcatttcaacactagtatattgctagaagttttgaatatagaccacaacttttgaataaacctgaaatggactctgtagcagcttaccatggacaaaattatttctatctgaccacatatgccacataatacatagaatcttctccatatcagcagtggaatagagtgaagaaagatgaataagaaaatctctatctcgcatttgatttgctaatctagaaaagtaaaaaaaaaaaaaaaacagctgctctccaaatatctttggcatgatcacaagaaaataaggcatgtcctatggattcccaagcattagaacataagcaacaatttgtagagtttaagaccttccgatgaaataacgactttgcaactggaagggaaaattgaaccactctccaaccaaaaattttgactttcgaaggaagtttaaacctgcaaaacttttttcactaagttgcttgagatgtagaacttgaagatagattttgttcttccaaagagcacggaaaatggtagcccaaattatctgaatactcacctgattcattaaaatgccaaatccacttatcatcagtagcaagaaaagatagtgtaatggtaagaatatgatctatattagcaagagagaagtccaattgtaaaagctccaagttccattctcgactgatagtaatataatctgaaacttggctcatagcatcaccccgataatgcaagggagtgaatatggagattccaggaatccaagtgtccaaaccatatctaatattagtaccattacccacctcaatcttagaccttttaccaataaatctcgtccccaactaataccctgccatgttaaagaagacatacccccagtaacagcctctaaaaagtttttattaggaaagtaatgacacttcaaaatacgacttagaagagtattgtgattttggaaaatacgccaagcttgtttagccaataaatcttgattgaagtgaacaaaagactggaatcccatatcactttccatcttggttgtacacaaaaatttatatatttttttttatggatttttattttgtctgatgttgatccccaccaaaatttatccatcatagtctctagttgtttaccaaatttggaagacaatcgaaaataactcattgcataagtgagaatcgattgaataagtgctttcaaaagaatctcttttccaccaattgaaaaaagtttatcattccaagagtgcatcaacttctatatccgatccttgatgttactaaataattgttttttgtctcttccagaatacattggaaggcccaaataagattcatgacactcagaaataggcattcccaaaatttgttggaaaaagttcttggcgaccatcgttgtgttaggcgagaaagacatgacgacttatctgtattcaattgttgtccaaatgcacgatgataaatgtcaagagcatgtttgattgctccacaagatcggtcattatgacaaaataataaactatcatccacaaaaagaagatgagagattgtaggtgatctacgagaaacacccagccccttaagccaccaattttttcctcatattgtagtaagcgagaaagactcgcaaagcaaataagaaagagatacgaagaaagtggatcaccctgacgcagtcctctttgaggaacaactgaacccgatgttactccattggtgaagaacgaaaaggtattagtgtgaagacatgtcataatgagggagatccaacgaacattgaaacccattttcccatcaccgctgcaataaaactccattcaacctggtcgaaaactttcctcatatcaagtttgagggcagcataacctttgttacctttactcatgtgtttcaaactatgaacaagttcaaaagcaacaagaacattatcggttattaacctgttgagaggaaagcactttaagtctcagaaatgactgttgggagaacctccttaaagcgtatgaccaacatcttagagataagcttctagatgacattgcacatactaattggacgaaagtctttcgttgtctttagttttttaacttttggaatcaatgtgattagagtcttattaaaagttgttggactgccaacattattcaatacattcaaggaaactttagtgactaattgtcccacaatgtgccaattatgatgataaaacatagtcgacataccatctatacccgaacttttatcagaccccatcttctttaatgctaataaaacttcagaggtagtaaattcttttagtaaaaaatcattttgctcagctgtaattgatgcaggaattatagataaaacatgagacagagccaaataatattcttcagataccgtgaacagattttcaaaataagaagagaccatagttgatataccttcctttgaagaaattatattcccattatcatcatggagtgctttaattctgttattacaattcctagcagaggctttagcattgaaaaatttggtgttttgatcccctgactgcaaccactccactctagatcgttgttgccaatattgttcttcattacctaaaagttcatcaaaa

SEQ ID NO: 304932 - DNA, 2212 bp, Cannabis indica
aatacaatacgacctaatacgttgttccaaacgagccctgaaatagtaaaattgaacgaaattagacaaaagtccttaaatccaacaatttcaatagttcagggggcatttttaacgaccttaaaagttcaaggggcatgatttggtacatgttaaagttcagagggaaaaaatcctaattagccttaattgaatataatttttttcatctaaataagtattgaaaagctgctaaataaagtaaaatatgtgctatattatttattaaataatatgatatttaagttttaaattataatattatatatatattattatgagtataatatattgtaatatttatagcataaattataatgtaccatgtggtaccctcaaactttttttttagagttagttaagttagttggttaggggatttatgtcaattctagctctaaatatacaattgattaagtccttgttttaacaacaactaacaggacagatttgtgagagagagggtgcaattagattgagtgagagagtttaggagcaaatctcctttgtaattggagctctctaattcttgagtgatcaatttgtaatcaccatttttgattcatcaataaagattcataagctgttgtttcccaaacatgtaggcacaagtctcattggcttggtgttcgaacctcattaaaaaaggtgttcattaaatttttagcattcttgccatttaagtttcagacttagttcatgtgattgctttatcgtccattgctagttttagattacattttcaattctggtaattgtttgatgttctttattgtgtgttcttagacgaggtgaatcgagattcaccacaaatggtattaaagcttggtgaagaagaatcttaacattcaagaactgtttcaagattcaaagaactcaaatttaaaatgtcattagcaaggttcgaagtagataagttcacatggataaatgactttagttatggaaagtcaaaatgaaagcattgatgtatatctgaagtaatcgaccttactcaacttgcagaaattaaagatgaaaagattaagagagatactgaatcgaaggcttatagtgccacccttttgagtcttagggatgaagttttgagagaactctcaaatgaagcaactgctttaggatcgtggattaaacttgcctccatttacttaaagaaatccttggctaataagatttacttgaaaattcagaagttacgtggatgaatttaacagaattattttgaacttgaataacataggtgtcaagatagaagaagaagatcgggtcataatcttgctaagttgtctatccaaaacctatgagcactttgtagatatgatcctgtattggaaagacacattaaccatgtcagagatcaaagctacactcaattaaaaaaaaatcaaaagaattcagaggataaaggagaatctaatagtgatggtctgtaaatagtcgaggaaagattgacaagagagaattcaagaacaaacatagaagtgatagccagaccaagacaaaatccaagtttaagagtggaaagttctattactactgcaagaaggaaggacattttcaagatgaatgtagagctctgaaagtgaagaataccagaagcaaaagtagagaaagaggtgaatcaaatgttgcataagatggatatgaatttgtagatgtgttattgtgtccagcaaggagtctggtgaagagtggatgctagaatttggatgctcattttatatgacacctcacaagaatctattatgtgaattcaaggacataggaaatattcttttaggaaacaacaaagcatgtcagattaagggaattagatttgtgttgtttgtcatgcatgatggcattaaaagaactatttagaatgtcaaatatgttccagaacttaagagaaaccagttgtctattggttaattagctacaaatggatgttccattaagattgaggagtctcttagagtgactaaagactcactgatagtgatgaaaggtgatatcagaaatggtttctatgctcttaatagcaaggcagtgataggaacagcaaatgctgcttggatgacaaaggtggtgaccaaactagaatgtggtattttgagattaggccatattagtgaaagaggcctaattgaattagaaaattgttaggttatttttagtattaattttagattaa

SEQ ID NO: 304933 - DNA, 2726 bp, Cannabis indica
caaatttttgatatctaccaaatcatgtccttcgaactttgacatgcactaattatgccccctgaactttcatccatgttagactttgacatgcactaaatttaatgataatttctagcactctttttccgaatggcctgcctctctaattgtattttttgctattttgaagtgagttattatcttaagtttttaatgaggaggtcatttaaaaaaaaaatgaaaattcgtgctcataaatttagtgtattattaaagtagtgtaaagatttcacaatttcacataataatatatctttattatgtcaaaaaaacaaacaagcataccttaaagagacatatgtattttaataagcaaatttaaacttttcaattataatattatttaacacagtattcattttgattatagagaaattttaaattttcactattcaccataactacaatgacaaacaatcctaaaaaaataaacaaaaacaaatatgccctaataacaacaaattgaaggtgtgatgaatgctcgtatttcgtaatcagtaatcacgtgaaatattaacaatcgttctttttaaaaaaaatattgaattgaactgaatttaacaaaatcaaaacctataaacaattgttggtgtttaaagaaatacaaagaaaagaaaaaatgttaaactctagtaggaggatcaacatcatcatctgcttcattctctcgtgacatctcttccaatgattttcctttagattctggaacaagaaaagtgaataacaatccaaacagattaatcactcccaacacaatcagagaattcttcattccaatcccagcagggtacccagcatcagtcttcgtcttgtcctggttctgcgctgcgtaaaggaatccaaaagctccaacaatggccccagcctttcccgccgcagccgaaatcccgtgacacgtcgaacggaatctcgccgggaaaatctccgccggcacaatgaaagtcgtcgcgttcggtccgaaattggcaaaaaagaaagtcaatccgtacatcacaacaaatcccacgtggtttccggccgccgaccagtggtgataaggcaaagccaaagcaaacataaacaccgtcatgaaaaagaacccgaccacctgaattttgaaccggccgattcgatcgatcaaggcgacggtgaaccagtaaccagggacagtaccacacaaggctatcaagaactgagccctaccaatcttgaaaagctcatcgagagcgctcatcgtcttcgccgccggcagccacccgatggcgctgaaaatgtccttttggaagagattttgactgtagtaagccacgtcgacgaaaaaccaagccgcagctgttccgagaagatgcaatccgtgtcgtttgagaaacttgctcgagaatagcccaaacgacttgtcgtttctttcttcgactacgacaatagaagtgtctctgtcgttgtcgttttcattttcgttcggtatatcgacttggagaactttagccatatcttgacaagccttcttttcatctttagccaccaaagccgtgtaacgtggcgtttcagggagagtcatacgccagtagtaagtcaaaatagccggtaacgcgccgagcgcgagtatgattctccacacgtaatcggcttgagctggagtagaacctaacggatcaaccgaataaggcggcgcagggaataagctccgaaaaatacgggagataaggattgcaactccaccaccggagagaattccaaatccttgcatagcgaaaacagcggcgataaacgcgccgcgcgtggttgtggaagagtactcggccataatagtagcagagagtgggtaatcgccgccaataccgaagccgagccagaaacggaagaagcagagagtgatcattacagctgttggtgagctaccgaaggagagagccgagccgattgagctaaccaccattaggatgagagtgacgccgtagacgcgcttacggcctagcttgtcgccgagccagccgaagaagagctgtccggcaagagtaccacataaagcgacgccgtttacggctgcagcgacgtttggagggagagatccgggtttggcggaggagggggatgtggtaatagattcggcccaagagttttgtgacgagtgagatacagaaaagatcgtaagcgtctgtaaagaatcccattcctgttataataacggcttttagatggtaacattggaatctggctctatccattacgctgaaattgaacccattctcatgatcggttctctgtactactacttcttcagtagtagtagcagtgggagtaaccgccatggctaatgatattaatgcttttcttctttcttttcttttttctgattgtgaatgagaaatactaatatgaggtcgtcgagggtatttataatgtttgataatttttttcttaattatcttttttcgtgatttttcttaatagttctagttagagatgtttcttttttcgtgtgtaaaatctggagatatttcaatgtgtgttatacttagatattaatttaaatttaaattttactttgatttctgttagtttaaatagataaatataaaatagtttgttaataatggataatcgattagttgttgaattgaattactttaaaaaatcttttttacaaaaaaaaatatattcggatatttgtcatgcttaacctacatatattattattattattt

SEQ ID NO: 304934 - DNA, 1773 bp, Cannabis indica
taaatgataatcatctctatatatatagtacacgcgaccatataacaaccaatcatatatatatatatatgatctctatatatatagatatatacatagtggttgtatatatagtagtacgtagtagagtaattaatatttttattggataatatatgcatgcatgcatggctagagttttgatcgacatgggttttctaatattttactttttatctttgagagaaatatgaataattaataataatatagtaatagaggtaaataatgatgatgatgatatatataggaggctatataaaaaatatatatatatgagtaaatttatagtataaataacttaagtttaactcttatttgtatattataaatacttaagtttaatttttgacagtaatatacataagttatatttccaaaacttctgtacttgactgttaagtgtcaaattaataaccatgtgacagtttctaattattcaggtcattaaatatatattttttatttaaaaattaatttaaatatattaataaaaaaaaatgacatgtggatattacttgacatttaaggaacacgtttggtatgaagtttagacttgataagattgagaatataaaattttaatgatcaaagagtttgtttgatgttttccaagtgaattctacttttaaaattaaaatagtagtaatgttaatcccatccaacacttgaattttatattcccttcatgtctactcctccaactcaaactcacataacaaacaacaccttattaaataacatttgattagaaggaataaaaacgtaattagaatataaaaatgacaatattatatattttaaaataataaaaattatttcattttcattctattttttcattacgtcaaactaaacgaaataagttaataattaacccaaaaaattactctctatatataatggatatgtataagtatatttataaataatgtgtgggtaaagaacaaggcaaaggcaagatgttggagttggtttgttttgtttgtatgtgttatgagacaataataagccatatatatgacatgtcctatgtgtggggtccacttatgtctcctataatatatatatatatgtatatatattacatcacactcaaccatttacattttgccacgtccaaaccatatagtatatcctccgacaaatttatataaatttgactatatatattgaaacaagtttaattaaaatgaatgtttaaaataactcatttgaggagttcattaaaagtcaataaatacataatatcctatcacttttggcaactattataatctaattatatgagttcaaaaaccataccacattaatttgttacaatgtaaatatttattctatataaaatgtagttatataataaaatttttgatttataaaaattattgagttgatttttttttatttaaaaataataaattattagatgttgtcacgtaaattagtcatctataacaaaattcttaatttatttttttattaaaaattattttcaaattttaatatttagaattagttaaatgttaaattttaaatattattttaaattaaatttgaatgttttgatagtttaaccagatgatcatttttattaattgcgaaaataaatttaggacgaataataatttttttaattactattataaagtgttgcccctaattttgcccaatatatgtggaccaatcagacagggacacgtgaatcaagcaattcacaatatttgctaagccttt

SEQ ID NO: 304935 - DNA, 871 bp, Cannabis indica
gcataaaacccaacagttatgtcttcttgattcttctgatttttctttttacattctctatgacaatactagatatacatgttttctccttattgttagaatctagggttcttgaatttattttgaatgaaataaacccagaacctgattattgagattgagtcattgtatgatgggtcattctgtgtaaaattacaccttgtttctctgtttttgctctggaatcccgctaataggatgggttttctttaatttgatctctttctcttgcctagtcggagtatcttaagtgtttttctttagaaatacattctagccctatttgattcctcacctctctattgttcttcttttgtagataagcccaggtgaattcgaggaggtgataataggatagacgatgacttgctccaagttctttttgagtgtcaaccaagactctgcgcaacaaaatcgtccaattcttcaaatgaatcttcatatacatcaagtttttctgagtgggaaggctcaagtgattccctagaacctgagattaaccactatcattgccctgaccaaatttgtggagaaaggtatgaacgcttcatttgggagatgaacagagtttggagataataccttctagcctcgtggtcgtggacctatagggtccgaccaaacgttcctcacactctattgaggttgagaaagtgggcaacatcagcttgctagattggcagatgaataatgaatttatgcaaataatttaaacagacacacaaactttatggtagttcactacctatgttgcgatggtaattaagctacatctattttaattttttatttctcacaagaattacaagaaaatgttggattttatgcccta

SEQ ID NO: 304936 - DNA, 1698 bp, Cannabis indica
ttaaatgacttcaagaaggagttgagaatacatgtttctttcatccttatcttcaagatattagggtgaaaaataggatatatttagtcaagaccgaagagggtattcgggttgataagccaacagaagttacaacagcgtttctttcttaatattagaatctgttggggagtaatttgtaaggaagagttttagtcaacatggtagatgtgagacaagggccactcgtcacagagatacaaaactgatggttaatggtgcaattcactatggaggaggttaaacgagcaattttctctattctgggtttaaaagctcctgggcctcataatttcagcaactatttcttcaagattgctaggatgtagttgggaaggagataagtgaagctactttgtctttcttcatacgagcaggatcctaaaagaaatcaactcaacatctcttattcttattcctaagagtaaatatccaactttgtcagtgactataggccaattgcatgttgcaatgtgatctataaagtggctacaaaaatgatttgctccagattgaaaactgtgctgccagatttattgtgaagaatcacgacgggtttgttcatggtagattcattgtgcataatatcatgatttgccaatatcttatgagacactatggaagaaagagtttgaagcctagttgtatgattaagcttgatctcacgaaagcttacgacactatggaatgggacttcatagaagagatgttattacgacactatggaatgggacttcatagaagatgttagaggctttcaaatttccttaatttttaatggagagttgcatggcttttttaagcaaaaagtgggttgcgattaggtgacctcatgtcaccccttttgtttatcttaggcatggagtacctttcctgcataatagttgggaaaatgtctaactttcaattccacgaaagatgtggagatcttatgttgaaccatctgagttttgcggatgatgttttattattctgcaatggtgatttcaaatcagtttacttcatgttacaatgattgaaactatttttcaagacctcgggtctatttctgagtgaagcaaaatctgccatgtattgtggtggaatgaatgaaagtgaagtgcagcggctgattgatgcttctggattttaaaaaagttacttgacatttcaatattttggggtcccaatatgtgctgaaaaaatatctactcatggttaggagaattagaaggtggagcactcaaaatctttcttttacaagaagaataactcttattaatttggtgcttatctctatacatacatattggagtcaaattttatttattgtgaagaaaattatgaaggagattaatgttacatgttgggtactctggtagcatgggaatgcttatagctctactcacggaataattgcttgggagaaaatttgcaagcctaagaaggttggaggtctcagttttagaaatattttggcctggaataaagcaacaataggtaagtatgtattggaaattttaacaaaaaaaaaaaagaatgacctttaggttaagtgggtcaattgtgtttacataaaatagcagaattgggaagactatgcttgtaacgtccccgcttcaagcctccattgggcccttacacccccggaatgaatggctcttatacacgagtacgtca

SEQ ID NO: 304937 - DNA, 5125 bp, Cannabis indica
ttggagaacgatcgatgatcccgggcccttaagctttccctcttcgatagtttattatccagctactaccggggcttgaatcacttagtttcgggttaataatcgaagaaattggataggaatggaagatggtttcgttgcacgaagaataagggagggtttcgtttcgttcgtactattttcttataagtttttttttaaaaaaagaaaacttgagatatatataataataatctaataagtataaagtttttaattaaaataataataataacaatattaataataatcagaataataataataattatattatttttactatttcttagcccataatatataataaatctttaataattcaccattaggcttatcgggatattacaaccatcccctcctgataggaatttcatccttaaaatttacctgagcaactcgagatactgctcctgcatttatgactctaactctcaagttgcttcttccaccttgttgtttctctacaacacttttaactagtggaattgtcttactctaaagttctttctctttccagtccaaaacctggataggttgtttcctcatataataaatctatatgagtttaaaatcatctcagcttagaatataggtcgagtcttatatatattttctcaacatggaaatgtgaaacacattatacactccgaataacacaggggttaaggctaactgataggctacctggcctacttactttagtattataaggtctaatgaatctagggtttaactcttctttctttgtatccctttttataggtgatactcgaagaaatataaaatctcccacttgaaactcgatattcctatgctttgaattagtgtagcttttctttgtagtcaataaggtgactatacgactcaaattaaccctacacccttataagtctcttggatcctttccatccatctcattatcttcttacctgtgctactccactgaataggtatccaatatttccctcgtacacacttattgaagtgtctaatcaatggtacatttaattattactttagtcaaacactccatcaggacagagattatttcaagatactctaacctttatcatatatgcccatgacatatgttctagagtcttattaattcatttagattatcaatctgtttgagaataaaggttgtactatgactgctttaatatctatggttcttaataaccttctttaatccttaatattataatcacgagtatcaactttaaaactttacaagattaactattctttcaatgtataactcaatatccttacttattgtacaaattatctacactagtagactgtatgatgactcagtatattcaaccattattacttaattcaattcataagatctcatagtacaaaattcataattacatcttcttattcttcctatggtattccccaagccaatgtgattttaccagttgctgatgtactactttaacttaataacaagctgaacatccacttttaatagatatccaatgtccaattatagcatcccttacttattattacattacattccttcctcttgataatttttggaacgactactgatcgtgttttctaatatgaatctttctagcgtactttgttcttatttgtacaccttctaagatgatttctcgatagatttcccatattgagataactctaggttaagtatgcttaactctaaggtatgcttatggtgggttattagacagaaaatgcgtccttcatcgttcctacttgtatttcctacttttatcccttccttaattaaatccaattttaatcatttccttcatttgcctttttcaattctttgtttgtgttgtttacttaaccatgaagatttcctacattgatgtcaatttgaacctccttcatctcaatttattccaacttgtatcaactcctcatgaactgatataacttttaatttcccattcatttatatgtaaccaccgttacaatgttatttgatgcaatatatacaatagaggaaacattactcataccgagtactcatagctaaactaggagtacctgtctcccgaattctcaactaataatatttaatcaaagatcattcttgatcttaaagtttctttcctgcgtttggtagatatcttgataatcgttccaaacacatttagaaatatacagaccttaagtacattctttattttactgaaaatcccttggtatgaactaccataccaatttatagtaagtctcccattcatggtgctgattcatcaacatttaagactcttgtattcttcttccatcattattactaagatttcactccgtggttcgtacactaccattgcttccttacaaacaatactatcatactggttaaccactctaaaacttatattacattcaattaatagtcgttgtttaataaacaacctattctgttatctaataatttaaccgacatttaataatcacttgaacacatgtctattaaattgcatctcagtttataagctttttccacattttgggtgagcatacattttcattactgcctaataagacaatcttttctcagaatttgaatggtcaccttgtatgccaaattgatctgatcaaatattaaggtgttttctaccatcaccatattaccatgagtaatttgaataatattctttaccttagaaacaccattgctctccttgatgttatgttatacactactagcctaatcatattccaaaaactagggtttgcctcatgcccctttcgatcttattttcccctggtagtgagtagatcaatccacataattgttgccttcaattctcttaggattccagacaatactcataagttatcccacctttactaacactagatcacctctaggaaaaaagattatgttctccaaatcaattagatggatgcctccattagctactcatgttatattattccacttgcgaatatcaaaaaaatttaactcatattatcatttctctagtttgtctgccttgttagatgatttattgcaaaataacatacatacacagtccattcaaattcttaatatccctatttgaatgtacaatgtttaacatcaacataaatcgaaatagcaaacataatattacccataaaaattttgaccggagttagtcaaaggactgatacttgtgttcatttgagtcataataaacatatgggcaggaaccataaagtcttcttctttaacatcagttttccttacttgcaggcatgttcttttcagatagcccactactccacaataaaaataagatatggctctacattggcttaaatggaatcttttaaatctttgacactcaggatagggtcgccatttcttatcctttccacaatcgatatcctagtcaccttggaaccttttgttctatccaataactagtggtttatttagtttttgcttcttgatctgctcataagttggctccatatgttttaccacatctagtggcacaacaagaaatctgggtggtacaagaataggtgtaagacgagcctattattctttcaagtctcaaatatgttccccttattgtgtaattatatcttgcacagaagtaatcacttgttcccaatattgaggcgatagaggattcttttccattgatgtgatagaggattctcttccttaacatctacaccgagcccagacagctcgctagtcagactgtttaattgccctggctgcataacttaacacacctgtaatctacatcttccagccatttagaactcaactagatattaatgctaataagaatatccaacacaatcatcacatcataattatcactatacaacttttctagcatactctataatagtctaggcaggtaatccaatagcaaataatataaacacttactaaccataagtcaacctgtcttcgcaacaaatgtacatattcgaccagtctttaggacctttaaaacaatagctggtctgataccaagttgtaacaccctaatctatatggacgccacatgtgattttataaactagtttagtactaataaataaattaattattaaaatctatgataatattaaaaacttcaccaaagtaaaactcaagtaacggacatcataaagacactagaactttgttccagggatccctattataaaatttttataaagggactacatgtataataagttaaaatacaaagtcaaaaaatacacagcagatacagtttaaaacaattcataggaactcggcacacaggccaataggatcaataagtacattgttggagaagactgtcacctcatggctactctaacttttccttgcctttacctgcgccatagagaacttgtgagttacaaggactcactaagaaaagtaataaaagaaaatacatataataactaattatccatttcactaatataatttaattaaacaataacattccaaagactatataatataaccaatcgtatatccgaaaataataaggaactatatattggattgcctaaacaggcaaggttgtgtcaaaatttgagactcatatatcacatcaccatatcacctaatcaggtgagcccgtgctaaaacctgacccccatatatcgcatcgcctaattagatcatccagtgccctatcctggtcaccaatatattgcatcacctaatcaggtgagcccgtgcgtaaacttggcacccatgtatcattattgcctaattagacaagcccgtagccctaatcctagcagccctatcctagcaccaatatatctcatcacctaatcaggtgagtccatatcattgtctggcatccatatgtcactgtgctacctaaataggattttcgatagtgagaaacctaacaatgttttcagtttagagtcatgacttatcacaattgtctcacaggaataacccaaatactgctccccaacatctatatataacattgcctaatcaggcaagctcatgccatagcctagcatccatatattggattacctaattaggtgagcccgtatatcacatttcctaattaggaaagcccatgccatagcctggcatccatat

SEQ ID NO: 304938 - DNA, 5384 bp, Cannabis indica
tttagtatgcaccttaaactttttgttgtgtctttttctttattttataatatatatagattagatttaaaagttttgaggatgaatagaattatttttgggattatattttattttccttatatttatttttacaaaaaataaaaactaaataataattgtgctatttaaaaatatctctcaaaataattattttatatttttttaatcaaaattgtaatttatttagtcaacctaagaattttgtgtaagtgttttgacaaaataaataagatgaagtcattttgattccgaaaataatttaaataaataatgattttgatttatttattgttattttttctttgccatttaattctgataattaataaagactgataattatttaaacagatgtgtaaagtaaaacaataacacagagatgatgtcatttcactctactgtataaaaaattgtcacataataaaaatagttgttagataacaaacatttaagtcaaaaagtattaaggaaaaattaattagataataacaaatttgtgctatttaactgaaataaacagttcttaagtatttcaaaatttataatacaaaatttcttatatcaaacgtaaaactaaatctttttcattattgctttgttaaaaaaaacttcattattgctgaacaaaataatattattattttttttttataatttcaaaatatctgagaattaggtaatttatattttaattgtatatatattttcaaagaaagagacgaagaatacaaacaaaggtagtccaaatgacatgtgtgtgtctgtatcatattttttttctttcaccataaatcgttctcctgcaaattctgcctcctcctatgtaatatttgctcttatatactaatttaatatattaataacacttatttttataccagattacagagaaaatggaaacccatgttccttcacatgcatgcagacatttatatataattgtctgtattacacctaagaaaaacaagaaaagaaaagtcttctttaactaaaaataaatatatatatacatattcatcagtactagcagtactgttcactgttcaggtttaaattaaggaaaaaaaaggagcaaattattatgatttttaaattttaaaaaaaagactaaagggagatacattaaggatatgagaagaaagaatattagaaaaaatccatattgtacttaaatagcatgcatatgtttatatttaaaaatatatttgtaacagtcaatttatatataaatatacacacacataaatacccagatgtttttcaggcacttaatggcttctttttttagcttaccatattaccagccatgcaagagttgtacactttacaaccaaaacaagaggtagagaatggcaaaatggtaattatctgaaactctaaactttaaactaaaaaaattaaaaaataaagtacctactaattaattattaaaaattcatttctatattattaacacttaaaattaaaaataaattgataaaataatgaaatagatttatctttaattttttttatattaagacataaaaaaataaataaaaacaatacctaaaacaaataatatttatataaaaaattaacgcagaaattgttagagagacatacatacaatatacatatacatttacatataaaatatatatatacctctcgataatctcacctaaaaaaatcttacattcccaaagttctaacttgtctcccacattgaatcatcatcaatatatatatcattaaaaaaaaaaactcaacattaataatgaagttcatgatgattaaatactaaaaatgcttttaataattactgacaagagtttcaacccaaagaagaagatcattcacctctgtttctcatcactgtgttagcttagctcagagctaaaagcttaaacctttgtagcttgcttttaatatataacttaaaaaaatcttctattttatttatttatttattttttacggcataaagaggttgttgccacacttgcatctccaagcttcaggataatactccagaggaaaactcagaccgggttgaatcggtacatgaaccggtttacaaggcgaacacctcccacattttgatctacatgtcggcggagatgaacccggtccggccagtctcttctctggttccaaaactccactctttttaacaattgtactactactagtagtagtaatacttcttctaattccttgcccacctaacccaaaaaaaaaagacaaaaacagagaagaaattaataaatcactgcccgagtaaaaacgacgtcgttagtttgctaatgggtttcttcttgttcatataaacttaccgatgacctgtgtcggtacgagagctgacgcagaagcgaacaaaagaaaggtaagcgccgtaatagtagaaagccttagaaaacgacactggtggtagttattgtaatgtcgttggtggtgttggcggtggcgcagtacgcccatcgccgagccggagtacgtggcgcaggttagcctctgagaatggaagtggaaagaagaagagaagagaagaagaaaataatgaattgagttttcttttagcagagttgtagaagagagtccaagtcaaaaacagagaccaaaaagatgggttagagagagatagagatagcttctgtttaatattattattataatattatgtcaggggttaaggagggagggagaaaatggagccctgttatatgagagggtgaatgattgaatccttgataattaccataaattcctcgcttttatgattatttactagaatgaccctaatatcgtttcaaggagggagtagattattggggggagatggtagagttgtaatatttgggaaaagagaggtggaattttggagatgaaaaacaaagagggacagacagcgcacgtgtggttgcgtacgtgtgggggatagtgagtaagaaaggaaggggaggtggggggagggtgagtgtatgagggtggtgtgtctcgtacgggacgaacatctgaatcaaaagcttaaaccataccccactctctctctctctctctctctcttccccaccattattgatctctttctctctctctctcctattaaattcgggttgggccccacgttacagagagagacgtcgttgttattttctgatttttgttttttatttcaccttattaaaaaagaaaagtaaggaattgggtcaaaatagaggaaggaaggaaaataatataaatggtgatgagtgagtgagtgagtgagtgagcgagtgaggtgtagggagttgtattaaatgaagccgcatgatatttgtgtaagtgagggccaagataaataaatattaaatagatagaatagtgtttataaagtatagtagggatttggtaaaatatggaaaatatttgatttgataggttttgagtttttgtttggcatttaaagcataagaaatttttatttgtacatatttagcgtctgtactgtgcattttcttggtcagggtctggttttggattagacaaagtaatgtaacaaggtttgagaaaataaaaaataaaaaaaaataataaatgtcttggttttgctttgtcaatataaatgttcattgtgggcctcttggtataaattgagtgaggacaagttcctaaattgtaggcaaagaatagggctcttgaaattgaaaaagatgaagctattgggcccccagattctttaggcctgacttgaaatagtgggcttttttatccatttgagtgatagtggtggtaccatgcatgcttcttgcttctcttacacgattatgttgacactttgattgttgatagaacggaacttgaaaaagacacttcacttgaatactttgttaagagtatagccatttaaaagaagaagaaaaacaaaaaatattgaaaaataagttaacccatacattatttcactttatgatgtaaacttctcatcacttaacctaatggctaatgcattatttgcctaggcaaataagaggggatgtcatttcctactacttccattttatttatttatttatttattattactattattattatttcatggtgaacttgctcaaaattaaacacggactaaaactatctccaatggtaaaattgaaatttaatgttaaatctacactaaaaaaaatattatttcgctaatattttcttttaatttcaactactatactaaaaaaaaaatatattttttattattatattattttattaatatagtaagaatattttaatattaaatattcatcaaatccaataaattatattagtaactattactgttacttagaatctctcctaaagtggcagttccggacgaaactaggtggcaatgggacccacactacaagatacgtcaccttaattactctcggagtctattatttcaaaagaataataacaaattagtcatctccgagagggtctagctggattgtgagcatctctcgtcttttctcctctgcaagagaagtatacctggagaagagtacgggaggactaatgaaatgtgacatgtcactcaaggacctagacacagtatatgcatttaatgcggcatggaaaaaagcatcagaagccttactttgataagcgtgtttaagagattaaacccatcatttcctaattttactagaccccatacataaatcaacgtctacataaatgagtcgttaaatcgtaaataagagatgagtcaaataccactaaacacttgtagacaacccaaatccatcataaaagtagccaattatgttctaaaatcatatttgagaaattgtgccaagtatacctttaccaccattatgagcctataaatacctcaatgataaacagaactggggatgggtcgaaaaagctctataataaatactctcataaatatagtgtcgtagaccaaggctcatgaataccccaaccacgtaaaaatctcctcttctaatgcttattaaatacttcatgcaactttaattattgactgccaaaaactttggtcaatattttagtactttcattcagagttgtaggaagacttacccaaaaaaggaagtcgtagatagcatcatagtataatggtgaagacaagaaacacttcacgtccacaataactagatgacccaaagaatccaaaggaagaagaggcggcatctatggtggatgttgaaggagaaggagacactaatgatccagaatcttcaaactaagaataatatgaagattacgatgaagacagctatacagaattagttgagctaaggtagaaggctgctgaccatgaggctgagttggcagagcaaaaagagcaaaacaaaaggatgcaagag

SEQ ID NO: 304939 - DNA, 2241 bp, Cannabis indica
ggatagtacgacctgtggagaaacaagaagctcacgccatataatgagcgcctctgtttgcagatcgtttaacaaaacacacagaaacaaaagacaaacgagtaagcaaaagcttacaatcagaaacaataagtccaaattgagaaggcgtagaaagagaacttaaaatagcttgaacacaaactaaactatctgtctcaagaacaacatcaccccaagaaaaactatcaatccaactaagagcctccttgatgccaatgatttcaaccatctcgggttgcacccgaccttcaaaagatttattgaatgcagccacaattcttccttcatgatcgcgggctgtacacccaacaccatagcgcccccactgctcaaaaattgcaccatcgacattattattagacggttgtaattaatagttacatgaaatatgtaattataattgttacatttattttagtaattagatcattattattagacggttgtgattaatttaaaaatttactaaacataattaataaattacttgtaacccctgatactaacttgatttatttccttaaaaaaaaaaagttataaatatcaatttttgaaatttttttgttaaatactttaattaaaaattaatttattttaagtgtataattaatttaagtttaaaaataaaattatacttattagtgatatattatagtagatcatacagatgtaaggatcatgttatatttttaatgtaataattgaatactatatattaatcctacacgtacaattctctctaaaaaaaagaagaagaacagatcctacactaattccctcgacatttgcattattaaatgagaaaattatatccagcaaaaagaaaattatagttcacaaattatctctctcctttctttttatcctgatttattatttgtaatggttatcaattatgtatagacatgctgttatttttcttagtcaaattaatttaattattaattataaatactacagttagaattgacattataaatatctatatatatactagctagtttagaaggaaaccaaattaaatcgtcaactcttggtgaaagccaaaagaaatggaaggaaacaaaaatatttatatatatatatataataatttattcttgatgtttgtaatatgtggaatggtcaaaagttttacactgatctttgcgtgtgaaaccctagctaggtagaatctaaaagtatcaaaagagagagctaattaatttctatggtctaatattaattaatcactatttttagttgtatatataaattataaatgaattacatccacactgccactgaactggaatatataatattttatataatatgcatgaacttgggtcgtcttccaaattccaattagtgcttattaaattttgtacgtattctgtgattcagcaaaaatgtatctcaattgataattagaaaaatacatattaagatttgctcctggccctttcaaaattcgaatacttcattatgttgtaacaactttttttttttcatatatttatataatatatgtcaaatggatcaataaattatgttagaattagaagaggcatgagtactaattatctcacaatcaataaattatgagagaagtagctcttaaatgtcatatatggtattattttttacacatttgtaatgtgagattctataatactggaaacggaatttttgatattttagtttgattagcacgttcaaaaaattacaaatttattttcgatacgataaattatttaaaaaattttaaaaatttataaggataatataatattgtaactataacaaacactgttacgaaaaaaattgaaaaaaaaaaatatttcagcatgtattttctaacatgaaaattgactaaaaagttataaataaaatattgagaatactaaggatactttaaggtatcaaatataataaaaggtaatatatcattattaatgtatattaatattgaatctcatatattataatttaataaataatataaaaaattactaatcataaaatgtgaatttgaattgtaacaaatgacaatgctcatactatatattagagtgtggacaaataaatatcagatgatgcgttagttattgaagatttggcgcttgtagtaaagttattaatttttgagaaaagttattaattggaaaaagaaagaacacattataaaagggaaatttgattttctatacttagaaa

SEQ ID NO: 304940 - DNA, 1989 bp, Cannabis indica
tttgctgatgacagcgtgcttttctgtcgagctagtaaacaatcatcaaggtctattaaaagatctctcgacttgtacactcgagcttcaagacaatcaatcaaccccataaaatgtgttctatctttttcatataatgcaaggcaacaagatcaagtcttcttccaacatccttttggtatggcaattcaaccatgtcatgaacagtacataagactcccctcctttgctgggtgcgataaaatgaagctctttggtggcatcacagataaaatttggaagctccttagttcttggaaagaataactatttgcggttggtggtaaagaggttcttttaaaggctgtagtacaagctattcctacctatgccatgagctgcttcaaattacctgtcactttatgttgtcaaatataaagcatgatggcaagattttggtggggttcattggcatcagggaattcaattcattggaaaaattggaatttcctttgcaaagctaaaatacaaggtggcttggcttttagaattttatacattttaaccaagctctattggcaaagcaagcttggcgtcttttggaatctcctcactccctcatcagcagaacttttcaatacagatacttttgaatggcccatttttactgctgatttacgtacttgtctatctttgacatggaaaagtattatttggggaaaggagttattgttaaaggggctgagatggagggtaggaacaggtagtaaaatcaattgcaaatcagatccatggatctcaggatacacttgttttacaccttatttattcaaaggctccaattcgagtttgatagtggttgatttaataaaccagcatcaacaatgggatatggtggctttacaatccaatttctgccaagttgacattgatcgcatacgcagcattccttcaagccttttttccttcaaatgatacaataatttgacataattttttcacaggaaactacacggttaaatcgggttatcactttgttgttaaccttgctgaacaagaagacacaaacaataactcctcgatagagcattggtggacaactttttggaagttgaatcttccatcaaagattcaaacttttgtgtgaaagcttttctcatggcgctaccagttgctactgaacttcattgaagacatatagcctcctctcctcgctactctctctacaattcccaccatgaaagaataaatcatgctttatttttctgccaaagagcaaatgatgtgtgggatctctcgaagttaccaattaactttaatctggttggtcgaaacacatgtgaggatttcctgctacaactttcagccaccctctctacttcacactttgaacagttcattgttctttgctagtgcatctggcttgaaaggaacactaaattctatgggaatgttgcaaaaaaaagctgatgctatcttcctatttgaaattcatatctccttgaatttcaagcaacccgtgcaaaaattcaccagtctgacccacaacaaacagcgttgtcttgcatccaagcacttttactggtttcacttctaagcctaaatggttggttccactttcgggaagtctcaaaattaacacaaatgctgccattgacaaatcaaaaggtattattggtgttggcattgttttaagaaactctgttgtttctgttgttgcggctttatccaagcctctttggggctgtctcaaatctgaagaaatggaaatattgagcctagctttaagtctacaatggctactatcacttaatttgtcagcagattatattgaaacggatgcactcgtggtggttcaaggattacaatatgcctatttatttacgagaaacttacaaaattactggattttgactcaatctttacaaaaatactgccacacggcaaaaataacttttatactgccttgggacttttttttcttttatactgtagcatcgaaaataaaaa

SEQ ID NO: 304941 - DNA, 2955 bp, Cannabis indica
atatcaaaatctgaggagcataattttttttttgagagatgaggagcatgatttaatatataacaatcactaaaataataaaattaaatgaaattagagaaaaatgcttaaatccaacattctcaatagttcaggagcatttcaacaacctttaaaattcaggatagatgtcaaagttcagtgcgaaaatcctaaaaaaaaataaataaaccaaagccctaaaaccgaactctcatcgtttttattcttcttccttgttttcttctcaggtaacagcgtcttctcaggcgacggggttgaggtcttctcttcactggtgctcggatccaaaagcccttaaaacgaaaatcaatttcagtttaaattcgtaattttcactttctccaccgttcgccgcccttccttctcacctccgaataccatctccgttgactcgcgcacctccttcccagctgcccagtccactcttaactccggatctccctctcctcttgtgttcgttgccatataaggtattactctactgagctttgggtttgaatctgctctagtctgtttgttgaatataaatcatttcgatagtaaacactgaatttgattacatgaaggacgtcaagacatatcttctagatatttttttttttttgtaagaaggtagttaagttttgatcttgtgctcaatgaaaatattacaaatgcctttgaaaatatgcatttgcattgaagaacacttgtgctgtcaaatgcacattaatcttggtgattagcttagcttagaatttttgagtgaacaactctatattgtggtgcattgtagaccactactaaggaaaagaagaggttaagaaaaagggatgcaaatcagagtatgggaattgtaaacatgtctaattgtgtatggagcattgctctctctttattctatgtttggtaaggaggaaaaatgagaggaaagaaatcagatgatgggaaagtgaaaagaaaagataagatgaggttgtttgttaagaatgaaaaatggaaggagaattttggtgtgaaacccaccaaagtttttctcctagagaaaactctccaacaatttagtataagcaaagtgacaaaaatatttttacaaagaaaatattaatactttttttttaaaaaaaaaacaacaaggaaagagatatgttttaatttctttctttctaattttctatcccttgtagattttctttctttcctattttctttcattgctaccaaacatatgcttaaagtatgttcctttgctctatttgttgcttcaaaattgcctaaaggagtgaaattgatattaccaaatccctccagaaagacagtattaccaagatatgtaccactgacttgttttagatgtattctgaaaaatccttgtcctatattggatattggtgtatgatagtgctaaacatcataaattacttgatatattatctgcaaataattttactttcatgtcttttacagctgtgttttcaattgagaagtggtgttatctagctgttaatgaatcagtgaaaaaaggagcgaaaatggtggtagttcgatctcaaaaatggggctatgttcgaatcattgcgggcactatttttggtggcattcttggcttctatgtcatggaccggctagagaagaactacaaggagaagatgaatgagagactaagaaagtacgagcaagaaatgaagaagaaagaggagaagatggaagagtctctgtaattgtttctggtagttgctgagcaattgtcagaagaaagacaactcaatattgaattttgtttgtctttcatttatagactattgttgaagaaatgcctaataatcaagttttcaaaatctccacaaattcagcactgtcgaatcgatggttcattatcgggtaaaaggggctcatttggtttgtttctatgctacaagctcgtcgttttagaaccatttgagttaagaattctgaagtcaaacttataacatgtaaagttatcaaaacgtctgaatttgatgccagaaacttggtctctatttttggggaaattttctcatgaattcctccagaactgctgtgttcgccacttttggcctgattctgttaggaattatgatgctgctttgttaagtcggttttttgtggcatttttggctcagttaaagcttcgattcatctatgtcatcttgaaatatatttttccttgttttgtttttggtttatattttaggctagagttacttattaatcttgccttctgtaattactttgtccccaaatgataaaccgggtggagacgaaatcacactccctgttttgacgggatccgtttagtattttattttatttttctagtaatattttatattttataatttatgtttatattttttttagtatattagtatcatttttatgaaatttaaattgtgttttgaataataattatgttattgaataataaataatttttaataattaaatttttatatagtttaatatttttatatatttaaatttttattataaattttatttttttattatgagatttcccgttccgtctaagctcctattaagggatttctcaccctatctcgatggaaaataaacggatatgaggattaaaattctcaatgaggatggggatttctcgcccgtctccactcctattaagggatttcttgcctcatcatctattggatagaaacgatccaatccaatagtttattggatcggttcggttgagcctacgatattggattggatcggttggaaaaatctaatatctaatgtgtaattggattgaatctggatgggtctaaaaatattggatgtgatctaatgaacaaccctagtttgatttatattaaatttagggattatttcacaaatatacaaaacaacaaaaaaattacaaaaatacggttcacagaattttaaatattt

SEQ ID NO: 304942 - DNA, 3348 bp, Cannabis indica
cataaattgtaagagattctaggtataaaaaggtgggtcattaattaaaaaaataaaaaaataaactgaaaaggatttaaatttaaaaatgataaatattttagcttttatttagttgggccctgtgcaaggttgggccctgtgcaattgcacagcttgcacaaggttaaagctggccctgatctcaggattgtatctaagagttgacgtgtctcaattttgtttgttagaagttatttagcaagtatttaacaatatggatcatccacatggggctcgtatctatcatttctacatctttctatcagtttcgtagatgcttggctcacttaacaccttcaatactggaactagattcaattaatctaagtcaaactgtgatgtcaattttgctaaggcatcaacattagagttcagttctcttggaacttgtttaattttaaaataatcaaacatttccaacttcttccaaactttttatagatacttggccatatttgtgccttttgtttggcattcacccaatacttgatttatgaccagctgtgaatcgctgaaacattgaatttgcttggcttttaaggtttttgtgattcgtaatcctaccaggaaaacttcgtattctacctcgtcattcgaagcatcgaattggaatctttattacctttattacctttttcacattccctctaaaaatctctaactatgccatctaccttgttagtgagtctctgggtaagttttgtggtctgcattgagtaaactagaagagcaaaatcgataggcttaatcaaagtagcccgccttacctttgaaagggttttcaccttccacccttgaagtttagaaacaaggttctccaaaataagattgaaattaacatgttttttatgggatctaactaaagggagagtctcacataattaatattaattataaaaaaaatctatcaagatactcccagtgctccttggcttcctcaatattagctctccccattaattctactcagttttattccttttattatcccattgttttaagcctcctccaatcaagacaacacttttgctgcatgcccaaatgaaaagatagggtgaaaggaggttaccttactaatgccacatttagaaaagattttactcatatttctcccattcaaacaaattaatattcaataatgtcgtggagatatattggtagacccagttgtagaaaatcagaggcaccttaaaactaaagagcacacggttgatgaactgccagctcaacttatcatacttgtaagaactttgtttcttaaatttaaaataaataaataaagaccagctttatgtttattagttttctgccgttaattctaactagtgattttagttaaaaaataaaatgagggatacatattcggatattcggattacagttgtaagttattagtataacttagctatttatatatagaataatgccctacatacatatatatctataccaattaatggataaatatttcaccaggagaaatcagaactacaaatctaatgtggcgtttggttggaggtaatgaaatggaatggaatggaatggaaaggaaataatttttattccatttctttatttagttgcattttaaagtattggaatgatatttcaatagaatgctctttccaccattttggtagaatgactattctattttaaaaaggaatgaatgaccattccaatgtaacaagaaaaaaaaattaattatttttttatcaattttttttatgcattttaaattttgttccattctattcctactcctattctcattcttattcctcccaatcaaaaacttcagttgtagtggtatattactaatatctctgtatattaataaatccatatatagaaggaatatataatacattatattgaaagcattttgatgtaaaatctagttggcaatgtgcactaatcgatgactctcatcctcgtcggtaacccttacttagatttcactacccacttgacctttcttttgtattattaactggccaccataaaatcataacgttttatagttaagattttttttcaatcttttttaatcatgaacactatttattttgagtattaagtaataattaaagaaatatataaataaatggaagtatttagttggatcggggctaagacaacgtgtgtccaaatgctgccataatagattcaattactatatatgtcaagaaagctgatatatatatatatatacttattatttatatgtacgtatagaagaaaaaccacagtaatagcgtgttgactacaatttttgatgatccaactacactttttttaagcgtttatatattacatcagcataatttgggactcgaacccaaaacttccaatacacacgcaccccttatagccacttaagctagcctcaagtgatttgcactcattcggggacaccgcaagatacagatcatacgatcagtgcaccccacgaacgtcatcaccttaattattatagcagcctttacaatttagatcttaaaatatatacatgcgtatatacttaattattacataatccctatattattatatgatctatcattaataaatcacactttctgatatataatcttacttaatttattttttcagtgtgtcacacacacattattatataaataaatatatcatgaattaaactcatttatctacctacaatgattatgagaaaagtattaattgaagtaagtccacttctaaaaccgcgtgacaactcattagatcattaaaattgatccaagtcctgaaaccttacgtaacccattctcacattttattatttggtttacaaaagttatatatgctaatatataaagttcaccatcatttattatctttagattttttttttaagtatctatatttatctttaacataatccttttatacaaaccatttaatcatttgacataacacaaacaaagcatcgcgctactatagaactatatcacaatctgttccacgacactacaaaagtgtagatacacattaagatggagaaactaaatttctatgtgtattgcgcacaacattgtcatcaaaagaaatatatataccaactagtctcgtgttcgaggttcgagatctgagttcgggtcagagttcggtgttgggatccgagtttaggttcatggtccaggttctagtttggatttagggtctaggatctgggttcatgttggaatccaagatttaagttcggatatgtgagtaaaaatgtaaaaaaataatgttttagataaaaaaaacaaatttaaaaatagaaaacaacattttgatgtt

SEQ ID NO: 304943 - DNA, 1918 bp, Cannabis indica
gattgaaggctatggcatgattgtcatggtgcttttaggttgtacaaaaatagttaatttgtaataacactcattgattcatcaaaaaaatatatataataaaataaatttttagtaaaaattaatttattatagagtctcttaatcaaaatagctttttttaaaagttgggttgtaacagctttagcttttagctataatttttcaataaattcttgggattatttcacaaatacacaaaaacaaaaaaaaaatgcaaaaatacggttttacgaaattttaaatatttttatgattttttttaatttatttaaagaaaatacggtttatgttgtactcttgttaatttattgttgattttttgtttgtatgttattttttgttgtaattttgatgttatttagatgttattttcatgttacttttatgtaattttattgttattttcgtattgtttctatagaaaaccgtaaaaataataaaaaaaaaaaaattctttaaacgtaaaaatgttaaatttttttttttttcaattttattttttattttattttattttatatgtgttggataaagctctttagcttctttattattttatataatactatatactaaaaataaaataggtaaaaatacactttgtttggtccctccttgttctatcgtctggttccgccactgataatagacaatgtgacataaaggaatttcttcttaggggttttgacactcttaagttggatgacttttagtatttttctcactattatttggttaatctgtctaggaggaatgacattatttttttttaaaaagaaaactttgtttctaactaacattgaagatgcagctagcaacctattgcaggaggattacaagactgctcaatcaacacccgcaagcacaagattggcaaccaataacaatgtagactcaacctcgagaaacacctttgcaacactcattacaagcagccttcctacactcccaggggaatataattaaacgtggatgctgccttagacaaccacgcgaaggaggtgcacaagtttaggggcgatagttacttattggaaaggaaacacaatagtagggcttctcctctcccatggcgggccatgcatcacctctttatgtcgaagtccatgccttgttctatgctctcagatggtgctccgcaatcaagataccaattgcactcatagagacagactgcctccaacttaccttgaagattaaacacagatggaaagatcgctcaacgacctcttgatttatttctaagatcatagactctttctcatcctttcctaatgtatcttttttatcatgttccaagaatctaaaatactttagttcacaatatagcaagagatgcattaagacaagatagagagttagtttggatagcttaactcccctttcactgttgtaattgtaatcttgttctcgtactctttgcctctaattacaattacttctaaaaaacagctaaaataacttataattattgcttatgaacagtgcttcaccacatttgggagctaaaaatattttaatagatatatacatacatctcattgttaacttttgcaattatataccagtatttataatattttattatttatttattgcaaatatattatttaaataaatataaatgtgtgagttaaatagtaaaaatgagataatgtgaatgtgaatgtgagttattaatgagataagtgggctcttgagtgggatgaggaagttcttcatgatttgtttgttcaaaggggtattgatttgatctgttgtattccattgtctccgttttcggttgaggatgcttggttttgagtattggagactcatggggattattctgttaaaagtgtcttatcatgccttacatgttagacatttatatgta

SEQ ID NO: 304944 - DNA, 1495 bp, Cannabis indica
ctttgccaaaaaaaaaaactataaaatgaaaattctaagactaactcatttctttgatcctttatataaaatttaaatgaaaaaaattattttattcatcattatgaggacaagatgtgtgcaatttaaaattctattatttatgattacaaacttaaataattaaaatattaattgttattcagttacataaatatttacacagacacaaaaatatttaaatagaaacatgatatgtttaaacaatttatatttgaagataaatataaatatgaaataaataacacacaaaatttatatgtggtatcagcaatccaaattgctactagtccacgagagcgtgcccaaagaataaaacttattagaagaatatccaaatgataacaaaactaaattgatttatacaaagaatcactctagaatttgttgcaattgttgtaatctaaaattctcatcaaacttctaaaagtgttatgatctcaaactcccttcaaaccataatgcttgcatctcttctcctaaaaagtaactcatgaacaagacttctctcgaaacttgatgaacacgcccaaatgtgtagtcaacctgcacaattatcacaaaaaaaataatacaatagattacgaagaaaattttaggactcaagtttttcacgcaaaattctctttcaaaacttggaaaactcttggaaaaataatcaacaagagagataactcaaattcatgacctaagagtgtctaaatacatcatagaatcactttaggacatgaaaaagaaattagaataatttgtttacattaaagtttttgttgttagttaatgcctacagaagttttattttttgacattaaagtttttgtctgtaaactttagaggcatttccagtgacggacccagaatttttactttgtgggggtttatttatcattaaaaaatatttatatttatattataatcacacttattagatttatttaattttgtaggagcttatttattattttggtctataattatcaaattaaaaaaaaattacatttaattttttaaaagataatatttttgttagtgggggctatattgggtccgtctctgcatctctttttcatatttgtcgcaaatttaattaatggttgtaggaaatttagctctgatacataagaattaacctctgtaattccagattcaagatcacacttaaacaaacaaaagttaaatcaaaacaaacaaatcaagaataaaaaccagcaaacacattaaactagaaaaatatagcatagatgaatctaaatggctgtcagacacaataacacaagagaattatactggttccgatcctaagttcaatgtgaactcggtcatactctagtttgaaagtattaccaccaatctttattgataatgggaataagagatatcaatctcaagagctacaaggaaataatcacagcaagttatccatggtgtaatccctcaacacacattaactcactaa

SEQ ID NO: 304945 - DNA, 1393 bp, Cannabis indica
gagaactccatgactgtgaacacatggcggcattttatcagcccttgcatttccttgttttgtagaaatcaaaatcttttacatcataccttgacaacattagcttcattgataaccgagacttgtcaaccgcatacttcacttgatcggatgcagtatgcaacagaagtttcaaatacagtagatgaagttgtctctattcttcatgtaatgcatgtgtgccacacatttcagaagattctttcttcattcaaggaagatattaaccacattttgcaaaagattgtttgtttacaggtatagataataatatcgaggtgtgtttgaactgtagtagtacttgtggaactcattcttactaatctgttttacttcttgttattcagtcatcgaaggaaatcgacctttcactcgagggaaagcagaaagtacaatctgcaatccatcaagttgaggaaatattaagttcattgaactagaaagagacatgtagaataatattatgtaaatgtgagaaagaaaagataagaacaggagtttaatttggattcattttagtacttgggtttttctttttcttttttagtttagtttattagcatttttgtctcttaagtggaaaaaagtgtattgattattgaatacactgtattcaatcaagttcattttatttaattattttatagtttttaactttcaaatctcaaatggtattgttatatgtgtactgaaacaattaaatagtgtactgtgttttacataatttagtttaaattgatttaaaatataaatatgcgggatctgatatttgtgtataggcaattgttttagtatttctcaatctcatatgtttatagaagtctaagaatattcaaaattactttctatttgtgtggcattaatctggattagggttagggatgcttaaaaaaatctaattgtgtaatagatacatttttatttgtttgaaataaaagaaaaattctgaagagtataataagattgatgaattgtcaaaattctaactaaatttgatctattttattttagagagcttcactaggaggaaaatgttctaaactttaatgaattctattttgtatgttatgtcctcattctaatttaaataaattaatttaattttcattaaatatttgtattttacaaatgaatattgttataggacatcaatgatacttaacacaacacaatatggtattttagaattagtaaagtctattttataatagttattaaattagaatatgtagtacttatacttaatactaaagagtaatttgcggcataaatacctaagttttatgccgagtagcagataaatacctaagtcctatttttggcggtaaaaataccttccgtcactactctggaa

SEQ ID NO: 304946 - DNA, 715 bp, Cannabis indica
atatatatatatattttccttttcatcataaactcctgctaaggaaatttgagacttctcatagttgatgtgcaaacttgaagtgccactaaaatcctccaaagcctctttgactatttgaactgagttcaactttcctttgcaaaatacaattaaatcatctacaaaccatcagttaataaggtttagactcttacaaagatgatgaaatctgaactgtttgtgcttggctagcaaagagaagtcttatagacaaatactccataatgagaacaaaaagaaggggagatagggggtctccttgccttagccatttttcccctttaaatgattcttgcatttttccattcatcaatagggaataagttgtatttttaacacaaatcattacccaattaatgaatctagaaggaaaattgagagctacaagtagatcttccaagaatttccagttaaccatatcagaagccttgctaaggtcaatcttaataatacatcttggaaatgtgtttttccttccataattctttaagagattttgaaaaattaggatattatgggctataaatgtttatatatatatttataaaattaatctttctaaaatattttgttaaaccaataaaaacggttaaataactgtattttatatataaatatatagggatatgattttgtcccgttattgtactttcacggattgtaatccgtgatg

SEQ ID NO: 304947 - DNA, 690 bp, Cannabis indica
aaaaaaaaaataaaaaaattatggtgtattaattttgactacaaatttagtgtattcatagcattgtagttttatacatatataatcaaaataaaagagcattaaattttatttactatttagagtgtgtttagtgtgaaactaagtacataattataggttttagaaagaaagaaagagattgaataaaggtatattaatatgttgtgggacataataataaaataaaatgtataaatataattttaacaataatttaattaattattataacatgttattatagagaagtttgttgaaacattcattaatatattggtaacaagtcccttaagattgagacatatcaaagttgttggagtaagtaggaagtattttttttagtaccaccaaacatgtacaagccaaaatcaatttataattattttattttatttaaatataaaagtaagtagatgagaagggcagctgaagaataagaaagggtgaagtgatgtcatggtggagatcgactgtcgagggtggggactggacacccggggggaagcacttcctgtaaattcttcgctttgtgtgcatccctaattagtactcttagtaatgtgtcgttattttttgttaaattgtttgtgaatcaaaatctcatttatagaacactatttattgctttaaatatattttattaatttt

SEQ ID NO: 304948 - DNA, 2094 bp, Cannabis indica
aaaaaagttgctaataataataaatgttttttattggcctatgttgtaaatttgtatatatatacactaaatactaattttggagaagggggctgacacacttgaaagggtcatctacactaattaatgagggagtttataatattaattatttatgtccatacaaataataatggtgtatatatatatttatatatattatattcgtattgttgtcatggaccacaagtttccaagtcttatatgctgcaggatataatatattctatatatacgtaaatgatatatgctatatataatacaggtttatagagttgatttacagatagatagcatagcataatatttacgtatagcatatatactactaataatcaaaatggcttgatgtggtaattagtgtattataaatgtttacacactgtcttgatttttgtcgaaactatgcggagtgctaataaaggaaaattctcttttatacactctagctcttatcttttttttatgtctataataataataatatagtaataatggatctcaaatacattgacagtgacacacccatctccatggcctggccatattattatatatattatagatagcatggatcccttttaagtgtagtgtgaagtgaagttataataagaagatgttaataataggagagacaggtgcatggaagaaagaaattaaaggtagcttaggggcgaggtccaatgcttaatattaatttgatcttatatataattgaatattgatattaatattgggcacattggtcaaacatagaccaatctatttgagacagatgttggtcggatatagtccgatgaatagtaacgcaacggcatgtttgacacatggcaaactaactcttctttttgcctgttttgccgtgctaaccaagcccaagcccaaacccaacttttcttttattggctaattccacttattcttccaatccctatgtgacatggtcatggacaacttcacgtgcatgcatgcttccttaccttaatttctagtgtccatttctatatttacagatagtaaatgcatcattaatataaccaaatataattttttgtcccataatcttctatagaagtatatatttgacaatttagatttgcgttatgatcatgtacaaccttaagtagtcactttaacctgcaggcccgctgggtatatgggctggccggggacattacacttatctccaatctgtgtttgtttgtaatgtaatgtaattttaattttagtttatgtttttatactataaaaatgtataaatatcatgtattaattgtatataaattgggttttgttattaagtattagtgctgttaagtatctaatatcaccacaagcatgaccggccttagattaacacgggctaggcccttacttaaagtcacctattttagaagtccaaataaaaaatatataatttctaataaggttaatttattttataataagaactcaattttttttctaaggctctaaggtacttctagcaaaatagttagggatattaattacataaaattttaacattaaattaagtaggacttaattaaatatttagttttattaatagcgatatgacatatctttaattcttttttttcctaataatttatatcaaaaatattttttctattgtattatcattattaaaaggagaaaaaaattaaaaacagagagccatccctgccctgtttacatttctatagccatgcccaactattattatttatataagcacaacacaagtggggaggtggaaacttggggagattttgtagtacattctccaaggattttctttgttggtcttataatcataattcaagatgcaatttcaattcacccctcttttgagggatttgcacggtcaactttgtgtcaaaaaattactgtaaagagattgatttcatttgaagtgataccaattaattaaaatacaagtaatcactataaatatatgggtgactattcaatggttatatttttattgtaaccatatggttacatttttctttaacctgtaatagcagcttactaataggtagactttccttt

SEQ ID NO: 304949 - DNA, 1225 bp, Cannabis indica
atcacaaaccaatcaaacccataatttccaattttggattggagatagtaaatctaaatcaaccgatagatgtcatgatcaaatatcaattaaaaagaaataaattaaaatggaacgtaccttcttaatcattgtggtacactagccaggcaggctctcagtctcaactatcaaccaaaaccctcaaaacctaagaaagtgacttatgctaactcacgagtaacaactacatattcaaaaaaaaggacaaccattttcgtcacactatcacataatacactatacaatataaagattcacttatattccattttcaaaaagaaaaagaaaaaaaaaggattcacttactgtatacatgtatgtgacgactcaatcagtctcaatctatattctatatcttagcctctcctctctgtcaacatatgtaaattgcgaacaataaatgtacacggttaataatagttttctaaggaataaatttcaacatcgtgaaaacaacaacatatcatttcaaaaagtctaattaaaattttttttcttgaacttccacatgtattaaatgataccctttgaactttttttgacttttaaaaatttccccagaattattgagattgctagataaagacttttgtctaattttagtaaaaaaattataatatggatgaaagttcaagaggcatgatttagtacatattaaagtttaagagatatgactcggtaaaatataaaaatctagggagcatagtttagtacatagacaattactgaaacagtaaaattgaatgaaattagataaaaaaattcagagagcatgatttggtacatgtcaaaattcggcgagaaaaattcttaattagctttttaaaaaaataaataaaaaaacaacaatatataatcaatattcatatttcatattcatatcaaacatatagagacaatgagagcttattacaggatttagctgttagagatattattacaatggaagaaaatcaaaatattataactctattgtaatacaatacaaggaccaacaaagagattaaataaatgttacagcaacataatatacaatatatatacactatatatattatatataagaaatgtagaagaagataagaacacatgcaatataaaatatgtatatataataagagaataatatatacatacactcactcacaaccttgagtgtagattagtggggatcaccatgact

SEQ ID NO: 304950 - DNA, 10040 bp, Cannabis indica
gcattcaaggtgaatcattctggaatgtgcagtagattactgccttcgcttgttgctgagaatagctcgagaatatccccatcttccatcgccagtgatcaagacgactactgcagaggaaatcgcaagttggactttggaaaggaaattgactcgttgattgcttctgtttctcgtcttcaggtgaggtgtgatcgtcttcatgagccaaacccagcaataatcactttgaacctccctttatcttcatcaggtatgtcctttttacttgtgtatttgattcacgaatttgttgctttaaattatatatgcacgctctgtttggggatgaaattagggtttttttatctatgcaaacaccaccataggctgatttaggtgttatagattgctttacttctcgaattttgcatttaggaatttcatcagatgtgctagctaattttttgcccaaaatccttgaggttttgggtcgaatactagtttatgtcgcctcccttcatacattgttctaggtttagtgtttggaacgagtaatccttgggaattaccatttcttaagtagtgtgtctagttgggacctctctaagcagtttatgggggaggacccccagctccctttctatattaggtagttagggtagctaactacttggatctccttcttcctgtacagaaaccataactacttggatctccttcttcctgtacagaaaccatgacgaagcgttcttgtcggagagaggctgactcagaggaggagatgacagaaactcaaagagttccttgaatgacagtccatgggaaatagaccagcatgtcaactcattcaagtagtacaaaaacttgaggaagtatgaaacccaacgggggcttcaaagcattccaggactgttctggaaaagctttccatacttggagagagggccaggcaatgcgcagaaggaggctttcatgtatggagttgggcccatatcgagatgggggcacacttgcccgtgaggtgatattttgctaaattctacgccttagctggagtaacacccttccagttcatcccctaagtatatcgtctgttggcggattgatatgttttttgtgttaaacaaggaaaacttgtgccaacgccggaagagatcttgtacttttaccagatcaattcccaagcgatgagggtcacaaggacaaggtgagtttctaccggttgcagatatagcacaagtatcccttgcccaactagtcacacaaagtacacgcaagacttttgggactattacttcttcacctctggcttcccattgaggagggttcccaccctaagcttatacttcaatcttgcaagtaagtcttgattcccttttcggcccacaaagctctatttttctgttatactcattgtattatgattcgccactattttctgtatgttagactgccttcctcggtccaccttgacttcggaactggaagagagagtcaatttctacaaatccttctcgcccaaggagtttcaggtggagtttggtgaccatggagatctttgggaaataggtctcattgccccactccaagatataactctaaaggagtcagtccaagaatccttgaagagggacccaaaagatgttagagaagccattgcggttaatactgctgaggaagttttaaaggcggtgaaggccaatgaacaatggctagaagactggagaagacaattcctagcaagcttgagtgaggctgaagaactgtccatccatttcaatgcctaatgaaggtgctccgggaggacgcacttctgtagtggtgatatgccttttcgtataattagggctcccactgtgtttgattttgagatggtcaatcagtggcgatttgatccatacttcttgaattagatcgtcataagtattcttttaatagatacgtagatagggtagactgcattgtccatagtcctaaccacttttttccatcctgtgcaccatcatgttcgagtggatacacttagcaaaatctactttcttggattcttccaatatgaaaccattaggtcgagaagacattgctctatttgctaggggaagagtcaattatgccaggattaatggtctggatcttcctgaagtcttgcatgcttacttgttgtaaaattcatgccttttgctataatttcttttaatgactacttcgtgtgttttatgcaaatcaaccagccactcttcagatgaggctcctaaaaaaattcttaggcagtgttcaggcccgatctaacaaaattaaggagatcacccaaagcgagaatgatggcggaaagaaccaggcctccggaagcggagcttagaagacagcacccctagtaccaaattcagaagtggctccaaaggctctgagtacggaagcagtgttggctgccatcatagacctgatagagcccaccttgtttgtggaacctctgaatcaaattcccctagagaattatggagaagacaattctgactgtgatgggcccatcatgcccaataagaaacgcgtaggctcgtctgatggttgtcctagcaagaaggctagggtagaaatcaaagagaaagtcctacaactggtagctttgaggaggcaagccacagattctcaatcccagaagggagcatcctcttctaatgatggaaggccaccaaggtgaagtacttgtttgttaagggacaagaaggaccttcctccgccacccctagtgcctaaagtgattccagccacttcgattcaattgtccaggaaaaggatcgagttgcctccaacatctttcacacttcctatcaggcctgtacagttgacgaaaggggaggaagctagactagaagcgctagaagaattctactaccaaaggcgcagctgcaaaattaaggagatgaggaaactgggtaccagtatctcttccaggcgcaacgctgagttccccaattatgacaagtggaatgaggatgcccttcctatcataaacagggttgaactggtgaagagactccggccacacgttgggactgacttgtcaccattcttggcagatctattagagcagagcactaccacaagttgtaggcttggagttgatagatttgttgtgatggctagaagggacctgatgtacgtgactaactttgtgaggactcaggccaatgctgtaagttcaacactcttctgacttaaaataaattttagtgtttccgcactgttttaacttatttgatttccctcttttgtagattggtctgatggtggagaggggctactccctggtcacccagttggcctacgacctagaggtgttgaaggtcgaacatgccaatgctgaatagaggagagacgaggaacaaagggccttaaccgaggctaatgctaccatggaggccactattaagcagagtgtctgtgaatctctagaaaagtctttgtctcgagagaagagggctaccaagatagagagagacgcagagacaaatacaaagatatgcatttcaaggcgctttctcgttttaaggaattggaggctaaagtgcagcaggctaaggaggatgtgcggcaagtcaagcttgaggtcgatgagaaggataagaaactcaccactttgtcttaaaagtatgataaataagccaagatcatcgaggacaagttcatcaacgaatctactctggcgaagaaagtgaagcttcatcttgtattgcagcagaaggccgaggcagctgaaacataatccattaacaaagcccaggaggtggacaacaaactggctgtgcagactaaagcttgcgaagaatcccaacggagaatcacgaacctagagggtgaaagctccactttgaagggatgtcttcaagagcaagaggctcaacatgtcaaagctttggagcaaggttttgttcactcagtatataccctctgggagcataacaaagccatgttagatctcttggatgctgaagacagtgaggaacttttgccttagctattggcgctagagaaggtggacaagtcagaagcgaaccttaaggattaaggatggtcaatctcgaaaccaccaaccctgtaggtgaaaatatggataaccctgctcctccagcctttgaggttcctgttccagtcgagtctgcaatcctagagggccaaactcaagatgctttagcactggagggcactactcaaccataattgttctgaacctttctttttatttggggaacaagggttcccctttttgaatgagcagagacattttatacccttggcatagggctttttcagtacttggtaccttttattaactcattagatatttgcatttcatatcgtagatattgctaagtttttaacacttccaaccttgtcaagttctggttccaaaggcctgaacctttagttttttcgattaagtacttagacttaaatgctttttgtgaaaaaaatgcttttgcagaaggttttatttaaaacttggagtaattagttaacctgaactaattaattgtctaagaatattacccatcacttattttcagggttttttcaaacataactctttaattgacctgaatcaattgatttaagtaacctgaatgttatgacattgttaacctgagttaaccattacgcacggacctttattgtaaattaacctggattaactattttaatggactaaaattaattataaatgtactaaggcaatgacttacttctgctttcttgaggctccagatttataatactttcttttttttcacatttgattaagtgttaaataatcttcaaatacaataagacagtggattacttctggtttcttgaggtttcggttttaggcaatacttcctactcttatatttgagcattttacttggttgttttctagtggaggaaagagaatatgaatatttgtacaataacatacatgctagcaccaagtgattagtagttgagacttctgatcacttgttatatgataaaacattaaaagaccaattatgaaatgaaatatcttctttttattcaaactattcctgccctaagacatacatgaaaattaataaaaaggcaaggtaaaaatgtaaaaagtgaccacctctagtttacagatagtatctgcgcaggtggtcagcattctaggctctgagaattcttgttcaatctagtctcttcatatgataagttccatcaccaattttattagttatttcatacggactttcctaatttggacataagactctcactccgggttcctgagaagcagggaaaactcttctcaaaacaagatcatcgatcctgaattttctactcttaactttagagttgaaattcctagcgattttgttttgatacatctggagttgcacctgtgattgttcccagagctcctcgattaaatctaaagattcttagagtaaagcatggttttgggttgggtcataggtatccctcctatacgtagatatagtggattcgactgggatcacagcttcgcatccataagtcatggaatatggagtaaggcccatagaagttctctcagttgttctgtaggcccaaagaaccctggggagttcctttggccagtgtgctttacaagcttgaagcttctttttttaaagtagtcttcatgattttattgacgacttccacttgtccatttgcttgaggtctggccacagtagaaaagcttttgattattccgtgcttggcacaaaaataggtgaattggtcactatcaaactattttctattatcagacactattttgtgtggaagtccatatctgcacactatatttttgataacgaagtctagggccttcttcgaagttatcatattcataggctcggcttccacccactttgtaaactagtcaacaacgacaatggtgaatttgactcctcccttgccaatatggagcaatcccactaaatctattcattagactgcaaaaggccaagaactactcatgagggttatctctgtgggtggagctcttaaaacttttgaataacattggaaatgttcacacttacggacatattcaatgcaatccttcttcatggtaggccaaaagtaaccttgacgaatgatcttttcagacaggctgggtccagatgtgtgatctctataaaacccttcatggatttcatgcataacaacgcttatctctattctggctatgcatcgaaggtacgacattgataaccctcttctgtataaccttccgtccatgattacatatctgggcgcttagtactgaactttccttgaagcagctctatcctccaagagtatacccatttccatgtactagagtattggtgccatctaggggttaaatggttaatggcggagacccccattccttccgtgcttggagctatcaaatgtgtaatggggtcaagtccgtatttttctatttttggatctgttgctaactttgccaacataccagcaaaagtattcttattcctggggatttccttacagagtaatgtttaaaatgttgcaacagttctcgagtttaagttacgtaattggccatcttctcccttttttctggtactctccagacacttgattgaccacaagatgagagtaacttagagttcgatgtactaagcactaacttcttttgctaacaataaaccagcaatcatggcttcgtgctcaacttcattattggaggcttcatattcaaaacgaagtgcactctagacctggaggtgttgggggatatcagtacaattttggcactgtcacctttctcgtttgatgctccatcaacgtatatcctccaaacttctctttctggggtcaaagtttcaaggtcatcatttatcccagtgcattctactatgaagtctaccaagcctgacatttaattgaaactctagattggtattgtatgtctaacgaactcaattccattgcccattttaggagtctccccgatgactcttgcttttgtaacacttgatggagagggtggttgattagtacccttatggcgtgggcctggaattatggtcttaactttcgagaagcaactagtaagcaataggaaagcttttcaagcattgaatatctggactccgcgcctagcagtctcttgcatatgtaatatactggaagttgtacctttccttcttctcccacgagtgtggcgcttaaggcatgatcagacactgccaggtacagaaacaacaactctccgtcaactggcttggacagtattggggccttcactaaatgtttttttagttgctggaaggctatctcacattctgttgtccactcaaacttgttatttcctcgaagtatattgaacaatggtatgcacttgtctgtggatttagagacgaatgtactaaatgttgctattcttcctgtcaatttttgaacatctttacgtttcttagttgaagacatatctacaaaggctttgattttcttcgagtttgcttcaattcctcgagagctaactatgaatcctaaaaacttccatgaagagactctgaaagtacacttctttgggtttgatttcatttcatactcccggatgatggcaaaggccttttctagatcttgataatggctttcagatgtcttcgacttcaccaacatgtcgtcaatgtatacctccatgtttttaccaatgacattcttgaacatcttatttaccattcgctgatatatggctccgacattcttcaaacagaatggcatgaccttgtagcaatagattcctttgttaatttggaaactagtatgttcttagttaaccacatgcatttttgtttgattatagccaaagtacgtgtccataaaggttaacaatataaatcccaaagtggcatcaaccatttgatcaatggaagtaagtgggaaacaatctttgggacaagctttattcaaacatgtgaagtctatacacatcctccatgtcctgttaggcttcgggaccaacactaggttggcaagccatacggggtacaaggcttccctgagaaagtcgatgtttgtcagtttatccacctctgttcttaccatctccaaccttgcttggtctaatggtctccgctttcgccaaactggttcaacattgggatttatgtttagtgcatagaaaataaccttggaacttataccagtcatatcaacatgactccaggctaacacatcactatttgctttaattgtggaaacaatctgttcttttactgctgggggcaagttcttccatacttagatgaccttagtgggatcttgatcattaagacagacttcctctacttcctcaattggctctatggcacgttccacaccgatttaagggttaagctcatcttctgggactacccccaatgtgccctgagaagatattttggcgtcagagttatttccttccctaaccataagcacaattctagttgagaggctatagcaacttcgtgcacttctttggtctcctctgataattcttatgcttttggtatcactggaattttaagcatagatgctggattgatgtcactactccgaaatccattagaaatggtcttcccaagatggcgttataagtagtagaacaatcaactaccacgaaggtgctgtatttaaaagaggagactgcattacttccaaagacttctccgattatattcattgggagttgtatctttcccatggggaacaacatgtctccattgaaaccttacaactgaattggacagggtaacaagttggctttctactagaccaatggcgtggaaggctcctttgaagatgatgttcatagagcttccattatccaccaagatttgggaaactcttttgttggctattggagcctcaataaccaatgactaattatgcgggaaatgcacatgtcgtgcatcatcttcagtgaaggtcataggcaagttcattaatcttgggccttgagcaagtgattgcacaaaatgacaagcctcaccttgatttaattcgttcaggtaccgcttttgtgcattttaggtgcttctagcaatatgtggtccacctgaaatagttgctacatgattgtctagggctggtaatgcaattccgagaggatacggatttttgggattgggagccactaccactattgttgttggagcagtttgtgttcccagaaggacttgtgcattaggagcttgtattccaggaagttgtgggtttcccactccctgaggagggtttatggctccttgctgctcgagaacgaatagttgcccatgtgtgaccgcttgtcctgggtaaatgacaagaattcttacccaattctcaaatgcccattccgtaccaacccttctatttcatcttttaagtagtcgcactcattggttgtgtgaccaatatcaccatgatactcgcaccttttgtttgggtcttgcctatattttctgcccttgaacattggcggaggcttcctataatgcaccatgttagatgttgccttgtacacattctctcgagtatcaatgagacttgtgtattctgtgtatcttaattcttgattttacccttcttcgcagactcactctaatttggtccctttgaactcctcttattccttgggcaggtcacattggattacgaagtttccactttttggttcgtttgtctaggagcggcactgtatccgatttgtgtagctctatacacgtacaactagcctgtatagctagttgtacggaagtacttggtccatacactgtgagagtagtaagagttgtaagtggatgataaatggaatgagttaccatctacaaaggttgggcacttgttgcttcggtggaaggtgcaggaagtactccatacacttgggcctaagcatcttctaggtttatgaatccctgaccttgtaccaagaattcagttaaactgtccccccttttttgctgaaggtctccccacaatagggatctagtgttggaattaatcttaccaagatctagatttactaacaagtatgtttgattaacatccta

SEQ ID NO: 304951 - DNA, 2151 bp, Cannabis indica
aaatggcataggactatgtaatagtaattgaatacatctgaaggactatatattgattctaaaagtcaagagtacttcatgtgtcacctcaaaatagtcatcatcaaagagcagttcatcaatatcactgtcgaaaatgttgtattcaccaattatccttttgttctcgtatattggcatagccatcccaatcaaagcattctggaggataaatgttcagtttaaaaatatataagaagaaatgcaactagttatagagaagtaaaacaaaacaaaaacagaactaaaaataaagacactcccggactatgttaaattgagtttcaatagatttggatcacgaaacgttgaaaatggaaggcctaaagatcacgccacaaataaataaataaaaaaaaaaaaccaattctgctttattatgatacaactgaaatcagcttctctatcttaacagttagataaaatggacataatttcaatccccagtaagatagtttatttgccacaaaagtcatttacaaatttccattcaagtaaaaaatgaagaactgataattaaaaaatagctcaaccttaccacggggttactagctgcagggtcttccaagatgtttgcatcatcaaatatttcaaaatagatgtctacaaataaagaaaaaaaagaaaataatttgaatcataatgcacatcaaaatgcatagaaacactatactaatgcacattgatgttgtgctagacctccataatcatcaacaacatattgaaactcggcccatgatatttgttcatgtggttctgaatgtactgtcccaggaaatatcagcaaagcactgccgttggcctgaaagaagaaaatcaagaaagaacaaaacaaaacatttaaccatacacgatgaaacccaaagtatcttataaaactttcgtaagtaataaactgcaaaaacacagtgaatgcaacatacctcaaccgttgtcctcgcagtttcagcagaagtgagtttagtctcccagaccttattggacactttcaagtcttcgagaggatgataaccactattagtcatgtaattcgaggaatccggaacagaatctgagtaatcagcagcaactgaaactttcaagagggaaaggtcgtgtccaatagacaaccattgaaatggggttgaccccaaaaacggattcctgcatctaagattttaaccaacatatgaaaatgaatcttcgccattcagaaaataggactcaaattcattacgaaacattttttttttccctttttcccgaaacaaaggtgaacatgggaactgaaggtaaatgcaatgctaaataatggttataatttctctttgaatcgccattaaaaacaggaaagaaagaataagaaggaagatttagaataaaacgatagtgttgttaattttacaaactagaataccaaccttatgctgccggaacaccctgaaagcgttcgaccatctaaaggaggtttcttgaatttgcttgaaatcccacaagaagtataaccataaaacccttctgcatagcacgaattagtatgtcaatgagctgaaaaatacagtaacaatgagagtcaccccacaagaaaccaacttaacaaataaataaagcaatcaaattgagctcaaaatcatttcatttcctctattctacaacctcatccaatgaattaatgaatgaatcaatcaaattcgaaaatctatgagaaaagcccaaaagagttatgatccagtggatgtaaaaagatggcgtgaaaagttggaaggaaaagtggtggcaaatagtgagtaccgagggaaagtgaggaaggtgtgagcgatgcggccataggcatgagttagagaaaggagagtagaagggtgagtttgagttgagagttgtcgtttatgttggatggagcgtggcgtgatgtgagatctgattaagccattaaagagagatgttatgttgtcagagagaacagcggaaagtaacacagatatagtcagaggagaggggttacgatgtcgcagatataatccacatccacatggattttgttttgttttcctcaccttcaccttcaaataaatatataataatatatataatattattatataatgatatcactccctactactattttttttt

SEQ ID NO: 304952 - DNA, 708 bp, Cannabis indica
tttggtttgggcggtttatttgggttgggcagtttgtaaattttgttaaacacccctactaaaatattgtttgtaagaacaagtgacgtcggagaaacttcttcccaatggcgtgattgtgattgcgtttgcacggagcatacacggattttcacttttgggattccatatatcgatttagtcaaacaagatattgacaaagaggatggaataatttacttgaacattttgaaaaaaaaaagaaagtacaacacaaaaaaaaaaagtagctagtatagtggaatataatctcaaaataaagttgacttggccatttgcatgatgtacttattggaatttaaatggatatccatcataattaccatagtgatcatctaatcaaaattagccagggttgcctagtactatttatacatttcaatatgtctccgaaacttctaaacatttccaaaaaaaaaaattagttataattaaagaagaagactgcgtgccaataaattaaaaaattactaactagttaaactaagagctcactaatgagtgtttttttatttttattaactcaaaatcagttgctgcatgcaatcctagcaaacatgatctcaaagccacgaattataataagtaacgacacgaatatcacatttaaagcacaaatcagcaagagtataagtgtatgtttgacatcataactgaaaaactgttttt

SEQ ID NO: 304953 - DNA, 1605 bp, Cannabis indica
acgttattttaataaaagatagtatactgccgtataaaagttataaaaaatatatagtataaatgtaaattataccgttggtaatataaaagtaaaaaaaaagttagtattctgtataatttttcctttgcaaaacaagaaaaaatgaggaccaataaaatgagacaccaaattctagaaaagatcatttttacttgagctttctaaactattaggcctcttgatggatctgtaaaagaaattttaagagaaatcaatacgtctttatagactacattagaaagttggttcatgaaagccgctagttttctaaatgcctgataagtattttgtaaacattgaaggttggaatggaaattaatttgcatttcaagcaatggattgcgacactgaaagcttttagaagaataggttcgaaaattaaatttttgttagagaagaatgcatttactcattaattctagagatcttaaaaaattttagtttgacaatataaaatattttttgaaaattcaaagtctcattcgcgtcactacttgtgaatagtaattaaatgttattataaaataaagttataccaatagtaacctttgttaaagttaagggctaagaaaattaaaacaccattaaataaaaaagatgaatgctaaagccaaagggcatcagtgtgcctaaaaccctcttatctgttaatatcgttattggtacaactaagtatcgggtttcatataatttaatatgatagtttttagggagtatcactaactaatcgcaacacgatatgtggagaagatactaagcaacattagtacctaataacaatgctcaatacaaaaatatccttagatatcatttttaatatttttaaatatatatagtctagagatacataaaataccggtggtgtttgaaaaatacggtacaggataagttaattattgatttaattattatattggtatgggatatctatcatatatgagcatggacatagctgctgaattggtatatgttggtacacattggcaaatgattatctacaaacaaacaatggaggtcaaattcacttaattgttgtctatatataaaactttatttcattaggtcacttgacaatcataaatgttttattatcatttcataacttttctttctttttctaatgaatccaaaaacaacaagattcttacgatctcaagtggccaaggttttcaaacatagagcgtgtggtattctccatgtccaagcgtttgcttccctctccaattattctgaccaaatttaataactttattgcatatatatctcctacgactatataatttatttctatataatttcctatatttatttatgatatttcttaatctaactggcaagcgtccaaatgtcatataacaatcttaaacaaatcaaaagttcatatgtagacattccagtttatataaaaatttagttgaaataatacctacacgatgctttgttagaatagatccacatatgttctaactcgaaacattataaggtacacaacaacaactttgttgatatttttaaatgcattgacactattcgcttttcttttgcagatcaccaagcttactt

SEQ ID NO: 304954 - DNA, 3385 bp, Cannabis indica
attttcaagaacagagagcttaatgaattctcaatatatgttacacattttcaataaaaaaaaaagaaagaaaaagaaaaagcaattaggaaaaaaaaaagaaattatttaacaaatagtataattcaagtagtattgctataaataattttaatataaaatattaagcttttaatataaaatattaagtgataacttaattagcaaatgaaacatagttgctaaaaacaataaagaaaaatgaagcatagtacaaccgagtacgaccgcttcttgaacaggtcaaccagttattaaattggtttattttattgcaaaaagagtcaagagctgtttagttgatgcctaatcgaaagagcaccccaataaaaacactttaaattacactaaaattaaaatgtattagtaatgtatttttcttcctattagtattagtgtaatataatcttgaatcttacttatttcaatatagttgctattataaaaaatgactaattagtagtaatgtactatctcatagtgatgttgagtatatttagtgtcaaataacaatatttttctttaaacgtagctatacattatttttcattatatttgtttttttttattcttgatcttttctttctttctcatattttttatttaaataacaaatatataaaaatataatatgtaaatactatattaaaaatttaatgcaaggaaagaaaataaaattatcaaatatactttgaataattgagttccacttgttagtaaataattagtaggatataagaacccttacaaaaaaaaaaaaaaaacaattaataggatgagaacgaaacattaatatgtagttattaccattatgagtaaaaaaaatataaatcaattcaagttaatttttttttcttcttatttggtttttcttttctcactttcattccgtgatgatgtttaagatgatggcagcacatgcataataatattctcttaaagcattgtaagaaaagtaggaaatgattagtggattacaatcgacaaggaaggttcattgaaaattttgagtcaaaaactttgaacatagaaaagttaattaagaaacctatgtactcaaaagaaaaataaaacctaataaacatagatgcccaattgtcctttatataaaccactccaatatagaaccaaaaaaacatcacaaactcccaaaactgaccaaaaagggctaaaatggggaaaccaagaatgcttcatattcctatccttttggttcttagtctctttgccttatcaacagcttcagattctctctacaccactttcctcaattgcttagagaatcacacacaactcagcgaccgagtttccgactcagtttactcccaatccaactcgtcctacaactcagttctccagaactacattcgaaacgccctctacaacacctcctccaccaacaaaccccttctcattgttacggccacgcacgtgtcgcacgtgcaagccacggtgctctgtaccaaacagattggcctccaactcaaaaccccgaagtggtggccatgattacgccggaagatcttacgtctccgacgaaaagttcgtcattctcgacatgtttcaactccgatcgatctccgtcaacgttgccgaccagacggtcttggttcaagcaggggccacactcggcgaactctactacagagtctgggagaagagtaaagtcctcggtttccctgccggaatatgccccacggtcggcgccggtggccacatcaccggcggtggatacgggaacatgataaggaagtatgggttggccgttgattacgtcctagacgctcagatagtcaacgttaatggagatattcttgacagaaaatcaatgggggaagaccttttctgggccattcgaggaggtggggctggcagtttcggtgtggttttgtcgtacactttaaaattagttccagttcctgaaaccgttacggttttcagagtggagaaaatattggaccaaggccagaacgtgactgatgtcgtttctcagtggcaacaagtggcgcccacgacagacgacaaccttttcatgagaatgttggtacaacccatcagttccaaagtgaagaaaggtactaaaacgattagaatttcgatcataactgagtatcttggaaatgcaaacgaattggtgtcgttattgggtaaggagtttcctctgttgggtttaaagaagaaggattgtatggaaatgagttggatagattctgttctttggtgggcaaattttgatgttggaacctcaccaaatgtgctcctcgatcgaaatcttaacaaagctagttttggcctgagaaaatctgattatgttcagactccgatttctaaagatgggcttgaatggatatggaagaagatgatcgagttaggcaaaactgggtttgttttcaatccatatggtgggaaaatgaacgaattctcaccttctgagactcctttcccacacagagctgggaacttgtttaagattcagtactcagtgaattggaacgaccctagtgtagagttacagaagaattatactactgaggtcaggagacttttcagttatatgactccatttgtgtccaaaaatcccagaagtgctttcttgaattaccgggacttagatattggtgttaataactttgttaaagacagctatgaacaaggaaaggtttatggagtcaagtactttggtcagaattttgataggttggtgaaggtgaagactgctgtcgatccacaaaatttcttcaggagtgaacaaagtatcccaacttttccaagtaaggattaggaaaattattttacaagtcacagaactttggttattgtagtttgttacaagattaaaataaatatattgtcattatttttgcttgagaaagagcatgtggaactatttgggttttagttactggcttagtgaaatatatatacctcttttttttacatcagttctcaaatgatttttctttctttgttattgttatagacttgtaatagagattttatatacatagaattagtaaacaatctttatttatttatcttttacaactgctattatgaccatgcatgattgacgggactatatttaggaatgcacatggggtgggtaattagcggggagtactctctcatcctcatttctattgaagattttaatttttatccctgcttattctttgttgaggatggaagcggggacaagaccgtgaatctcctaataaaaaataaaatttataataaaaatttaaatatattaaatattaaactaaatgaaaattaacatattacacattaattattatttagtaaattaattattatcctaaacataacttaaaatttataaaaa

SEQ ID NO: 304955 - DNA, 1193 bp, Cannabis indica
aatcctataatatgaatcaagtaacatcactaacctaagacaaaacacaagctgttgaactcaaaaatcagatacacaaatttagccaagtataaactgatggaagaagcagggctcaaaggacaatagtttgagttgcgtttttgtatcagagtgagatactgtttcctctgtctgtcattttcctcttttgcaatggcaactgctgatcttctttactgtcttctagttcttacaccatcataatatctactcctagacattggaggaaacaagtctttgctcaaactacccgaaggaggaatggagccagcactactccttgtgtccccactagaaaatgccattgacatgttattaaactgaagctggagctcttccatcttgtacctctgtgcattgggagatgatgaagccttgcaagctctcaactttgcctcggttgatttcgtgaaattcatgtagctgggctttcgcgtactgatttgctcaagatttcccaccttgcggtttctaaataccaaaggtggagtggcagattttgaggaagttgatgttgaggtctcatcatagtgagattcagaactcagcgaagaagacaagtgatttagttgattttctgaaggtggtggtggtttagctgtaatccttgttgtgagattattccttctcacttccacagaatcttgtccagaggaagaagagtatgaaaattcttcaaatttcctagtaaagggactcatttcaggtggcatatcttccattagcctgttttcccatggcttggttgccatccaacgatctaaccagctacaatctgaattgttaaccagcttctcaagcttgactgacttagatggctgttttgtccttgcatatgggctagcattgggcctaagtttctgtggccaagaaaaccataacgcattcaaaattaactcagaatcaccaaacaagccatagacattagcagattgaccaaaaatttacctgttgagagagggagtaggcaattactctctctcttttgatggctccattctgcctcatatgaagctttgctttaacttcactcacagttccaggactatcacaccatccttgctgccaattttcaagacaagaaagacccaattcttggtcaatatattatatatgtctttctcaaaacttatcaacagcatttcaatttc

SEQ ID NO: 304956 - DNA, 2172 bp, Cannabis indica
attattttttttttcttttttaccaaaattaatttattcacatcaagtcaatgacaatataattaacaccactacttactttgcttagtccatcacaccatgattcagcatgttccgcttttaccatagaaaaactagggatttcattggctgccgaaagcatcgccgctgcagcaatgcatgatggcctatattcaagaaagctggcttctacaaagattaaacaaaaacagtattgtataatgcttttgggtttttacgagtataataatatatgttcatgtatttgcatggaaatatacgtatgtattaatatcattgtattgtacgtaccttggatattggatagtattatttctgtggcacgtgaaatcagaaacccagttaaagttccagttgaatcaagtttgcatgcaaagaaaccggtgaaactaaatggtgttattgatcttagcctccaatccaaaacattcagaacaagaagttccatccttcgaattgttctgggttcgaaaatgtacttggaaccctcgacctattattatatacaacattagtaatatatacaatttaattaatcaaaaattaaactatctttcccaattatttaaatgggggggtcatgttaatcattacctgtagatccaatagagatggaacaagtggttcctccatttttgcagccaatgataagcaagcaacagataatagttgcaatggccacccacccgtattctgcaagtaaaaactcatccgatcaaaaaaattatttgggtttcgattttcacaatgcaggggtattgtgtttgaaacgtggcgagtaaaaagttataataaattacaggcatattaaatacccaaatactataatgtactttatactgtagttattaaaaaagtcaagggagatgtaattgatagtccatacgacagtaatggctctgcgttttactatctcagcataaaggactacgtatttttctcttatttgtacgtttgcacgacattaaagtaatttcaggctctgtctggaagcgtaattaagtaattataggtaaaatagtgtgctactttttcagatttgaaaagtcaaatataattactttcctcgtatagataaaaaaagctaaaataataattatataataatagaaataaaaaactaataatcagatttttatattataataattaatattacattcgcaatcattatcttttaatagcttcatcttgttaaaattaggatgatcggcgggaaagtgaatcaactcaccggcaggcggcgagaatacaagaaccgatcaaagtagttaacggcgagatacaccgtcagtggctgaaaaccgtaataagaataaacctacaaaaaaacgacacatcatacgaaaccgtcactgtcagtgacctattcgtaatattagcgctcctaccactaaaaaacaaatatgtacagcataaaaaaaaacgcaacggaattccgttacgctccatcaacatcgatctggagctcttgcatagatccgataaccaattaacagtttcttcaaaacatcgccgttaacattaccgccgttgaatgaaacagtaggaatagatcagatctatacgcatatatatacgatcattcatggagtacttgtggcattattgtaattttgaagaaatttcaagggcgattacaattagacatttcgcaatctcaaaaaaggcaaagagagaattaaggcggagttttaattagctagctatagctttatactgtagagttttagtaccttgagaatccatgcgacggagtgagctctagcggaagcgtcaagaggatgagagcggaatcgagcgaggtaatcgaatccaggaacaaagtttctctcatcctctataaaactagcgatcgattcctcactgcaagctggagatgattccaagtcggataaggactccgacgaatactgatcctccaatacaattccagaatcctcaccgcaaagtaggtcggagaagcagtccgagtacgaaactgacatgatcgcccaagcttataatagtagcagaaatactccttcattctctttccatcgccggaaaactgatcagagaatcaaccgaattgatcgatgagtgagagtttctcttttctagagagagaaagaggagagagagagagag

SEQ ID NO: 304957 - DNA, 1441 bp, Cannabis indica
gtgtgagataaataatctatgcacgcataattatttatttatcgttatttttttaattttctaaatttgtaaatatattttagatttataaataatctaaatgaaagaatgaaaactttatttagaaatttattgtcaaaattttatattggtgaaattttaaaattttggagttattatatgctcttaaaaatttagattaattaaacaatattacttttattctagtaaaaataatataatacttttactttttgaaattattaaaaactatttgaataatttacagtataaatatttaaatttaaattttaattgtaaataaatactaaagtttaatttttggacgacaataatatctactaattatatcttaatctaatatcattctatatctattccaatccagtctaaataattcatttggctactaaaaaagagattttagtatgaaactcctcaagtatatgaatattctaattacctttaatctaataataatataataatttgaattagtaatgtgaatgatttacgtggtatcatcactaatgtataatcaatagagtaaaagaatgaacaaaatcaataataatcttgtttttttttactttaattaaaaattggtaattttcatcacctaataacaattatataattcatatcatgtaattaaaattaggttacttgaatatatataccaaaaactcataaatgtatctatattagattggttaagctattatacatgtagatagattgaatggtgatgtaaacctaaaagatgatcaaaaatactattacacgtggtatggaacatagcactaattaatgatcaaattaaatacataaaatttttaccttcatatttttattattattataaattatttaaataaatatgtaataatattattaatatattttggcactacttactactaacaactcttccacatggtccaatgaaaaatataccttcccttgttcttagtctctagacaatttcttaaagagttccaataattagtgcatatatctttatcttttattctttttttacatatatcacaaaaactttaagaaaaaagaggcaccttaggttacctattagtaaacactataaaaagtaacatattattatttatacaattaaatattaaattttatatattttaattaaaaaataatataaaaaatgttctacaaaaaaattacttttagtgatagctttttagtgataatataaattttttgtaattaaatgtgacttttagtcacaacaaaatattacttgtgatcatagtattagatataagttataactaatttatttttagtcacaagtatattgtgactaaaaatacatttgatcacaacaaattttgatttttatcactaatatctttagtcacggacttttaattagttataattttaa

SEQ ID NO: 304958 - DNA, 1420 bp, Cannabis indica
taatatatttttctcttaattaaaatactgaattcttttctcaaaaaaaaatatatactgaattaataatgttttgtccacatttcaaagtctacattagctcatgtctaagttcacacccatatgtcacattccttatctcactcctataaattcacaccttctttctcttctcttaaaccatctctcctctctctctctctctacaaacatatattattgacaaaaggaaaaaaataagaaaaagaaaaaaaacaagaaatggacaaaaaaataatctacaaaaccctgttcttgatatcacttctcctcttctgctccactataacctatgctgctcggccagaaccaggattttcagccataaatacttccaaaacccaacatggggtaggtttatttttccaaatttcttaaattttttttattattaattttagaaattcgattaatgggttttctttatttatttgtgcaaaaatcaggttgttgaagcagagcaagttgaaactggtgatgatattagctgtgaagggattggggaagaggaatgcttaatgagaagaactttggttgctcataccgactatatctatacccagaaacacaagccatagattcattattattagtttcttctaaactataagttaatataaaaatatgtagttctcgttactgaaaatatttatatatatagaagaaaatttatcttcattaccgtaatatttatatatatataattaagcttgactctttacttttttttatttaatatttggaaatattataatatttatttcttcgttttctttaattaaaagtgtaatcatcattcaaattgttacaggaaccaaaaacgtaacagtagtacggtttttctaattaggaggaggtgtgatttgttgaagtactaaataattctttagtacttgatttgcgtgtttcaagaagaactggtttggttgtgattgagtgacgtattaagtcaactctgtactacggcgtagactagttcatctaagaagacttttttctagctattacaatgtatatactaatttcctctacctctatatatatatataacaacgatcactacgtcatgggatggtgttcaaccagagcatcccactcaatataagcaaaaattactacgctcgtgctcattagcgccaccttagaccactcacaacagcattaatattttttaaaatatttcactaaattttggtttttttttattttacctcaaatatttatattatatattaattttttattatattttttatatcattgaaatattatattttattaattaaaatgaaaaaaaaataataaaagagtaaaaagaataattaaaaactaattaaatggaataaaagagaaaaaaaagtttagagataaaatataataa

SEQ ID NO: 304959 - DNA, 3860 bp, Cannabis indica
atcataagatcatgttttatcttaaaattcaatccgtctagctatttttctttcttactgaaatcagttggcacaattcccgaggccaatcttgccaatcgatcaaattgagtcgtgtattcggtaacatattttccttttgggtcagctggataaattcttttcctttaaggtcctctccacaatcaaggccatcaagtaaaataaagcaatgtaagaaaacaatatgcaacaataaaaataaaggcaaagaagttagaccttactcctattgcctactatttcatagcctgagctagagtaaatgcctcgctgttactgcggattgcccacttctctgaggttagctcaattgcactgcctgccaattaatctagagttttgcagcgaaaggtgctacttctctcccaaccttgggcaccattctcctttttagggccacggtgtctatcatcggccctccttcaattatagtgtgaatgcccttggaggtcttagccctctttactgtggaaaggttttcaatcgtcttttgaagagcaatccttttcttctcacggcgcttcctcaaaatgtttttggcctctcctaccttctttaagatctcatggtcaaggcgagtaggctttagtggaaacttgaagcccaaagatgggatcctggccaaggaaatgacaagcctaaatggctaactagaagtagacagttagccccctaaaggagagatggctcctgattaagagtgttgctattgatgttattatcgttgttgttggtggtgttgttgttgttgctactagaattattattgctcttgttgttggtgttgttgttgttgctattgcttgttgttgttgttggttctgttactgctgttgttggtttcgttgttattgttgttggttagttgtgtttgatgatgatggatctggtagtgttagagtaatggttcttcgaagatcaccatcccctcatgtagaaacttttctaatcagagtagacttggccttcttggcgtccctttcggaaggtggaggagaagtcttagctttggagtcacggacgcatccttccaaggggtctgaggcattggttcctgccaagacctcctggacagttccctcaacggatggtgttggtgaagcctccaatagtggcaacaagagttttgtctcccccaatgggagcttgggagccataagcatttatgcttaccttcacaggaggaggaacctcccagatgttcaaagaggaagaagtagacagaggcctcagtttgcgggacgtgtgagccctgaccttgcttttcccttttccattggagccctctgccttggctaggcccttcatgaccttctcgcttaaagacttcaaaatctttgcttcaggggtatatgcaaacacaacaaccagatgattatcaatccaaccctaaacaacaaaatcaaaagcacaattagcatacaacaacacattctaagaagtgtgcttgtggctacaaccattcagtgaacaactataaggttctctacgagcaaaaaggaccatgttctcccagcctatgaagttgccatattctctgatgactgggaaggacatggttacaaaaggatccaccctaatggtatttcgagacaactctagatagttaggactcctaatgatctcatctaccttatctatgaaatcactcatggggtacttagtgtggtctaaatttaagaagtatttgtcaaatcccccttgatccatcaagatatgtggtacaaagtacacggaagggtatgttacctcttctagaagtgctggatcccggggcaccctcatccgggtatgttgcatcatacctctcctagatcccctcaacctctatcaaaaggtttgggtgacggagcatccaactagcttccaggagcttttcctccttagtggcctttgtaatgattttggccaagtcatgagctatcacctccttggcctcttttgaagcctaacctggacccatgtttttgacactgtcaattctctaaaagtttacaatgagtcaattctcgcggagtagctgtgtggtgaccaaaccatcgaactttaaccaggctttggtgaaggacatatactagactaccttttttgccagttcctcggtctcagcactccgtataggatcaaaatagcaagtttaaaagtttttatgtaggatttggaagatgagttggagagtaggtaccctctccactggaaaactaatggagaagaaccaatgctctctaaggttgggggaacatttggtgaagtgagtgaggtagtaaacgtcagagtacccctcaagtttgtagattcccaacttcttacagttggttctcatgagttgaggcttcactccttagaagaaaaaatctcctctggagagggaaccataaacttatgaatcttacaaaaaatgtaccatcctgctatgagcttataagccaatgatatcagttgatatggagcaatgccaatgtgtgtaataaactctgcaaaataagctcttaaagggaggtgtgctccgcttgagatatgggaccagctccaagcactgaacccatccatgctcgtggatgctaactccttcatgataaccaacctatgacacattactctaggtatgttgagtaatctggcttcagtcgcatactgttaataccaaaattttggctaatgatgagaagttgacacgtgtaccaaggcagaaatacaaacaagctaataccgtgcattattaaatgcacattaaataagtcacctcgggaattacagttaatagaaatattcgaactcgctaccatataagcaatagcaagatgtgagtaataactattaataggtgagattggcgagacaacaagtccatctcgagataaacagaatacacaatgaaagttgtttagaacgagtaaacaaagagcttgcagcttattgattaacatactcgtgagtaagagcttacagctaattcatccacatacttgtgagtatgttcaaagaatgacaacgacatttgttcaccttgctttttatgcattgaagtaaccgcgtcagtaataccttccaaatggcaaaagagaatcgcgagaagcattgtatctctacacttagcatttttcctacaaagacgataaagaaagataacatgtactcaacaagaatcatataatacagtcagcataaccgtcaatggataaaaacaaagagcaattgaataattatttaatattatcccatatgcacaaaaatgaaatgtggggaatatccacgtttcatgagcaattatggatgaatagatcccaaggaaataactgtcaccctatgaaactataaatagggacaaaatctagggtaaaaagggatgaccaatctagagaaaaagcatgatgttattattactgatatcattgtattctgtattcaaatattattatccttaataagatagactcgtggactatgaacatttaacttaagaccatgttaaaaacttccttttatttatttattgtttgctatatgattaattctgtagttaatttattacaaaaaggttgatatttttagctagcaaaaatctacgttaataggttggtgctttcattaacagcatgtgtagtgaaaactcaaaaaaacaccttcctcaaaaatacatctcaaaatttgtactcatgccagacggtactcagcgttatgaagagaatcagcccaaggagacaacttgtcaccctggaaaggaaccttagagttcgtagagaactaacacaattggaactccccgttctggaaggaatgatggagatttctgttggaattttattttaccaggatct

SEQ ID NO: 304960 - DNA, 3924 bp, Cannabis indica
aatgaattatttacaaaaaaaaaaaacaaaaaagataaagttttaataattagataaataaaatatttagtgtgattttatattatagataaataaataaatctgagatttgatattttattctcattttcattaatttatatttttttttggaaattacattgtatacctattttattttatttatttttatttttaccttcattttcatattctttaaaatataaatctattataacccttaaattaatataaattatgtgctgcacttaagtggagggcaaatgatatattaggcaactcacttataaagatatattaggcaactcacttataaaagtgagtagattttaatgaaatataatatgagggtattattaattaataaataaaaaaagggaaacttataaaaatactagaattcgagttaacttttacaaaaatactgtcacacgaaaatcttttcaaaaatactttatttttataaaacaacagtagaacacaaaacagaacaattaaaaacaatagtgtaacaattaaaaaataacattgaaaacttaacacagtacacagtataaaacttacaaggtatttttaaaaaaatttctgctaagtgaaaaagttggaaatttgtattcatcaacttattctaaattttttgggataagttaaaaaatacctctttttttgtatctattaattaaaaataccatcatattatattttttaaaaatatactcaatatactaagtaaatctagcatataatttgtattaacctaagaaaatattatttataaaaatagatatatattaaaaaaatattaaaataaaagtaaaaattaaataaataaaataaagtgagtttaaatataatttcttaaaatgttttcgtctaaacaaaaattgggccattggaaggggcaaccactcagaagtcacaagagactttataaccttggttggagtagcaaaactgcgtatattttctacactccaattgtgccactggtgctgggagagagagacagagagatggagggcaatggcattggaaatggcaatgggggtggagtagaggacatgaacgagccggctctgggggagtgcttgagtgggtacgttgaccaaggaagcgtggagagtcacaggtactatcgttctcggaaaaccgtaatggagatgcttaaagacagaggctactccgtaccagcttccgaccttaacctcactctcaatgactttcgtgccattcatggacagtctcctgatcctgaacgcctccgattctccgttactcatatcaagaacccttctaagagggtaactctactcactcactcactcactcactcatcatcaccaccacttcttgcagttttccattctttatttttgaaatttgattagtataggttcagattaggtcgtaatgggtaggattgaggtctacccttttctgcatgtcttccgatgctttgaattgaataccctaaacctgtatttgttttttctttcgaaaatcataagcagcttgtgttttttgaggatgataactatgaaagaaaagccttgatgaatgtgtgatcattatttttacaacgtcgtttgagagatttagtgttctttggaaaagcagatagagaatgagagaagaaaaaataatcaggcttgaagaaaatattcaccattaaccactcttgtttttttttttttttttttcttgtttcttccttttcatacttcgttaaaaacttgtagtttggtacatggccttttgtgctgattttagaagctaatgctaaattgtgctgtgaataaaagagcggaagcccttcctattatctggtagagattgtccatttcttgacgaatttatgagctttctggataataagagttagttacgtttattgccttgatttttggtctatttccttacaaaattgtttttgagaattcgagtttagatgatgtcttatccaaatcaaaagaaattatagaaatttttctcttagaatgaaggttattatctctaaaaggagggggaaaatacaaaaaggaagaggaaattaaagtcttatatttgtcaagcttgaaatgtagtcttaggttgctatgaatattgagttcattgttgttccttttgttgcagattcttgtcattttctgtgggcctggtgcggtgaaagtgaatacagttagaagtattgcagctcagattgttaatagagatactttaaaggggctaattttaataattcaaaacccaataacaagtcaagctcaaaaggctcttgattgtttgtctttcaaggttgaaattttccaggtatattttttctgacaaatgcaaatctttgttttcacttctcatgcttaatttttcgattaagtgaaatgaagctcttaggtattttccaagttgtgactaggcatgggcagtaccttagaaattcttaatctcaaacttatgataacttcattgtcttctttcattgtgtcagattactgacttggtctctggccatgatttttgtaaccattctaataagcaaggaagtttgagtgaagttttaaagattatgatagtgacccttatctcagagtcttagacttagttaacatagtggaaaagtaatttgtttttgactatagctagatgcttggccaccaaagtagggcttcacttcattgatttcctagcaagtgacatctgacagagattacggataatcttctcaatttcactaaaaggagatatggtggggtctagtacaaaataatttatggtttttatcttgtaaatattgttaccttgcctgccttgtttgaaggagcagtttacaaaatctctgccttgtaaatatttcagttgtctcttttgtttgtttggtcgaagttacacacactagtattaaagacgcaatgggttgagctagtttcttatgctgtttttaagtactttgcaggtgaaaataagctttgtttatccaggacaagattgtctaactcgaagtggggttgggtaattactgcttcaatttagtgtatgtattgcttgaatgttaacaatgactttttcttgcagctacctcgaatgttgaaagaagatgcaattgctgaatactatggacttcagaaggggcaagtggtgaagatttcgtacactggtggaatctccgactcttacgttacatatcgctgtgtatggtgatcacttttatgtgcagttcattatttggtagcatacttctagtgttatataaaggtaagattgttgacctcttctgaattactgccgttatatgtcttgtgggattttggctcgatgtttctgtcattgtgtgcccatctgtggtttagagatgagattacacttttgtgggggcgagttataaaatttcatgttccaagggcacatagctggtgaaagaatgtatgttaaacaagtacttttgttacaagatgacccgattaaacgttacttttccttaccatgtggtttctcatagaacggcctgtcgtgtttctttgagggttgtcctttataaaaacaaacaacattttcgtaaagaaatggaaatggtcttcgtttgagccatagcattgtactgttagtgttggaacattattgtgaattattaaaaacttgatgaaaagctgctatatgagatcctttaaaaattagtcctacatgttttggaatacttataagtgattaaaaacttgatcctttagaatcaaggaacttgtttggtactgttttctgttttttgttttcaaaaaattgtctttagaaatgagaacaaaaaatagtttttgaaatttataaaaacaagtcatgtttggttagtgttttttaaaaacaatattgaccaaaagtaaattggtttttaaaacagaaaacaacattttgttgttt

SEQ ID NO: 304961 - DNA, 749 bp, Cannabis indica
aaaattcaagtagtttagccgccaatatctctaataaaaataataataaatgaaagattagagggtagggtacacgcaatattggtgagtggtagcattagcagcatgtactgtcctgttctgataatccatcagtggtacgtacatatacaaactgtgccaccaccacaccacatacccttatctatacactactttactacttcccttttgtccctcccattcactgggccccactctccctctctctttatctctctcttacatgtgttaatttgtgtataactatatggctacgtacgtactatccattatatatgatcatcatcaccacatcatacatactatactttctaaactacccctcacattttctggaaattgcaccattatgcccttaataattatgttatgtatgtgtgtcttggtacgttgtaattggagtagatatagggtaattgagagcacaaaaagtaattgtattctgacctactcataataatgtttagaatgaaacatttatggcatttatatatactccactcgattatataaaatctatatatactcatcatcatttgcagaaacatgatttgtataatatatatatagagtaatttgcggtaaaaccccattaactatcaatttacttacaaaaaatcatccaacctcatattttagtgggaaaaccctccaaagtattgttccgtttacatttttaaggtgtcgtctgtccagcctcattaagt

SEQ ID NO: 304962 - DNA, 3773 bp, Cannabis indica
ctcaaaatagtgcagaatggattgtatgattaccattattcagaatgataaagaggagataaaaaactcttcaaaaaaaaaaggaaataaataaaatatacaaaaaataaattgtataaaattattaaatgaaggtgtcaagtcttgaactcatatcacttaacaagagatatgataatgtgtgcattaactctatcctacgaaacttttatttggaatacgaggagtagagatctgggtcgaaggttgccaattcacttggtaaacatagattcacgggtggtcttacagagagagattggatagagccatagcgtctgatgattgggttgtgtattatccgaacgcctctgtcaccaatcatcctatttcagtttcggaacatggctttattatggtagacaccggtgatgggaggagtaaggggttcaagccctttcgcttctttaaagcctggacaactgagcctttttgtgcagaaactatcaatcaggcttggggcccgaagggaacgggaggcaaaaatctcaggggtagattaaatgatacccgtcttgctcttcagagatggaggaggcagacatatggcgatcgggacttgatgattaaacaggctgaggagagattggcttggattcaaggtcaaccgattagttcggagttggctcgcgaagaggcaaatattcagtcccggttaattgagctttggattcaaaaagaaagccaatggcgtcaaaagtcgagggagatttggctcaaattgggcgacaggaactctaagttcttccatgcctccaccgtgattcgaagaaggagaaataagattatggctatcaaagacagtaatggggactgggttaggcaaggaaatcgaattgctcatgtcttcaacgattttttccttcaactattcagttccagtaacccggttatgggaagcgatttctctcaattgttttgcactgaaattactccaacggataacgctatgatcaaggccattccaacaaagggggagatcatatctacggtggctgcaatgcatcccctcaaggccccagggcctgacgggctcccagattgtttctatcgccactattggaatattgtggaagaggaagtaatcaccatggtccaaaaattctttgcagagggcactcttgataggcatctcaactacacttatatatgtctgatccctaaggtggaaaacgcgagttcggtggaaaaattcagatctataagtctatgtaacttcgcttacaaaatcatttcaaagattattgcatcaagattgcggggagtgattgataaacctatctctcctcttcaatcggcctttatccccgggagatggattgccgagtcctcaattctaacccaagagctagtgcacacgatcaaagcaaagaaaggtaaaggaggattaatggccgttaaattggatatgcataaggcttacgacagaattgagtggatgtttcttgagagagtgttggaaggtaatggttttgatgaaaatgttagagatctaattatgaagtgcattacaacagtctcgtactcggttttgttgaacggtattcctcaaaaaaagtttgtccctcaacgaggacttcgccagggagaccctctttctctgtttctattcctcatgtgccatgaggtgttatcaaaattatttcttcaacaacagggtaggggtaagctcaatggcatcaagatctctcgatcggccccttccattagaccatttgatgtttgcagacgatacggttcttttacgcctgggcttaatagagcaaacgctatggctatcttggattgtataaaggtctatgagaagtggtcgggtcagaaatgcagccttgataaaactagtgtgctcttctccaagaacactttgtctaacgtgaggcaagatgttctaaggctgctccgagttcaagaatgcgggggtaatgaaaagtgtctcgaaaaggagaaagagggaggacttcaaattcctgagagataagatacttcagaaaatagaagggtgaaaatcaaaacttctgtccttggccggtcgaactacactggtcaaatctgtggctttgagtgtccctatttattctatgtctacctgtaaaattcctctgtcaacttgccatgagatggatagcttgattagaaaattttggtgacgagggggaaatgataaggacaggtacatggccttaattagtgggattcgttatgctgccccaaggctatgggtggattggggtttagaaagatggagcatatgaattcagctttactagccaagttagcttggcaagttgcgactgatttcgacacaccgtgggtgaaatgtttcaaggctaaatactgcagaaggaattctttttggagtgtcgagagtaagggctatgattcagctacttggaaagggattcttcatgcccgtgagatcattcgaaacggtagtatcactcttgtagggagtggggcggatgtcgacatatgggagcaaccatggattccatggttgaattatgaagagttttcatgtctaatgcgtgaggtgcgagttcggtcccgattgctaagttctgttgcagatatctcctctcccaatggtgactggaatagacagcgagtcttggagatttttggtaatgatattggctctagaatttgtgaaattcagagactccctattctcaactcagatatgttgatttggaaacattctggggacggtgaattctcggtcaaaggggctcttaatgtctgttccaatatcaatgatcacgatgccggaattgatagcaagctttggaaattcatttgaaacgacaaggtccactttagactttcagttttgatttggcgtgtcttggttggttgcctccccaccaaggataagctgcattttgtggcgaaaaaaacctgtcttctgtgtgattctgcaatggaaaccagttcccatcttttctgggagtgaccattcaccagggcactttagttcggaggtcctttttctctgaatattgataatgggacatctgactcttctccgggaagaatgatggaaattcgttctaacattccgtcgggatctcgaggtatccttttgttaatttttttggttgccttccgggctgtgtgtggaaaacaaggaatgatctcatgtttaaaggtcttcgagtgaggattgacaatgctttgaagaccctgctttctagatataaggaagccattgtggggtgtaatgcggttcatcaggttcagataagggattgtagtccgacacagctttttaatatctttgaaagcaattcaaccttcatttgtatggtagatgcatcttggaaagagggagatgcggggctggcagtggtgttagtcgaaccaagtgcagggtcttcgaagtggatggctaaaagatgcaaggcagcctcacctatggaggcagagatgcttgcgatctgctgggcattacagttggggaaggatctggggcatgactcaattacagtcctcaccgatgctcagatccttgcaaagtctcttcaggcgagacggtgtcccccggtgtggaaagttaggcctttggcgcttaacattttaaacttatgctctgcttttagttcttgtaactttttctatatttcccgttcagacaattctataggttatagtattgctaaaaaggctaggattgatggtcatgttaccagccttttgtttagggaggggtcccctggtgtgatacccaattttct

SEQ ID NO: 304963 - DNA, 3365 bp, Cannabis indica
gattaaatggtttcatctgattaaatctatcaaaaataataaatattaaaaatagagtttaccttctgcaaaatcttgagctcatcgcgggcattccagttcatcttcttgatggcataaaagtctccatcaattgaacctttatagacagagccttgaatcaagcaactttcatggaacccattagtggcttcttcaatctcatcaatactaaacactctgtacttatccaaacaccctgatacatctgccattaaactttcttccatctccttagtataaaaccctttattcttgttacctttcccacctttatagagttcttgcctttgcttttcttcatcaccccacagatctctctcctttctcattgacttttctctgtacaaccaaagcccaccaatcaaaaccaccaaaaacccagttatccccaacccaactgccagccctgtaacgacaccctttctgctgtcgttttctggagaaggaggagaaggaacgacagtgggctgggacagggctgggagcttagaaactgggatgaaaatggtgtcgaaaggcttgatgttgttgccgttaacggtggttatggactccgtttggactccgaaagttgcagccacagttgatatgttatcagaaggctggaaaacgtaggagatgagttgattggcttgatttccaatctgggttttgtttggacacttgcagaagattgggaaaatgacactaaccccaatagtgagatttacaggtattagagttgggttaactagctgaacagattggtaagtggtgaggttttggaagtactcagttgaggttctgtaaaaggtgtcatcttttttgattgtgtagctaatgttggcatacgatatggccatgctgctattgactgagttgcaagaacatgttacggggatgaaaaggggttggtttgggactagtggggaagatggagaggttatattacttgggtttgagatctctagtctgctaagtgaaaagaggtcgcctatagtggctaagtccaggaaatctggggcctggcctctgtaaaagacataggtttggcatgggctggtggtctggtttatggtgcacttgtagcctatggtgcttggttgagcattagaatggaaaatgatgaagatgaagaagaagaataatagtagcagtagaagaagagagttgtaacgaggtttggctcttgtcattgtgtttattgtgtttatgacaagtttttgtgtttattagtttatatatgatgtgagacgtgtagttttagaagatagaatttgtagaatgaagacaaactattttcgtgtttactatacactcacctaatcctactttctaaactatacactttcatattctaacagtctggtctttcaacagaagcttctgctgaccttagttgtaattcatgaactgtatatgactttatggcaataacaaatgggaagagttcccaatgagactaaaagatcctcttattggacaaaagtagcataaagtcatgtactacatattaaagaacattgaaaatccacacagctgacactagaaccatgaccagcatcataagttttatgttggactagaaactacacgtgactcaatctgttgaaattgttatgagatacgaagtaatttggtctcatacgacagtaatattattcagcacagcagatattattgatcaaactcgactcagttttcccatttaatttatttcattttcgttcaaagttgtttactgtagaaaaattttgatgataggtatatagttgtggccaacttctcattattttgtggatttgtgaaatctagatacaatgtataaaattgggggaacaagacaagggacatgatttgttgtaacactacatgccattaatactttagaaaatttacaactactcggtcgtatctataaacaaaacagctcattataaggtagctgaaaatataatagtaaaaaaaaaaaggagaaagaatggacagagaagcagcagaaaaggaagagagacaaattatgtatacctttcatgtttttggtggctaagaatattcattagaatagatggatctcatctattttttattgttgtactatccttcttgatggtgaaatcccaaaggtctccatatttctcattgaaatcccaaatgtccattgtattgtagtcagaaattaacttgtcacgagctcctctttccatattgtaaatttggggctcaaagtggtggggtttatctggtttatccatctcaatgatgcaaaacaccactgtaaacaaacctgctccaatgaacacgtactctccctaaaaaaaaacaagtagaaaagagtgattttctactgaagaaaaaatatgataagaaattgaaccttagataaggggtgtttccttgttatatatttacatacaggagcattaaagtacatcccagctgcaactgctggaagaaacaaccatgaaataagccctgcaacacattaaaaccaaaagatgtttaattttcacagccatgtacattttcttctatagtagaaataaggagagaatcatcatgttagtgaactagaggaattccaatatggttggtaatctcctacaataaataaataaataaaacattccaagcacaacaaataacaaaaatagtcttattgggtatctataaagtcctggttagacactcctcttacattattgaattaacatgaagtagtctttgaaaaatattattaatacagaaatactttgtttttgaataccaagcgtgaaaaattcgcaatccaaaggtgttagattccatctgtaattttaacttaagttttaataataaaagaaaaagaaaaaaaaacaaatggaattttaataccaagcgtggaaaattcacaattccaaaggtgtcggattcatttgtacacagactctcagcaacttgaactatcttctttgtcatttaataaatggtgagaagtgagaactacaaaagtagttgacaacattgaacattctattttgcaataatgaaaatgtatcatcattatctcaacaatgttaaaatacaaaaaagagaaaaaaggtcagttattaaaaccttggaaaccagttggtgggtctactgaagcgatttctgatgatagtgcttcccaaaaagttcctgaaaaataagataaacaaagcatcatggatccctaatttccaagagtaacagttaggtataataacattgaattacataattataagaaaaaactaatataataacttaattagttcacatagcatatgataacttaatccaactaaaaaaatttaggtggcatttggtaacacttttttaat

SEQ ID NO: 304964 - DNA, 1234 bp, Cannabis indica
gattgattagtgatattttttaaaaattattttcttaaatgatatgagattcgatatttaattacaccaatagcagtatgacatcaaagaaagtgctagccaccaataatatttttttagcaattttctatttaatatgtaccagaaatgctaatgagcatggtaattaacatctttataaagtataatattactattgttataatttaatatcgaatctcatttatttattttaataaaagtacttatagaaaatttttaaccatttataaggcgctatcttaatccctcacaacaatattctatatctaatatttaaaaaataatgatatgtgcacacataatttacacacaaatatgacacatatatatgtaggaaataattacaactaatcatctttatttaagatggaataaagagaaaagataaaagagaaaagagagaagaaagtaattgagaaaatatctttgtatttgattctttgtaaaaataattgtgtgtttgtagacaagagttagaatcttttatagacaaaactacctaacaataaactaactgaaacaagaatcaaataacagaaagttgagttggaacttcagcactaactgaaaataatagactctaacaaattactgaattatatctctcaacatgtccctcaagctgcactgggaatcaactagagacaacttgtgacaaagaaagttaaactttagaagagtcaatgatttggtgaagaggtcagttggttattctttaatgggaatgtagcataatgtaagttggtattgagtaaataagtctctaacataatgaacatctactttaatatgcttagtctgagaatgaaacacaggatttgatgcaagttgttgagccccctgattatcacaccagatcactggtttgccaacagtattgatgccaagttcaacaaggattgatttagtccaaactacctcaataacagtagtagatagagatctatatttagagctagtgctagatcgagctattaatttttgtttcttagagcaccatgaaatgagattaccaccaagatcaagttaagcagtacactatagaagactccatgtcattaagataacaggtccaatcaatatctgaaagtacttctaaagtaagtgttgttgctagcctaaacacaaggccatgatgaatggtgtaaagcccgcttagttaatttggaaattagcagttatttatgttaat

SEQ ID NO: 304965 - DNA, 969 bp, Cannabis indica
aaaaatatgatttatataacctaatttaattaatataatacaatacaacttaatacgatatatcaaacgagtttatataaaaaagtcttctaaatatatttaaatattctgattaagtttgtttagattatagaataatcattaatacttacatgaaaaagaaaaataatgcatacacttgacaattaatttaggttattaggttaagtctcacttgaaaatttgaggtagatagtaagttattttcaaaaaccttattatgtattgattcagtcccaatcacaaaactgatagttaggtacatacccttatatttaggattcaaatctttgatttattattattactaggttattaattatatcaaacattattaattaataattatacaattttgcaataagatagaataaatatattgctaaatctataaaattgtgtatgaaattgacaattatttacaatcctaaaatcaaacaaaaataaattaataatatgtaacttcatatagtttaaaaatatttcttcttatatatatacaacattatttcattgtttttttttttaatgtcattgttttaattttaaacgcatgcaatattttttaaaattttaaaaagttcactaatttttatttttgacaaatatattatatatttattattatatcaagttttcaggatataatttagaaatttattccaataacaaaattcatcaacttttataaataagtaagggtaatttgtggccaaactctttacattttttaggtttagcacgaccaaccctcattattaaatttttgggataaaacttcccgaattccagttccgttttggtctccactatcccttctattttagtcagttaagtgtcaaggtggactgccactgtgtacaaaagctgtaacgaccccgcttcaagcttccattgggcccttacacccacggaataatgactcttata

SEQ ID NO: 304966 - DNA, 3548 bp, Cannabis indica
aattctgaagtagtgtttgtcatgatgagaaatcattttgctctgcttggttagttgtactttatatctttggttagtggttaaaggagcattaaactgagaattctttatggttgaattgcttttgaaggagctgattatgaaagtaagactgacttttcaaaccctcaagttactactcctatttcggaaaaagggctccaagttttcacctttaagcagctgcattctgcaactagtggtttcagcaagtcaaatgtggttggacatggtgggtttgggttagtataccgaggagtcctgagtgatgggcgcaaagttgcaattaagctgatggatcaggctggaaagcaaggagaagaagaatttaaaatggaggtttgatcattttacttattcaacttttctctattttgttctgggtaatcaagcatttatttatttatttatctttaaagatgtatcactatgaatgtggaaattcattgtgggcatatcattaatggttttgtgtttgatctcaaatgtgaagtgggttactaatgatatgcaattgtaggtggaattattaagtagattgcggtctccatatttgctgactttggttggttattgctcacatagtaatcacaaagttttggtgtacgaatttatgccaaatggtggtcttcaggaacatttgtaccctgttggcggtaagtagcatactttactattagtttaaagtttttattatgtctgaactgaaaaaataaaaaaagaaattggactccttgcacctttaattatttccttatgcatattattacctttgggagtgtcagagtcatatatatataatgcacactatatattagttcattattattctttccactaatcttctgctacccaacacaagcgtgattgttttggaagttttaagtaatttttgtagttgtgaaaacttgttttacctacttgtctaactatttgcttcactggctcattttccctttctcgtttccatttggtttggggcatgatgatatcttagttattgaacaggtataggctgaacttatgtgtccttgggttcgtcctactataaagtataaactattttttaaaatttagaaaattagaaaaatgaaattcatatggttaattaatactttttatgctgggtatgaaacattgaaagccctgaactgagataagggtacagaataaacgggtttgcatcctggaggtcctttatgatgctgctagaggaacatattgaaacaatgtatgtgaatgaggacaatgtatgtgatcatgtcagaataacggataaattatgtgctctaattttagttttgcttctacactgcatagttattatttgactaattaatgggcatcttaattttattgcatcagataatgtgtaaatcttttcccaactgagtgtgaaatctttagatgaccagctttcaaaagaatagatttaatatgctggcactctttctgctgtgtcaatgtgctatccttagtgtctattgtttcatacttgaagtttttatgcaatattttatatttgaggaggcagtttgctgctgaactttatttcatgttttatgtgtgcaggttcaaatgctccgtctctaaatttggactgggagacacggttgaggatagccattgaagctgcaaagggtttggaatatctccacgaacatgtcagtcctcctgtgattcatagagattttaagagcagcaacattcttttggacaaaagtttacatgcgaaagtttctgattttggactggctaagatcgggtctgacaaagctggagggcacgtctcaactcgagtattgggcacacagggatatgttgcgcctgagtaagtgctctgatttaaactgtcaatagatactcaagtgtttattttagttgtgcatcccatataagttgtattgcaattcctgctgtcatttaggtatgcattaacggggcatcttacaaccaagtcagatgtgtatagttacggggttgtccttttggagttactaacaggcagagttccagttgatatgaaaagaccttctggagaaggtgttcttgttacttgggtaagtttttctaggtctcctcttcagttcttaggaaaattgttagttgagttacttaacagattatccgcttcttgcttttggtttcagtcctttaaataaccatgaagtccatttctaatcttatttctctgttgtttttttcacttatgtgataggctttgccccgtcttacagacagggagaaggttgtacagattatggatcccgcacttgagggtcaatactcgatgaaggaggttatccaggtggcggcaatcgctgcaatgtgtgtacaaccagaggcagattacagaccgttgatggcagatgttgtgcagtcccttgttccattggtgaaggctaacaagtcaagttcaaaggtaggaaactcatccagtttccacctgacaaagtcacccacaacccaagaccctggtaaagtaagcttatgaaaggattatctgtgtaatcccttagctaaggtagattaatgtgcagttttagacggacccttttttactctaggcatctgtcatttgaactaagaagccaaatcattgtattgtataatgttttctgaagactataaagttttggcagcaagaaaacctagtaagattaccatattaagaaacatcaacctaaactatgtaacaaagattatgtatcacaagtgaagaaagcataacccaattttgttgttgttaactatttgacctgctttttaatactttgaggttatactgcagtgatgttcatcttgagaaacgagttttggttggagttagtgagaaaatttcataacaagcattattcaaaccattcttcagtctcaaaaattggttagatctaatttgtatgagttttcatgtttcgacacttgaattgtataagttggtcaaatttcagaaaatggtgatcttcaaaataaagaaaattttataagaaaataaagctaaaatttaaaaaatttgacttatgttttgatcagattttggagaaagtcaaaacatagaagttttatctcttttttaactttttaaaacatcttgactaatataattttgagcaatatttaaagagttatgactaaaatattatcagtcgtcgcactaggaagcttgctgccaaaaatcaagctttaaatgctgcaacactaccatgtagtgtcgaggcccgtgtgaagaattttgcacaaggcttcacatgaaggagggcacatactacaacactaagtctgtagttgttgggttttgtgccctaaataaaattcatttcaatataattagatttactaattaataaaagatcataaattagtttatgttgcatggttcgcatgattatatgtttaatgtataaattctattaaatctaaaacatatagttatttatgattataatgttgttaacacagtggaatataattgtgattatatgttttaaagtttaagtcccatgatttgt

SEQ ID NO: 304967 - DNA, 1171 bp, Cannabis indica
aatgtatatatggtacatagatattaataaattaattaaacctctatatgtaatcctaatattttgcaatatatatttattcatcttggtgatcatgttctgttattaattgtaacgttgtaacaagtttaattattcaaagttattattatttaccatgttgattagagagagggaaaacaaaaacaattaatctttttcattaaaaaatgcatttaccacaaaattaataaattatatatgcattaatggtaaaatatataaatctttcctaatagtattattttattttaggttaattagtatttttgtcctttaaactttaacatgtatcaaatcacgtcccgtaaactaatctgaccgttaaaaactttttttaaattattgaaattgttagatttaaagacatttatccaattgcattcaattttactaattcagtatttgtttatggacaaaatcatgctcctcagattttggtatttaccaaatcatgccctcaaaattttgacatgtaccaaattatctccctgtattttcatccatgttaaactttgcttactaaaattagacaaaaatccttaaatccaacaattttaatagtttaaaaaaatgttaataaccttaaaagttcaaagacataatcttaattagcgtatgataagtgaatttttggaagctacgtacccagccccaggtacatttttttttatatttaatcaaaaattagtgcctcgctaatctattaaagtagagaaacattgtctatggatagatcttatattaatatataatataggattattattattattattatctatatatacacgtgtgagctgttataatcagctgataattagattatcagtttctattaagtactaaacatatggacaggtttaggtggattcggtcggttataacatgaaatgtcttattaacaaatagagacaccaaaacaaagaagcttctaattttgatattttcttacagtaaagaaaatcagtcaattaattataacattttatttatatataccttatcatatatgggaacaattcccttatatgataccaaaatgtgtcagaagaaaaaattctcatggtttcatgctctttgaaatcaaatcgaaattgtctagttttaattttcttactatctatgtata

SEQ ID NO: 304968 - DNA, 3759 bp, Cannabis indica
agagagagagagagtggcacagcacatgcatgtgaccagctagtgtccacatacaaaataatattattgtcaaatatatatgtattgtagagatatggtgctgattttgttattgtgacctaaagctagcctacctctctaagtttcaagttccttttcaactaggaaaattagagactatatatttatcacatgactcgtgttcataaagctatcattttattatgctccagcccaattgcctcccgcattcaatctttttgaacaaatcaaaaatatataatagacttttatataaagtgtatagagtaaatttatcggattattaacaagcctttatttaataaagtatgagtgtatcgtatcgaaaatattactttataattaataaaaagaataaatatatatgtggaatgttgtataaaataagttgcaaaagttaacagataattcaatatctaaaatgctgatcgaataagaaaaatgtgtgtgaagcttcgtttcctctctccatgaggcggaggaaaaagttcgaaaaattcaggtcatcgcctatgttgcgaatgctaaaaatgttcgggttcgatccatggtggtgtaagacttaaaccaatatgaagttttgcaagatacctaatctgatttaggtaacgatttggggcctatccacgctgagattggtaatgaattgggaatcaatccagggtcccaatagtggctgctcagcgagcgggaacttgggcgaaagagctagagagagtggattaccataattcaatgaaagatgtttggagtaaattcaaagctaattaatagtttgtgctcatactactaaacttgaattactgaatctttgaaacatgggatcaactcattgctaaaatttatgctgatgaaattgttacggaaactttttttttgggaaatttttgtgatatgggttgttttattaggagttaattcctcatttccgagtgttcgaaggtttcattaaaagggtatggagaaatctaggagtggatcgtatagtgcgaatgcactatggtttcactcttgtgagtttttgtgagatagctactagagatttggtcttgaaaactgaggtaatcaattttgattaaaaaaatccaatggtaattagaccctggacgagtgatcttgattcgattcatatggtgcattcagttttagtttgggttcgattaaagggcttggtttacagtactcgagtaagaatagcctaagtactcttgtgagtacgttaggaaagcatattatgattgataaggtaactcagggcatcaatgattaaatatgcaagagtgcttgtagaagttgagatatatatcagataagctccataaaaccattagttatttcaatgagagaaatcaactcatggaacaataattagtagaatacaaatggctaccaactaaatgtggttcgtgtgatatttttggaacataatgtgagtaattgtggtaaggacaaaaggcttatttgggttaaaaagctaaaaacatatcaggtgaaacgaaagattgtagagagtaatcctcaaaaaacttaggagactgcttcagatgctgagattaaataaagaggttgagattattcagtttgttggttctaacactggaatttagccaatctctctaaggctataactgtgttaccatgggctaaaaaatggaaaataggttgggaatatccatgaatctgctagtggtgagtggattactccaacgaaaattagaaataaaaaatataagggctcaggggtggcaacttccattaaaaacacttatgaagcactttaagagccaactgttgaggcaggttttgatacttctacaaataatcaagatggagtggtgcaaccttctttattggaatgttaggggtatgaataaagtcaataagcaatgttctatcttgaatctttgccgcttgaataagattagttttggatcttttgaaaaccaagattaggggtgagagtttgaagactatgatgaataataatttccttaaatggaattactaatatagtacaataattgaagggtgattctcttattatggcagaattttttttgtccaagttgaggttcttgatgctcaaatggttcattgtaaggtcaaggcaactggtcttaattatgtttttttattatagttgtttatggtaaaaatacttgtgttaattggaagccactttgggatcttcatgtcggtattgattttaagaagtgtctgtgactagtaatgggggatttcaatgccatgtttaactatgaagatagtgagggtggtagacgagttacgcaatctaacattatggatgctcaacagtggcttgctcttggccaagttgacaatctgaaatgttttggatcctattttacctagttaaagaaacatgatctaggtgtttatatttattccaagttggattggattttttaaaataaaagttggctagcttgacttatttcctttgactgaagcaatcatgcaatggaatgttattttggatcattgttattatattgtcaataaattgggaataaagaagatgtagattaaaccttttcagttctttaattactggatggagcacccgtggtataaggagctagttatttaaaactggaggaaaccgatgtgtagtaaagggttgagaggtatcattggtaagttgaataggcttaaacactacctaaaaaaatttagtagaaatattttcagaaatatctcattagattaccaagttgcaagataactaaattatggctcaatcattgttggttgctaatcaaaatgatttgggtctgcaaatggtagaaatagaagctacggagtaatttgaccttgctagtgccaaatatgtgagctatctccaataaatgagtaaaatcacttggcttcggttgagtgataaaaataaaagctacgaagaaggctcaaaatcagattactacttttgaaaaaagtggtagattatagatgatatgatcttgttgttgatcattatttttctcatttttgaaattttatgggtaaaataagtttatctacaagaaagattaatttggattgtcttgcttatggtcccaaactaaacttgaatcagatgctttctcttaacagacttttcttgaagaaagatgtgcaagaagctgtttagcattcattcctctaagagcccagatctagatgactttagagcgggtttctttaaggggttgtggtcagagattagggatgatattactttagttgtgctagtctttttcaaagaggggtgaatccttgaaaagctaaataaggttgttatctctttgatccccaaaactaattctccttcctcagcgatggactatagacatattgcgtgttgtaacactatccacaaatgtatctctaaaatgatgtgttacaaaatgagtgagattattcccactctaatccataacaaccaaggagtcttcatcaaaaagatgtcgctttcccataacattctcattaactttaatgagtgaatcaaagaaactaataacatgaagaggagttcatgattactcaagatttaggccgatctactattgatcatcattatcatataaattaggtttttatagtaaacaacatgtttgataaagacaacttaattacatatcggtccttgtcatatataatctctactatatgcaacacattcacttagatgtcatactacatcagtaatctgaa

SEQ ID NO: 304969 - DNA, 1971 bp, Cannabis indica
aaaatgagcccattgttactcggatggttgtaaggctgaccttagcttagagaagtcaaggtgctgcacaggagttctgctgcctgaaaaggtgagcccgtggcactaagctgtgtaattggcttttcttacctcgaatccaaaattaggtgtgcgggctgacctaagttgaataatgctcgacaatctcgggtcctatgtcacgacaataaaacttggtaaataacttaaccaaatcttaaatttaatcctaaacttgaaaccgtacaaactttaatccccactggcttagaaatagcttaaacatcaataaaataccctaaactaggttctagaaaaatagcttgagaaaaaccagattaaaaaaaaactagggtttcccttgctggccaatcggttggccagttccacagtaccatgtagaacaggttaaccgattcttgctgcacaaatggaaaacctagttttctcgaaccgaaaccaaaccaaaacttcttcaaacctattcaagctctctagaacaattcaataacataaaaacatcatattcaagcaatcaaaactcagtaatacctcaaaataacaaattcgccataattaagtgaattttgagttcttgaactcaattcacccaattctagacctaacagccatggaattcatccaatacacacttaaacaatcctaatttaaacctaaaatcatactcttaactcaaataaaacccacagtcctaaaattaagcaaaaccccaaacaaaattcaacctaaactttaaaaatcatcaagaacacatggaggaagcttacctcaagattctagactgaacttaaggttgatttctgcaagagaaggtcaaaaaattggggtgaactcctagttttcttctggatttctcttgagccaaataaaggagagagagagaaagtggatgggtttcgtaaatatcttgatttctttgattttatcttctacaacttaaattaataataaaatctaataaaacaaaaaaaaccatttcagcctaaaagaaatcatatgagacaaaaataatataacctaataaaatgactattctacccttccctctaacactaaagctaattaaacctaagggtattttgggtcatttctaactattctgactaaaccaagaactcaacattctaaactagtctagtataatgccaacataacattctattaccgtcgtgacatttctaaccattccatcgagtttttaccgtcgccgaacccaaaaatattttatttcaaaatagtatataaaatacccacatattctgataaattctccgtaattaataaattacgcttaattattcatataatcacatatttaataaaatatattcaaaataacacaatcataatttttgggatattacaactagtgtttatcataacttttaggattcccatgcatccatcttgcaagggatctctagctttcaatactgagataattaagattcaagaaccctgaaccaatcccacaaagataaatggttcttcatcttctgactaaaaagtatccatttttattttacaatcgatactgaccgcatactcagacaaaaatccattttgagaattatattaaaatctgttatggctagctcaatcagattatcattcaacttttatcacccactctgactgacatattcctaatccactttttggagatgactaattctcaatcaggcaaaagggtttcaaaccttaactcataacgaccatatagtctattaggtttatcaattattttatcaccactgtttagctagcctctacattggcctaaataataacaactatttaaactggaatgggtttcactgtaacgtcccctcttcaagcctccattgggtccttacacccacggaataatgcctcttatacacgagtacgtcactttggctgcttcatggactgatgactgaccctaca

SEQ ID NO: 304970 - DNA, 1908 bp, Cannabis indica
gaaaacttgaatcgccatttgaggttttgtttagagggaaaaagccatttgagatttgggttggaagaggaaccatatgtaagaataatactctcaactaactgtgtttctgttaatagtaaccataaaatttagtagatactaacgtggcttttgttggaatgaataaaaatataagaatggaaataagaataagaaactttaaaatgtgaaagaccattccattaaaatatcattctagtatgcaatccgccgatttgattaatgaaaatatatttcttgataaaaattaaaaagaaaaattgaagttattttgcagtaaaaattatttttacaagacactcggttcctaaattttacatgttatatagtctaattaactgtacataacttaagcctcaatcatttgacaaacagggattttgttaaccttgatgggagtttgagtaaattcagagaggattgctctgaactcatctccacttagagtctccttttctagtaaaacctcaactactttgtctattgcatctctgttattcctcacatgagttttagcaacctcataaccactttcgattatacgtcgcacggaggaatcaatatcctccgcaagcttttcagacatggagtttctggccatcattctcagcaccacgtcgtcactttgcgctgctggatctgtcaatgcccacggcccaatctccgacattccaaacattgtcaccatctgtttttacacacaaaaacaacacatttttatcataatgattatcctaaatgggtgtaatacactctctactctccaaccgaaacatacattatatgtatatatatacctgtctagctatgtgggtgatttgttgtaaatcaccagcagcaccagtggttatctctggttctccaaagataatttcctcagcagctcgacctccaagaccaccaactattcttgcgaacagttgttgtttagagacaagagtgggatcttctcctggcatgaaccaagtaagacctcgtgcttgtcctctaggaataagtgttactttctgaactgggtcatgaccaggagtcaatgtcctgaaaaattacattaaccatagagaccttttagtgttaagaagaagaacaagttcaaatgattggttttatgtatataaaaatgttcaacttacgcgcacactgcatggccaacttcatgataagccacaagagttttgttcttgccatcagtcatttttgttccttccattccggcgactatcctatcgatcgagtcgtcgatttctttcattgtaatcttgggtttgcctctcctaccagcaagaatggctgattcgttcatgaggtttgccaagtcagctccactgaagcctggtgttctcatggctattacactaagagaaacatctttatcaagcctcttgttgttgctatgcactttcaaaatctcttctcttccttttatatcaggtaaacccacgcttacctacaatatgccatatgtttttttagtcataaatgaaccaaagttttcatctttttagttccaacaatacgatactaatgtgagtccaatggttagttaattagttaactcacctctctgtcgaatctaccgggcctaagcaaagcagagtcgagaatttcaggccgattagtggcagcaatgacgatcactccactatttccactaaagccatccatttcagtcaacaactgattcaaagtctgctctctctcatcatttccaccaccaatgccagttcctctctgtcttccaacagcatcaatctcatcaatgaacaccaagcatggcgaattggctttcgccttgttgaacaagtctctcactctcgaagccccaacttgtaacgccccgatattttgccttattttacaaaaata

SEQ ID NO: 304971 - DNA, 1883 bp, Cannabis indica
taagtttttttttaaaaaaaaagttgggttagatctgatccaatccgagtatctgatccagcagggcggggcaggacagattcttacatgatctagatcaggtcgaatcatagccagatcaaatctgacaatcagatccgacctgatctatttacactccaaaatcccttagaaaggttctcattctagtgttctctttttttttttctaactgaatattatatatatatatataaaataaaaataaaaacatatgtacagtggaagacccaaaaactctgtcagtagggcaaaaattttacgaaaagatgtagtacacccccttaaaatagtgttttggtagactctattagtttcaacatctaggagagctttgcagtccaaacatttttcatgatcatatatgttgtagttatttatgattacctattaatttttaacaaaaaaatattgaatagtttaccgtgttaaaaagtaatgttcaaacagttacttaccacatatataagaaaaaatagtcacacatctaacaaaatatttaaatcttatttttaatgttgtaaactattcataactttttgagaatttgcaagtggtccaaaataactaaaacgtaaaaaattaaactaaaagactttcttgaatttcaaaacagatagggaatctactagaatctaccaaaatgttcctttagagaggtatactatatacttattcaaaatttaaaatacaattatgtaacttatttttaatgtatgacacctgtagtatagtgaaaaaagtctcaacatctcccctcaatatcgatgtttgaatctttgacacttcaaaatttaaatcaaataattatgtaaaagatatattagaaatcttgacatcttaaagtttaaaaaataattaagtttacttctgcactaaattatatatatatatatatatgtgtgtgtgatatagtatattctatgtctagtacaaatattttttattgatgcgatttttcgtcaacttgatcttaggagatcgtaatattaaagcagactagactaagactagcggttgccaaaaagtaaactggtttaaattaagagacagagaatttttatagttgttcaccttatttgattggcaataatgaactaatccgcttgttattttattaatcaatacctaatcacatcagagttatgttcctaaaatgtaacgatctactaaaattaggcatgctaccgtatttttcttaattattgtgcactcatttactaatcaaagggtttattaaaacacgtagataattaaaattttcataattaaactttaatcgtaaatatattataaattacataatttgggatcccattttaaaagttacataagtttgcaaaatacttataatactaaaagtcgtcgtctagcgactatcaaagtgagcctaaattatcctaaagacactgaacacttcaggtctaaccgtcttgatatgtacaatcttcaccattagctttagacccattccagttcagttctagctcttacctgcacatacatgtaataattgtgagtcgacagactcagtacaaaaagcataatcataaacataaatatatatccagaccataaccaggcgcctatacaccttatcacgacctaataactaggtaaagaatgtcaataaaagtatgattaattacgaatctagcctatactcagtactctagtcgtaatgatgtggtaataattaattcatactatctggaagcctagcatatatctattgatatctcagtgcaactctatatacacttcaataatatcctaatatgctaacctaatggctactgatttgcttgttaggctaaaattagtctaagtttcgggtcgtattt

SEQ ID NO: 304972 - DNA, 1481 bp, Cannabis indica
attctcttaaaaaatattattttcattagtgaaatgtaactttacaacaagaatattataaatatatttcacatacactcactataaacaagctgatgtatttatatatataatatatattaactgtattgaatgctaatatataagaggcaagatttgtagaaacagtacttttatctctcactgaattatttcgagtgtattttatgcaagctaataagctcgtttgtctggcggatatggtattttccgtaaacctctcatcgagaaaattaatagcggggtagcgttagctatataggtgaaaagactttgaagttatattactccatgagtgggctggggatcgagaaaactttttcagatatgagcagcaggaactaataatttcataaccccatttctaaaagattaaggaaaacatgattgtagatatgctcatttgtgtcattttatatatctgctcttttgctcgttaagctagctatatagtattcctaaattggtaagggcggctaagcttgaccaggaggtcttcccgactttccagctctcctgaaaaaaataaatatacacatatacattaataattaattagtaatttacaacacaaaatattattatttattttttgctaagacaaaatattattattatcatatagactaattaaagtgttatctttgctatctatgccttaacaaacacttaatttggaatttggaatttggaatttggaatttggaagtatgatagttggatgggatgagtgtatggtgacatacttgagttttatctcaaaagaattgataataagggtagtttatatatcttatatagtattatatttttacatatagtgggactacctaacaattttgcaatagaagacaataaaagtactttggcatgtgttttaaagcttatccgaaaatactttttgttattgttattattgtggttattattgtattagctataattatacatacatatattcgtaaacaattaagctgatacgtttcggctaatcataatttggtaaaggacaaaacaaaaggagataaagattccatgcaaagctaattattattacagcacattatcatatatatatatatataatgtgctcaggatggaacgatataattaactttgaataaatatggttatggaaaagggaataaagcaaaaataaactttagttatattttaaaataataatatgcacctggagaacaataaaacatcaatgtaacagtcagtaaagaatgaaaggtaaattattgctagtcttttcgcggtatagaatattttatagagcaaatatttatggtgaaatttttttatattttaatttttatatacttaatttttttatttttttttagtcaaaaactctctcaaatttatttttcttggtaaatacgtcagttaaatactactattaaatattaactggatgaccactatatacactt

SEQ ID NO: 304973 - DNA, 2073 bp, Cannabis indica
aataaattaatatatatagagaatacgtacgcatatctttgggatcatcaaatgctacgcaaaagtcctgtagtgggcgttgggtcgtatgcgttaccattatgagctgccaaagactaaaaaaagaagtgccaaaacgaaagttggagtcttcatgtcttactattatttatcactctcttttgaaaaagttgttctgatgtgttacatattatagaagtctgggtcacttgacaggtatttataggtggctatgcaaagattacgtagatgagcttctctttgattggtcttaggttcttttttttttttgtttttttttctcatttttatatgtttttatttggagagagggaaagtaatttaattattaatttggttacattatctatatacttagtattttacttatatataatatgtatgtgcatgataacctatatagatatatgttttattctgtggttcatttataattagtacgtgtaaacataaacttaatttgcaattggttatatgattcaattaattcgcctagtaattttacagaagtaaatataattcattttcttaatggtcacttcatcacgttctagccaaagtattcggtgtatggggaaaggagaacgtacgtactcactgtataaaaaacaaaaaaattataattgttctcattaataataaaaaatgtttcacgccaacatatataatatttcctatttacttatttaaattttttttaatttcgtatttttattagtataattaagtatcagatgatatgtaatttacaaaaataatttttaaaaaatatcgctaactaattataaagcgtcacatataaaaattgttaaacgtacccttaatgtttaatagcaatacatatatacgtacaaattagagaaatcctaagatctcacaaattgttttgataaatgatttaaaaaattaataatcagtaacgtgtctatcagtgtggtgttgacaaaacatatatcttctattttcagatttaacaaattattttaataaatagtatagaaaatcgttttttttaacgtcccatatcggtggtgttgagcagtatgccaaagagcaatgggagagcatatgggagtgacaattatcttttttcattgattaatcatattttttcagagtttgagtaaattaattttcaactaacttctggtggcaggtcgatgtatattcgtcccctaaaattgtcttttaatgtgaaaaatatatgcttaattaggcttaaagattatttttgagattctacttagctatattttgagaaacaaaaacaaaatgcgcaaattaattagctgtttggcacctttcaaaaaaaccataattatgttttcttagttacatttatcaaacagtcttataatttactataaatatattgtgtttaatctttacttctttttatatatatgtatatccacttagggctaattggaatcatcaacatatctactcaatcgatcgctagtaaatttttttgtcattccaacaattaatatatgtcacagaacgtacgtcatcacattttagtatgttgtgtattgctgtatacattgaaattcgtttgctctttttatttttatttatctaatcgagatgagtatcttcaccaacccaaacccttcaaatttaactattaattaaaatagagagagagaggagatcagcaatatcttttacaaaatatatacggatcgaattacaaaaatgatggccattatggtaactacaataaccattagaggctagtgtatgtggccataagaaggtgcgtgtgtgttagaggtcctgattcgagttcaaaattatacatagttgtaatatgtagacccttaaataaaaaaaaatggtaactaagtgacagaaataggaacatcaataaaataatgttgagaaaataaacacaataatattgcatatttaattgtgtaaaaatataaagttaattaaattttaaatatttttctatgaaattaatgttatacatttatatgttgaaaatattttgtttagattttattttatttttgtttatag

SEQ ID NO: 304974 - DNA, 3409 bp, Cannabis indica
aaaaaaaaattgattattaaaatcacaacactttttgacttatcatttacttttaaatatctcaaaatttaattctaatagtgctcgaaatgaatgtaggcaaggtttgcctacatattggcttgtaattctctttccattgattacatattatactatctttctttctaattactaaactttaaagccaagtaagtaatcagatcaagattggtaagaaagaaagataccacttagtcttacctcatttcattaagtttgctttaaagtcaagaaacgtataatatccttttattattatacacacaaccacagtttaatgttagagattatatcaatagaataaataaaataaataaacccaattataaaacaatacaacaacaacatatgacaacaacgacatatgagattgattaaataaatattatatttatatacattatatagattgttaaaatttagtaagttgtgattaaggtgcataaagtttcatctcaaaatcaattagcaatgagaaaagcaactcatttatctgatatatatatgatattttatttccacacattagtaatgtgggactaacaataatacgtacttctcacgtttgagcttagaaaatatggatataacgaacgacttttaagacaccacgagggctgaacgtgacatttgaaagaactttacaaggccaaattggaaaatttaatttataggtgtacatgtcgggaaatttgtggattttcgaaactggcacacattagccaaaagaccccaaatagaaaaaataggagaatattttttgtttgactctgataccatgttaaaatttgataaggtgagattaaggtgcataagattttatctcaaaataaattgataatgagaggagtagcctatttattttatatatgacattttatttttacatattagcaatatgaaactaaatatatataatagatagatattatgtgtaactgcatatgcttagttttattttaagttttagtttactattattattttttaaatatcataaataaatttaaaataaataatactcagtataaagtaataattgtagaaaatataacagtattttgacaaaataaaaataagagtaaaatattgtgtagtaggtcaaaaaaaataaaaattaaagtaaaaaattagtaaaatatagtaaaagtaataatagtgaatatttgaaattgaaaggtaaataatttgtttttttttttttgagaaaaagtaaataattgttaagtgttgatatttttgaaaagaaaaaaaaaatgtcttttttttttttctaaattagatgagttataatcattcaaccaactaacttttaattacaacctaacaatgttagtatcaaacttacaagtgatcactccaaactctatcatatatagatattttctttgatatttgaaattgtattctacttctaatttcaaacatgatttgtttaacaataacatgaggacattggaggctatgaagccaaaatacttgataacgatttttccaaatatggtatacggcagtagccattattgtagaaaaaaccttcttcctccacttagatagcttgttccttcgaatcaatttcaagagatcttgaatggtagtagctgaagtgacccgttcaaccaactttttagagtctccaagattttaatgctatttgtgcagctaaagaagagatgttgggtagtctcttaatggctgccacaaactatacaaatattattttacaatattcattttgagcaacctgtctttcgtttacaatctattcaacatagtcagccaaagaataaacttatgcttcggaagactaagtctatcctcctccaatcaactttgggagaaggactacaaagcttagtatatccatcactaattttgtaattcaaagaagcaaaactttttaaatcaatgacaagaactagactatcttttaccttgcatatttgtttccaatacaagctgctatttccaggagctttatatgaccaccaatcttccttgcctatgtaaacacaatgcacccatttgatccagaggttgtcctactttgaagctaatgcccacacaaatttcccaatcacaacaatatttcaagtaataatgtccctgaatcctaatctatccattgacttcggagcgcaaagcttactccaagcaactttccctgcatcattagactcttctattcctttccacaaaaaactcttgcataaagtatttattttttggagaatcctctttggtagagtcatgatttgggcccaatacgtatgaatcgcaatcaagactcgagtaataattccaattaagaaagttattatgaaccatactattacttttctcatctcgaaccttagtttccaaaagcaaagcaatcctaatcttattcaaccgacaaatatttaaaatagaaatttacttattgaatttattcatacctataactttgcaacaaaggatgttacaccaatccatcaatcatagacaaagagtgagatcaatctagatctttggctcttagagagcctcaaaggcagtagttgtagcagcttttgtgtcattactgtcataccaggctgagttttctaacctttcctatgagaagtgatccattgaccttcagaatcttgaggttatgcttccactattctattttcacctggttcattactattgactgtctcctccttttcctcaaaaaacatcaaattctccttatgttctcctacaccagaaattgtatcaggaaaagaagtaattggatcagatttaaccataggcttattcttaataactttcctcttgacttgattagatttaaacttcttaacccaaactaatcatttttctttagcacaagtgctaacattttatcccaaaaagcctacaagctgcacatgtagttgacaaccactcatattagatgagttattccgttaaatggttcttttcattcacaaagttgatgctagtaggaggttttttgaaaattggcacatccacaagcacccctgtaaatttgatcattggccggtctctagtgactttgtcaatcctaataggaattcttatagtactcacaagagcacttatgatgtgttaacacagattttcgttaaccaaataaataattcttttttacaataaatatactacagaattaaatgataataaataatacccgatattttacatgattttatagttaaaatctacatactacacgttattattagggatattttttgggatacagaatatacattttaatatttgaaaataataggatttctatctattttttgccatcccttttcccatggattctgcctctatttataggaatataggttggcagttattcttt

SEQ ID NO: 304975 - DNA, 1627 bp, Cannabis indica
aaaaaaaaaacaagaggttccgtagtgtttgctgaacaaataacaagttgacgtgttatgttatgaattgaaatgcaatttgtaaactcagatcaaatccaaatttcctttttatttattttgtcaactttttgttactaaattgagccaaaattctataatttatgtatctgttacatcacaaagttataaattcaatcacagccattgatacaataatattacatatattcccttaaatttattaccaaccacaccacgtactataattaattagcaattatatatcagcattgttatagattattaaattatctagcattgagataacactctataattaattagcaattttttataatctttaataaaataaattaaataaaatctaatataaaactacattaataatcatattatatctcataaaaatgttagacactttcatctatttaagaattctcaatatatatatttgtatgtaatgcttagctagatgacatgtgataaacaccaaacatatatataccaatgaaaaatatttaaaattgataccatccgcacaatgcatgtatatgcatttttttttttataatataaaaaaatatatattaatatgtttttatggatacttgattttttaatcactcctttgattaattaattttgtataaaaataagtattcttctcatgtatacatatacaatactacttaattaattggtctctactttctttataaaatttccctctctcctcatcccttgtaatcaactaataaatttattactctagataagtagtgttatatatataagaaaaactcaagaatataatttagtgtaacaaattatgaagctaatacttttaatatgttggtgtgtcacacaccatgcttaattataagcacaaaggaaggtcgtcctagtacatctcgcacttattgggattgaattccagcctcaaacgagatatgtcattgttagaaaatctcacgtaactaatgtaacatgaataaaatctatacgaactactcctttcatcttataattgtaacacaatcattcaagaggagagcctcgctgaaaagaggcatctatactttgggtccatttcccaaatgaggtacatcaaccaagttgtctagctagtatggacttttcaatgcccacttcgaaaagcgcaagccaccaatgtagccgaaagcgtacaaccctatcaatttaattagagtcgcacgattatattatttggtaaaacccaagaatttaaatgcaacttaaactcttcactataaataaaaggaggagaggtcccgaaaaaggatgacatctcttagtgcttaatacttagaagttcatttaagtaccagcagtgtttaacatattctagacgtatccttttacaattgattagtaataattcttaaaaattattatattaaattatatgagacttgatatttaattgcatcaatatcaatatgacattgaagaaaatgttagatactacgtatgcttttttagcatttcttccattttttttattggttatgtcatctgcattaattcgttgagtacgtacactaaaaaacaagtatatgggcaaatggatcatataaatatt

SEQ ID NO: 304976 - DNA, 643 bp, Cannabis indica
tctaagttatctttttctagccaaaagttaaggctattttcacttcttttttgcttttcaaggaattcaaagccatcctttttgacgaataatagtatggtgtcaataaaaatatgattctttctttgtgtaaggtgaaccaactatctattaattattatccagggttttggattaataaagggtgcactttcaaagctcaatatcaacctaaacaagctcatttttagcacaatcaaattaataaatcaatccactaggatcataagtctagtttatagacacgataagatcgaactactttggtccaaaaaagagtatcttggttgagaatgaaaggtccatcaggacaaatccagatactcacatggaatattctagaacgggcaactgaagagatatctagaaacctttgaatatcatcctcagtgtcagctcaagctatgggcaagagggacaattgcccgattgcccaaggcccattttattttaaaaaaaagcccttttttacatatatatcttaggaataattacataagacatcatttattgtaaaataattacatttttacgttcaaagaattttttaaaattttttatggttttccaaaaaataacacgaaacaacataaaatcaacaaga

SEQ ID NO: 304977 - DNA, 1726 bp, Cannabis indica
ccattgaaacctcttccatacatttattgttatgttcttaatttttttttttacggcttatatgaaagcctttcattactatacttataccaaaaaaatagttcaaaaatacgacatagtcaaaaccacacacatatatctttattcacttaactatttatgagagatatgtctctttattatatccctacttgtatactctttctctctaatataccaatttttctatatataaaaaaacattcttatttataaaacttattgaattctaatacaaatttcatcgagtacattgtagtagtagtatcaataataaaataaaatattagaaacaaagattaatattctaatttacataaaaaaaattagtattttgaaaaatctcatattattaataagcttacttatatgatcataataaaaaagaaacacacaaaggcacattgcataattcatttaaagttgctataggttaacaaaataatattttaatgatttatcctacatttatttttgtaagtatgatatcataacatgtatttaatttaattataaaaccattttatggtgcctttaccatttctatatagtaatttctattatatgagaatatttaccatttttactttttaatatagccaaatgcaatcaaatacaacccatttcaactttcatgtatctttaagcaacccaatacatacaatatgatataatgaaaccaaaatacaatatacatataacaacccttacaacaactgaatcttatatgatatccatgttaaaaatatctagtacaactcaatatcatacatgataacaactatgttggcaattcttataataatcttgttagcaatttaatcttgtacaataatcatattagcaacctttaaaacaactcaatcttagcaactctcatacaacaataatgttagcaaccctctaagaaacttaacttcattcaaaaataaaattatacaacaattcaatttcatacaacaattatgttagcaacacttacaacatccatgtttctaactctatctcatacaataaccctgacaacaatccatttcctcttatcacaactatgttagcaaacccttgcagtaatactactacaaaaatgagcttcaattacccacttagagggactctaaatgcttttagtgactcttcaatgcacgtcactaatgtgcgcgactaaaaaaatattatttaatgaccctgcattacgtgttacaaccttttagagtttctcaatgtccattactgtatccttttacagtcccatctaaaggtaacagctacacacaaagcgtgtcactatatctatatatttggtgaaattgacaattgtaaattttaaataataatattcatggaattggattaattttttattattattttgatgataaaaggtgaaataagagttcaatttttacaaacaaattatgatttattcttgtgtggtaaattgtaccaaaaaaaatcagaaaatcttttatgcatatattttcaagttaatctatatatttcatattggtaaaattaaacaaatatattaagtgtaaatcaaatgtggaataagttacaaacaaattacatgaccaatatttacaaaaatgggtgactattcaatggttacatttgtattgtaaccatcatggttacgtttttttttttttacctgtaatagtaggttacgaatagataaaaattc

SEQ ID NO: 304978 - DNA, 3793 bp, Cannabis indica
aaaataacatacgtgggtctcttcagcaaactagatttgaaccaagcatcaaagactttctcatcattatcattgacatcgtcaacaatagattattgcaaacataaacctttaaccttacttgtaactatagtaggcttagatgatgaactcaattaacataaacctttaaccttacttgtaactatagtaggcttagatgatgaactcaattaacataaacctttaaccttacttgtaactatagtaggcttagatgatgaactcaactgcttggcataaggagactgcaaatgtaaaccaggctttaggattctcctctcaacgggaggagtgacctcatcaatatcaataaaattctcgactgcaacattagggtcagactcttctatattaacaacagatgtcaaatcctacataaaaaagataaaaacacatatatattaaaaaaataatatataaacataaacaaaacaattagaaaaaaaatttactagattagtagaagatactaattgtggatcgtatggaactaaagcataggattgctgcaaaacaacaaaataataacattataacaataaacaaacaataaaagaaaataaattaataaaaaagaaaatacataaaattttgcaatagcttttaaaccagccataacaacatcatcatcctcaacaggtagctggctataacctttgaaaaaatcatcatcaacttttttttttttcatcgttgacaacatcttttgatacctcaacatcattaccactattcccttcaccactagctaccatctctatcatcctcctcatcatataatgacacctttaatatcatttttttcacctcgagaaacatttcacaccctcttcattctcttcattatcactctcttcattctcaccctcttcattctcaccctcatcctcatcatcatcttccacatcatcctcatcctcatgagaaaccttctcaatcttagtatcttattatggtatttcatttatatatatatatatatatattatttttttaagtttacgttactagctaatatctctttttatttgtacgatagtcttttgagtttttaattaaatacaaattctccatgttgactccatttcctctagtggttatatgtctcggaatgggaccaaccacagtccaatgtttttgacttgatcttcatcaacactttgactttacttcagtgacggaatgcagcttaccaccgtccaaatttcatagacttattaacacttctacctttgtctggtgtggagtgcagcaaactagaatctcattgctacctgtatttacgtattccttctacaatatgaatatagctcatccacctgagtctcaccattttgtggcgcgtacttaaagaggtcgacgaagacccatgagctcttgatgaaagggaaagattaaacctcatgcgtagcttatgcaattgattgaagaatttgcatggctgtgaatttcaaactaatataattaatttcaagaggtaaattattacattgcatggctttaaggctgctagaagttgaaaaactttaacgacaaataactatattattctcctatatgtatgtatgaactatatccactcatacagctagctagctcaaattaaaaaaaaaaaaaaaattgtgtatggtcaaatatatatatatatatatatgtatgtatggtattgatttcaaacttacataagtattattatatggaagtacatgaatttacaaggtatatacacatgtattgtattttggagaataacccagtataatttcgtaactttttattggggagatttaagtgtttcctatatgcatacatatattgacactacaagaaaaatagtttttatgatgagagtatttgtagccacatgaagtaatgtttagggcttacaagacttttatgttgctaataaatagattcttaaatggttattgtatgagaaatggttgttgtaagagttgctaaactatatagttgttttaatggtaattatacaagataggttgttatattatagttgctataagggttgctaaaatagttattgtatatgattgaattattaaagagttgctcaaattgttagtgtataaaattgggttgttgtaagagtttctaaaatcatttttgtaagggttgataaaatggtcaatgtatgatttttgtacgtaaaagattgagtaattattaattgctaaaagggtttttgtatgatattgggttgttttaagggttgttaaaattgttattgtgaaggttgctaaatagttgtcgtacgggattgcggattgcgatgttgtaagagttgctaaaataattttttgtaactcaatctcatacaacaaattatgttaacaacacttagagcaactcaatctcatacaccaattattttgacgacccttatagcaatccaatctcatacgacaattttagcaacccttattataactcaatcttacacaataaattatgttatagaaaccattaaaataactcaatctcatacaaaaactatgttagcaacccctatattaacccaatctcatacaatatttttttagcaacacatacaacaacccattctaataaatcaaccatgttagcaactcaatctcatacaaaaattatgttagcaacccttacagcaactcaatctcattgtaacaatcatgttaacaaccctcataacaattcaatccgatataaaaactatgataacaatctttacactaactcaacctcatacaataactatatcaacaactcttatgctaacaagtttaatgtgtttgatactccgtattgtatactgtataactaggaactttcgtattaggagttcatttctaaatggctcataaatgtcaaaggtgtcaagaaggttatgtcagattaatggcatggtggatgcggttgatcatgttggttcaggctttggtggactatagaaagctgacatgcccatatagcctaggcctcgaacggagacctcaaggccttgtgattcaagtttgattgtttttactttagaagccattgatctggttcttatttttcattggctaagtcattagtctacatatatgtaatattattgatgatactaattatatattgtacattgtttgaaatgaagaaattacactctatattttttttatattattcttttttatttttactctcttttctaaagtctattatttttactttttgtaccaatttcgcccctgtcacttcaagatactttccatgtaactctctcatatcagagtattttgagtacaatatttcaattaaatataaaattagaggtaaatttaattaattaattaataaaagtagtactttttaacttatcctgtttgaaatcttgtggcggtatcaacgtcagcttccaaaattcacctaaacacttttttttttaaaatagtcattatttatataattattgagtatacgtaacaatcagtgttgtatatttatttatgtaaataagcatatataaatattgagtacagataatcatcacataaaatatatacatgactatatataaatataatattaattataatactcatatgaattaaaaatgattgataataagttattttataatatattgctcggttagcgttcttttataatgtatttattgtgtatgaaccacattttttataagagaaattataaattgtgtattaatgaaatgattcttaaaaaaccgtaaaaatgaataaaaatattt

SEQ ID NO: 304979 - DNA, 1529 bp, Cannabis indica
tttataaacaacattagaacacaaaataagaacaactaaaaaaataatcgtttaacaacagtgaaaatttaacatagtacataatatagaatagaactatacagtattttcgaaaaataatttatcccacaatataaaagtaaaaaattaaaaaattttagtatgtagtgtaattattccaaaatataattaaactggtattgttcaacttcaaggcccatttgaattgccatattcacataatatacaatataaagtcgtgccaaatgaaataaagacttttagagtgtgaaaaataaaagaagaagacaaagacaaaacataaaagaaaagcagtcgagtccttttcttaatattaatcaataaatgaacttttatggcctgctcatcttaaagttagtaaactattattaaattttggttgatttattggcaataaattattattaaataatttaatccataataataataatgttaggttagctaagacttgagttaaaatgttagcataattttcattggttttaaatatctttaggtcattttcctcctattattttattgactttgcaggtccaataattactggagttctattgtgtaagatagtatttatattattatttaaataaatcatatgctttttaaattattattattattattattattattattagtttcacttggagtacatttgttctgttgttagggttaggtgggaatatttaactagtagtgctcttttatttttggctctatatatattataccttttcgattttctacccaacacttttctaatagtaagtaaattaatgctaagattaaaataatggatggagagatatggtacattagtaaaagtggtttttagaaagaaaaaaaattaaatttttagataaaaatttacaatttaactgttatacgaattttttttacaaaaatactatttttttataaaacaaccgtaaaataacacaacagaacaattaaacaacagtggaacaactaaaaaacaactgttaaaacttaacataatacacaatataaaacttacacaatatttttaaaaaatattccgtcccgtaaaactttttaatatatatatgatataaaaactccttaaaaaatactccaaaattagcttcacttttcagaattagaaagcaaaaattaaaaatatttcaatatcataaaaaaaaataattatattaatattaattgagagagcactttcaatatattttgattttatatactatattggatgtaaacatatagtagtagcagcagctggaaaattatgattatttaaagaaattaattaattaattatattggcgatagatcatttaatttggaccgttaacatttgattaatatatataatactaactactaagattacatttggtgacattgctatttgtactttcaagataaaatgttaggtatatatatatgtcatgaataataattattatttactatatattaaattaatatatgttattttttttttt

SEQ ID NO: 304980 - DNA, 1950 bp, Cannabis indica
aaaaatgaaaacttgtagttaatagaattgctccattagttttagtgagttaactttacaaaaataaattaaatgatgtgtcatcatcatattggttagacataatatggaatacaatatttggacagagaatcttgattccaatctcaatgcctcaggaaaaacatcgatctattccaagacatatatatttccattttgacatatatatagaataaataattgtttatacgtacatataatatttatccagctcgtaaattgaaggaaaaaaaaaacaattgtgccataattacaacaagaaaatatagtattcaatggcttcagttggaatcaccactacttctctcttctctcccacacctcaatatttgctaattcccaattattatagccaccacagaaaaatctttgcatgcaaagccacaaacaataatcatgatgaccacaaccaataaagtcataatacaaagagagcataatgacaaagcttattatgatcgtgttaagtttggcctaggagagctatatgcatggcatggcaccaccatgacatggctaataaactccaataatccctttgcaattgcaccccggccataacaccaaccaattgctgtccaccattatcttcaaaaatcattgacttcaagttacctcctgcatgtgaacaaattgcgcattaggcaagcgacaactcatacgaccaagttgggttcccaaatttgcagcttcaagttcacaaactcttggcttttctttccttttcaccgttattactagccaaacttatggatgaccccactttcgctctgcctttctggaactgggactctcctcctggcatggagtgccggcgcttatacgaaaatcaattctagcctctttacgacacgctccgggacccttttccaccagtcacctacactactggtacgtatagacagatggtagaaaacggcaaaaatgctcacctgtttttgggctcgctttatagggcaggagatgaggccgaacccggaccaggctcttatttggagagccttcctcatgggccgatcaacttgtggaccggtgagagtacccagcccaacttcgagaacatgggagacttttactttgctgctcgtgatcccatattctttttccaccactcaaacattgaccggttgtggagtgtgtggaaaacccttggaggaagtagaacagttttcactgatccggattggctagacaccgacattttgttttacaatgagtatgccctcctggttcgtgtcaagatccgagactgtctcgatacgagaaagctcgggtacgtataccaagatgttgacacgcgcgccacaccgaccaaagtcaacgatttctttcgatcggacaatctcgaccgctaattttcctttatataagatggtaagtacagttgtaagtagaagaggagcaagaagaaaagaagaagaagaggagatgttggtgattgaaggtattgagctttgaagttggatgtttacgtgaacaacgaggatgagaattgagaagttgccgtgtggacctgagatatctgagttcgcgggaagctttgttgacgtgccgcacaagcaaatggatgggaagaaaacaaagactacttgtgtgaggtcggaataacgaacttggttgaagaatatttggcggccgaagatgatgacactattctggtgactttagtgccaaagctcggtcttgccaccgtttctagaatcaaaattgagcttttgtcttgaaaagtcttactataaaaaagactttttttaatcggagaatgctaattaaaggaatgaatgtacattttttcaaatatttggtgaccatatctattctatataaagtgtgcctatataactgaattcttgcgtttatgagaaattcatggataacttttttttaaaataattttctattcaaaaa

SEQ ID NO: 304981 - DNA, 3460 bp, Cannabis indica
tagcgaatttaatggttaataaaatgacgattttccattcaaaaaattagaaataaataaaaattaacaaatatatataaaacaatattaaacgtattttattaataaaataaacaaacaaatatttattataataccaattctaaattttaaatgcatcaatattaataatcatacacaacaaaaacaactattcccttaaattttttcttaaattttcatactcaatcataccctcacaaattcactttttttcttcctaaaaagaaaaaagaaataatttgtattaattgtttaacattttaatgtaaaaataaagtaaactaacatttttttgattaaaaaaagtcgttgaaatgaaaaaaaaaaaaaagagttattgtacctgaaaatatggaatcttcttccttctagtgatgctgaaggagatgggtgttctccttacctgaaaaaaagagagttattgtaccaacaaagaaaaaaaaaagaagaaaaagaagaagaaaatctaagactgagagaatgttagggttaaaggtctgatgataatgtgttatggcttgagactaaaaatagtagctttatttattttacctaaagctttttatctcagtttttaaccaaaaaactgagatatataaaaggtccgtcctaaacaaattaaaaggttttggttaaacccttttatcttgatttttagcaaaaaattaggataaaagagtttaactaaaacttgtttgggtcccgctattgttttatcctactttaagggagaaaaagagatttttaactaatcagccaaataagacccttgatatatacatttataatttagagtctgtttgactggtcaataaaatttcaatcttgaactcattttttactatcgattttttttttaatgttcaaccaacaggacccttgtctaaaaaatattatatgttgtttttgaggtgctaagtctaaaagtgggataaaagattgcaacatatattttatcccactttttacttttgttaaggataaaaataaaagtatcatttcttgttaacacccaagttgatattccgggctagggttttaatttttaaatacgtcttagtacaaattgttcaaatttgcacttatatatgtgtaagacttatcacaacatgctaggcaccaaaattagaatcataacacttcctatttgaggtacttcggcacccgttgcccaggtcaacctgatgatgcacccagcgcccctctcaacctggggcgcttccaactgcttttgtgaagatgtttctcaaacattttttttgtcttcattcaaaatgaggaaacaagtgttttaaaaaaaaaaaacagatcaacttagaggccactattagcgcctaagttaacatatttccaacaacgattctgacgaagtcttttgggcatattattgaaattaaaaaatgagtgtgttcgggaagcaaatggagccatcaagtgactagaattaagactaattaaaatttataaatacaattaattaataaaaaagaaataaagaatattattgtgggttcgtttttagctaggagtgtgtgcccaaaggtccaacatatatataaatgagagttcttcgatcgagtagtgaacagtattatctataacacttcttataaatatatatataatatttccaccgaaacatactgatcacaataaatttaatttataattttaataaactttttcataaatgtgtatctctgcaactgcatacgtacttacccttagctttttcttcttctcttctttttttttgggtggtgagagattcattcttatcataattattgcaagtacgtgttgtgtttttttagtcagagtaaccgttatgtatatatattataatataactatatatacgtacgtgacaccactccacatatatatatttttataatatcttgtatctataatatatttatatatatatatatatatatatatttacactgaatcaaaacttaggataaatgcctcacaacctctagtttcgagataaacttatcactggcttatatattataagtactctctatatatatgcggttggtaaatattaaaaaagaactagtaagtaccgttactaacatatatataaaagttttcagaaaagaagttaaaacataatataaatttataaatgagaaaccactataattacctaacacatatgccaataaatttttctgtattatcctattttatatatataacaggttttttttttatttatttattagtgaactttttaaaatatattatggcataatattttacacatataattactctctatacatataaatatttgtctcatgttgtttggttatgcatgtttctcgttatgcctgatctaggatgtgtgtggctcccaaatataataataagttctactacatatatatctatatgtaaaaattgtccattttttcgtttaatttaaattgggctatttattgttaaatgaccatatataatataagatgcatgtattgctattagatattagtagtgtttgatactttttataagtagcattccataattagttaacaatattctctaaaaattattttttttagattaattatatgggactcgatatttgattacaccaatatcgataaaacaccaaagaaaatactaaacactagtaccttttagcaatagatcaaccacatatattttactatttcactttctcaacttcatttccacacgacccattttgtaaaatgtttaaaatatacccctaagaaacacatatttaaactttgttatattagcttaatataagacatcaatttgtacgtaaaagatcattataagtattatcaacaaaagatactatattattattgaaatcgatcaatttcagacaccttaatacactatctaaattcaaacatgatatcaacatatcttaaagcacaccttatataatgaattaaattctattagatattcgcacgtaaacggtgaatttattttgttgcatatatatgacagtaactcatcgaattaatactgactgaaattaatatatatagtaaacaatacacatattaattattagatatagctctatttcctgaatgtgacaaatatatccaactgaaatggcagaccattatatctttctaataatatttattattataatatatatatatctatttatatatataaattagagatataaaatagtgacatatgatattttaaaatttttctattgaggattatttgttttctctttaattttctattttgttattttttattaatttcataaatattgattgatataaaatacgagaattactctatatactattttttaactttttttttttcaaaatttacagtttaggttgttccagtaatttctctggtggtttctatttgagttgctata

SEQ ID NO: 304982 - DNA, 1775 bp, Cannabis indica
ttatttgttaacgggagatcaaacctaatcgttaaatttaacagaatattcttttattttgaagtatattctgttaaaccaatgccgttagataggcacctttaatatataaagatatatatattattactttaataaaaacctcgggtggccctctcttctattactaaattacactaatataatggacaacatttaattacatggtttcaccttcatccagtcgcactagctaattggctaattaataaactcatcacaaaacacactactccttccaacgctaatttccctttttttaacttatttttttctcctaatctctctctttctctatgtgtatttataatgtaaatgattttattttaactaatgattttattttttttaattattttgtttttttatttattgttattattattattttacaaaactcagaagagaagagaattgagagaggaagagaaaaatgtggccatcatcaattaccctcctgcaaaagacgaggtgtcttacccttactcgatagctctttccatctgtgaactctctctctctctctaaagccctatcctattttcccgttttttaacttttcaatgattaattcttctttttagttttttcgaacaaaagaaagtaaaataaaatcatgccttgtaatgtttgattatgtgatatcgttctatttctcttttgtctaaataacttttgtcctgtcattctgacatgaaaattaatcaaattccctgttctatttttattttgttattttacatttaatgtttttgaaaaatatatatcagttgttttttttatctctaatggtatgaataagtaaagaatgagtatctagaaacttattcttcaaaccatgtgacaaaatccacgcggtgaatattaagtagaggatgcgataaagattgagataaccctagccttggctattgacaatattctctatatcttgggatttgggaacaagccaactaagttcatcacacactaagtgcatggcaattacagataatgtattgtacaaaactaacctaaatgtgaggataactgatattttatatatttatatatgtatatagaacttctacacatatatactactatactgtttaaatatgtacatgtgtagcaattagaaaattaaaaatatggctcagagaaaacaaaagcaataataatgttgggagaaagataagaaagttactaggagtgccacacggaaatacatatcgggaaattttgaagttgtcggcatctgcgggagccagctctatatgttgctcttcatctccgacataatgtgacgttctggatcgccaaacatttacactatttttccttttcctttttgggcctttggctacatatatatatacacatacataatatagatatctatcaactgcagagatatttgttattattgaagtttgttatgaagagggcactctccatatggattattgtggggctcaccacctaagtgtttcaccaacagagccccaaataggcatatgcagtaagagacaggcttaatatgtgtcaatggaaataaatcagaccatatatatatttatatatatttttttaagagagtgtgtgacgacccgaattttaagctgtggcatgagagacatgtaatccataatttaagtaatcaaaactcatactttaacacttgatgtaataggtgggtgtgtgttggaggtcctgggttcgagtctcccgtgaaacatgattgtaatatataaacg

SEQ ID NO: 304983 - DNA, 2972 bp, Cannabis indica
atatataataaaaaataatatctatatacataatattagatttattcaagtagattgtataatggattacaagttaaggtttaaatttcacattagagttttattctttttctaggtttatttttaccttctactttaaaagaaattacgtccactcactggttgaccactgtacagtggttcttagcctgaaatattactttaatttttaaattagtttaagtgatttttattatattttttttataatttttatgtatatttatcaatttcttaaaaatgatttgatagtaaatacgcaatgcattaaaacattagtcttctttatagctacaacaaatatttaggtatttaaatattttaattaaccaactctaattataattacatatcttttcttaaaaaatatatatatatatatatttttacatatttatttttccaacaagcatagagtcttacatggttttctctaacgcgtttagtaggaaaatattttgaagtgacttagtcccacatggactgtgcatgaattttgagcttggctaaaccaaatataacgtggccatgtccttcataaatttttaacgacagataaaagattcctcttattgggttctgcgagaggtgcttaaattactcaggtaattagtttttatttatttatttattgctatttcaatttatattataataatagcatttatatttatttattttttttgtttaatttttatgggataattttattatacattaatttgtataaatattagtttaatattttatatttataagtagagatgaacaagttaaatcagtaattaccttatacattaaaatttaaatatttattagtaatattttctttttgatcaagaaaagggactgatgctgaccctttatctcatcaatgttggccaagccaagacctacgaggtagatggccgcaccagattcagttcgaatcactcactcgtagactcaattttcttactaaacaaacagtactggtaagaaaatagtttgctaattttctttctcatctttttgaataatctatatcgatgcaaaatctgtgcagtgttaatcgatctcttgtttcatgttttgagaaatatttcatacgtaatgtatttgcaaaagttttcttaaacataaatagtatttcattttcctcactgcctttgaggaggtcaagcaggtacaaatcgagacatacattaatgcaaaagtagcgatatattaatgagcattcctacattatataggtcactcactctctatgattggttaacgatattttgtaaagtacttccttaaattttataaaactcctatacttaatcataccaataaaggtataatactgagaaaggagctgggcagtgatgctttttaacaactcacttttctcggtgttatacagttattattgaaattaagtattgagttaagaaaatatttttaaaaaatatctctaaccaatcgagagaagatgctgacttacagcaatactctatttatatattcctcttactaataatgaagagtactattacacaaacaaatactgatctaacccgaattttactaaaatagaattggtgttatacgacgctcttgatgatgattatcactgttgttgtgccctacgaacgcggtacggttatggtaggtccatcagtgcaagctggaggacctccccatgtctgcccagtaaactcattatctggctgcgaagatgccacactcgtagccactgtcggagcagccggaggagttgctggtgatgccgaggatcctttacaacaattccccatattcgaatctatatatatacgtaagaaggaatctatatatactaagaagtctttgtgtactctttgagtgcacaaagcaaatatatgtgcgtgtgtattttagatatgaaagaaattcattgggtgtggacctcttatataggggataggttggggtaagttgaaaaatactatttttatttaccctgagataataaagtcacatggagagtatttttttgaagtgacttaggcaaaattagtattgaagaggtaaatatgataaattttaaaaaagagagttaaaataaaaggtaaatatcattttgtactctgtgtttacaaaagttattaatttggaccttgttattaattgcacccggttagtaaaaacggttatatcaagtacatactatatttttagtctatacaaaatttgcaggtgattaaattttgtcagttaacatgataatatatgtgtgaaaatagtttctcttttaatcaattaatagattatatattattgttttactgcgtgactggacacgcaaatcagtctatgcgtgattgaatcgtcagcctcgtcggccttatatgtatatatattaaaatatttacacaactggggacaacagcaattagactcactaaaatcttgacctttgactttaatttgcatagacacaaaactgccacgcgcacatacaacacaccgcttttcaattatttcttgaattattttcttattagataatgaacaaaattagggcaaagagttcttgcggaaatgatcaaacacaattcacaagaaaaagagtcagaataacaagcagaaacaagtggagaagagggagaaaattatatatgattttagtaaaaaaaaaaaaaaaagtaagcattaatattaggaaacgtttccaataccatatataccatattaatatgtggaccccaatattaatttataccaatagtaatgtgtcactttttataatatttggcattataaaaaaagatatgagcattgttattagtcaccagtagtgtttagcacattctcgatatgtcacgttctaattgactagcgatactccttaaaaattgttatattaaattatataggactcaatatttagttggattaatagcgatattcacacataggagggt

SEQ ID NO: 304984 - DNA, 2706 bp, Cannabis indica
ctaagggcttccttgattccataagattctgcaatttcaggagaaacattgccaagcatgcttcttgacacaacttcaataattctcccatcacagtctctagctatgaaaccaaaaccaaaagagttacttgctgcaaatatagctccatcaacattaaccttaaccgtatccataacaggtttcgtccaatgctctatatcccgtccttgatcattatgaacaaggatgggttcattcgattttttttgagcacacaaccattggttaagataagatcttgcttcaagaactacactagctgcagatttaactcttcctttccagagaacatcgttccttgcattccaaatttgccaagccaccattagaacttcagcagagaaggtggtatgtaagttacctgtagcatcaataacaatccttaaattcatttgttgaagctggtttgaagctaatggcagatctgtgccaacaagagacagcaaaagaacaagaaacaaggacatgagtgatcgattctgctgcattgttgcatacagggcacgaattattcacaggaacatgttttgtttggagttgagtacgagtaggaaggctgccagaaattgctctccaaccaaaatgcaagacttttggtggaaccttcagcttccaataatttttccaaaaatcaccttgttgctgaatttcagtatcggcctgttgcatgaatttgtacgcacttttaacggagtaaaggcctgtggcttcaaaaaaccagcaccatctgtcagctatagcagaatcaggaaggggaattcccataattagagcttgatctctctcgttgaacaggtctgctataatatcagcatcccacctttgctggttcatttgcatcagactagcaacagaattaccaaacaaagcagggtgagatgaactaatataaggctgatcacgatcagggagccacgggtcagaaacaatgttagtcctcaaaccattaccaatacgaagtcttgcaccagctttaataaggttctttgtttcaaaaatacttttccaaatgaaggatggattatttccaagagaggccgagagaaatgacccttcatgaaaatacctggctttatagactttgcaaactaatgagtcatcttcagttaacaacctccaagcttgcttccccagcaaagctaaattgtaatctctgaagtccctaaatcccaaacccccagctgttttgtgtttacacatcttactccaactatgccaacttacaccattcttctctttagatgatttccaccagaaagagctcatgattctttccaaacttctacatgtttccaaaggtaaaaggaagactgacatagcatagctcagaaccgactgagccactgtcttaagaagagtttccttccctgctttcgatagaaatcgactttcccaatgttgcacccttttctgcattttatcttgtatgaagcccagaattgcttttttgtttctgcccacaattgatggcagccccaggtataagctagtaccatcaacttttctaatattcaacatttgacttattcttgttcttgtatcagtggaagaattggtactgaaatatattgcagatttattaaagttcacaacctggcctgatgcattctcaaaggttttcagcaaacgaatcacattagaagcttttctatcattggctcggcaatataaatagctatcatccgcgaatagcatgtgcgagataatgggagctccgttagcaactttacaacctcgaagttgacccgatctttcaaagtttttgattaatgatgaaaatccttcagcacatatcaaaaacaaatatgaagaaagggggtccccttggcgaattcctcttgtaggtgttatggaatctacttctcttcaactattattaactgtatagcggacagaggagagacaagttaacactaggtgtatccaatgatcattaaagcccattttgcacatcatatctcttagaaaggtccactcaacacgatcataggctttgctaaagtcaagactaagagccatgaagccttctttaccccttctttttctttttagaaagtgcattacctcataagaaatcattatattatcggtaattaatcggccaggaacaaacgcactttgattagtagatatcagctgaggaagaatcactttcagacgattagcaggaactttcgagattattttgtacaatacattgcagagggatattggtcttagatcgctcatagagtttggatgtttaaccttcggtatcaagaccatgttggtatcattaagaccacaaggaaggactcccgttagcataaagtttcttaccaattgaatgacatctgaactcacaattccccaacagcgttgatagaaacccggtgtcattccgttagggcctggggatttatcggggtgcatttggaagagggcttttacgaacttcgtcatcagttactggcgcaagtaaagactcattttggctagaggttattgttgtggggagtattatttactacaggtagcagtatcggtttggggtaagaggcaggaaataggacccagttgaaggtatccccacaataacatcagagaagccaattttgccaatccctccaaatgccattttcatccttgagtttggaaatcgaattgtgtctctacgagcagagg

SEQ ID NO: 304985 - DNA, 5281 bp, Cannabis indica
tcaagagtaattactcataacggtaatgaccattttcaaccctcgatcacagccgaggcataacaaacacataaacaggaaattcattatattcaagactataccaatcacaatcgttaattatttaaccataaatgatgtgtatcacttttcttacctcagtccagaaattaggcatgcgggccgacttgagtggaataaagctcgacgatcctaggtcctatgtcacaacaacaaaattcaataaacaacttatccatattctaaacaaaccctaattccataacaggacaaattctaactctcccctagttcaaaataactcaaacctcattaaaatatcctattctaagctctgggaaacaccctgaatagaaactgatttcaaagcataaacctaaggtttcccctgttggcaaaatcggttgaccgatttcacaatacctgtgaaaccggttaaccagtttctcagttgcagaaatgggaaacttgggtttttgcatcaaaacctaaccaaaactccatcaaacctattcaaactctccagaacagtttaacaatataaaatcaatatatccaaacatccaaaactcagaattacaatcaaatcccaaaatcaccatgcttgaaccaaaattaggttcaaaactcaatcttccaatttcaaacttcatagctcactaaaacatcacaaacatagttagacaaccttaaattcaacttagaaatatactttgaatttaactcaacactacagccccaaaatatatgaaaacactacaaaacctaactcaaaacctagaaaattaaagagaagaagaaggagatcttacctcaaggattaaatagctcctaaaccaaattatacagctagcaaaagggtgagattgatgaagaaatcctcttgcttctgttgggtttctagggttcaaaggaaggaaggaaagagagagaggtcaagtactgctattcttagttttaggataaaacctcttttttttttaaataaacattattacttataatctaatataatcttatttcagcaataacacaatcccacaaaagacaaaaccttaaattacaaaaagactattttgcccctccatgagcacttagcctaaaataaaacctaggggtattttggccatttctaattttcctgatttaacctacttctcaatattttaacctagttcggtataattctaatatagcacaattttaaccaccgtgacatttctgaccactccgtcgagtttccacggcctctgaacctgaaaaatattttattctaaaaatggtatccatgatacccccatagtccaataaaatctctgtaattaataaattacgctttatttaatcatttattaaatttacactaattgccacataattagcttaagtaagatcataatcttactccagtatcagcataatcacatatttaataaaatatgtccaattaaatataaatatattttctgggatattacaaccgtagttgttgtggtaatgacataattttttcatgtccctcttccttgactctttgaaaggaagaggtttgtgatacgacactgttgactgagtggtcgtacagatctcctctcttggagccaagagaatggagtaggtggtgaagcaagcctcataatctctcaagggcttgcccccagttttaggcttctttcatgtgggggagttgcattacttgccaccattttggctctctttcctctgttcgaacctcctttttccattgtcgtgcgcctcaatagcgggggcttcagtgtcttgcgacttcttcttgccatcctttgagccttgctcgggtggcatcttcttcgagtttgataaagacatctactctatctaagaaatttttcatggtgtatatcgccttgagataaaggtaaaacaacagaggactcatctcattgagcctagctgcgagtgccataaccattgctcctcgctgagacttttggtattagttgctgcctctaagagccattgtatgaagtccttgagggattcttcttctagtttcttaacatctaccaaattattaggctagatctggcgttgttgggaaggagcgaactggttaccaaaagcatctaccagatcttttcaggagtcagcttgaggtactagcgttgagctaggcctgtcagtgtagcaaggaagattctacacctgatgtcatctctcaaaccttacagcttggtctgcacttcgaagtaatggatgtgagatagtgggtcttccttcctagtgtattgatgtcaggaaggattcatgaactttgtaggaatgagaagggctttgattcttttagagagtgttgagcgttgttctctatcgatctcgaatttagacaacttaggtgtcgtgattcccttcactaaagcagctaagatgtcaaaatcagtacggttgatgcatcctagatggagcttttgtcacccagatagggtcttctctagaagttcccacatccaccgttcgtcttttgttcaagagatcatggaggactctttgtcttcaaggtcgatcatgtgcttcgatctgttggggtcttgtagttgtctcctgaccgtggggtcatgaaggtaactctggtgaggcctctgaaatgaactcaggatcatctctggatgaccccctgtgagagtgtttattcagagcattgtagtggctacatccctgcaactagtcttcagcagcatcacaagtgcaaagagaattaaattggccactcaagttcaattcttcgccatgtactcgagggaaatactcgtactgttggtcatcggggccacgttaaaagtaacaacacaactcccctctttcatctcaaaagtacttttgagtatgaagaggctcaattatccttacttgcggaattttgtagcctccgtttttgaagtaacatctcctactacttcctttagtttgagtagtaagtccctttcttgttacaaggtcccgaggcctggtctcttgagaacattgaggaagattttgtggaggagtcctattggttttctcattgttgcgaggtcgatcaacatcaagtggcggacccattggttggtgccctcgagcttgagtcctttcaggctcttgatcgaaggtactttccccctgggagctctccatgcctagtgtttgcctagtgcctgctcggttaccaggtgtagcatttgtaatccgagcatttggggttttgccttggacactatttcccacatgaacagctggtcgacagggggtctgtctcaccaacttgaaaatacctcttcgggaagcagtttcacgattagagcgataagcctctctaatctgttcagacatgttagctctgtactgttcctgctcaatgcgttagctttcaatgttcttccagttttccacgaaccaatgttaaatttgttcgtgttgcttatcgagagagtctcgcaattgttattgcaagtcatccacaatttggttgagttgagctacatgaggattggtctcctcagggtcttctacctccacatgtggttccccatgtggaatctggtggttggtgccaatctcaggagctactagtggtggccttggaggacgagttgaggagttggttccaagacctgctcttggcacctggagtgccaaagtagtcccaggaacaactccatcaactggcgtggccctagttgattggccagctgcgggagtctatctgtcaacacttgtagaacgtgttgcaaccatcttgactagtaacttacttgagttgtggctctctataaaagcactaaaatgttgactcaaaaatcaagactagacttttaagtcaaacccgcccgctagattggcgagaatataaaaagttgtaaagtaattaataagagacacaataatttatagtagttcatccctatgtcgcgatagtaatggggctacgtctacttcgagttcttatttctcatgagatggtgttacagcaactgtttaagtatcaaaaacttcaaactctaaagagagaaagtctagagagagaatctggtggtagttttctgaatgtgaaaaatgaactaagggagctctcattttataggtgaaggaggcccacaaaaataggagataaaaatacaaataaattattttaccgttgatgatgatctaatagtgaaaaatagcttatggtaaggatatttatttttggtatctaacgggtcctgctctgagatacttagagcttattttcgtaactctcttgcgatgaactttgaagacgatagtttcaaaatttcgcctactgtgtgataaatgacttgagggcttaaatagcttcaaaaaacaatttgaatcgcgtcaatcggatgaaaattaagtgagttagagatattttactgaaggcagttcaggttccaccgcccaggttgacatctaacatcaacctgggctttgtaaaagtgtagaaacgtccaagggaagtcttttgagatgcccaagtgatggtttgaaacccatagtctttttatatattttagtcactcgttctcgaaaatattgttgttttgcagaaacagaagactcgaaacttttggattccgaatgagccaaaattgaagttgtgaatttggctgatctgacttcatggctcattgcacttgtgaaaaacttgacagatgatgaaaatggcattagatttggataagcagaacccagcgaaccaggccaaatgttgacctgggcactagggtctttaaactgagctcccaggattttgtttttgatactttcaaggcttctaatcttgaggatgggtctctcctcccgttttcgaccatgccaaattcaatggtcccatcagatttagtgtttgaacaattgaaggcagcgtcctaggttaattgtcaacctgggagctgggccctgtttccagagactcaggtttgtggttttctccccgagtttacttgactctttgttatttctaatgatggtaaagatgcctgagcaccttttactgacttggattgaaaacagccaagtcctaggtgtcaacctaggtgttaggtccctattctgcccctttggaaattccgtttggtctccaaaaatatttgattcccaatattgtttgaagacggagatgatgcttgaaagaattctgggaaaaatccattttttgtggcccatgttgacaaattgtcaacctaggcgtaaggccagcccaaagtgtcaacctaggtgctaggccctgttatttgtgccc

SEQ ID NO: 304986 - DNA, 3069 bp, Cannabis indica
tcttactcatctgttaagccttgtaaataagtgtatggctgcctagatacaagtcggtattacatgatatgttatatgcttttcttacagagtctgtcgactcacacttctactttcatgtgtaggtaaaggaaaggcaaaaattgaacaggagtgagcctgagctggaatgggattgtacatatcatggcagcgggacctggagtgtttggtctcgagacatgtggggtttccattttgtagttgctttgtgacctgaaatatgtagtttaaaatatttcgtaaaaagtttagaaattggatcccaactttgtatatatttatgtaaagtttataaagtatcatatttaatataaaagttttaatttgacacgatttttgagaaaattctttgattagcaaagataccacagttatttaaaaatcactgtagcgtgtcttagcattagggtgttacagcttgggaagcctctgatggtggattttgtaatgccattgacttatgcacaaagtcctaatgctaccaatggcttaggcacaattcctaatgccaatggcttaggtacaaagtcttaatgccaatggcttaggcacaaagtcctaatgccaatgggttaagtataaagtcttgatgcgaatggcctaggaacaaagtcctaataccaccaatggcttaggcataaagtcctaataccaatggattaggcacaaagccttaattccaccaatgacttagttaccttgagagtaatcaattccttttgtcttggagcaattctctccaagtcctaatgccaatggcaaaggcacaaagtctaaatgtcaatggcttaggcacgaagtcctaatgccaatggcttaggcacaaagtcctaatgcaaatggcttaggcaccttgagaatagccaatccctcatcttggcaaaattctctccaagtcctaatgtcaatggcttaggcaccttgataatagccaatgcctccgggcttggcacaattctctcaaagtcttaatgccaatggctagggaaccttaagaatagccaattcctccaagcttggcgtaattctcttaaagtgctaatgccaccaatggcttaggcaccttgagaattgtgaacacctctgggctttgtgaaattctctcccagtcttaatgccaatgtcttaggcacaaagtcctaatgccaatggcttaggcacctcgagtaaactaatgcctctaggctgggcacaattctctctaagttctattgctgacatggcttatgcacctagagaatatgcttgagacctacaggccaggtgcaattttccccccgtcgtaactcctcatggcttgggaacattttggagtaaaaccaatgcctctgggcttagtgtgattcacttcaagtgtcaaagctattagcacaattaaggaattcattcctattcaagaaattgttttttgattgagattcttccacctcgagactaagagccatgtctttaggcttcgtgcaaataactctaatgccctaacgctcgatgtgcttaaacactggtgaatgagacaaatgtcctctaggctctatccaactgcttttttgagagtcaccacaacagtcacacatgcccaaagcaaagaaaataagtcttaagtcgttattgacgaaaggttaaataaagacttccagggtgaatattgtcctaatttttgtcaaacaatgacaaatgattgtccacccattagctgacacaactgccaataaagttgaagtggtatggcgagaagctttcccgataaagttgaggagacaagataagataacctcatgtgcctataattactgctttatttatgtctatcaatgtgtttcctcaaatcaagtgaaacattttagaggaataaaagaaatataacccatgactgatataaataggaccatggaatcacatgtaaagagttctaggctttctctctcgttggtattaagcgaaaattctagagagagaactttatcgtctccatctcaatacaagtgattcgtggactaaggctcattaacgcccaaccacgtaagaattgtggtttcctgcaacgacaatgacaatgataataacaatgacaacaggaacgaaaattttattaagtttctaaaataatttataagataaaaaataatttctcatatgccataaaatgagttacagcaacagcagcaacaacaacaaccattgacaacgaaaatgaaaatgatagtgataatagcgacagcgacaatagtagcagcaacaactataacaacaatagcaacaacaacaacaacaacaacaacaacaacaacaaatattctaattttctatggtaacttttaatatactttattataactcaatagttttttaagataaattgttaactactaaaaataaatataaatatatagttaaataaaaaaataatataatataaacttaaaaccaaaaatgaaatcttgacctttaaaattaactaatcaatatagataactaaaatatgtatcttaaaatatatacttttttattttatataaaattgtaactcattagtatcttattaaccattaaaataaaaaaaaaattaagagctggatatttttttatttttagtttcagtagaaattattttaaattccggtatttttgctaacgtggcattgatttttttttgttgttaataaaatccattagaagtataatatttaaattcttccattttagtatagtttattttgaaaattaggatattatttttcttaggttattttttttattaatttcaagtacttccactttttgtaataattataagtttaaaagatttttttttgaaatagtttatttttatgtatatgtttttagagcatccaatcattattcatgtgcaaatatgatattttcctattaataaacaggatttgaaaagcactcaacaattttgatgtatttgttgtgttgttaaatttttagtacatcttctaaaaaggatgtttttgttataaatattaataattatgtggatgttgaaatattttatttattacc

SEQ ID NO: 304987 - DNA, 690 bp, Cannabis indica
cacttaattttgtatcacactttataatagcatatagattatacatatgtgcccaaataggattttagtccaacagctagtatatcaaaattaaatggtagtgttaaagtgtgctacacataagaaatacaaaatacagtatatacagataaacatgtagcttaacctgtatatacatcaaatgcattaattaatatgtataatctacatattattattctgcataactctagcttgaatctcaaactaattatttccttgatcttagcatgataacaaatacatgaacacaaaattgattaatctatggctagccaaaatagtcatgtaagatttgagggtctttacattgattgatatcaagcacacaggtggatcggaaaatagtacatcatttcatttaataagtaattctatacaaaaaaaatgataatattccataacaaaaataccaattttctttttcaaattttagttataacaaactcatgacatattcttgtaaaagtcatcactatataatcaaaacaataaaaccaaaaaaatccatacataaatgaaatggtaggatcaaacctataacaacaaaatcacaatcagcaaataaaataatgagataaaaccataaagaattccaattaaaaattaaaattattgaacacaaatcagaagggaaatttacaaaaatac

SEQ ID NO: 304988 - DNA, 4822 bp, Cannabis indica
tttataatttactaaatactcagctcagctttgctacagctgcttttcctcacagcacagctacaactgctttttccttacagcacagctacagctgctttttcccacaactgtgccaaactggcccttattagtgcatctcttttacaagggtgccttataaaaacatccaaaaatttattcaaattttttttattatttttttaaaataaataatagtaaataaaatcaaaagagcattatagcaatgttgattagttttgctattgggcaccagtggtgtctagcaccctaaaaacgtatcgccttgtaattagctagcgatactccctaaaaactattatattaatctatataggacccaatactaaattacaggaggatgcttctcactgccttttaatatttttctaagaaaaaagagaatagtcatataattgggacaggtgtcattcccaaagagtctcatttgattgtaaatagaaaaaaaggtttatatagttaatacagcaaaaatctcaaccgctcgtctctcctaaaccgcttaattttcttcaaattaagaataaaattcttctctcaaccgtcgtataaattcatcattactcggcaaacccaaaccccattaacaacatctcttacgtctttgcatcggttggttggttgggttggtggggtcccccctttcattttcccaattatttttctcgagaaagtttcaaacattttctcgagaaagtaatcattttcaaaaattctgaagttcattattttccttccttccctaacttttattaggtttactaagaaacccttttatcagttttatataaatttgccatttttaattacaaacatcaaagttttgctcttttgttcattttcatggcgttgcttagtcgtttcagatcagttttttcctttacaaacatcaggcgtatctttcaggtttgttggtttatatattttttattttttataaattatttttgtttggtagagaattattttaattaggtaaaaaataaagtaaccctaaataaaggtgttacctttttttgcataattgtattttttctttctttctacttttgctaattattaagttttttttttttttgaaacttacacttttctcttttctggtgtttagagtttttttttttcctaaacatggtctgcaataatcttttgagcattataaaataatggttttagttatttttgttagtatgacttttctattagtcaaagaagaaaattataaattaatgaataactcagaatatttttttttatttttgattcataaattacaacttctcttactcatcttggttctttttataaaaataaataaattaataaatgttaatccaattttgattatcatcataattaaatcttgcattatagaataaagaataattgttttgttataacatatttattacttttctataatttaatttaagaattatcatttttttattcataaattacaacttctcttactcttcttggtttttttagacaaataaataaatgacaataacaagatcatcattgataagttcatccaattttgattgataattgtttagagctttttttctttcctaatcatggtctgcataatcttttgagcattatagaataatgaccttttctattactagtcaaagaagaaaattataaattaatgaataattcagcattaatttttagaataataaataaatgacaataacaagattatcattgttaagttcatccaattttgattaatttaaaccaatttgtctcattttttttttatgtatataattttattttattttcttggatttttatgtatagtttggtggacctagagaaatagatcttggagcacacacaataaaatctcatggagcatcagttgccagaaaccatatgctagattggcttatattagtagtgttgggagtaataacgattattctcaatcaaattcacccttttaaccgctttgttgggaaagatatgatggatgaccttagataccccatgaaagacaacactgttcctgtttgggcactgactattttataatgtcgagacaatcagtcgggaattccaaacaccgtctttgaattcccgaccgagaccattttacaaagaatttaactcttaagagttaaattacaatagagacaattagtcgggaattttagagacggtgtaaaaataccatctttggagtcccgactgagactattttacgaagaatttaactcttaaagagttaaaatacaataaaaacaatcagtcgggaattctaaacactgtaaaaatacagtctttggattcccgactgagaccaacaaagaatttaactctacgagtacacaacaaagacaatcagtcgggaattctggacatggtgtactaaacatcgtcttcgaattcccgactaagaccattttacaaagaatttaactctttgagtgaaaacacaacaaagacaattagttgggaattctagacacggtgtacaaaacgaattcccaactgagaccattttacaaagaattaactttaattgtccttacttttacgagtaattggtcaaaacacgactaagacaatcagtcgggaattccagagttggtgtattgtattgcacacaccccatctttggattcccgactgagaccattttacaaagaattatctttattattattattaatattcaactgataagattatttttgtttatggatcagatatatgcagttttgttgcctattttgatctttgtcatagtctatctgcgtagaagagatgtctatgatcttcaccacagcattcttggtaataatttgaaccatatatttgttcttaattaattattttaacttaaaaactaattgtatcttaaaagcattgttctaacaagagttttgtacttgtaacaggcctattatttgctgtggtgataactggggttcttactgaggcaataaaaaacgcagttggtaggccaagacccgactttttctggcgttgctttcccgacggtatagatgtatgtgttcatctcaatacaaacacacatttacattcatttttttggtattaaagcttattttgtttaatttcggttaggcatatgatcgatggggcgatgtgatatgtcacggtaaggctagtgatatcaaggaaggacataagagtttcccaagtggccatacttcatgtaagtgaaatttcacttcatgttgagtagcaacactgctcgggacagcccttaaatcagggctgtccatcattttgttcataattgacaagtattgtgtgtttggaaatgcagggtcttttgcagggttaggttttctgtcgttgtacttgtcgggaaagattcaagtgtttgatcgaaacgggcatgttgcaaaactatgcattactttcttccctttgttgtttgcatcattggttggtatttctagagtggatgattattggcatcattggcaagatgtctttgccggaggcctattaggtttgctcgctcgttcgtttgtttgtttgtttgtttgttttgtatttcgaaatctttaacataatatgaaaattttcagggcttgttgtagcaaccttttgctattgtcaattctttccactcccttaccacaatgaaggtaagtaacaagattttcctttcgagttttacttttgttcggtttttcagttcttgagaattttttcgcgaatttcaggatgggggccgtacgcatacttcagagcgttggaggagactcgtagcaacgctatcaatatgaacgatgtgagcagtgctgtgaatggacagagcacggggtatgttcgtcgagaatcgaatgcagagatgcgatctaatggcgaaactttcatggcgttttcggttgatcagaattcaactacttcaaccttggatgaattagaatctgggaggagataatccaattaatcaatcaatcaatcacatattcatgtttaattatgttcaaatatatatttttttgctctcttttttcttgattgttttcctctgtataatatgtatgtaagatttttttagtagtgttatatagttatctgagcttgcttacatcatagtaaaaaaagtacactaaactaaccatagtttttttgccttaattttaagtttaattgccttgaaaagaaaaaaaaaataaaatgaagaactattttataaacaaaattcaatgcctattattactcagtttttctcacttaaaatatcaagaaaaaaaaattatagaactgtatttttttagctttgtgtcatttttaggtatttatgaaaataacccatgaataaaatcaccctaaataattttttttttatcaaaacaacattgaaaattgaatagatatgagatgagaccacaagattttgagcttgaggcaattagaattttggtcaccaacaatcataacagacaactgttgtattttctttattgtcaacctaaattattagaatatggtaatttaatgttaaaaaaactcgaactcaaaacctccaacactcacacacctatttatggtcactagagctagtctcaagtggtttatatatatatatatataataaatatattatataagattagagaattgggttgtctcactaggaagatatggggtgtggttgtactagggtagggcctattttggatcataagaactggcctagtccaactcttaaatttccattattgtcaaccatagttgtctattgattgcatcacatggtcatggtttattgttg

SEQ ID NO: 304989 - DNA, 5649 bp, Cannabis indica
aaaaataatttttttttcctataaccaactaaatttcacggtcgaacacatttttctcacaaatttatgctcccttttagactttgttcttgtgctggttttggctcagattttggagcttgtatgacagattgcttcttctactttattatttaattagtgaagactaagattgttagggaagtcctacgttggatgtaatttctcacataattccttttgtatgtattcttgttgagttttctatttattgcaaataaatatccctcgtaacatataagacactttccaaaattttctaacaggagtgcccatcaagcctccctactgcttaaaagtgagatgttaaccacactttaataagtatctagaggcatttttaaattattgcaatagtagaagtttatcaataatagttatggcttctttcattttaatgtattgagcttttaatcttattttaactaatcttgtgctacgcatttctggttctcaactcaatttcttttcttttcaaaacaacaaatatacatatacacatcacccatgtttacagaatcatagcacacacactctctctctctttctgtctctaaaatgagacaccacagttaatcaagaacaactcaaatgagcttccttttttcattgcctccatggcaatgtaactcttctttctttaatttttatttttttgttctaatctgttagtcaaacttttgctggaaaccgagatttgtgactctgtcccttctttctccttcgcagaagcttccgcagcaaatcgaaacctcccttcttcttgcttggcacaatagccaaagccccagctgcattgttactgattttgcaacttgagctatgacatgctaatgtagtatgtgccgggacactaggagaatcgattgcattcatgctatctgattgagatggcttttcatcggtttccacattgcttgacatttctttgacattttgagaactgacaacctcagctttaacatcatcctcggccagcattttatcacgtagcgaggatcgcttgcttaacctcttatctttgttggctacgggcgtttcactcgtggtggagaataccttatctaagagtgctgcttccctcggcgaagccagtgctttcagctgttttcccaggttgacaattgtttcttggcactctgccaactttgctgaagctgttgtgatctcccaatcctgagaattttcactcataagcttcatatgacataatcaattgaagtaaagtattttaacgttatcaagattcatttgcagtctcattttttggtgtagacttacattttgagattgtttttcctcttggtttttgaaatctgtagtttcttttgttgcatcactaaaagaaaaatcctcatatcagtaattctcagaaaacattagaactaaaagtttgtgcagtaatatgatattataattaatctatttgacaagaatgttacctttcaagttggagttgaagctcaagacatgttgcttctaactcttcacaacagttacgtttgtcctctaattcaacctctaaagatgagaccttttggtaaacttgattcagtttagctttggcaacactgagttgagtatcaaggtcttcactaatcaacttctcattttcaatctcgtcttcaattgaccctttcgtttctttcatagtctccagttcggcttgcaagcttcccactctttgttgggattcttggagctgtttcatcaacgcttcacttttttctttcgctgaatgtagcataacttccatctcattctttacagatataatattctcgagttcatttctcaatttgttgttttcttcttgtaacgtcgaaggaatgttatccactttgatcaaagcttgttgtccttctccaaaagcaaccaagggccaacccaatgagtgtttttcagatccaacgccttgcgattccccacttggtagacatacttgctcatcattttcaccttgtgtatcatccaaaccgaaatgcttcttgattttgtcccttgcacttgcagcctccttgggggccacatagttattcaaaatccactctaaagtcgatgctgcgtcctctgcaaaatcttcaagacgggcattcccattcagcagatcatcacaggtgttgataaacctttgtagcatagcatttagttctgaccatttccattgaaaaacatgaatgtagtagtcagttgaaggtttatcaggagaacagttcccaattacagatcctggattggtgtcttgaattagcttaatgattttgcagattgatttactcagattacgctgaatgtgctggttcccgcctacctcaactgaggtttcgacactcagagctccagtcaaagaatttaggactgttgatcttttcggtgaattccaaagatcagtttctgttggagtcctagactttggttgatggttagttggctggttaatataaccaacagaaaacttgatatcatcaagtagctcttctagacttcttttggaaacatgtttttgatcaatcattgcattgagaacaacctgaagccagtcaaaggatttgtcatcatctttgtgctgctccatgttcctctcaccacaatgggagagagcttctgcaaccggaaccagatccccatgagttagtgtgtcagcagaaactattgccaatttctccatttcaacaaaatcatccattaagctaatgtctgaaccttcaaaggctttgcggtttggtggatctccaagtttcccatttttgaattgttccaattcagaaattagagcactagcccaagatccagtagatctgaatccattttcacttttcatgtcaaaatctgtggacacaaaaagtttctttgctaaaggattagattttgacagctccattgatttctggcctttggaagctgtttcggtatgtatggctcttgacaaattgtgttcaggactcttcatgtttaaaatctttttaagggcttcattttcttcttcaacaaaccgcaatctttcacacacgaaattcacatccttgctcataatttctaaggaattatctatggaagcatctctaacaatcaaatcttttgtaggactaagctttcttcttctcatcatctctgtctggtttcttccattcacttgaacttcactcttcatattcctagacaaaccgagaggaccaggaagacgctttcgcataggagagcgtagtttttggcattcttgttctaacattgtgattctcttcacacactctaaattttgctcctgtaatacatcagcagactggcgataatactccatttcttcgttacgaatctgtagctctttttcaaccatgtgaaactcatatttcagaaaagcattttccttctcagtagaatctactctactcatcaatgcactaaactctgcatcagattgagacttgtgtctgtttaaatcttcaacaactttttctttcacaagaagagccttggtaaggttagaattctcaacagctatatctgtgagctgtttacttgcctttgctaatttctcctctaatttcttctgagccttctcatattctctcgatgccaatatcaccgcgtcatgtatctttttctcagtctcctcttcaacaaagattaactgccgtttgcattctctatgtgcagcatctgaattactgaatctttcattagcagccactcccttcttcaaagcttcatctggctcctgctttagaggctcaacctgctcttggcctaaacaaaaattcattcattgaattacactaaatgtcaaaacccaaatgtagttgtcaaacatagtttaaatagttgaagaaaagcataattttgaatcacctttcatggtttcttgagttattttcgcgtttttcgccacaagattatgttcaacatgagaatctagtatgactaaagctaacttctcattcagagttttaccagtttcagatccaactcctttttctgttggaatcttttgcacctaatacaatcatattttggtaagatacattcattagattctaatactaaacattgcttactagaagaaaaagcagctcttgttagttacctcaggattaccaactttattagctgccaaaattgtcttctcagatgattttttcctccaaagccaagacttgtgatccatgatatatatttttctgtaattagagtgaaaaaacaggactgtaaataaatacatatggatagaaattttaaccaaaaaaaaatgacagatcccttggtagctcagctgggatatcaacttgttttcaatgttttgacagtgataaacatctgactaagacatgctaactactaaggcttcaatattcacaaattattatgttaattcataaaatgaggttaagatgaaacccatctcaaaaaaggaaattcttaaatcaaagaacactgttcactgaagtaagcaagtgagaattacagttaaacccaaaagtgactggtttaaacacacacacatacacatggttttggggtatttcataattttctgaatattttgactgttggaacagaagaaccagaacatgcatggcaaaatatcaaaacacaacatgtgaaaaaaacccagaaagccattgttacagttgttacctgggtaagtaagtaaagtgtaagataaaaatacaaacataatcaacttatgtgctgattaaaaacagaggtggagcatagaaaagtgttcatatcataacgtttagataattaaagtcaaaaagaaaagaaaactagcctaaactggtggaaggaagcattgagtgttaacttgtcataggatgcttgcttgcacccaccgacagtttactgaggagtgataataataattcacgagagaaaaaaagaaagtgagaaaaaaaaaaggaagaataagaaggaaaaagggagaaaaagagagtcaaaggagaacccacaaaaggagaattgtgttttgtatctcaggtagtaataaacacaagagacagagtacgttggagacaatttgatgatctacgagagttagttgttggtatatatggattggggagtggaattaacgcgccatagaagaagatgatggtttcttttaatggaccacaaaggaaaaaaaaaagaactcttaaaaaggaactgctggtgcaaaggactcgttttcgtatttaggattgtaaagtatccagtctcatataattatattattaacggtgttgtctataaaaagtgtcgagcaccactagtaccaataataatactcttttactagtggtatctaacacttttaaatatgtcgtattgcgattgactagcgatactttctaaaagttattacattaaggtggcgtttggttggaggtaatgaaatggaatggaatggaaaggaaataattttcattccattcctttgtttggttgcattttaaagtattggaatggcattccaatggaatgctctttccaccattttggtagaatggctattctattttaaaaaggaaggaatgatcattccaatgtaacaagaaaaaaaatttaattattttttatcaattattttatgcattttaaatttattccattccattcctattcccattc

SEQ ID NO: 304990 - DNA, 3261 bp, Cannabis indica
taatttaggaaaattaggaaagttgtcatataagaccaatttcaataactatgcatttggtatttaagcatagaatttcaaatttccctaactatatagtacaccatcatataaaattcctcattctccatttgtcaaaaacaaagaccacactaccattggatcaagattgacaccaaattttgattagttttccaatataccaaacataatttagtcattatgtcgtagttttttaatgaaagttttgacaatattagtaagtgaattaattgtattaaaatttgaaagaaaaggagaaaacaagaatggagagcaacttttaataatgaatcaataacaattagcaacttttaatctaattcaattgaattgaactaatccaatcaaatctaattacaaaaaaatagatattcaattacaattagattgaattagatgttaaaagttaaattctcactggattggatctgttattggatgtcaatctcaacaacaattaggagagcagcttataataatgaatcaataacaattagggatgggcaacatccaatctaatccaattaaatcgaaccaatccaattacaaaagattagatatccaattacaattggattgaatgttaaaagttggattctaattgagttggatcgattatcggatgtcaatctaaaaattcaattaaaaactgatccaattcaattacatttgtatatattaaaaaatatttatattgatttatataataaaaagtgtatattaattataattttagtggtttttattattaattttgtaacacttagttgttttatgtatttattttcatgatattttgttatattttattactttttttagaataaattctgctattataaatttaaagagtcatttacaacaataaaaaatttagcaggaggaatctcccctagccaaatacaatcagtaaccatcgctaaagcttgtttagccaaaccatgagcagcttagtttgcatctcgacgaacgtgagatacataaatattaggaaaattagataattaatttttaacatcaagaattaagtcattaaatgataacaaacttgatgagaaagcatgaatggaattaactagcactaaggaatctgtttcaactaattcaacatgaatatgtatttatcttgcccattgtagtgcatgaaacatagccttagcctccatctcttgaagtttaaaattgcatgttcctggttttgagagtgcagccaacacctgacctcttgaatctcgaatcacagcaccaaagcccatcatgttttgtgatgatagcacaacatcatccacattcagtttatactttccaggagggggtgatttccatggtaaatggtttgcaacatattgatccgaatgtacaattgattttaaaccagaagcctgctaaaaattgtagaggtaagccatggaattcgcataaatatcagttggtttcttgtgtgatttttgatgaacgatattgtttttgtcggaccaaatggaccacatcgtgcatataatcttttcaagaccaaatttggtatgtaatgttgacagatggatgatgaaattgcctttaaacatttgactagctgctgcaaaatcaaacttaaaatctaagaaacgccaacagatttggcatgcttagaactgaacaaagcatgtcccactgattcccacgcatttgaacataagctgcaagaactagaattgatgatcttcctgtgaaacagattggcagcaacaggtattgagttgtgtataactctccaagaaaaaattttcactttggaaggtaagtttaaattccaaaatgatttccaccatgttgctaacgattgagaactggaggagttatcttgagaggccaatgagtatgccaattgatatcttgattgcacagtatactcacccgagcaatggaaatgccaaacccagtaatcattgacagcactatgagaaagaggaattttgagatatgttcaacatcaattgcaaaaaaatcagtttttaatttatccacattccacacacaatcaggagtaatataatctgaaaccagattactttccaaaccagaaaaaatacctggtgtgaaagtattatgagttggtgtccaagggtcagatccactcttaatttgaacaccattaccaacctacactctcaaacctttaacaagtaagtcatgaccccaacatataccttgccaagtcaaagaggatacaccagcagaggtagttgtcaataaatcatcattccaaaatatcttgctttcaaaattctggccaaaagtgtgttggggtgtcgcaaaattcgctaagcttgtttagcgagcaaagcttggttaaattgaacataagaacgaaaccgcatacccccttccatttttgatgtacaaagaaacttccatttcttccaatgagttctttttttatcatgtgttgtatctcgccaaaactgagccatcatcatgtctatctctttacaaaacttggctaatagttcgaaataactcatagcatacgatgggatagattgaaccacaactttgaccaggacttcctttctccaattgagaaaagtttatcattctaagcatgtaacaatttccaaatacgatacttgatttcagcaacaaatggcctttattttgctctgaataagcaggtaggccttaagaattttcatgacactcactaataggcatgcctgaaatttgagagtcagaatgctttgtattgtcagatgtataaagagagaaggatattactgatttttcctcattaaggagctgtccagaagcacgatgatagatatccaaagctctcgtgatagcaccacaagacctatcattcgcttgacagaaaagaagactgtcatcagcaaaaaggaggtgtgaaatagttggagttgtttgagagaaaaccaaacccttaagacgtcctatagactcctcgtattgtagaagacgggacagaccttcagaacaaattaaaaacaaatatggtgagagtggattcctctgacgaagacctcgttaaggaatgattgaacctgtgatagcaccagcgataaggaatgataaagtgtttgagtgcaaacaagtcataatgagagtaatccaacgaatattgaaacttatttttcccatgactgctgccagaaaggaccactcaactgttggaaatattttaccaggatctagatttactaccaagtatgtttcattaacatc

SEQ ID NO: 304991 - DNA, 2290 bp, Cannabis indica
tttctagctctctctctctctctctctctctctctctctccctctcaataattattattaatattttatcattttgaacagtgtcaagccaccaagatgagttcttaatggattttcctcctgaggtttttcagttgaagattataggcttttctaaagatattggaagttcaatttttctgttaccttcttttatgcatcgcttggaaaaccttttagttgccattgaactgaagaatcagttatctctttcattccctgaggcatctgaagttacttctcgcagagtaaggagttactggctgatacttacagtaaacgaacatgtttcattacactgctcaccttgtattgtgacatttagctagacacgaacctactaaatgtggtaaatcttcatgttaggttcttgaagcgctaaccacagagaaatgccaggagtgtttttctcttgagaggcttgaagtacttggtgatgcttttctcaaatttgttgttggaaggagtgtttttatcttgcatggtactcttgatgaaggtcaactttcaaacaaacggtccaacatagtaaacaatttgaatttatgcaagctagcgtgtaagaggaacttacaggtaagattaagatctctctggttatgttctttgtttcctagaatttatctaaattatttatacatcaaatcatccatctcctttccccactccactcttgatgtaaagtctctatgtttcataactttagtacgacttaaagtagattgtcttgtccgtaattttttgttttgttttgttttttttatttaatttttttagtaagtgatgtcaattttaaaccctggtatgctactttgaaaatactgaaaaactagtttgatgttgtcagccctctcgcaggcccgcaggggtattgcatgtaatttcttctttgtgtcgatagtagtaaagacttattcgcatttttttgcattcttatttaaggtgtacatacgtgatcaaaaatttgacaccagtgagtttttcgcattgggccgcccttccccaacaatatgtaccaaggaaaaggaggaaagtatccattctcaatatttgaatagcaatagcacagtcaataagacaaatgctattgaggtcagatgtagcaaaggtcaccactggttgcgcaagaaaactgtcgcagatgttgttgaagctcttgttggagcatttcttgtagacagtggctttaaggctgcaattgcatttcttagatggattggcatacaagtggactttagagcctcacaagttactgatattttccgcgcaagcgagaaatacagcacacttgctgctgaaatcaactctaaagctctggagagttcattaggataccagtttctccataggggtcttcttctacaggcttttatacatccttcgtacaacaagcttggaggaggctgctaccaggtatgaacttggtaccctattatgttacgaaatagatgataatatcatctcttattgatgagctttccagactaactagaatttgtgacatatgactttgagggtcttatgggtgagctttccagactaactagaacttgtggcatttaaagctgagggatttaaatgatttcttttgaccagaggttggagtttcttggagatgctgtcttggattatttaatcacatcctacctgtattcagtttatccagaactgaatcccggtcaattgacagatttgagatcagagtatgtgaataatgaagcctttgcaagtgttgcaattgaacggtgtctccacaagtttcttatctgtgactccagcagccttacccaagacattaaagtttatgtgaactcaagaagtaaaaatgggctaaaatgccctaaggtatacatttatatattctattgttttccttgtcttcttaataaagtttctttttttattaattctctgaaggatcaggctgcatttttaaagtttgtgtgtattgatttcaggctttaggtgacgtggttgaatcctgtgttggtgccattctactagacacgggtttcgatttgaaccgtgtttggagtataatgttatcctttctggatcgaattataagcttctccactttgcagcttaatcctttaagggaattgctagaacttttccaatcttcttctgatcatggggataatctttatacagtgacaaagaaagatgatctttatgtagttgaagcaaaaagtgaaaggtcaaaagataatgtctatgcaactgcttctgcaaccaacaagagcatgaa

SEQ ID NO: 304992 - DNA, 3604 bp, Cannabis indica
tgaaccttttacaattttcttataaaagcaaaaaaaaaaatattcattatattattgagtgcgtttttattataattatagatgaaaaagataattccgtaataattgtaaaagctgtaaaaaatgggatcaaaataaaatcatacaaaagttatttagtaattcatgaagtacacccatacaaataataattacattctaaaatacattttcttagtttttccaattagacttttttttaatctaataaaaacgcataggaacccccacaagtatgtacataattctatgttatatacttaaacatataaataaatataagaaaaatttaacagtgattatatgtatatagaaaaactttgactttgacaaagtatgtcctacagttagagaatgaaatttgatgtgttcatcgtgaatttttgggtaattcaaatcattaataataatgttctcttattcttaatggtgttagaaaagtaaggtgaagtgatacaactttcatgttttgaatatttttatcaaaaaaatatcattagttgctttgaaattgacttgagaaaattctcacttttgaagctttcgaatgtgacatatattaactgttttgaaggcacaaagctaagaagaaaaattacaacttttgagttctaatattaacaaattattcaatagaacaacacaagtgaaaacacaaaaacaaaaattatttgcatccaacaaccgaaaattgtaatcttaataaaaccaaaaattgaaattccttggttgatccatacaaatgttgcctcaaaaatttcaagattctaaccaatttagttggtactagtaaatacccttgccaaactagggtttttcaagttgagttttgtctcatggcaaggattttctttgttacttcatcttcatctatcttgtcacttttcatgccctccaaaatggcatctacttctttaccatctcttatatgtgcctttaacaatgcataatacatatgtctgttaaccgggacaacggtcttcaataagtccacgaattctttcactgcttccgggctctcattttcaccgagctgactaaacaattttgtggtcactctaggattgagtttccacactacttccgaatgaagtgagtgaagtgagatagctacctttatcaactccaaagctttttctgtctccttcttttccaggtatttcaaagccacaatgctccaactgttggggctggtcatttttcctttctccaaaaggtcctcaagcagtttctctgctttctcacactctcccttttcagcataaccgacaatgagacagttcggtacacgaaaatcataattgttttctgaagactcccactccttcaatactttctcagcttcgtcgagctcaccgagcctcacgaaagattctaacataacaatatagtccttgtttatgcacctcttacaagcacttttttgcagttcccaaaccctcaagacctcttccttattttccagtttagcgtaaagtgaaattaattggttgtatccacttgaatctttcttatctagcttctcttctgatttctttaaagcactggttgctttatcaggttggcctgcttttatgtacaaattagcagccacagcataagtgttccaatccatagtaatttccggttggctctccatctccttgagaaccctttccattccttcaatatcagatcttacaccgtaagaattcatgcaaattctatagctgaagttgtcgggagaaacattattatccttcatctccgctagaacatcagggaccttctcatgctgaccaatatttacatacaagcacatgatatcgttgtaagtaagagatgaagaagcaaaacccttctctttcattttctgtagatgagagagtgacttatcagtttggcgctgtcgaacatagcaattcagaagggcgccgtaagtcttatcattctgatcatgctccttcagattatcgaaataactttctgcagcaacaaacccgtgaacttttccaatcagatccagttgcacagcatgttcagtaggtgagaaaacgcaaacacccttcttattcatccattccgagatctaccacaataaagaaattaagtaaactcaagtgccaaaaagcaaaatccaagaatcatttgcagtattctgatcaattatccatcatctatttcatgtccccatatacacatcccaatgtaatgaagctctgaatatttttgactaagttaaatctccaaaataaaataactctaataagtccaactgaatgtacctttttcatcataacctgtaaatctctactctaagtactaaggacttgtttgcaccttggattttaagaggggaaaaaatcatgtttgaattgaattctatttttagaaaaatcaaaacttgaatgtaatttaagtttatgaaatttaaaatattacaaatacataaatcatatttatggaaaacattttcatccatttcttctttacttctctctaaataaattccctgtaaaatggaagatccaaacaaagcccaaagctatatatactatttacagctaccatcttcactctgcatagtattagtattgtgaaaattgattccaaaaatttactcctgtgaatgtagttttagaaaatggtgattagaacagaaattctacaagattcagtttttacatattacaaattgtccactataaaaactcataatcaacacaaacaagagaaccattgaaaccaacaacaaaaaaaaagtttcgtcgtacctctagggcctgagaaaaacgccggcgcttgcgaagatcatgaatgatgcgctgaagctctccgactcgaacccttttccccttttgaatccagtcatcaagctcgggcacaacgcttgtggtaggactcccgagaggactgattctggagtagagtgaggccttgctggccgtgttggtgtagtaggatctgctcgacctcgcatttctaataaggatctcggagaagagcttcgaattcattttttcagtgaaatggagcttggatttcgaagatggaaatggaggttttagggttttggttctcagacaaaatttaggggtttaaggtttcggacctgatttcgaattttgtctacatgggctcattttgggccaggcctcacatagtagaggcccaatacaaattattctcttttttttttgggaaatttacatggtgtactaacttttgccatttttttacaaaaatactgccaggtggtattttttacttttttactgtgttttttataagtttcatactgcagtatactgtgttaagttttcactagtgttctactggtgttttactggtgttctactgttgttttgagctgttctgctttgtgttttactagtgttttataaaacacagtatttttggaaagatttctgtgtgacagtatttttgtaaaaattatcctaaattccagtatttttgtaagtttcctttttttttgggaaatttacatggtatactaaattttactaattttttacaaaaatactgccaaacggtattttttactgtgtttttttataagtttcat

SEQ ID NO: 304993 - DNA, 2843 bp, Cannabis indica
ctccggctctcaggttcagccttgacttctttgagctttgcatctgcatcccttagctcgatgtttaaaccattgatcttgatctatatatccctaacctcgttgctcctctgcaagacccgagcctctaaaatgtcattatgtgttttggcatcttaggtttccttagcaagagtttccattttggttttagcagcgaacaacatagtttgtagcttttggatttcttgcctacggaatttagtgatgcgaccaacaaagtggttgctcttaaccttgactttctggtcaacctcctcgatagccctcctccagaagtcttcagcttgaatcttgatctcttccactctggaagctagtgtcctattttttgccttaaattggttcagtttaatagccatgtaattaacctcttggcaagtcctctcagagaacatggccagctggtacattgagataaaaagttagcataaaataaaccaccaaaggaaaataacaagttaagtgtgcaagacttattgcgacagcttgttgttcaaaagcgtgtgccagcataacggggatagtgctgcatgcaacttctcacttctctgttgttgactcacacacgctggtggtggtaagatctatcatgttagaagcaaagggtgccacatttccccagccctgggtgcaaaaaaacttagccagagtcgagcggtccacaactgggttagggctcttccttttgaaactatctgttatctctgccttccttttggcctataagatgatggttttcttttgggtagtaaccatttctcggtcatggcacttcttaaggtagaggttagccttcaccacctttttaaagacctcagtctcaattgcctagggatgtagaggccaattgaattcaaaagagggtatggctagaagggcggtagaaagttattgaggtggttgttgttattgttggtggtgttgtgattattgttattcttgttgttattgatgatgttgttgatgttagttttgttgttgctttggttggctaagagttatggatgcttgggggcctcgcttagacctctccagctgaagttccagcccacctcaaatctctctcacctctaggaggccttttccttgcttccgccagcttggcctttttggcctttctctcggtgtcggacggggggtaaggccgcttcaacgattgagtagctctcttagggaagatgaaaccttccccactctcaaaggttcaacaatgcaaaagtgttgaaaatggttccctcgcgtctatatataagcaaagatggtgatccatgtgctttgagatcaagggccaagatctccctagaaaaacacaaattgtgatccaacgaatagggaatcgaggggacgaaattaaatgcctttatgggaatctaggcatttttgtatcattaatactcgcctaggggtacatgctgacattaaatagtcgtcatcccatcatttcgcacaaatcgcaccttcccaaagtgtgtggcaatcgcgaatccaataaagtgaagacacgtaggtggttccacttgttctccatgctagtttttcactcttcaactgtcaagtgtcagaaagagaaaaatgcttcctttcttttcagaagtgtccacgtgtctaaaactttcaaggtcgactggaaagaaggatgtaagcttccgccactcttaagtcccggaagcttggggtaaatgttatccgtgtttctagaaggtagacaagtggcataattagaaggtaatcaccatataaaattgggcctaagccttcctgtttgtggaagcccaaggcaaacttgggctgggccgacgcccaacaaaggctaaggacaccgctttagagacaaaacattcttccaagtcccggaaggcttctagtcttctaggacacaggaggaattaagaccgccgaacaatgataagggtacaaccagaggtagaccacgcgaggtgctcctggaggcctaccacatgatgacctcagaagcctatcacggatcaggatctggatgtctaccacacgacgagtaccggatgtctaccgctgggtgagtaccatatgtctaccctagaatgatgtgtccacctctctgacacaagatcaaatagtatcctctgtgtcagaccatgctagtgcgcgcaccaccatatcccttttgtccacctactcccttggcaactttgtctaccaggcatgctctccgcgcaacacttatcctgcaccaaacggtcccctcattagaacctttgccccacgagctgaatatcctcagtgggcctcttagtcatgtatttgtgtattttatcccattagtgggcttgcttttacaaaaacccgaataggtcacgggtatgcctagactcgaactctagcctatataaaccctactactccttcatgcaagggggacgaatttttagccaaagctctgctggttttattctaagctttctacttctctaagaaaaacctagagaaactaccttatagcaagggttagggttccttattgtaaaactcacttgtaatacacttcaaagcttaaaaaggtcaatacactgactcttggactaagaattaacgtccgaaccacataaaaatcttcatctcatttacataatcactatttaattttttaagctattatttaatctcgtttccaaaaatctcaataaacattatcaataaatattattaattagaatctatttagttttaattttatctttattttttcagcttattatttttcttaatcctatattatagcatgtgaatagaaaattaaaaaacaaaaatttgaaaaaaaaata

SEQ ID NO: 304994 - DNA, 3877 bp, Cannabis indica
aaagtctgtgaaacttggtgaatgacaaatgaccaagagacttgtctacatgcctagtataagctactaaacctgcctttaagtcgtgcatgcatactttggcttgacaaagtaaatctggacccttatttgtcaaggcccttagaagatagctaggattaaagaccgcctagtcggtcacaaaatccttgataaaaaagcaacatgatcaaatactagtagtgttcaaaaatagagggcttatggttaaagatacaaacatgaagatcctggggctcaaaatataataatgttctaaaaaggccttaggccacatagggcatgaaaataatttctaaaaaggctccaagccacataggacataatttttcaaaaaggccataggccacatggaacgcaaagtgagtaatgttcctaagctaaaatgccacaagctatgcagaacatgaaaacacagtctatacaatataaacatcatgttgaatactaataaaaattccatctacatgtgtgcaagggaagcaggagctgaatctagagcagccaactccagatctgcagagtccaggctggccccatcatcactatgctcactagcctggtgggcaacatcctggctggccaccaactcttctggtgggttggccaacacctcgtcacaggtacttaatgatgaactctcacgataagtagctgtttggtctgtctccatccagcttttcgaacaatgccttctcataagccagtgttctctccacaaaggccgaactgcccatgtatgacaaataagctcaaggattgcacaggcagaactcgtaagtaaatttggaggacaagtcaaggtaatattccttaatggcctgctagccattaagagcttcctgtaacttcttgtgctccttaagatcaatctacaacccagagataagagaaacttggttggtgttttcgatgttcctgacacttagcataatctcctatccagagaccattctttgcatctatgctagaacgacctccagctcagaattggctttgtcttttgcagcaaggggtacctccaagaccttcacacgctcctgaaatatgtctgaagacccgctagagctattgcgagccgaactcaactttgtcagggctaaaaacaaagtagaaaaacatcagtattaaatagtcaattttggccgcccagtccactcttttgactaccatggccggccagacccctgtatggatgcccaaggccagccagccacatgcaagcaagaccatggccgaccagcttatacagtgtaagaagatgaataaagctaaaattataactcactagagaaaggtcccaaagtccgacagagtacaacctgtcaagcacgccatcacccaactcctgcaaagcctcatccaagaaagggatagccttctctatatcgaggggaaaactcagcaaccttcctactagtagttgccccgctcctcaactgggccttctcgtaccctagccggcaggctgaaccataggctacccagcgggtgtaagcccaggtggagggggaggcagtgatggtccactagcatctgcactgcgagaggtcctggccaccttggcccttactcactgggtaggctcatctgaaagcccacctgcaaggcctctcaacttggaagacatgtctacaaaaagaaagtagcaaagtcataatgtattcaaaagtattcaacacaagaataaaatcatgatgttacaaactatcaaataccatcatcattagaagaagagctattagagctcacaactacagcttttccctttcccttagatttcggcacagggcgtgtaggtctattagaagctgggcctctaggcccgatatgaagagaggcgtcaccaatttgacccctacgggctaggtgcctacggagagccctctctctcctctctagattctatacaatacgagacaaaggtacttcttcatcatccaagtcagggccttgttcatctctagggcaggccacaccaatacttggtactctcgcaatcccaagagcagggggtacaagccatgcatccaaaagttgtcaacactggtcaactggatgtagcttttgaggctttcggcctctccttgattaatatttgccaggcttatcctggggatagtgtaatccttggacgcatagtgttggcccaagaattcattagtgaattacttctaagaggtgatggatctgggcaccaaccttttgaaccacttgtacaccgcccccttgagtgtcaccgcaaaacattggcaccttgctttgcttgtgaccctcttcatttttattatctcatagaaggtgtcgaggtggtattttatgtctgtcaaaccttcatatgggagcatattaggctccttaaaatttctgggcaagcgctacgcttgaatctttcttgagaaaggggactcctcgtcaaagtcgtcagcttctcttacaggttagtggtggctggcttcaccttcttctcctcccgaggagagtttaccgttagtgagcgcttctcaatcgtaggcttctggcagagtttttcccttaagtctccctggaccaccttggactcaattttcttaggttttgaggagggctcagggtttctcctggttgaagccttacgcggtgagggatcatgggtgttgcttgttgagtatctcgaagccccttcgtcgcttgacttgtccgctcttcttctccccacctctggtgctcctcgccttactaggggtatcttagagtggcctttaaggagttcctccaacaccatttgcatgtttacgactttctcttctagtcgtaggttcctcagccttcgttcactcatctcctcaacgtaaagtcgggtccatgaactggaactcacaaagtaggcctgcttctcctttcccaattgctggcaggaggttcctaggtcttttggccccgaaggctgtggtgtcttattgcagacgaaactttcgaccgttgagctttgttgccttcttcctatgtgatggaggcagtcattccatcccggggatggtttactaggtcatcttcgtgctgctcattttcctcttcagagtctttaatactagaaagaaagaacttgagagtctttaatatctttaaaaaatggtatctcataaatgctcttccaataatatactttttcgctctcaaaaaattcaaaaggaaaaaaatctccccttcaatggattggagagtccagccttcttgcccttacaccttcggttttccccatacatcctatgaccagtcgctttcatctattattacactgtctcctaagcaacctgccatgtttaggattctaacttacaccaaaaaagctcctttaatttgtaccttgaacgaactaaaacttgttcctgttatgtaagtaggttgagtcgtcgtggtccccccctgataccttctcagtaattctatcggcgttaggaaggagaggtggatgggcgaagtgttatggctgtgggcatcagcgtcgtgggcaaacgtgagcatgggcgcgggtagacagaggcacggggctgggcgcgcgaggcaagagagcggggtaggctgggcgcgcggggcaggctgggcacgcgggtaggctgggtgcgcgaggcaggcgcaaggactggaatattgttgaatggaatattatttaaatagttaaataatatagtgagagataaaatattattttattagaaaataatatttatttaatataatcagatatagattaataattaattttaatcaattattatttatgttatctagtacaaaattgagaaattaattttgaagtattataaaaaggctaattagtaatttttccccctgaact

SEQ ID NO: 304995 - DNA, 2153 bp, Cannabis indica
taatattcaatggtatatatcttcagttcctcactgattttcaagatttgtaatagttaaaataccaccttagaaaaagaaaaaaaaagttcatgcacatagtgctacctatttcgaccaaatcgaagtagtattcttgacagactttgcaggccacagttaaccaatccaacaacacctacgtacgtgaatggtgaagttgattgatcttaggataaatagcagtactctttgtagtttttcttttaaccaaatgaatcaaatcttgaaactatatgtgtcatgttagttttttttttttttttttttgttacaaaactatataatattaataatagttcttagtatctaagaattcttgaagaaaaataaaataaaatctgatacataatacatataattaggcatacttttatatctgtcaatattataactaattattctcactttcacatagtatcctaatttagttaaataagtcttcttgactgactcaagatttaagttgagcgatatatatatgtaatagactattgtctcatttgcttattaatgagaaattctatttttctctctaaaaaaaattactttcattgaggtaataatacaaatgttattgatagagaatcatgaaaaaaagaaacataaaatactaaaaagtatacatggtcttgttggaatttgaacccacttatactacatgtgtaaatactacaatttccgttggttttcaaattaattttttttaggaactgtcgctaataaagttaaatcactgtttaaaaccggttaaaatagtattttcgacagttttaaactgtcattttagaatcttcactcagactatgcaaaacagtcacaattttaaaattctaaaacgaattaaaacatagtattcctgacagtttaaaactatcgggtatattataacttacaattttaaaatcgttggagatagcgcgttaaacataaaaaaatccaaaaataatttatttggttcaaacattcagatctcgctctctcttgtctctatttctctctcgtcttcaaactcgcaatagaaaccaccaccacaaagcgatctctctctctcactctccctctcccccctctctcaccatgatagtaaatctcaaggattggtggcgcctcttcctcatcggtgaccataggtctacaaaataattaatctctattatttttattttggtatctatatatttttgagatttttatagttcacaaatcgttgagtatctaagggtaatgatttcggcggagccgtggcccaaatttcaactctctgagactcttaaggccagaaaaaactcttattttgagtgctcgtcggagaagacaaaaaagactattcttttattattaagtttttttattggttgtgtatatatacatatttattgtgtatattggtcaataatttttgaatttgtatttgtatattattcttattaggggtgtacatcggtcggttaggtcggattatagtatatttttatactaacccaatataaatgtcgggttttgtaacccgtccaatgaaaaaataaaaaaagtgtaactcgtccaatgatctgttagtagtggattttcattggtttggtcgggttaacccatttaaaccgatctttattttttatttttattttcattattgttagtttttaatgttcaaataattgatttgaaaaaataaatgtatagtataggcctttcaaaattaaaatatttatagtttaaatttcaaattaaatattataaaatacaaactttaaatgtaaaatagtttaactattaattgtaatttatatattatattatagataattaattttagtaaaaaatatgtaaatcggtttattcgatttgttcgggttatttagacgggttagaaattaatattcaactcgatattgggcggtttgaattttttgtaaagttattcgagttgtatttttatcagtttattcaatttggtttgggcaacttgtaaattttttgaaccgccctagttcttattgttcatattgtaatttttgaagatttttttttccgtatgtaatgttatagctgattgtgtaaaattgtcgacaccgtcacctatgtgcaaaattgttgccaataatatatgcgac

SEQ ID NO: 304996 - DNA, 3482 bp, Cannabis indica
ctctctctctctctctcaaataacctagagaaccagctaggaattttggttttctcaactcaaggtataacattctagctttctctcactagagttataaatgttgtgatatagggccctgtaaaacttcgagctacaattccactcaggctgactggcaaacctgagcacgaaaatgaggtaagatagcataaagtatatatatatatgtgaatgtatacatgttattaattgtttacactactaacactaacgaaaatgtagttttaagggtgttagtacattgtagggctttagggtagttatagtgttaccaacacgagtaccagggggtacgtctgtaactcttggaagtacaataatggccctaccaacacaagtacaaagttggtactctagtgcatatggtactgtagtcatactttcgttgagaacattcttaaccatttggtgaacctagtaaatggactcaggatggcttaagcataaagctggtgttgcattatttatatatatgtaatgcatatcttactgagtttgttgactcataagtttgctaccctctgtaggtaagggtaaagttaagctggaggagtagtgaggtggagcttggcaatgattgtacatgtcgcgccagtgcaacctggagggtttcggtctttcaacattttgagttgtattttgtagtttccttgtagtttgtaaaaaaaatagtgtgtaactttatatatagtatttgtattttcaataatgaatttaaacttgggatctcgatttacgaggttatataattatactatagctgaaatattttttaattagcaagtcttaaaagttgggcattacaaattttgtatcgaagtcctttgattaacaactctctcccccaacagatgccttgccatgttaacgatggagaatgtcccaaatttgcatctaagaagttattgttggaaaaaaaaatacttatgcttcaataatcgaatcagcaaggaattagggatttcaaagatacaccaagcttattttgcaagaagtgcttgattaaagtggacaaaagacctaaatcccatacctccttgaaatttggatttgcatagtaatttctaacttttccaatgtatctttgacccatcttatttgaacgccaccaagagtttaccatcattgattctaattgatcacaaaattttttagtaaggcggaagcaactcatagcatatgtaggaattgattgtatcactgccttaaacaaaacttccttttctcttattgaaaataatttttcgttccaaccatgcaacaaattccaaactcgttctttaatgtcacttaacatttcttttttgtctcgtccagagtatgatggaaaactaaggtatgtttgatgacagtcatagattggcatccctaaggtgttatgcaaacaatttttggcactttttggtgtaataggggaaaagagcattactgaggacagtcatacatgccaagtactttttgaatggacatggctgaattattagttttttgacaaaataataggttgtcatccatgaaaagaagatgggaaatggatggagcattccttgtgagctttagtctgttcaagtttttggcaatttcctcatgctttaataatcttgaaaattcttcaaaggaaattaaaaagaggtaaggggacaaaggatctccttttcttaaacctctagttgggcgaacattccccacaacttccccattcagcagaaaggaaaactttatagatgataagcaacgggagaatcaaagaaatccattggtgatgaaagcccatttattttcatttcgacagtcaagtatggctactctgtcaaacgctttactcatgtccaacttgagagccgaataacctttagtaccatgagtcttgtgcttgagataatgaactaaatcaaaggctgtcaaaatattattagtgataaggtggttcgagagaatgcactttgagtttccaaaagcacatgaggtagtacttctttaaaccataaggccaacactttagagatgagcttgtagattactttgcatagactaattgggcgaaagtcccccataccaactggcttcttgatttttaggattagagttatgattgattgattaagagtactcgtatgcatgccatcattaagtacaccaagcacaactttggtaacttcaattctcacaactttacaattttattgataaaacatagctgatataccatcacttccaggacttttatcagggctcattaaatttaaggaaattttgacctcctctcttgtgaatggctagattagagagtctctcatatcaataataatagtagatggaattgtgtgtatgatgtagtctaatacctttgaatctgtaccagttgtcgtgaacaattcaacaaaataggagcaaataacatctgccatagcatcctttatgcttattatgacacttgctaaagttgtgagagatttaatggtgttattttatcgatggaatgatgcatgagcataaaaaaacttggtatttcagtctcacatttcaaccaatttattctttaacgttgatgctaacaagtctcttcttgctataggagttcgtctagaatgtcttctaaaatcttaagttcatgcatcgttgacttactcctagtttatgcattatttagcaaactaattttcctttttgcatcagctattttcattttcatgctgccattttttttcattgccaatcttgaagtgtaatgctgtaagaatgaatgttgttattgaagtttttcaacaagattacccaatgtattttgtttccaaatctatagaattatctccatggcctcttcatctttcaaccaacgctttttaaatctgaaatgagagcatctctgtggctgttgctgcagcaattgtaatggtaaaactaaaatagttatggctccatgatctgatcaaaaataatctaagtgaattattataattttctgaaacaaagagctccaattatcatcttatgaagtaccaatcaagtctttctttgacggtatctatcttgtgttgacgtttaatctaagtgtatggatcaccctcgtatggttgttcattaagttggaagcaatttaatacctttcaaaaatcatccatttgagcttcactttgcaaatgtccaccaagtttgttttggtttgaccatattttgttgaaatcaccaataaccagccaaggcaataatggtgcaacatctttcaccctttctaggatagtccaaaagtattttcaattttgagttttaggagcaccataggatgcagtaatatgccaagttggaccattataacatgccatataacaatcaaagatgtttacattaaaattgagaagtgttacatctacattatctttccataataaaagtaaacaaccacctaaacctattctagggacttcaagtccattgttaaa

SEQ ID NO: 304997 - DNA, 654 bp, Cannabis indica
ctcgcatacgaaaattctctagacacacggctctagatcttcgtcttctgagtaaatctgactcctacttttttttttagctaaacgttttgtcactttttttaaggtcgtggttttatcttctagtttcctcacgtggtcatacaggagctcacgcccccaaatttgatcattgatattatttcttaagtcacctctatgaggcttaatcctttctccttgcaccttttctctttatacattcgagttttccattgcctttacttgcaccacaaagcactcatcagtcaagagacccaacaaaaaaaataattaacagcataaattagatagataatcaatccaagtaaaaataagaatataacccatattgattatcataagtataccaacaatccatactgattatcataagcatgacaactatccatgctaaaataagtaactgcctcaaaaggcaagccataagcattactatataggataaacattctagatctaatctaataaaacattcttgataccacaactagtattcaaatagtattgttgttgtcaaaccagataacccgaatacctagtcaccagtatgcctgatatgtcactgtcgctatctaatgagaaattcaggaagtaagaaacctaacaatagtt

SEQ ID NO: 304998 - DNA, 1330 bp, Cannabis indica
ttctgatttagagatctagggaggaagacttagttgatagtattgcactatcaaattggagtaactgctgtggatcaaacagagataattgctatggatcaatcaggtacacatacctaattattatatcttattattgtgttctatgttatatacaaatagatcttgggttaattgttaatttatctaacaaaaaatgctttctaggaaattaggtagactttgttggaagattgttgaggtcggtgatgaaaatggaaatgttaaccctctgtttgctcctccaaactgagagtgaatgtttgtagaaatgcaagctactatacaaaggtagagtgaagagattaggcaattatggcaacaggccctaccttccaatttcgtatgtgatattcttttggcatagacacctttagtagtgcaacctcaatggggaaatcattatgaacgattcttgatccactcaaggcagaataatggataaacttgattgccttaatctttaattctataaagggtcgagggtaatggttaagtgatctgtgtgatgttcatgttatatgaggatgctcctagttggtgggaggttttgttcctaacttgggacgttgaaaccatgatctgggactataaacctgcaaaaattgtattacaccctttaaaagtttaaaaggttgtttcgatacaatttttagaataaattgtagattttaaaaaaatttcgaatagtcaccatgttgaaataaaatttcaaacagtttcttcttacacgtataaaaaatatttaaagtttattttgagtactataaactatttagaatgttttaagagtttagaggtgattcttaaaaaactacaacacatacatgataataaatacaaattagactaaaaaactacttaattagatgctaaaatagataaagaatgtactaaaatagcttttttaaaagatttactatagaattacccagcattatttttataacctttgttattgaaataaaagttataaagaaatgaatgagaatgcttaccattcatgtcataaaatgagtgctaattataatttcatattacaactttttagtcaactcttatgtccgaaatcacacgttgaaatattttttttttcaatttttttcatagcggtattcgttttagttacagtatcattcttataaatttttgaaaaaagtcgtaataatttacagtaccaaaaacaaagttcctaatatttcaatttatcacacatgttccaaaaacttcaaacatatttttgggactataaactattcgaatttttttaaaaatttacaagaatgatgtt

SEQ ID NO: 304999 - DNA, 2880 bp, Cannabis indica
ttattattattttattatatataattaaaataattaaaaatagagtaattttctattttatacttacaaaacaagtattttttttttttacataatttcacatagaaacccctataacaactacatagttaacctaaatcccaaccaaaattcatataacaacccacatagaaaccactagagaaactaccagaacaactcaaaccgtaaatttaaaatatatatacaaataatatatgagataatttcccaaaaatatcatatatatttagtggttatttattttttggtgttaaatttgtaagagtgggttgttttgtacatttgttttcatgtgttttgttatattttattaattggcagtattatcgttttagatatttcaaaattttttaaatttttagttgtattaaacttatattgatgatatttttatgggttattaaacttatatatataaaaaaagtgttatttagtttttaagtatttttttctccatatttttaagttaatattaaaaattaggtatgtaattgaatatatccaattaaaaaatcaatctaatcccattagtaattagattggatttttgaggtagattggattggataataattttttgaatctaattactaattagattggatcggatgcctagtactcttacattttcagagtattcccaacaacttttctaatttataattcaaaatatattattaaaattttattttatctattttatttcaatttttttatattatatcatacatttttttttttttacattattaaatattatattcttaatattttattaatttataaaatataatagtattgcacatgcacatattcataaaaaaaattaaacaataataataaaatattttagctcaatgaatagttatttttatatttaataagtattattcattaatgtaaaaaatatatatgtaaaataagtaaagctagctcacttggaagctcaattttattaaattttctctataatttaaagaatcaatgagctgttttagctcattgggagtgccttagtaattaaattatgatatattttttataaataaataaatatatatttgaatcctacaaatagtatatttggtcacatatattatcatacaaacttgtttatatttgaactaaaagatttaattaaatgtgtgtttttgtttattttattgtataaaatttaaaattggagtacgtgtcaaatcatttacaacattttaatttgtcatagaaagaatattctgtttatatacaacttttaatcttacataagcccatgacctttcaaggaaataaacaaaaataaaaagtttgactggctcaaatattatctatctttataagatgacgaaagtacaacataattcgtgtataatttccttttctctatcttttaattatacaatatagtgatgagaattactaaaaatattagtgtgtctaattaatcgagagacgtcacttataaaataaatgtttgataatactagtatctaattataatggagtgatctcaacaaattatataaattaatattataagaatcaattaggattctgtgtaaatgatgagtctaaggttatagtctttttttaagcttaaataaagttgtattattttcctttttaatttgtgtctacttgaatttcatttctaagttttgttaatgaattaaatagtaattaatgtaatattcttgtaaaagattatgtaataagattgcatttttatctagatgagctccaactgagcactaaggtcttatcaaattcatccgcattttcttgcctcataatgacttcaataaataataattgctcgtcagtcaacacatctgtagtctcctatgtattttttactggatggttcaaattgtactcaacatttggtatgaggatttttacgataaagtttaggactaatgctaaaatattgatttacaattggttatgttgttggatgggcagttagtaattttttataatatttattaaaataaataagtaaaatttaatattgaattgaattaatagtaatattacatctcataaagatgctaagtatttataggtgctaggcaatctttcagctacaaatttttcaggatgattttatcaactagttatagaatttccgaagactttgatttgtcatgttgcgataatttgttggtctctttagaaagcaagcaatgagcttgtttggcaaagttaaaatattgttgcaaatagtgtggtggctcatgcattgttttactttaatcaatggaagattgctcacgaaaattctgcaaacacaatggattctagtccttgtgttcatgtagagcattggtcggttcctatagtattgatatgattaaagtcaataatagatgcttttgtcacttttggggttttgtatttcgagattagagggttggcccgtgatcattatggaacaaattgatacaaacaaaacaattgtttggccgcgtttctcctcttttagcggaggtaattgggttgaaggaagctttgagcaggatcaaaaaacggggcctagatcaagttattattgagtcggattgtaaaagcatcattaatgctatgtatagttcggcttctttattatctcattttgatttaattacttttgattgtcgtactttaatgtttacttttaatattatttcttgtgtttttgtctaaatgatttgctaagaaaattgctaattatttgtccaatatgatgaactgcaaagtgacaataatatagatttataaagggttatttgcgacataacctctttaagtggtgaggtatttacaaataacccccaattctaaaattttggtggtaaa

SEQ ID NO: 305000 - DNA, 2455 bp, Cannabis indica
ttttgagaggggtatttttggagttttggaaaagtgatcatatattttcaatgtagaaaagtattagtttaggaaaaaaattatcccctaatgcatgcatagaaattcaaatttcccattgtaaccggttatttaataaatttatttctgttatatattattcagttctgataatgttaatttaataatatcaagtacaaagcggcctaaaagttgaaatgtactctaacagacctacaacaagttgtggtcctggttcgtatgttaggaggtagaagtgtatttcacacattgcttttggagggctttgagtaataaaattataatacataatttcaggtactaagaaagttttgtatagtgtgttgcagtacattatgttaatgttttagtacattcaaatttttcctttccctgatgattgttcttacttgtaattttattttttgatcaaaggagaagagattcccattaatcaacaagcacaaaacaaccaagctacaacaaagccatgacaacaaactgccaggcaaagctcacgtcaacaggcgacaagttaacatgtgattacaagtatcaaacttcctgtgaatattgctatacaatctatacttaacaattctttaaatctctttaactatatgagtgatcatgtataagaactatgttcatgtatacatttgttcctattcatcaataaacaactgcagcaagaatcattatcacaatgttatctcgaacccttccatttgtattagtaatgaaagacatccaaccatcaaaatgcaatccccaagccttgaaacaaagccagtcgaataatgcttggactacatgcttggaaaaaattaaatactgtcaaaaaacaagtgttgcagactttctaaagcctgaccacacaccggacaatcaagggaatggatgttgatgtggatattagctacctgattccttgtaagaagctgaatatgcaccgcttgccaaagaataaaccttcgtttagaaagtttaagtctactccaaacaactctataatatttgtcttcatcacaattcagcaagctgttgtaaagtttagcagccccaaacttgtctttcctcctacctgccattagtcgctgctgattgaaaacatttcttaagtgacaaagtttcctacgagtaccaacttgaatcctgagcaagcttatagttccaaatatcagctccttttagatacacaacattgacccataacacatcatgctttttcataatggcccataggtacttagccaaaatagtctgattccacttggccccttctttaaaaccgagaccaccaaaatgctttggtctgcaaaccttttcccaagaaccaagatgaactttgcttctgtccccagattgaccccaaagaaataacctgtaaagcttctcaaactccttgactacattttgaggaagaacaaaaatgttcatccaataatttcttaggcccaacaaaacagtttaaattagctgcattctacttgcataagataagttttacgtagcccatgtatgtagcctcttttttatcttgtccacaatgatcccacagtcttccatgcgccatttgataggtctcattggaacccctaagtatttatgggggaacctaccctcctcgagcccaatcatattggttatctccactttagtagtttcatccacacccccaaaataaatattcaatttagcaagattaatagacaaactagtaatcttactaaaatcatccaatgcttccttaacatgtctcacaatctaactagtgcctttgcaaaataatattaaatcatccgcaaaacagagactaatcaagttgagactcttacaaagagtcttgcaacagtcttctagtaaggaactccattaccaacacaaataaaagaggagagatcggatctccttgcctgagccctttcatacccttgaatctgccttgaagtcttccattcatcattatattatatgaaggtcctcttaagtatgtcataaaactttgcaggaaaacaaaaagaagattcagccagttctctaggaaactccagtcaattgtatcataagttttactaagatctatctttaaagcacatcacggagagacattctttctattgtagttcttgatataatcttgaaaaatcaagatgttatggactattgttatatgttgaatgaaaactccttggttctggttaatcaagaaaggcaagacctcagcaagcctagagcacaatatatagcttcgatataaatagttgtacaacaagcaatcagcttgtatagtcaacaacacaagacggtgtatctctctttgggatcaaagagattgttgtttcattgaatacatctgggatgcttcctgtaatgaagaagttctgaatagcaaaacaaaactctgttccccattcaggctagatagagagag

SEQ ID NO: 305001 - DNA, 2504 bp, Cannabis indica
gcccaggttgacaattaacttggtgcgttggtttctgttactcaaatacaaatactgcttcgggaattctctctggcatggtcaaaaatggggtaagagacctcacctcaatttcgaaggccttggcagtatcaaaatgacaacccggaagctctaaaagatgcacccagcatgcaagttgacgtatgactgtgttggattctgctcatctgattttaattctttctcaagcacacatctattttttcatagtaaaggagatatatgaactcagacaagtcaaactcataacttcataatttcacttttttggcaaagtgacttagtcgcatatcgtggatagttttgaatctctcaattccataaatagcaacatctctgagaactgatgaaccacttcactagaataaaaaaattgattaaatgatgtcaaaatatcacttaagcatcaaaaaatacatccccaacacgttttcctactcacccagcatccatattgatgtcatatgtcaacctaggggctgggttgtcaacctgggcacttgtatcaagcaggcttcagtcaaacagccataacttcctcaatatttatctgattgatacgattcaacttgcattttgaagctatcgcaatgctctatcagtttgtgtctcacatccatgttgtaattctgaagatattaggtcaaagtttcgtcctcaagagagttaagaatttcaacaacaacttacccaaaaaaaaggtgctagggacgcaattcaagctctgaaaaatgacgaccaacctctagagtcaatttcagtgtcagatcatcatcaactgttgaacatagctcgaatgtacttttttcacatttttttgaatattttattattattttaatagaacctccttgcctataaaaggagagttcctctaactcatttttcacattcaaaaaagtacccataaggtcagagcatctctctctattttatctctctataaatttagagctttcaggattagtcaattctcttgtaattgtcgtgagatataagaagtatacgtagttctattaccattgctacatggggaattaactactataaattatgtgtgtctctctatttactctactcatctctatttcatcttgacaatctagcgagggagtgttgaccactttttaacatcaatatttttggctttcattaagagccacaactcgattcttagttcccattagagttctctactaggaactttgtttcgaaaggaatttataagttcaattaagaaatcattcaagagctcaagaactgttactattgtctacaaacacacaaagaaacaatactactcttggtaaccatgccactactcagcgagcaataggcattcgtaaggaagtgagctttgagcgagcattcgaaaggactcagactcaagattgcagacctataggttaaccacacacagctgataggaccaactacaactttgctcaaagtaattcaaacaaggtgggaaactaatctcctccacaggattttcttcacaagtctaatgactctaggccaccctgtgaccctgcatagggaaagagacctatagtcagccttagaggaaaaacacagaagctttaccataaaagtgaagagtattagatttgaagggtgaggatcaatgaactactccacactcaaaaaatatttccatgatgaacgaggtgcttagtgaagttactttgcccaaggtcttgataaccaacaatacaaatacttcccttgggtgcatggagtcgtattgaacttaagcaatcagctcaattccctccgcacatgtcactctgaggaagactattttaaaaggaatagttggtacagtactacgagaaatcaagcacaaagtaaatgctcaagagacgactttatcagcatacgagatagatccctttagttgccaacaaggccatacgaccaagcaacaaccttaaagccttggtcaatcaattccttagatcgacttggaagataaaagatcctgcttcacaacatcaaatggaagcggtaaaccgatacgcacatcaccacacatgatgtttatatggctgaattcgacacccttgctactctggttaacggcatcactattttgaagcaaacagagtatgggctagattgagagtggttttctcctctgtgagatcaaatcaaggatttgaagatcccctccaaattcaaaaacccaatgtggcatttgtaaactggtaaagaaaaccctctctcttgcataaacaacttggaagtacaaactggcccagaaggcattcgagacgattctcgttgtcatacttttctacccacgctattagaagtagcacaatatgttagcccaatatatgtttccaagaaggggggtgaattggaaatttaaactaatttcggtaaattaaaacttttaacacaaaatcatgcaattagtcaattaatcaaataaaagcaagtagtatggcaagcaa

SEQ ID NO: 305002 - DNA, 2315 bp, Cannabis indica
ttggtttttgtattgattagattatgagtactcacttttgggactggctgaagatagtgatgaaaggtcacgtgttaagcatgaagttcatctaagatctgcacgtaaacttcaagaattatgtttcaagaatggaggcatatatatcaagcttggtcaacatattgcacagctggtatgtttcattttacttttctacatatttatgaagagaaatttaactcacattctatatttcatgaccttctggacaaagttttgtaatataattttgaacaattcatttcaaaagtctattattcttcaggtacaaatgtggaatttcaattgtcatagctgttctttcatactttatgcaggagtacttagtacctcatgagtatgttcagacaatgagggagtgtatgttaaataaatgtcctgtttcttcctatgatcaagtgtgtgaagtgttcaagaaagagttgggagagacaccggataaagtatgtattttgttttcatctagattcatggttgtagtattttcgttatgtagaagtaaaataattgtgtactgaagtaagcattattaatgcagatattctctgaatttgatcctgttcctatagcaagtgcttcactggctcaagttcatgttgctcagctgcctgatggccgtaaagttgctgtgaaggttttaattgtcaattttacctcaaataagaatctttagtgtaattaggtgccgtgcaccaccaagttttcatcctttgtgatgtagaatgaatcacagtttctttttctaatgagaattattttctacttttaaaaactttccaacattcaggttcagcacattcacatgacagatactgcggctgcagatcaggccaccgtggaattaattgtgaacaccttgcattggatctttccttcttttgattacaggtattcttggatgatttcttccctaacacagtatggtaagccaacttagtaccaccacaatcatgccgtccaaccatgcatcaattgtcatataaatagtacttctaaaatttaggaatacacttctttcaaatgaaatgctgtgtttaaaatttctggttttaactagttcttttctgcttatgtccagatggttggttgacgaaattcgtgaaagtttacctaaggcaagttgcttaatctcttgagtatgcatttcttatttttttttttttctcatctttggattaatacttgttaagtttgtttggggatgtattgggtaacaaaacatctgacttctatatcttagtttttttgctataattatccacaactcttaggatcactttctgatggggttaatacttttttctcaagttattgtaaactttctccaatttgtatccaactttttcaattttggattaataatcaaatacattctttatataatatgttaggccaaataaataaataaaagacaaagttgaattgatttttgtcaagactttggagtttggactaggaattgtcattgtttatccgtgcaaggtcttttgttaatttaggttacttttaatctactgatttttcatattactattgttaaatctttttttagtgtatcatagaaattagaatagaaaacttgtgacaagtgatggtctgtacttgtgaaaagtataaaaaaactactttatagtttggaaaaagagtatgctttttcaagtgtgagaattatatgtgacaagtagacttatattaaaaatttgtagctctttttgatacgtaaaagtgcatggtttttatttatttaaaaagtaaataaatctaaacacatatttgtttctgacaacttgattagatatttgtaagcatgcttcacttatttctgatgtagccttatactgctttggctttattgtaaccaccaggagctagatttcttggttgaggccaagaacagtgagagatgcttggataatttctggaaactatctcctcatattgcaccttatgtatatgcaccaatagtgtattggagtttgagtaccaaaaaattattaaccatggaatatatagatggagcacaagtaaatgatttgaagtctattcgaaagcttggtgttcaaccacatgaagtttctaaattagtaagctcatcactgtaatttttgtatggggcctctaaacttgctgctgatccaaccattcattgtcatattatcatattataatggcagtagacatttactttgaccaaattatattttatatttttttatgcttcaatgtcattgttttcacaataaaacacttgaatgcacttcgagtttacaaaa

SEQ ID NO: 305003 - DNA, 1133 bp, Cannabis indica
gattggattggatcggatactttgtgaacacccctacctcacagtgttccgagcagcatgtatgtattcagaaaagtatcgttattcgcactaaaggacgcgatatttaaagatttcccaatataatttccttaaatatcaccatgattatagcttaactaaaattcctatatttgtgggatcagtttggtacaaccgagaaattattggaaattaacattcagtttcttgattatttctctgtacttttgggtaacaaaccctcgtagcttccctataaatattagagttattttattgttagagatctgaatttcaactttctagagaactatttcgctgctaaaataattgtaaactttctcaagaatattaagaaactcacctagctggactttgtgatcttaatcattctataagtaatacaacaaaaaggggagtagactattaccattattacgggatcgaacctctataaatttatgtgttcttattgttattgcttattattattttattcatgattggtaattcaatttcattgacttaaagactcagagccgttggctaaaagtgaggtcaacaatttggtaatttcattgagagtaaatgaacacaaccttccatccatcaaatttttgattctcttcaatttggttgacaatggttctaactggaaggtcttcatcaaataagccatgtgatccaacagcgacggatctcattatccaaattcccattgaaataggggtcaagaaccctaacgcgcaactaccacctcggggtaatccaccgatagtccttgctcatgtaaatcttattgaaacttattttatcaagatctagatttactaacatgtatgtgactataatctataatctaacatcctaaatatgaatttcctaaagtaaagaaataaacacaaaagagattaagaaatccttacattgatgggagtagaataataatgactccttccatttagatatctagcccttgattcttgtctgtaacagagcattatcaatctgaacttggatcttctctccttcaatttggttagacacagtcttcctcactatgttaggtattgcttttgacatgagtgggcatactctcaattcaccatagg

SEQ ID NO: 305004 - DNA, 1834 bp, Cannabis indica
gcaaaaccattcacagcaagacctgaaataactgaagtccatgacactgagtctttcattttcatctcctgaaacactcttaatgccttctcagccactccacatttgcaatacatatcgattaaagcattcccaacccaaatatcagctctcacaccatgagtaaatatgtactcatggatggcttctccaacatcgagacaccccagatgggcacaagctgaaatcacactagctattgttatttcatctggtttcaccttagctgccatcatctcctgaaaaagtgtcactgcttcattatgcctgtaagcttgagagtaaccagttatcatagcagtccacgacaccacatccctttggggcatctcattgaaaagttcccttgcaacgactaaattccctacctttaaatatcccatgatcaaagcgttccatgaaactatatttcgttcacgcatttgatcaaacacttcccgcgccaacattaccaagccacgtcgcccgtacatatcgattatggtgttccccaagtacgcatcaatatcaacacgattctcctttatatatttgactaaagagtctgcgacatcatattggcccaagtaactacaagctaaaataactttcatcattgtcactgaatcaggcctcacatctgccgcttgcattgattcaaaaagccccaaaacgtcctcaaatcgattccatttcgtatagccacaaatcaacgagttccaagagaccaaatctctatcagtcattccctcgaacattttctgtgcaaaacccatttcgccacaggaagagtacatatgaatgagtgcatttccaacaaaaagataggtctcaaaaccaagtttaatagcaaaaacgtgaatctttcggccatgtaaaacatcattaattcgagcacaagccctgagaacaaaaataaaagtaagattatcaccaataaatccatggctatacatacggatatacatgtcaatagctttccttggctggtcactctgcgacaaaccacgaatcatattgttccaaacaaacaaagtgggtcgctcaacatagtcgaaagctaaatgggctttgtccaaattaagagatgataaagcatatgctttgataacctcagagattgcatatggatctttgtgacgatttcttctgattaagcgagcgtggagctctttgatagaggttatcaacattgaattcttagattgatcggcaacaaaggaagcgtagaaccgtgtaatgaccatttaatagtgctggtcgagcaaaagatagcagcacgcaaagaaaagccagggaactaatctttttacctcaccagactgaaaagatcgtccaggagtattttgagtaagaataaataagcaatatattaaattattatttttattaattaaaattaattttataaacatgggcgttttaacattctcaccattcaactttctctaccatgaatctctctctatattactctctgaaaacaaaagatagatcaaatctgaataatatatcagatcctcttttggattggactgaaaactcgattataaggtgagtttcttttttgttttgaattaaatctttcatttttttttagtatattcatatgagttatgaattttagaaatatcttttcgaacccaaaatctttaatactctaaattttcttggcccgtgagaccccaatttctccataggagacggatttctaaaacatagtaacactattcctctagtttatattattttattttttcatttttggtacctacagattgtatatacatacagtatgtgaatctagataatacta

SEQ ID NO: 305005 - DNA, 2376 bp, Cannabis indica
tagttacagaatgcatttttttaaaaaacaaaaattttacttttatttagtgattaaaaaattagaaaacaaaattgttaccaaacggcacgatagttaattatattattaattcccattaattaaaggacttaattaatacttatagggtctgtattacaacgtgtttaattagctatgttcttcggatgattttgaggcgtgcaaacctatatatgtagaggttaatcgatgtacatataagaggtattattaattagtattatacatattcgtataataatcaaacacttgaaaaatgaattatttatacagctaagagtgattcagatgaaatctcatttctaagatgatctagtcctaatccaatattattatatgatgcaaatcagccaaaaaaaaatgttctcctgtaatgttaatgataccaataacaaaagcaaaattccaaattagcaaatacacttagatatttcctataaagaaaaactagccaattttgtcatgtcatgttaatgaaaaatataaataatatagaaattaaaatacttgaatgtttcccgaattatttttttaattaaaaatttcgatcgtccgtacatatcgatttcatattgttttgtgtatattagtataaaaactatactttgtgacttttaggcgttgcattgtaacaaaaccacaacaatattgaaaataatatctcattatcagtggttttttgttttattttgaaaaaatatttattaaaatggaaaagttaaaattcgatcgatccaccctaatatatagttcttcttatgagataaaataatgctttgacaacaaatacacaacactacccaaaagaaatagtagtttacttagttgactattttgaagttggtttctttcatctgataattatatattatacaatatatataaatataaacataaaatatcgattattgtgtttatgtatttggtgtgggcggccaaacatgcctcatgcactgacctcaaaggagagacatgcatgtattacaacccatactgctctgcctcacaacaccaacaccatatgataactgataagtgtatatatatatggcatatacatatattaacatatatataatgatttattttttattttttccatttaaaatgacattagttattatatatataatctgctttataatattataaaataatttacaaatgggtgccaggaaaaataatacgaatgaagcatgacatatggcctatatggctatacattactgattaaaataacaagaagaaaaagaaatcaaaagaagcaagctaaaatgtttaacttattgaagacatgatcgatggactatgatgtgtaacctactatctctcattattatatattatacaataatttgagagtattatttgttatgcaatataataaacatattggtggcattaatattattatcacaatgagccaagtcacatatacatatatatatatatatatgtatatatagtatctaagaaagtagccttaattattaagcatgagtattgttgtgcatgcatatatagactaaccctagctagcctacacaatggacaacgtttttggcacctgcctttctgcatgcatggatatgtgtgatgaagattaattaataggcaattgataatagcattgctgttaggtaccagtgctgcctagcatctttttacatgtcatgttgtgattggctagcgataccttctaaaaattattatattaaattatatagaactcgatacatagttggaccaataacgatattaacacataggagggtgctagacaccactagtaccctttagcatttctgaattgataatatacctaatcaataaatatgtgtatatatctacatacattattcattaataaaacaaaagttaatagtgtgtacgtacacatatatgtaattatattatcattcatcaaatccatcaaattctatggggtgactgactgaaattaaggagaaagataaaccaaattctttatttgtttaatttgtataataaattaattcaaaactttcgtaaaagtttacgtattatgaaacattaactgaaattatctgtcgatcaatttataaattcctataccaatgaatatatactagagcagagaagcaacaaatatatgtttgatatacaagtcatcaacaattcatacacaaatcattagtagtaattaattttgatcctagacaaagaatatatatatatatactaggagaatgtacgtgccgagccacgtattgttaatttcatttaagattttagtctttttaagattttaaatattaattttttacttaaaaaattaaatatttatatttgaaa

SEQ ID NO: 305006 - DNA, 1948 bp, Cannabis indica
tttttttgtgactaaatgtgacttgtaaaaaaaaattttatgactaaaaaattatcactaaattagttgcagtttttcgtagtgtatatacaagtatgagtaaaataaatattattctttcttgaactaaactagctcatataatggagttaacttttaataatttttctacctttcttttctctatttaaaagaaaattaaataacatagcttatttaatgtaattgcattttcacacaattctctaaaaataactaaagagttattttaactcatttaaggtagagcatcattttatgtttttcgttacaatttaagtgatatcattcataccccccaaagaaaagtgatatgtttcatacttaatattatttattcctcaaattaaatataaattattgtgtgtaaaaaatttgtgttaaaacaaatattttagtaaaatttcatgtaatttattgattagtatattaaaaaagagtctttatttttacacttttaaaaaaattattttaatttttacaaaaattcatatagcaaaccacttagtaaccaacaacgaaataatttaaaaacatagcaacctacataaaaaatattggagcaacacaaactataaattaaaaaaaataaaaaaaataatatatgaaataattcccttattaaaaaaaacatgcactatttgaaatttgattttagaaccgtaaattatttcgatttttttttttaaaaaaaactaataatatgtcttctataattataatgcaggtcattatatacaaaaattaatcataatttcttatatgtaaacaaagacatcctacaagtaaaagcaaaaatgtaatatatactcctatttatgaagcttcaatatttaacaattagtatttaaaaatcaacaaccctagtgcatgaatggaggctatcaatatttaatatttaattgtttggtcatattaaatgtgttgtttgacatattgagtctaggaaaatgacaaaggaggataatgatgggaattaaatatagtaaaataaaaacatataaatatgaaattttatacgcaaagtaagatgagaataaaggtccaaatgcaaataatataaagatgtccctaccaaaatgaaatggacaataaaaaatgccaaaattgtacatcaggctagttactgcacaagaaaaatttatgagaatcgtaaagaggcattaatggacatttactgtgtatttaaaagttgtttaattataataataatagcactattaattagggttcgattgatacattatataggttatatttattataatatatagtattatatttattgtattgtataagtttattcaatgtaatattatgtttgatattgacttattaataggtttgtaattttttttttttgattaatcagagttttcattactctacaaaacaaatgcctttacaatctataagcacctatcaaataggccttaactttagctatacaatttacttataacaaatcaaaccaatctctatctttttgtttaatcctttttggcattacagaaactactctattctttacactccattttacttgttgaatcactttagctatgccttttttttttccttccacaattgctcatttcgagccttccacagcaggtatacaagtgctgcaacactaggggtgtgcagaaagtcatccaatccaatcccaaccgaccgatccaatcccaaccgatccaatagaatcggatatccaatcataattggatcggatcggatgcaaattttaaaaatccaattggatcggatcggatgttggatgagacatccgatccaatggataaccgatccaatccaatccaatatcatccaatgtccatccaatcatatttaatatttataattttatatatttaattattttatttaatattttatatattattttatt

SEQ ID NO: 305007 - DNA, 1550 bp, Cannabis indica
ctttagtgattctatcacttttattcacaaatgataaaataaaagtgattcattcaaaaaaaaaaaaaaaccaattcacactcattattatttgctggagaatttatccttgtttaataattagtaaataactttgagttaattagttactgtaaattaatggaccaaatcatgattagctgtttgatgaaagtaataaatttaattaaatactgaatgagaaattaattatatataaaaactaaaatgtatgtgtgaagaggagacagctatagctgaaaatagtaattaccctaataaaagttgatgaaatggagagggtgagctatcacgatctctttcattatataactcgacattttggatttgggctaacaatattatactcagattcaataataataacatatgtaataatagtcaacaaaatttaatcagtgtcagaacttagaatcttgatttttttttttttttgttgttgacatgattatacagtttttattttgttggtgaaaactcacataattgaatagataattaatcaattaacaatcttgatgatcattgattaaatagtaaaaggaaatctagcaattgcataacaccattctcaatctcaactcaaatcattttcataataatattcacatacatcacaataattttatccaaacattaataattttcttttaaattcctctcattataattcataatagagatggccataccatacaattatggtcccaaaaaaataaaagaatcaaaaaatagaccaatagtaaaggagggagtggccaacaattgtggctgatctggaccaaagcaaatagtcctagtcctagctagccacgtgggacccaagtcatcagagatgacaggctaggtcacatggtgacgtggcacatgaatattttttaaatttatttttaattaatttaatcatttttggtggggtttagggcacaagagattgtgggaacagttccttaaggaagggatagaagagaagagggttgtgtttgtgtgtatgtgtggggcaaaatgaaaaagaaagtttgagtggctttaagacaaacccatctggctatagctttggctattctctctctctatatatatacatctacattcatgtgccctcattaatcaatgtgggtgaaataaaaagcaaagcaaactcccaaaaggaaaaagtatacatgattcttgtgccttacgagagtcactgtattacagaacaatacaaacaaatacaatactctctcttttatttcttattttttcctagtatgtaaatattacatacattttatggtttatatttataatattttacatccttataaatacaaaataaaaaatatttttaaagattaccaaattacatttgcatttatgaatgatatatagaccatatactaaatattgatcgatgcatatattcttcaaatcaattgtaaataaattatatgacaaaatgttagacatttatttgtatagactaaaacatacatgattatgaataaagtgcggaattaataaatcat

SEQ ID NO: 305008 - DNA, 5488 bp, Cannabis indica
aatcataatttctccatatttatcaaaacttgaagaaaaaaaaatccatattctacataatttcccattttagtattacattctattgggccgaaacttcgtacaagtccaggcctgctttcacgaaactgggccgtcctgaaactctcagaaaaaccctaggccatcttctccatgtatatagtttcttcagccgagtaaaaaccctagctgctgctccatttctatctggtaagctctttctccactttatccttcccaacttcgatcgatcgtcaccatttccacgctcgcgctggttctattatcttaatttttatgctcgtgtaggagttgattatgcctagatctgtaactatttctttttctcgactaaacctagatatgagaaattatgtgatgtttcttttctgattgaatgcgagtatttttattctcattgaatcgtagagctcaattgttttactttcaattgtttgtttgatttggataaaattatgattttatatttatttattttttttttgtggtatgctttgtcgtttaacttatgcattttatttttctttaattcaggtggcatttctgtaagtgggttgtggaaaatttctaagcttcaaacatgaggtatgttaaattaatggcctttctagaaattcatacaagttattattatgataataaattgtgaaaatcagatttagggtctttattttacgttgtatgccccaattgatttagttaaggttcatttcaatatttatatttttctggtttgaattcacaagcatgaatgatttgcaaaaaaaaaaaatcactgtttttccttgaacattttcctggttttacttgaatttttttgttgtcaccatttgcttaatatattttgatatgcttaaatctgtattgtaattgctatgacaacagtaagcttcagagtgaagtcctcagagaggcaattgccactataatgaacgaatcaagggagaagaatcgtaacttcactgagacaattgaacttcagattggtttgaagaactacgatcctcaaaaggacaagcgtttcagtggctccgttaagttgccccacattcctcgtcccaagatgaaggtttgcatgcttggagatgctcagcatgttgaggaggtacgtttttgtttgttaaagttactttaatattgtatgcaatctgaaacctttagttttagacttgcttttaagaaatgtttgggtcttttacattttgctattcctttgaattggtttattgttttagttgatctatatgaaaatcttcatcttaacattcaatttttattgttatatttctcaggctgtgaaaattaatttggactacatggatgttgaagggttgaagaagttgaacaagaacaaaaagctggttaaaaagcttgcaaagaaataccatgcctttttagcatcagaggctgttattaagcagattcctcgtcttttaggccccggtctcaacaaggctggtgagtattattaaccgttttctttcttaatctaagcgaggtcgagttgtgctttcttcgtttatcttttccttctgttgcaattctgtacaaagaatgaacttgtgattttcaaatgtttaagatttgggttacttatatatttgtgtgaaattaggtaaatttcccacccttgttactcaccaagaatccctggagtctaaagtcaatgagaccaaggccatggttaagttccagctgaaaaaggttctgtgtatgggtgtcgctgtcggaaacctctccatggaggagaagcaggtcttccaaaacgtgcagatgagtgttaatttccttgtttcactcttgaagaagaattggcaaaacgtaagttctggtttatgattttgtgtagttgcaagctagagcattttcctttgaaataatttctggtgggagtcatttttagcttgaaaggttttgatgtttacctcttttttttcaccaaatgatatgatacaggttaggtgtttgttcctgaagaccaccatggggaagccacaacgcgtgttttaaatatttaatctatttttacatgtatggtggagttttgtagtgagatgttttatgaggttgatacttatataaagtattcagttggaattctcaaagttgcttttttacttagttgtttcaaggtttataacatggtcatgtgttttgttaagaactttttattcttgttgcagaatcaatttttgtttacttattgccccctaatttttgaacacatcatataatggtcttaatatttcacagaatgacaagccgtttagatttcatttattcttaatgaaattgtgaaatatttctatcttgttaatggtgatagactaaaccaagtctactttattttaaatattttcaaatcatgttcatttttaggtactttaatcaatatttcatttaagaataaaccaagtctgaaatcaatttgtgtttgtgagttgtattcgtatttataactatattttgtttaagcatattaatcaataacacattctggacacaactttaactcatctaagatcataatcgttatcaaataccttgaaaacaaaacaagaatgccaactctcaaatctctatcaagagataatccaaaaactggaacaaaaaaccaaattaaaataaaacaacacaaacaacgacagtaatattaataaaggaaaaatctaaaacaaaatataaaaatatagccacagatggtatttatcggttaaatatcatatggtggctttggcaatatgtgcctattatatggccttcatgataccgatgataaatttgaggctatgtgacactaaaacaatccaattacacttacgtatatgtgacactaaaacaatccaattacataagaggatttcgttgctgcaaattacctttgttttttatgacattcttacaaaaatacatatacattaaagaaacaattaaaaaaaatcttattagaataaaataaataacataatatattgttaaaaaaacacaaaattacattaaaaaaattattatgagtgaatttcaaaaattcatttaaataaattttgcttttaagaataaattacttaatttttattgttagattacttataatgttttgaaaaacttgcacgaatttattttcacatttaggagaattttttagtttgatgtttttcatagttgtgtacactgtaattatttaaaatattatgtaaaattttgagaaatttaaaaaaatttaacacactgaaagaaaggttcaaacaatacattgcacatatgatactttattttatacgcatggaaaatagactatttaaacactactttctatattataatttattatgaatttatcaaaattttgcaaaatttaaataacctacatgaccataaacaaaacaaattgagtaatttttttttttttacgataaaaaaagtaggaatatatcagtttatcttttttggggtgcattatataagaaaaactagaaagaagaaagaaaaatgaaaagaaaaattgtattggtaccatataaaattataagtgcaccacaatattaaaaaatatgtaacttaaattaatttttaaaaattacttttaatattattttagatttttttttcacatcattttcttaggtttattttattttcacattttttttttaaattcaggtatgctttgttcttttaataaaattttatataatttattatcttaatatttaaaatatattttatttttattttgtaggtatatttttaataatatgacaaggaagataaaaattaaaaaaaaaatattcaaattaaaaatatatatatattttataaaaaaaataaaattattaaaataggtgtacttatacctttaggtgaaaataaaatttcaaagaaaaagactatttaagattttcgtcccctaaacttttacgtgtaccaaatcatttttggccattaaaaattcttctgaattattgagattgttggattaaaaacttttgtctaattttatttaattttcctgattgagtaatgtttatgtattaaatcatgcttcacagactttgatatctactaaatcatgcttctcgaacttttatatgtaacaaatcatatgtaacaaatcatgacccctgaactttcattcatgttagactttttttactaaaattggacaaaaatctttatattcagcattcttaatatttgaaaagatataatttgtatatgttaaagttcgggcaacaaaaatactaattagcataaaaaaaacaatatttttttttaaggtacaaacaattttatttgtgattcctcgttgaaaaatgaaaaggtatctagaatgctagaacatgcgatggcaatttgcattggacatggatagatagagaaatgcccaaaatgagtggttcgaagctaagctttcagtccaattcttctgacaactctccttcgttcccacacgtgtcaaccataaacaaattcactcaccatgtcccccattaccatttccttacaagctctcatccatggccaacctaatcactctctctagctcctctctcctctctcgctccctcctctcaaaaccactcacttccactctcacctttgtcagacccaaaataatggccaaagttactcctgctgtgatcgttggcggtggaagggtcggaagagccctgcaagatatgggcaacggagatgatttgttggtcaagagaggagaccctgtaccgcttggttttagtggtccaatctttgtttgtaccaggaatgatgatctccaagctgttcttgaggtcactcctcgatccagatggaacggtgtgtttctacttctttacctcaattggcttgatttgaagcaatgttgatttgtgtttatagttttcaacttgtttttagagtcaaattagtgttagaatgtaatagctaattaaacatgagattatgttggagattggtaaagcataatggttgaattggtttattaccatgttaatcattgttgttgttgattgttgattaccatatggttgaattgtttgattgttggtttcgagtacttttgaagttttcaacttgtttttagagtcaaatcagtgtaagaatgcaagcgcgataaatgaacagagtggaacagtgtaaacaaattggaaacaaaaaatcagtgagaatatgcccattgaactgcattgttaattagatagcaaattcaacataaaattatgttgaagattggaaaagcataatggttgaattggttgattaccatatattcaccattgttgttgattgtgatataataacttgaaagttggtggtcaaaagtggtcttagttgatgtcattgtgagttccaaattttaatactccctctcaagttggtgtatgaagtttttagatgtttaattttccttgatactctttaaaacaatcaaaatgtgtttttcgtt

SEQ ID NO: 305009 - DNA, 1611 bp, Cannabis indica
ttatttgttattggatcaaaatctaatatattttaatatttctaaaattatatttataattaaattattttaattaccaatggtttattgttgaattattatttgccatatctgtatatatattcacatatcacctataaacaatattttataacaacataaaaattttaccaaccatgcatttaatttaagtaattaattaatagggttaggaaaaaaagtggtgagaccatcatcaaactaaaaactaacaatctttattagtgtttttctttttctattagtgtccatagatatagtataaagtctcttgatttatattgattcattttcatttaaagctagcctcactaaagtattacttcaattatattgtcccaccactccatatggggcaagttgtccctggtatttttaagtaatgattttatttataatttatatcacttgtaaatcctttcttgcctcttgcgcccatacatttaattaaattgatttccttggccttaaatgattagactacctcacaatacacagtccatagaacataaaaccaaaaaatgatgacaagcaagtattgtccactcaaatgacacatataaaaactataattttaatataataaagcaagtttatttttttaactctaaacaaaaaagtagtcattctacacaatttttttctgccttttaaagatgcttccaaacagtaaatttcatattttttaagttaaaaagacttctaaaactcaatatcatttcacctttattcccaatttgatttgaagcaagattatttgttttttggaatgttgcaaaaatgcaaaccctagtttgacccaaaaagcctttatatacgagacttgtttgatctggtcaagaacagataatgtataaagatcagttctctgataaagacttgtcatatatatatatatatataaatatatatacatatttgaatgtgactttaaacatatataaggtgcatgtagcacataaaattaaatagaaaaagaaccctatagctactatatatatagggggtaaataactatatacttccccttcttctcattaatttatatcctcttgtagctacagtcatccaatgagttattgtcttttgaaaagaaattattagtcacaatgagacaataataacaaaatcgatgagattattggcattacaatataatcatatgtataacttataagtatacatgcatatcatatatataaattgtaaagttttaaatttaaatataattacaaataattaagctcaatttaattatgattaaaatttaattatttaccaaatttttattggccaaaaagatgttctcacgcgtctcatttaactcattgtagatagagtaaatgggcacgtatttctcgtgttttcttttatatttcgatgaatctttcgaattttccttccttttcccacttgaatcatttgtgttgttgtaattgttgggagctgagtttgaattcaattcattctcaaaagcaatgtctctaatcttatttctctccctaaagtcaacatcttcaaaaaatattgcagttctcgtctcaaaaatatttctgacagtgggatcataaa

SEQ ID NO: 305010 - DNA, 3665 bp, Cannabis indica
attgatccaagtcattaaatttttattatttaaaaaaaaatagttcaaatataccaataagaaaataacacgtggatataatggtttaacatttgacggttaggtacttacagagtttcagaaatataactttagtattattaccgccaaaaattaaacttaagtatttatttacaactgagagttaaacttaagtatttatgctgcaaattactctaaaataaataatttataaaatgtggaaggaatatttatacatttataaccaaaaaaaaaaatgaataagaccactttataattaaacttgatcaatattgaaaccataatatgtagttaagatagattttatatttttaagatgtaaataaataagttttaaaacaaaattgttagagagagtaaaaaacaattaggtaaaaggtgagacaaagaaaactaatgtgacttttaagtaaagaataatgatatttgtacttataaattacactaaaaaattatatataataactacaatttctttaaactaattacaattatctaaacttagacctaacatttttttttctagggaggttgcaccatttattacttccatgaactaacctttgtttgtttctgtttgcttttctcttaatttagatttcagttataaaaaaattaaattaatgtgtaattaaataattaaatttaaatttagaattcataaaatcgaagagaatttaatcatattgataaatttttctcaaataaatttaaattcagagtactaaatatgtataattttaaaatataaagtattaaacaaacattattgaatatataaagtaccaaatttgtatttaaataaaacaggatactaaattagacaccctataaaataaggcaaaaagataagtgttatttttcctttgttttagtaaattcaaaaaattttagcatggataaaatgatgttctctcttaaaaatataagaaatttaatttgtaagagatgaaaatgattataagattcttaaattttcacttaaactcatcaatgccaatttaatttgatagtaatattttagtcttacaaattttcactcccacatcgattaggttaaattaaattttattattgtgtggtaaaatattttatcactaaaaatatttttaatgtggagaagaatttatctaaaaaattaatagtgttggttatagttataacattatttatctaaattttttagaattctccaaaaaattaaataaaaaatataaagtagagatatatttgattgaatttgagaatttatttaatatttaaatagaattaattatgtgtgatttattaattaaattagaaattatttaattatttgtatttgtactcgaatgttatagtattatgtaatagttttattagttagaatcgttcgagtggtatagcaaaaagtgacaaaagtaaaatatcaaaatatttgaaaatattttaatggaaatctaatagctatttaagaaagtaataatttgatgtccatgttgctaagtgggaaaaatttattgagattatggtatgtaagttaggttacttaaataccaatttacataatgtgtatttatattttctcaagcgatttacgaattgtgtgacttattatttggctaaagcttcagtttcttcagctgatcgtagctttaagaaatttttagcccctttagctttgcttgatgtatttattaagtgacgtttaatgaaattatttttccattaaaaaaaaaagttaggttacttaagttagatattatgtaaataaattgatatttttggagtattgttatattttaaaaaagtaatgtaatatttatagctcaataaatagtggttctttacatatagctaagcactattcatgagccgagtttttgagctataatagctcatttgatgtagcacaactttttactatttttttatctctcagctatttttttttagttattagctattttaactagtctattatgattgctcttagtattttgatttgatttatgaagcgtgattgtaatttttttaaagagtaataaataaggtaaatactattttggatcttatattttgtaaaaaattactaattggactctctgttcgtgctaagaattatcttcaagttagttatattaaaaaattatcaaaaattaagtttaatatatactaatttaatcaatacaattgtatcaatttaaccaatcgattctcatatatatgtaattaaatatattcataaaattgaagagagtttgatggtattgataaatttttctcaaacaaatttgagttcaaggtatcaaatatgtatgattttaaaatatcaattaagttttattaaaaacacaaggtacacaacttatatttaaataaaacacagtgtgccaaatagggatggagaagataaaatccaatccaatccaattacaaaaactaaatatccaattacaattagattgaattggatattaaaagttagattttaattagattggatcagttattggataacaatctcaaaatctaattaaaaattgatcaaatccaattaaatctaatacatataaaaaaaactatttaaaataattcatataaaaaataaaaagattgattatatttttactagtttatttatttatttatttattattattttttaatttgtaatacttggttgttttgtatattcatttttataatattttcttctattttattagttggtagttgttgttttagttacttcaaaacttttagttgcattaaacttgtcagtatgattagtttatgtagtattaaattaaaatgaaggtttatataaagtttttatgtatttttcttcatatttttaagttagtattaaaaactaggtgtataattagatatccaattaaaaaaatagattggattgtgttgcctagaatttctctcaaaataaattgcagttcaggagcaagctagatggtaatgaaacccacactatgggacgtgccatattaagccacttccagattctgttaatttgcgagaattgctaaagattggtcaccttcgggaggctccacctagatgataaatggttttatcatttcctcttcgtgagtaaactcaatccgaagaaaggatgaagggacaggcagagcatggcgcactgcacgaggttaagtcattgtaggcacatttaataaggcatgggaaataacatcctacacattactctaaaaaaacgtgctcaagagtttaaatctataatttcctagtttcaccatgccccaaatatcaattgacgactacataatgagctattaaatcataagcaagagacaagtttagtctcaccaaacacatatagcaagcctaaagcacatcataaaagtaagcaatcataccttatgattaaatttgagaaattgtgcaaaacatgacttatataaacacgacaatggtgaccttttaccaccattataagcactcccatgatgtataaaagatgagactcttggaaattctctgtaagaaaaatattcattaataacagtgactcgtggactaaagctcattaatgtctcaaccacgcaaaaaagttatcttttttaacttccattaattactacaaacaactctaattaatagtt

SEQ ID NO: 305011 - DNA, 1174 bp, Cannabis indica
ggacaacccaagcacaatataaacaacgacggagttgaacagtcacgatcacgtggtggcggcgttcacgagaactgcataaagtaagcttttatttcttactatctttaagcttcctttgccgtaatctgttaccagtttatttgacatctctttacatgctccttaatgggcggttcctgttctgctatacattgtttatttattatactacctttcatgccacatgcatatcaaatggttagggtgatcttcatctacctctaactggtgtgaattgaaaactaatgatactgtgttctggttactatagttgtatcgtgtctcttggacagccggggatatcttcaacgaagcgcttcagcacctcaggtaagtaaaatgaaaaaaagagaaaaaagaaaaagattcaaaatttattttttcgtactcctctaatgccatgatatcacaggaatggatggcagagtggttatttgggatttggaaaaccaagcagatctgtcggaatatttgtgaaccctcgaatcatgaagaacaccttcgtgcagtggtggcgggaaattggcattgtgtattaaattctattgttggcaattagttatctttctacaaaagccttctgtctactacatgttgtgattttacttttgtactaatatatgaaacttgggtacccgcctacaaattctggcttaatgtcaccatttctgctctgtcccctttatttagtgtgaataagaaaaaaattctagttttatttatttactttactactagttatggctggatgcaccttcctatatctatgaaagcttttactcgcatatctgtatgctgaccaattttgtaaattgaataatgtatacaataatcggagaatgagaagccacgatgcttaagggcgcgtagtttttttagaatcatgttattgatagtctagtggtagtgtttaacattttttttttagagcatctccaaggagctcatcaaatatggtgtcacactatcaccaaatttgatgttaaaaactatcttcactccaaccacaacaccaaaaattacactaaaaaactaattccttattattatattaattttttaattaaaaaaagaactaaaagacacattgtaatttaataaatacaattaataatatagacatatacaaaaa

SEQ ID NO: 305012 - DNA, 1540 bp, Cannabis indica
ctttgatgccaccttgatctccgggagcatagaaaaccttgcatgccttctccgggaggcatatccaggataatgtctttctttacaaagacttagctattaatttgagtgctaaaaccccttgtgtccacgtgtccttgtctggttggtccacgtacattgggcaaaatcaggggtaacaataattaatttgaaaataattcctaacacgcacagatgtagaaaatttaactaattttgtcataacacctcgaattattattaagttttattttgaaaaaaacatcagttcagagtaccatttgtactatattaaaaaatacaaaatctattttattatttaacaaaacagaaaattcattatataacttttgcaaaatacactatacaaaatactatttatcctataaaataacaaacctttaaattgcaataatgtcaatcatacacataggcaaataatcacattagatgaagttcttaaccagtaatatttattttattaatttacaaaaaaaaaaaaaaaaaaggaaaaacagcctagttatgaatcttaatttttatacgctaatacatattatattaaaaattatagtgtactatgaagtatgaacattcttgccagctgggcatttatttaataattttagagaccaaaaacatgaattacagatagttcacaccaaatatgggtctttatgtttcttttaatgaactttttttcccctgaaaatttgttttaatgagtttattagaatcataattcgtaaaactataccaactttcatttttattatttaagattaaattaaattattttcttcttttcatgaattgtttttattttctgcgtttatgcgtcacttctcaataaaatccaaaatgattttatattttatagaaaatagttttcccaaaaaagaatattcaacccacacatattatttaatattttgaaaagggtacatacccaatattagtatataattaatagtaacacaatctcacatatgattctaatctaaataaactcttcaattaagattaaaaaggaaaaaagaatatatgattgaaaattggaaaggaaaaaaaaagaacagagctaataaaaaccaaaattccctttaaccattaatatttaaaaaggtgacgtaaaggagaattatttaacaggaaacaaacagaatgaaatagggaaatttgtttaaaacaaaacaaaggaggtgaccttcatttccaattccaaccttgacacagaataatgatttgatattttgattttaatttaatttgggtaaaaataataattaaaaaagaagctgaagcgaaacgaaagtctttcatcaactaactcaactctatgacccaaacgaatcccttatttcacagagcacgtgcatctccactctctctctctctctggtatatgctcaaaaaaacccaaataagctttccctctctcattctccattttctctctctataacactcttttcagaatccccaagccaagctagagagagagagagaggaggagaag

SEQ ID NO: 305013 - DNA, 1265 bp, Cannabis indica
ttttttttttttgcttcagtgttctaataaggttttcttttctgtttgatttttcttacacatataatttcttgtttccaccatatgactatgcaggtgaatatgaagaaaaaaaaatcaaaagaattgacaagaaagttattgtttttacaaagaaatggctgtaaaagcaaatgggtttgtgaaaattgtctctctgagactgagactgaggatcgaatagctaattcgatctgatgttaatgcattcaaacttgaaatgttggtaggcatgattttgttattaaaatgaagaaggtacttgaaattatcttttgaggctttgtacatttaataagttattatttttattttgttttttaaataaaaattcgcttttggattttctatttttatgagaatatcagagagaaaaaaactaattttttaatgataatttttttactggcttttagattttcagtttggttgatgagaattgacctttctttttattgttattattattgagttttgagaagactaaacttagttaaactcaagttattactttgagaaggctatgataattgctatctatttggttatcaataactttgctcttttgtttaaaattgaatacttcttaaatttggactcattaaactcttttacttaattatatacagttgacagttgatattaatggtgtgagggttgacaagaactacaaccagatcgaagagtttcatctcatttattggaaagacgaagagcaaccagcataattctaattgttctaatgtgtaatttctaaaagttcttatacaatcatttttatgtaaacttcttcctgtatatatctattttctttttccttttaatgagatcaatgtgcagatattgaaaacatattgtatcgaaaaaatgaaactgaaatttattaaaccatgaatttctgttcttattagtttgcaactttcacttgatgcatattaataattaagatatatttcagaattttcttaatgttgtctctttagaataagatgaaactaaagttaatttagaagttgattgtgagttatatttgtcttcaaggtttggcttctgtcaaattcttatttgtttttttgttgctttctttaatcagatggtgattgccacattattggcaatgatgctttgaagttcttcgctttgtcgaatttgtcttggcaagatctcaagcaggtttttcattttcttttacggattttttttggaaaatttacatctcagtacat

SEQ ID NO: 305014 - DNA, 1673 bp, Cannabis indica
acataattattaatatttataacaaatatatgtttttgagatttttaaaaattaattaattagatcttaaaaaaaagatataaaatgataaataatagacaagtaatttttacgtggttctgctatcaaaagaaaaattacgtggttcagacgttaataatccctagtccacgagttcgttgtattagccttaccggcgagtatctaaatattacaagtatttacagtatcaatattaatgtattcctttcgtttctcttggagaaaaagaaagctcataggaattttggcaaaggttatgtaagtatcaaaatgttcactctttgcacataaaaaatgagagcatttataggcacatgtgtgggtgagggcatatccttcacctacctaggatttcgtgctcaacacattacaatggctagtgctacgactttagcaatttgaccgttggttggtaggaagccttcctatcgtgtggcgtacggctgctgcaaggcaattcgtgagactcaggacatgtgtcgctcaaaagtttcaccttacaaagttggtgtctagacatgttggataaaaaggagctatagaagcacgtacgtgcactaccaaggtctgacgcaagagacaagatctgatttggtgttagaagatatgcaatcatcaccttgagctccgactaggacacacccaaataggttcgaagagcatctggccatagccttcccgaatcaaattaacccgctgccaccctggaacactcatagcttctaatccttcccaatatcaaatcattaatgggaatctcggagctccttccgtcctcactgacaggaagaacctctgggtaacttctggtgtacaacatctcccatgatgtcgaaaggcaaaaggtacatactaattatgcatgatctgacgtgtcatccttgcgtaattgccacataccaggcatcccaggatgcagataacactagtgtaaggagcttgcagcttccttccggatgcttgacttattattttgacttgtcgtccaagtattggaatatggaagaagtcttccgtattcccttgggtaactgaggggttgatatactctgggatactatttgctgaagcatggtgattgtttagtggagctgtggagctcacgctctgagcctaggcacatttctcgtaggaaatgaataacaaatggacttgaaaagatgccaaccttctggcatgttggaggtgttgccacgaaatgatgagtaatgaataatttattctttttctttgggcgcattaaatgtaaacattttgaatccccagccgttggatggtgtttttgattaattcaatttggaccgtgtatttcaaaaatgtctgaaccgttgccacccatataaataaaagtcttgacgatagaattcacttttccttcctcaccttaagcttcaatcccttgcccagagaattctctcaggtagcatcctcgactagaaaccttcacccttactcacctctttgaaccaaaactttgccccctcttctcgactttgctgtcgtgtttcctgacattcatcacttacccaaacgactagttcactgttggagcaaggcgtggcctggtcaccaagcagcctgtggaattttagacgacgacgagtatgttgggaattattttaccaggatct

SEQ ID NO: 305015 - DNA, 1086 bp, Cannabis indica
ctggtaaaataattctaacaaaacatccattaaaactttaaaagattttaaaaatatattcatattatcaaatattttttataaaatatctccatcagagatgcacttataacccccaatcaaaaatgccttatgatttttctttatagaatgctctcaatttcaaacattatcattttaaaataaaccatattttgcaatggaagcaagaactctatcatatgctccaaaataaaactaatagctttttcaattacccaaattttcaagcaagcaagcatgtcaagtagaaaaactcttatcatgatgatgaatgtatcctctagtttagattgataaattttgtaaataaatttagaatttgcaatcaatccattaatcaactcttattagtgaaaaaaaaaaaacaattgtcataccttatgatatatgagatgacacttaattatttattagtgatacttaatattatttattaaattaaaatgtgtaaaattttatattgaatggatcagatagcggtatgcgagtttatgtagttgaaggctaaaatatttttttctctatataaataaaaatagaatttttattggagaaaaaatataataaaaaaaaaattatctgagaataaaaattaagaaaaatatataaattttgtgagtataaaactgaaaatataaaaatgaaaaaaaaatcaattttatgaggactaaattaaaaatattaaaaaaattctacaaatttaatttatgtatttataaaaaaaaatgatgcaggacacatgacctcaatttccttctcctttaatttctacctcttataacatattgtgagtttcccttgaattggctcaaccactacaactcaattgtgcaacattctcatcttctcactttagttcttgacagagtataatcttgggccttagtgggctgcaataaatcaaggcttccaattgggtctcttacatttgcagaagtgataattacaccacatactaaaatttctaacttttttatttttatactatggggtaaattttttttcaaaaatactgtatgctaaatactgtgttaagttttcact

SEQ ID NO: 305016 - DNA, 2094 bp, Cannabis indica
tttattgatattgaataatctagattacattgaaatggagttttatttagggcataaaacccaacagtgtgttcactgcttatttcccagtcttcaaagctagagacgaggatgatcctcatacaaaagttgaagcagatcatggtcgatacggtggttgcttccccaaaactcaccagtgttccatctacaaaaggtaagagagaagaaaatgagaattggtcagagcaatgaataaaaaatatgttgaatgtaccaaccaggttcgattgaggaatcaaaagtagaaatttcactcagaaatagaattttcaacctagaagttcaaaacttcgaattggagtttgattttcactatacccctaatggataagtgaaaatggatcttgtaaggttaaaatcaaagcatagttaaattcagacatcgtggttaagcacaatcaagatttctaaactttgaacctaagatttctaggtcatcctagaatagtttaagaacagtcaagatccatggccaaaaacccagaaaattaagcatgcaaatatgtaaaagaaagaaataaagaacttaatcactggtttgaagctccttgttctgctcggatgatgttttcaagagtttcatgggaatccttcgtagaatttgagagaaaaattcgcctaagaatttttcgctctggtttttcaagaacgaaaatggctaaaaggatctttggaggtttttcaatcctatttataagcagttcgaaaaagggaaataatcatttcaaaaatttaaactcctccaattccccccaaaagtatatgttatgtactcattacaggcagagtaactgtcaacacgtccagacatcgaggtgtgattcggggcaagactgtcaatcagcattaatgatccaaaattgaagagacccctggtcagggtcatatcggttcggcattcgatgcctaggacacgcgtcacccatctagataagactccaggttgagtgaagtccacgttcgaccaggatggtcctgcacagacttggggggaaaatgttattcagctttttgcacattgacgtggtgataggatcaaacgacacgtgtcccatatttttgatacctaggcggaggaaaatatccctagcaacctgcacatgactagtcaacatctataatagtatgttatccgagcaaagttgtggagaagaatttgactagatgaaagcgtgtttgcgctgagaaacttacaagaaatagtgactttagagaataataccgttgtgtccaaacacgaaggcgatccttataattgtgggattgaatcagagaaaaatgacaacctgttctagtttcttatttcatatattgtaattatagaataattgtaattttttattttgtgcattgtaagcgaaagaaaaaccatccctcatgtattaatcccctataaatagtgacctcacgtcactatgaaagggatcgaaagaattgcctcagagagataatctagaaagaaaagagtgatctaagagaaaaacacacttagagatcagttgtaagagcttttaaggaaaagaacacttcgttccttctcttaagtcaatataatataaggagagtaggctattaccacaatcacgggaccgaacctttttaaaatctagtgttcattttactttatttgttttgttcttttttgattacgttacttaattattttattatctgactcactgtcgttgacaactgtaacttgaattgtggtacaccactaattagttaaatgaaatattatttcattattatgtagctactactctaaactacgaagacatgtcaaaaatgaatagaaatcaagctaggaactaatccaattgttaccggtgacatattttgaactgccaagaacatttatagtgttagaatattttatatggacttatataaataagtgttgctcatagagtgtcaatattaatatatgtggataactatatgcatcgtataatgtcgattatgaaattaggaccataatgggatggtcagttttattatctgcatttgaggcacatggaagcacccaaatgactataaattggcccatta

SEQ ID NO: 305017 - DNA, 2316 bp, Cannabis indica
tactgagaaatgtgattagacaaacaagagaaaatatgtgaaaggctaaatatactgcaagatctgccatgttaaggctacatcagtccaaactaaactagaaagtccctattcgtatagacttctgtctgcatagggatagggacttggggggaaaatgttatcccgattttttttcacctaatgtggcatgtctatgtggccaagatcaatgccacttgagagtacatctcatcaataagaaggccaagtcctttactacaaacttcaaactaccgagagggatgaagaaatgatgaactagccaccccaagggggttggccggctagcctgcacctagcaagtgcatggccagccagccttttacatggtaggcttttggtgcgcagccttcaatcgtggagaacaagctaagtagagaacttcacaacccacgaaaataggggaaaatattagcaactttcctatttttcagggattattattaagttttaaagtttattatttaattatttaaatatagctttatttacctatttttaagttttaatctataggtaagctctactataaaaatagcattagtaaaactctaattctctaagtctaaaacgcaactctctcttcccttctctctcacacgccataggcgtactctcgctctcaattgagatttgccaacttgattctcacattgtaatcttaagagaggcacgccaaattccacaatatttgtgagctgagtggtattatctctgatattaccaaaagggaagtaggtcattacccgctaactaaaggggccaaacctctacgaaatcttgtgtctcatttacttttctgttgttcttgtgtaacatgtgaaaagcatcagtaataaatactactccgttatcagtttgccaaatatgaggtcaacactactatttcttagactgtagttgccaccaccaaatccacctttggttacaagattagcagtagatgaagtgattagagcacttactgttaccaaaaagtgagtccaatctatcaaccctactagcaacactcaaaagaatgtcctgtaagatttaccaagttattttatgtcatacttcagtctacaacactataggaaagtattccatgtttgaactagatataacatttgtgacaagaagagactaagtgcaaggtttacctgccaaggccagaatatctgcccattgctttttttgcctgatgtaattagtcatatccgtcgaccctttctttactatcttaaattttgcgtagtattcatcaattttagccacgaaatgagaaccaaacagtgcttctaaaatgtccataactctgtagaagatgagcattccaaaacatctgtatagcaatgctttcaatccatgatccatagatcaaacctattaatagttggtcattgacaatccactctttgaacttaggattagtttcaaaaccaactacttgttgtcaattaatatctagttctggaattagtttttgtggccttattcttgctcttgttaagtagacatagagaaaaaatgttcctatcctccttgagcacaaaaagtttatctaatgtgctcttaaattgtggaacaacaacactagaagaagaggcattgaaatcttagttagtaacattgtaccaaattgagttaaactatttcttggagtttgttctttactagccatggattcgtactgtactttggtaccaagttgagatatagaggaaatatattttaattacctcaatgagctattgagatttcattaacattttatagccactagggcaatattgtagtatacattttaaaaagatacctcaccgaaaagttgggaatacacaaaaactaaggagaatataccctgtcacaaataattgaaaagagaaaaaaaactcgtaatgcacaatgcctagtcaccacaacggaaagctcatgagtacagcattgcaacattggcgggaagcaatctcattttctaacagttaaaatcacttctaatttcatacatttaactgaaattatgttgtatatatttgattttgtggagtaaaacattaaaatggaaatagaacggaaaataaaatttaaaatttataaaaagaaatgataattttttatttgtcatatttaattgaaatgatttttatttgtatttacaaatacaataattattctactaaaatagtaaaaatattatatcattggaatgacatgggaatataaacaaacaaaagaatcaaagcaaaacttaggtgccgtttggtaatacttttgtttgttaattttttaatc

SEQ ID NO: 305018 - DNA, 3340 bp, Cannabis indica
aaaattcaatttttaaaaaattccttttaaaaaattttgccaaataaaaactgttttagttttaaaaaacagaaaataatttttaagttatgaagacaaacaagctgtagtattttgagtgacatcatacattacagcataatgctaggattagaatatatgtcaatataattttttttggggggtcaaatttaatattagttaagaaaaaaaaattaatattaaacttaacacatgcattacagttagagttggagataatttagtaagattggctgttgatgctatttcaattcccattttaagatgacaaagtaacttgaacttggaccataacattattttctgacaaatattaataagtatcttaacaaaataaaaaataaataaataaccaaaagagatcattgtcacttgggcaaccgagagggccaatgaagttttttctcttttcatatttctcctttccatttattaaggaaagagtagtattaacaagatatatacatattctccggtgctcgagacaaaaaaggtacagtatttaacttaattctagccacaaacaattacaatatgagtaattatgtacaaaaatatgtaccaaatcttttattagtatatcctataaaagttcgagatctggtatatattttatttactttggtattgaaaaaaaaaaattaatagtgcatgtggtagaattgtagttacgtaatatcaatcacttataaatttttaaaaaattcttaataatactaaaaataagattcaaaatatttatttatctatgacaaaaataattaattaagcatgtacttttaaatttttttaaaaatttacaattaatcataaataactacaaaacaatacacaattaagaagaaaaaaaaaataactaaaactaaaaggggcatatatatattttttagtattattatttttatatattttaatatttgccccacataataaaaaatttcatttttttcatcatatattgtcatttttgttcttatattagagttagttaattttctcttaagttttaccaccaactgtatttcaactctataaaaatattgctcttgtaccattttacacatagttcaatcaatacaaaattattttacaaaattatttttgttttactttgtttttcgtttctttcctcctaatacggtatcagattttacaatccaagaaccatagaatccacaagcttccactgcctacaacaatggtgggtcagagagccaattcctttgctacctccactgatctcaataccaaatctagtggacgatgctctttcgaattctgctcctccagcatctcaaaactcgacagagattcctcctcgagtccctgttccggctgttgctattcaccgtgtccatggagatcaaccaacttatgaggatgtaagaagtccctactacctcaacactgtagatcatccaggactagttcttgttactccagtcttgacagatcgaaactttcaaccatggactcgagacttcaagctttccataggtgcgcgtagcaaccttttcttgatggtacacttcctaaacctcctcccaatgatcctttatttagttcttggattcgttgtaatcaaatggtccaatcttggatccttcactcggtttctcccgagatcaaaagcagtatcatgtatctagatactgctggagacatgtggacagaactcaacaataggttcaaccaaggtaatggtccacagattttcaaacttaatgaaaatcttacttttcttcatcaaggtgatgattctgtcaatacttattttactaaactgactgctatttgggatgagattacccaacttcttccaagagtaccctgtacttgtgttgctgctcccataagttaataataccacaaccatgatcaagtgctacaacttctcaaaggtctcaatgagtcctatcatgttatacgagatcaggtattacttcttgacccatgtccccctctgaataaagtgttttccatgattgtacatcaagaatgccaaagaacgcttggcaatcaaaacattaaccccattgcagcagctacatcttcttctgcactcaattgcatgtattaaaaaattaatctacatataatttttttttttttctagaaagagacatagttaatatgaactaatataatttatcaaaataaattattaactaatatgttaaaaatatcaaaattccaaacttattacgtttatcaccctctcttccctcacataagcacttaccgatcattgttttacttattttatgtacaaaactagcttattagaaataatattaattatgattataagtgagatacgatgatgacatcaactataaatatagtggtgactacaaataaaatacggtgatgatagttgttttaaaattatataatgaattttccatagatttattatcttcattcagtttcaaatttctattttgtgttagaaatatttagtttgtaatttttttcactataaagtatatttaaaaaaaattacttaatttttatttatataaaaaattatatgatgattttttttaattccttaaagttttttatatagatttatacataaaaataaatttaaaattatttaatactaattttatttttcaattcatatttacataattatttaacaacccggtcatacttatcaaaaaggataaaagttgaattggtaaatttattaaatatagggtcccaatcatgaacttctagaagatggaaagcatgttattagaccaggctaaccaatttatgggttgggtaggcagaaaaaaatcccaagttaacttatcaactcaaccttgcttatatagattctccacagtctttgcccaacacatggggctgggaccatttgactatgtagcatcaatgagtaatatacttcttttttaatagcttatcagaaaattcagtcttaccccttcaaagttcaaagagtaattttttctattgtactcaaagttaggcgagtctttcttttgttttattttatttaaatttcttttactgtctcctcagaatttttaccactttctaagtctaccgactgtttatacatatataaatattttatagaaaattatatggtcctacttctatattgcatgccaccatgctatttgagtatggccctacttgttataaatttaagagaaatgggtacccacactaccaattatgctaggctcatcatcatcaacaatgttttcgtggctgatatcatttttctccattgatataaaaaaaaaatatcactgtttttatgtaattttttttt

SEQ ID NO: 305019 - DNA, 1917 bp, Cannabis indica
tttttttttttaacaattacttaattttggacttacaaaaaatgctaatatatatagatcgctaattatttaatttgtgttttaacaatacaagttgacaaagaaatacctaacaaaaaccaacttgaactccacctatgatcaaaccaacttctaaaattagtagtgattatgagaaagaacccaactttgactatttacataaaccacttgggtacttaggttatgcaaataaaaatgtaataataaaagaaaacatacacacaaaatacaaattcaatttaatctcaactttgtacaaaacataaaaaccatatattttagtttttttttttttttcatgtgaagacaaagaagagaagaaaccaaaaaaaactaaactctaaaacacatggcaaagaatacaaaagagattttggtcaaatgttgcacactttggttggacctaaatcaagggattttgtcctttcatgaaggtgtggagccattttaggcaattgacaactttgtaaatttagaagaaaaagaaaaaaaatgtgagcactaagtaaggttcatgttcaatgtttcatgcaccaataataataataataataataatagagctataatatatacattatgactcttcaattgcaccatgggctaattagaagggctactactaataattgtgtacgtatgaaactaaatcatacattttgtttttaatgaaaaaccatactaagaacctaaatatgaattatattcaaaattatttgttaattactttaatgtagtaaaactagttaaaacttataattttaaataactaaaaaatatattattataccacacaaaattaagactacaaaaataaatttagacattttttaggagtccaccgtaaaaacttccaactctatataataatacatggataataaggatgtctatagtacaacatacttcaatagcttcttcaaaattataataagtgatatttttttttcatgataatgttaattattataatagtagatctcttatcatttttagaaaatttttgaaaacaaaattaaaataatttatgcactaacactacaataccctctcaaaaatttataatgagtaatattatttttcatgaatgtgtttattatagtaaagtaaatttcctatcagttcactattatttttcaaaatttaaaatttttgtttcttgaattatgtcctatacattattgcacctcttaaattttttaatccgttaaaaataattattgaattattcattgttgtaaagtagtccgtctgtgaagttttatcacatatggcaaataaaatgatgatatgacagtttatactatctctatgttcacaccacatgagtaattagtttgaaaaaaatatatttaaattttttaatttagttatacttaaataaataatatttagctttatgattttgaaaaaaacatatttttttttttatataaaatgaagtactcttcttttcattcctttgtttgatgggacaactagccagcaaaggataaggttacggatttgggattttcattgaccaactatcaaaaagcgatcaaagtcaggtcagaccgagctggttgagcagcaaagggagaattggtccaatctcaggcaaaaccataattagagtcataaggaaagtaccagttaaatagggtcggaagtcgaattccttctcttctttctacccgcccacaacctattccctgaaagtgcccccaaccttagtattaatgtgatattgatataaatatttacattatcattatatttgtcacgtataataaaacttgataagagaattgagaatcatgaggttccgtcttaaaatcaattggcaatgagtggagtaacctatgttcttatatatggctcaatacttttaca

SEQ ID NO: 305020 - DNA, 1243 bp, Cannabis indica
taaaatagtatttacccaaaacaaaacaaagaaataagagaaaaataggatagaagagaagactacttagttataagcacctcaatgtgtattttctgaagaaaacataatacaaaaacaaacatccgctttgattagggtcaaaatcttaatccctccaattaatatagttgctctccactactcttcttcacaaccaactgctttaccacaaaaaaaaacaaaagtaaaaaacacaatacttgcaacagattccatgacatcaacaaatcccaattgtaagaagttcatatcagaataattcattactatatgctattgctaagccgaattcatggaaggggcattcaaactatcgggaaccacttaaaattcagttgcaaagaccacatatctgcaaattttcgttgaaataaaatctagaatgccaaagagaaaagaattgttgaaatactcaaatcagtaagaaactaatattctgtttccaacacgccatcgattagtccaaactccatagcctgcataaaaaaggcataaagcaaaacaaagatgctcaatagtttgaatacaaattcaattaattacaaaagtatgatctgtctgactgaaagtaggaaatagaagttctggaatatcctactagtccataacattttcacagaatgaataagttgatgcaataatggatggcgaaaatctagcattcgtgacaggcgacaaagatcagtaaatgatgttttacagcattcagaaaactgatgaactccaaattattgtctgttatcctaaatcaatttttcttttataagtcctgccctctcttgtaaacaagttttcatgtccatataacatgcagaggtttttataattttatgttattattaaagctttctaattcctcattatatattttctcttaagagagcagaaagaaagataaacaggtcttcagtaaagtctgtttgacttttataaaatatatatatataatatatacagtatgttgttgatttgtatcctgggaaataaaccacttctttatgacaaagtaatgtagcacgtatattgtggtttataataataaaaatacagtactcagaagttgaaccaaaattgtctaaaacaatattctgtagcctagccacatctctaataccattttctctaaactcgttttatattaaaacatacagacaggcatgcatgtaggggtgttcattggatcacatccaatggatttgga

SEQ ID NO: 305021 - DNA, 1934 bp, Cannabis indica
taataaaagatgtaatataaagttaaaaataataataataaaggccgatattacttaaatataatcgttacaaaaaaatatttcaaattctattaggattagaatttatttgaacattaactttttttatttattattaatattattatatcattcgagttaaaaagggagtaaaattatttatttttggagtcattttacagatatatctcacaattttattggcacccttttttttatatatatatataaataagagaaaattagagttttaaaaatggcaaaatacaatggagtagagctagaaaagagtgtacattctcttccattttgggctaggggtcaaatattgggaaaaggtggatttgggtgtgtatattttgcaagaatgatcactttaccaacacctattgacggaatttcccatgttcgtagcttccacccgttgatggcggttaaaactgcatttccttcgaagagcaaagaattagaggacgaaaaaaaaattcttgataattttgtcgattgtccttatattattgagtgttacggtgatgatactactatcaatattattgatggtaataagaaagtgttatacaatgtattcttggaatacgctcacggtggaacattatttgagttcgttaaaacttctcctccttacgacgaatctaaacaagtcaaagagtacattcgacagattctgaaaggtgttaactatattcacgagaagggatttattcactctgatctgaatccagaaaatatattgctagtcaaagagagagaagaagataccttttttgtagctaaaatttcagattttggattggcgaaaattgttgatgactttaagaatctcactcctattgtaggtactttagagtatttagctccagagtgtctgggtaaaaatggaattcaagggcaattttcggacatatgggcaattggtatcacaattttgttcatgttaaccaaaaatgtgaagtggagcaatgatttaagccaccatatttccgaagaggctaaagacttcataatgaaatgtattcaagctaatccattcaagaggccatcagcaaaaatgcttctaagtcactcatttttagcaaatacttaaagtataaaatttaagtgaattgtaatttttgttcggcggtattttagcttttcttttttaaaggtattatgtattttttagtagagattaatcatataaagtaagtttacagtttactccttaaatgaatgttttggtgggtcctttatttattttaatatctatgagagttttttaatctatttttattttatgatcgcatacgttgtagctatttaggatcacttgtaaatttttaaatttttttaaataatttacaatatcaaaaataagatttacatctttttgacttttctaacggaatgacttttagggcgtttattacaaaaatttataataatatatataattatgtgatttatcatggttcttcacaaactattatttctgtccatataaaacatttaaaattgaaacaaatagtttaaatcaatatcattattttattcaaatgtagactcttagtaaatcatagttaattatcattcaattaaataactaatttaatatcaaattattataaatttgggatttcttttttcataactaacaaaaaaaaaaaatacagatgcatagtttttaaaatctttgaatcattattctaacaattttttttggaactttatgcgccaatgtttttaaatatatatattgaaaaaaaaaagagactaggaggcataaaaataataaagagaataaaattatgacaatcataaataagtcattcatgactaatgatagggtgtccaagaatataatcattaaggtattattttaaaatttatattcttaccttttttcctttttt

SEQ ID NO: 305022 - DNA, 5837 bp, Cannabis indica
acattaatctaaaataaactcaagtggttcacataaaaatctttaagagaacttagctactaaaggacattttaaagcaaaaggaatgtagctaaagacataaaagatagagttgaagagatagaataatgttggagtcctccactgtgccttctgctccttgctctccttctacactcaggattcctctcaatttttgaatggtgtcaaagcttttccatcaagcctccttttataatgcaaaaatccaagtttcctaaaaaaaacaccaaggtcgcagattcctcttttctttactaatttttgtagttttccatttttagtttcctattgtgatgaccgatagtattttggtcataactctcttaatataacttagaattggacgattaaagttgttttggaaagatgacagagagatctagaactttattttgaaaagtttttcccaaaagtgaatggataatagtcaaaaattggcttgaagcttcagactttactttcaaacataaacagagcgtgttgaacatccaaaacttagagtttttcaatttatttttggaaaatgatcactcttgactctagagcatgaattttggagctaaaaatgcaatctttgacccattttaggcaataagaaatcaatccaagctaaaagaagtttattttctgtattatattttctcatttttgctcaaaaaggcttgtagaacaccaaaataccaaaattgaggatctccaaatattttcctaaaaaaaataaaaaataacacgaaccataattttgcacaataaaataataaaaatactaaaacacacactaaaatgaactctaaaaatgtataaaaataaacctaactctcttctttggcttctattgtgtctttaacctcaataccgatttacttgtcccccatcaagtactatgccactcctcagtgagatagcattacgttgttcttttggattgacaactatatcactagggaaattactctttttctgtacaacactcacaacattggccaattatcccacttgcaccgttatgttcttcatggaagcaataatattagacaagtaagtctccatgttatccaaccttgtttcattcttgttaaacctcttgttggtctttatcatgaaagtacccaaaatgtcttctaaggacttcttctcttcttattgttttttattaaactcatgaggaagttgcaagttttttagtgttaccataagaaaagttctcatgatttcataaccccagatgctagtagttaggaattagagcacccctgtagttgttattatgaagtctattggccatgtactgtgcttattctatactcatctcaggcccttgtgatgcggatgcagcagcaacattctctacaacaaatgtatttttctcagcaactaggcatccacttgatcaaataaagcgaaaatttgggctgctatatttatcataggatccacttcatataaaccagccacctttcttggagttatttttttttttccattaggccaattctagctatatgtggccatcttttatagtaaattaatggcttcagttgcagccttagacaatactgctcctccataaacaacatcaataatagtcctagttggactattcaacctattgtagaaaattaaaacttgcatccagttctcatagccatgttgtgggcagtgacgtaataagtctttgaattgctctcatgcttcatatagttgttttgaatcaaactgcctgaactttccaatctcactcctcaactgtgcagactttgatggagaaaagaatgtcaccatgaactttctagtaatttcgtcccttgtagtaatagaacgtggctgcagagattgcaaccaacttcttgctctcccttaaaggggaaggaaagagtcgtagtcttatgacgtcatcagtaacacaattcatcttcggcataacacatacctctagaaatatggctagatgaatattaagatcttcagtaactatttttggccttgaacaatccttgacagactcaatctttcctggatcaaccatgacccatcctcactaacaatgtgccctaaaaaggacactcgagacagcaaaactcacatttcttaaatttggtgtaaagcttatgttctcgtaattgttgtagatgttgctcatgttctgcttgtgactgagagtacacaagaatatcattgataaaactataacacatatatcgagaaaatccttgaataccctattcatcaaatccataaaagctactggtgcattggttagtccaaaagacataaccaggaatttgtagtgaccatacctagtacgaaaagcgatctttggaatttcttcctctcagattctcaactaatgatagctcgagcggagatcaattttggagaagactgtttgtaacgtcctactcaaaggaatgccacgtgtcataattacaatctattaatcccgttaatgggggcctataagccagatgatttgaagtaaataaataataaacttaattaaataaataacttgcaattaacatacacattttactttaaaccaaaataatttaaagttacataactaggattctgtaaaattgttttcaaaatattacaagttattttgtacaagccgacctaagcagcaaaatagaatttctatacaattcttgttggacccaaccctcgtggtctagcttggcaagaacatgtacaagtcattcgcaaactcctcgatctcatgcctgacccaacactgctctacccttgcctgcacaatagagcatccgtgagccaaggcccagaaaaataaaaaataatacagtatgataattataataataattacatttcatacagtacgacattgcatacatattgtgccatcgtactaaattacattattctatataataatatcactataattaatgtttatgtagcatagacgtaagtgttacgctcacacgtctcttttaaatttaaggccttactaggatttgtctcggttataatcatcgagtataacctagttatgtcttacacacataactctgctcacatattcaattaataaattattgcacacttataacaatatgcacttagggtaataaccttaggtctcaaattcacattaacaatcaaatatcgtaatattgcgccactacgcttattctatgtgcttagttcactatcttaccttatttccaatgtatgtagagaaatcccgatcttcttgtgattctgaccaagcactgataatcctagtcataatttctaggttttacaaactagggttaatccccctgaaatcacattcataatattcaaaattaagtctccaatattggaacaaataatagagctcaaaacaagctttctgacgatatatagaatgtccaaaatggagttcaaaatcaagagttatgtataaaacaaaatagcaaagaaataattaaactaccattgccatggtcatgaccagacttgtggtagtcgcgaccagagcctaaacagggctcaccctctctggttttgagccaggtcatgaccaccataaattggtcgagactactggctttaaaaaccttgaaaatgccaagaatatcatatttaacccaatgtgaacattaaccaaatcaaacccaaacttgttacttaggcaattgatttttcaaatcaaagtgtttctaagcatcacaaacaccaaaatacatgctcaaatactttaaacaaacaagattcaattacaccaaaacatactctttaaaagctcaagaacacacagctagaatcttcatgctcatctaatatagtgaggtctcttttagttaatattgtgaggtcttttctttcaatactgcgagtactataatattgtgagccactttaaataccgcgagttctctatagccaagtccttctcgcatggaggataaattttttctaataacacctttaatccagattctcgcatgtcatccaacccaagtggagaaacattcccgatgatcttagcactcaaacttttcttcttcaaagattaccgcccagcttctactagggcttagaatacaagtttttaggctgaagattgaagaaaaaaatagtggtggtgagagtttttgtcacacgaaagagaggaagggagaaggttatatttttttcttttaagtttatatataatctgattaaaataataataataataataataacaataataataataataataataataataactttaataataatagtaaggataatgacaacattaataataataaaaataattattttattattctatagtcattaaaaatctttaatcctagggtatttggtcaaccccgagtatcctgaaataccccgataagtctataagtaacttatcttaattattccattaatattactagctaaactcgttgtgatatttttggcctttgatcgggtgtctaggatcgatgaacctgaaaatatttttattttgcgaatagcttatattatacccacatgctctaaatatatctctgcaattaataaattacacttatttatctacttatggcaaaatttataatttatgctaaaatacgttagcacgatcataatcctactcattactctctaattaactcataatatataataaattctaattattcataattagatttccgggctattataagtaaggattcaacaaaaccaagggtaatgctcgaagaaagagagtcaaatatttgagaaggaacgcctggattatccataaaaagaatagaacttatcttggattaggtcaaggagggtcgtagctcggccaaaatcaagatgaattataagttagacagttttgagaaagatcatgtctaaaactatgctgagataagatttaatcaagtgataaccgagatacaattacctcaaattcactcaaagttaagagtaattgtattcaccattatctaagatagactagtttgataccatgccaagataaaacctatctagttatcagctgagacacaaataccttagaattaacagatgtcatatgtaccccgactcaggcagagataagttatgtaccaggacagtcccaaaaaaaccacgaaccaagctaaagtcaaagcctgactatgactcggcgtaataagtttggacactgctgagataagataaaaatagtatcaagcggaaataaatcacatcctagactcagataaaacaaaactaagttaaataagataaaattaatccaaataaagataatcataacctaaaaattaattattaaagaattaataactcataggtacacatgtcagttacatcattaaagaatgacaacgaaactatgcatgcaaatagcgtacaatataaatgaagcaagaagttcacataaaaggtaagaagaaagactagaataaaggaagtactaaaaactcaaagaggaaaatcccaccaaaaaatactgattgattttaatcaataagagaaaaaccaccatttttggtcaaaacaactacacattgatcaacctggagagatttaaaaactggaaagaacaagaattaattacaaaataaaataaaaaagaaagagaaaagtgaatttacatataaaacgtaaaaatttaaataagatttatgcttaaacgtaaatttaattaaaatatatataaatagaatattaaaataaataatgtagaaatagaacctaaactcataaaaattcttatatctggtaatttttttttaaaaaaaagtgatataaagcattacacttattatatttatatt

SEQ ID NO: 305023 - DNA, 2569 bp, Cannabis indica
tttgtatttttttttgaacaagaagaaaactttttattcaaaacaaccacaaactacaagcaaacaacatctgcaacatgctagcaagccacccaaacaacaattaccactcattaactacattaaaaatgtattcctcgaacctattcgtactactagaacaaaagcccataaatctaattttaacaaccctcctaatttcattactaacaactacaattgtcagagaattaaaaagacaactatttctaatcaaccaaacataatacaaggttgttgcaataaacgagtttatgactttctcttgcaaactttgaagaagcttcgagtaccaaacactgatattaacaggccaatcaaagacacccaaccatttgctaatctcgttaaccaccccgttcgtaaaggaacactccacaaaaagatggctatgagtctctctagcaccatcacaaactgagaaaaaatcagtaggtataggcagaattttactgatatgatctctagttagaagttggctgttgatagcataccaaccaataaatctatgcttcgaaacaatcatcttatgccaaatattagtagcataatccactctttggccttgaacaaaagataagtagaatttttttgctttgaacttaccttttttactagcttcaacaatatcatgtttttccaccaacccctgaagcctcaaaagcttcttcaagtaccaactcgcatcttccataaaagctaccgaccagaagctttgacccttaaagtaaatgacattgatccaacgcacccaaaggttgtccttcttgctcgaaatagcccaaatgtatttctccatcaaagcaacctttttcataagacgggagataaaactttcttcgattgccaatggttccccaaagaaaatctctacaatatttatcaatggttccagtaactttttggggaagaatagataggctcatccaaaattttcttatacctaagagcactgagtgaattaattgcgcccttcctacaaaagacaaatttctgctagcccagttatgaagtttcttgtgaaccttgtctatgatagtaccacaatcaacagatcgccatttcgttggtctaaggtggactcccaggtacttaagaggaaagctaccctctttcatttgtaacatattcagaatactacccttgcaggcgtccttcaccccaccaaaatacatcaaagatttagttttgttagccattaacccagttgaatcactaaacactttgaaagcctcatgaataagcctaatcgagtttccatttcctttgtagtaaattatcaaatcatctgcaaagtagagattcacatgtttgagagacttacaaatcggataaaacccgaagcccttcaacttagatctttggatcatcagtctagtcaagtactccatgattaacacaaaaaggaggggtgacatccaatccccttggcgaaggcctttctcaccttcaaaggtgccttaaaaatgaccattcatcattaagatataagaggcaccatggaggcaacttacaatccaagtgatgaattttgagggaaaacaaaggccctttaacagatcagagataaaattctaatcaacaatgtcatatgccttgctaagatcaatctttaaaatacctctaacacagatgttcttcctagtgtaccctttaagtatgtcttgaaaaatcaagatgttatgggccaattgtctattcttgataaaagcaccttgattgtcataaatcaagctagggagcacttctaataaaagagcacaaatcatcttggaaatgcatttgtaaattgtgttgcatgaaggtatcggtctatagtcgctagcattatgagggttatctattttggggacaagagaaatattagtcttgttaagctcttttggaagaaaactatcttgaaagaatcaacaaaatgctttagataagtcctctccaataccatcccaaaaacctttaaagaatccaaggctttcttgacatttgttttattgaaaggccaagttaattgaacctactgaaccaggcttaatttatttccttcctccaaacattcaaaatcaatcctcctagtagttgaactcttccttcccatgaagtttctaaaatgaagaagaaaatgatcaaccacttttgtaaaatcttcaataatagaatcaccaacactttagaaaagaatcctattcttagttttcctctttttcatactggtatggaagtagcttgtattatcatttccatgttgggttttatgccctaaataaaacccatttcaatataattaaatttactaattgataaaagatcagaagtcattttatattgcatggttcacatgatttatttcatgattgtatatgtttaatgtataaattctattaagtccagaacatatatttattcatgattatagtgtagtcgacacaatggaatgtaatcatgattatatgatcaaaagttcaagtcccatgatttatcagtacactggatttagactgacatgataatcaaagataaggtatacttacac

SEQ ID NO: 305024 - DNA, 1418 bp, Cannabis indica
tataagagtaggaagtactgcctaaaaccagagcctcaacgatctggaagtaagccactaccttattgtatttgaaatttatttatcacttaaccaaatatgagaaaaggaagtatgacaaaactggaacctcaaggaactgaaagtaagtcgttgctttcgtatatttggaattaattgtcacacactaaaatggttaatctaggtaaacttaaaataaaggttcacaccaaatggttaattcaggataagaataccataatattcaggttactaaaatcaattgatttaggtcaattaaaaagttgagtttgaaaaaaccctaaaagtaagtgatgaatgccaagaaagggtaaattctcaaaaaataaaattgcttcaggttaattaatcaatctgagtttcaaataaacctttctacaaaagtatatttttacaaaaagtatatgtctaagtatttactcgaaaaaaccaaaggttcaggcctttggaacaagaacctgacgaggctagaagcgctaaatacttagaaatttctatgatgtaaaatgcaaatatctaaggaattaatgagtggtaccaagtactaagaaagccccacgactagggaatatattgtctccacacattcccaaagggggacccttgtcccccaaataaaaagaaaaataaaataaagaagagtttagaacaattaaagctgagcaaaattgcccaacactggtgcatcttaagctttaacatcaggtaggccctctgagattgtagacttagttgaaacaggaaacttagatgccagaggagtagggtcatccatgttctcaccaacagagatggtggttccaagattgactactctcgatccttgaggtgcactctttaactagtccgcctcttctagtgccaacagcttaggcagaagttcttccctgtcattagcatccaagagatcgatcatggttttgttgtgctgtaagagagtatacactgtgtggacaaaggtttgctctaaagccttgtcgtgttgagcatcctgctcttcaagatgtccctttaaagcggagcttttacgctctaggttggtgatttctctattgggaatcttcatgagccttcatctctgtagccaattcgctctcagcttctttagtcttcctgatggcctctacttcagttgcctctgccttctattgctaggtcgagatggtacttcacctttttactccaaaattagtctcatttgatgaattttgccttcgataatcttggcttgccaattgtactcttgagacaaggtggtaatcttcttctccttctcttggacatcgagcttgacctgctccacatcacgcttggcctgctgcacattggcttccaatttttgatgcaggtagggccttggagtgcatgtcttttga

SEQ ID NO: 305025 - DNA, 4753 bp, Cannabis indica
aaatccaatggccaacaaggtacatattaccaatataatctaaatagaactcaatgaacaacaataaacacataaacactctcttccatcaagtaaaacaataaaactatatataggcttccaactaaccaagaaagtaagttaaaaaacaggaaacagttataagttagttaggagcaactaactgcacaatatatatcattcattctcataagatttttattaaatataaaccatgccactctacaggtgtgcactttcttttccagctccaaccaacttgcatttcggttcaagatgagtcgtaaaatagaagtcataaaaaactggcttccatttccaatgatagaaactttcttctagagaaaggaggtcgagagactctgactgctagtagcagagtgagagatacttactcctatgtacgccatgaagatgttattgggagagatgtggatagatctgttattataaataagcttttgttggagagttgtgaagagagggttccaatgatcgccattgtaggaattggaggcttaggaaaaaccactcttgctaaaagtgtttttaatgatgagaaagtccaaaaacattttgagctaaagatttgggtgtgtgtgtctgatgattttgacttgaaattaattgttagaaagattgttgagtccgcgaaaggtgatagcagttttggagaccttagaatggagtcgttgctaaagaagtttcaagaaatacttggtggaaagcgttattttcttgtactagatgatatatgggaggagaatcataacaagttgtcagagttaaaaaatctaataataagggatgaaaatgctgggagtagagttgtagtaactacccggagtgcacacattgctaagtttttaacgagcaaacaacaaccatatcaactaggtgttcttgatgaaaatcaatcttggtctttgtttacaagggtggcatttgaagatggctcacgagagcgagaaaactctagcattgtgaagattggaaaggaggttgtgaaaaggtgtaaaggaattcccttggccatcaaaacaataggaaatttattacatgggaaaagtttagaatcagagtggtcttccttagataaggaattttcaaagataccatatcaacatgaagatgatatcttaccaaccctcaaattgagctatgatcatcttgcctccaatttgaaactttgctttgcctactgtagtttatttcctaaagatgaagaaattgaggtgataaatttaattaacctttggatggcacaagggtttcttaagttattagatgaaagtcaagatcaatgtttagaagaggtgggctatgaatggtttatgacattgttggaaggatcattctttcaagatgttgaagtagatgaatttggcattattacaacatgcaaaatgcatgatttgatgcatgatcttgccgttcgagtaataggagaggaatgtactacatttgaaatttcaaatggccaaggaaatatcaaggaaactactcatcatgtgtctttggtaggtgatacttactctggaagtgaactttcagttcttttgattcatgccaaaaagtttcgaacatttctcaaactttccaagttcgaagaagagaaatttttcgatgccataatatcaaattgtaagtttatacgttgtttggatttgaaatgttcaagtatgaaactagtatcaaattctattggcaagttgaaacacatgagatatttagacctctcagataattctcatctcaagtcacttcccaattcagttactaatttggtgaatttgcaaacattgaaactcaattcctgctcaaatcttcaagaactacctacagattttgagaaactcatcaaccttaggcatcttgaactttctttttgcgacaaattgaattctttgccaagtggagtaggtcagttggaaaatttgagatatttggacctttcttggagttgtggtctattatcgttaccagattcaactaatgatttgttgaatttgcgaacattgaaactcaattcatgctcaaatcttcaagaactacctagagattttgagaaactcatcaaccttaggcatctcgaactttcttcttgcgataaattgaattctttgccaagtggactaggacagttaacacaattgagatacttggatctttctttgaatgatggtctattatcactgccagattcaactagtgatttgttgaatttgcacacactgaaactacgtcattgctcaaaactccaagagcttcctagggatctttggaaactcatcaaccttaggcatcttgacatttctggttgtgataaattggagtatatgccatgtggactaggccagctaactaatctccagaagttatcaaattatgtgttgatgaagagcaaaaagtctatcccaagacatggtggtgagctaaaggaattgatgaggttgaacaacttgagaggcggattgaaagttacaaatttgagttgtgagaaagatgtggtagcagagtatgggacagcaaagttaacggataaacaatatcttcgatcattggtattggagtgggattctgatgaagatgaagatgaagatgaggctattgttggttatgaaatgtcattagaaggtcttcagccacaccaaaatattcaggaactaacaataagaaagtatgggggtgttaagctctctagctggctctcatcacttacaagcctagtgaaattaagattagcagattgtgcaaaatgtcagcaccttgttccattgaagcaattcactgtttgaagaatttgatgcttgagaggttggtatgtttagagtacatatccaacactaataatatgagtgaagacttgattggttcaacaacaacattacttccatctctagactcactttggttgtttgatttgcctaatctaaaaggatggtggagagagattgtaacttgtggtgaagaagaaaaacatatggccttgccttatctcccttgtctttcagcattaaggataattgattgtcctaagttgactcgcatgccactttacccacatttgaatggaacgttgatgctaagcaagactagccaaaagccattcgaagagacattaagagcgatgagtagtaatgttaatgttagatctatattcccaacaacgtcttctttttcacctctttccaaattagaatggctaattctagaaaacatggatgatcttgaatgtcttcctgattgtttcaagagccttacttctctcaataacttgaatattagaagttgcccaaaattgaagaatttgtgtccaggtattctacatctctcatcacttcgacatttggggatcaaaaattgcgaggggttaggggacatgcttaatagcgatgattatgactttatgtggcaagctctaaatggaagacttaacttgctaaacttatctaagttgcctaatatagtgagtgttcttcctaagggtatccaacatcttacaagtttacaacaaattgaagttcactcatgtgatagtctgacaacaattcctgagtgtatcaataacctcaaatcacttaagacacttacaatggactcatgtccacatctgacatcattccctgaaggaattcgaagccttaccactttgaacgaactcaagatcaaggattgtccgatgttattgagaagatgcaaaaggaatacaggtgaagattgggataagatttctcatattcaacacttggacttacttccagatcccaacaacactgaagaaaatgaggtacaaacatcaatgtcaaatatttgtttttatttcctaattaagtttaaaataaagtgatcatattcttgtttgatattattgcagaattcatcaaatggatgcaatctctttaacaagtttgggctccacaatattattaataaaagagatcaaggatagatatgtataggtaattattttaaattactaatctcaattgaaaatgagattagttttcatttatatgtttttgttaaagatattgaggttatgattagactggttattactttaatgctacctctaattatcagtgtgaatgtaattaattggaaacttttgagcttattttggttttgaataattcacttgttttctgaactggatttttgttgaaagaccatggaaatttgatttatagctttctgaatggttttactacaaaaatataaggttaaatttaagtgagttttgaatatttgtttttttgggtttgtttggatcctgaatttttgtacaagtgacttcactctttacaaatgttgcattgatagaggaatttttgttgtgtgcagaagattgttcttttttttccaaatggagatggaaattaagtacattatcttcatgataattctgtatcaataaaggtaaagaatgagggaattggagatgcaagaacaacttatcataagttgatggtgccttcaattaagtcttgttgttatagagattacaaataattttatgtctaagccaatgaaatgtgtaatcccttatattgtattgtattatgtttccttgtttacttgattgattcaaaattatttattacaaaatgaacatccataagaagcacaagagcaagagcatcagaaaagaaaaccaagtcgtggatgggctgttttagataaagtttaagctcccttctccattctcttggataaagtttacaagttg

SEQ ID NO: 305026 - DNA, 3162 bp, Cannabis indica
aaaaaaaaaaaaaaattatttgaacgaaaaaaaaagaaagtgaaaaaatatagtctacattttgggctaaattcaattgccattgttgaagtaattgattttattgaaacaaagaatatgatcgtgtgactttaatctagccaatcaatcaatcagtcaagtcaactccaactaccactggtggaactggagcgcacacatgacacaccaatctctcaaaaaacttgtgctatttgtttgaaaattcaaatatataattatttcatatgatttggaatagtttcgtgttgattcttctaaagactatcctttgtttaaaaaaaaaaccaaaacttaagttagtaatcataaaatttcaatgtatctgattaaaaaaaaagtgtgtcattataaaaatcatatatcagaatattatttaaaagtattacacttgggtccctctgcgggtttgcttacaaaagtagactaagtagtgttacacttgcgcacatatttttcaagagtatctgttttagtaatatagtattctcgaattttacagtacgttaaaaatttctcttaaattattgaaattgttagattcaaagacttcagtccaacaaatgcacatttagtttaccgttcaattcaagaacttctattaaattttgttcaattttattaacgttgcgattgttcatgtaccaaattgtgcctccaactttaatatgtactaaattatgctaccacactttaacatgtactaaatcatgtcatttgaactttcatccacatcagtcatcacttagtaaaattgaacgaaaatccttaaatctaacaatctctagagtttaaaggaaatttttaataccttaaacatttcgaagacacaatttaatacatgtcaaaatttagcgtgcaaaaatgctaattaagtcataatcaaacattattaatgattttttttctatcacccttttttaagtcttaaaacattatttatttagtatattgtgttttaatattacacatattttgatacttttggacatagtttttttcaatcaataaaactaaaattcattcagctatatgaaattaaatttgaatttaaaaccatataactaaggataatttagtcctatattattgataaaattttattaattaaattaagtctaaataacttcaaattataaattatcaaatgagcataattaaaaatgttactaaatttggattcgcataaaatattaaatagaaatattgcttttttttttatttacgtttgttacaaattgacgcaaaactcttagtcaattaattacgtcaattttggcattgattgacgcaaaaatgtcatagcctcaataaacaaggttcgatagaactaagccacctacgtccttgatcttcaaagctatggacctagttttgagtttaactagcgagccaagttgacgggcttaactaacccttacaattagaaaatttttcactaagatttttctcaaacctttcacaatagttttcttccaagaactattaacctcaccggattgttgaagtgccaatctcacaaactgaattgtttttccaccggtgccaacttcaccttaaccaatagttttccaaaggactatcaacctcttcaaattgttaaagtgtcaatctcactctgagactgctgtagtgacaatctcactcttcttgggttgtttataaaattggtgtcaacctcacctacaaccaagttatttttctgccgatgacaacctcacctctctatacaatggatatgtaactttgaaaatacaaagcaaattctctctaataagatgaaatacagtgtgaaatcctagagagaattgcaagcacactagagaagataagagcaagtttggctctagtgtgtgtggttggtgtgtatgtaaaaagataataaatctttggtttagaacacttagaataattgtgtatgatgaataaatgctcaaccaccttaaaaatgtgatacaaatgagtttatatagagtttgaaagaaaactagtcgtttatagctgttgtgaacgaaaatccatgcaaatctgggctcaaatggttcaccatttaaaaaacgtttcatcttttcctaggaaaaacgattcaccattttccaaaatggttaaccttttaagtacagtggcaaaatgcaattttttaacttaaaatgcgcataacttttagctcgtttatccgatttcaaaaaatcaagttgtgttctcttagttaaaagatgaataatcttaaatatcaatttagaaaaattatatgttatttttgaaaagtaacttattgcacaagttagtgagccaaacttttaacttataaatcctaattacaatgtaaatcactttagcaagactaatgtaaacttatacaatttgattgtgtgcattcttgatgtagatgagcttcctagcttaatttgcatgctttgatccaaagttgacttttctcgaaagttgacatcggctttgacgttgacttttgactttgagcttttgaagtcctctcgagagtaaaaattctcagctctatagaagttttcgagaacgatgcaattctaaaatcctgctacgacgatagatgatattttggccattactctctcgatatatctcgaaattgaacgattcaagatgttttaaaaaaatgaaagaaagatctagaacttttcttcacaatatttttcctgaaagagaacatatcgtagtcaaaaattgacttgaaggttcagacttgattttgattacaaatggagcgtgttgagcatccaaatcttaaaaaatttcacccattgtatcttacaactccaaatccatgctaaatctataaaattcatcttatttaacatgttttctctcatttcaacccatataatgtattttactattaaaacctaaaacaaaaataaaacaagcgtaaacttgaataataccaaataaaattttatgtgtaaaacgtataaataccttttaaaataaactctaaaataaaaaaaaaaataaaacaagagaattcttatagacacaccaagctatctgtttctaacatgaatccatctcacgaatgagttgcaatccaactcaatgctctttaatgcctatatctcagcaatttcagttgaacacatccaatct

SEQ ID NO: 305027 - DNA, 2193 bp, Cannabis indica
tttaagaggctttaataaattttagggcattattataaggtttaggatacatgatgtggcaggggttagttttaaatggtgggagtgatgtggcacttattttaatgacatggaacgccatctgagacattacaaggcaaaaaaacgaggaggtacctacgcaagatcctcactagtgacaaaaagtatttttaccgcaaaaaatataacttttttttttgaaacacgcaaaaaaaataacttaagtatttatctactactcaatataaaacttaagtatttttgctacaatttactctatcctttaacatttcccagcttattatatatatatatatatatattattttttttttcttttagagagatcccagcatattatatagattcttttatttactaaagtagatatacgtgcatgctatagctatatagctatatatatatatgtcagttgcagcacagtcgatgtcattgtgtgcattactttttctcaatattatacaaatatttgaaacaatacgcaaacccttgtgcattgctagcttgcatgcatgcaaatatataaaaactggtatagtaatactattagaatctcattaatttaatttacaaacgaccctacccaaagtaatgcaggtgaaaaacaccatgcttgcgtcagtctctgtccatataaaccgatcagcttcttaaatgagagctttaagatttgaatctgatttttctcgaaccatcgatatctaatatatatggttcccattatattacttattagatgtggtcctggtccacactactaatatgtgagagtaaaatgttatatataagatttatgggctatttctttcatggtatattagttttgagatataccccaatgtactttagccacttttatttcaatttctaacacggtatcaaaactgtttattattcgttgtgagcccaaagtaccgctgtccaaaaaagatgagccataaaacagtcgtttgtgatatgttgcgagcccaaagtatcgcttgtcaaacgatgagccaaatttaaaaacttctgttgtctcacctttaacctctatttggaaccttttagctaatttgcgctatttttcagtgttgagatctttaacctatttcaaaatgtacaagtttctcgacacctatactcacaaatttctcgatatttgaccttgttaaattctttcatatctcatcttcgaacttgtagtctcttaaattatactcattttctaagcaaaaaaagtaataagggtgcattagagttataattgcacattgttaatgtgtacatttgttaatgtgtgaaaataaataattatgtataatatgtataagatgaatgaaatatttttcctattgccaattaattttgaggttcaaccattgtatcttaagctgtttgattctaaattctaacattaatacttacaactacgtattatttgctcctaaacatttatgagcaaatgcaaaattgaaatggtccacacttcaggccttcattaatcttagtcatatctatattttctacacctacgtaccaatatgaattaatgtcgataaatagagcaagggctacttacatgaaaatcaaatgtactattattatagcttaattttgataaggagccagagcagacctgatgttatgatcttacatcatatatggtccattattcgtattggaacctgggaaatgttgtttacaagtacataatgtagataatatatataaatgcacagagagaggagtttaatcataaatatatttaatttgaataggtcgagcgtatgctagatccacttcaatcaactcatttatttcgtgcttctgcatatggtagacatgctacggagctttaaggtactcgacgcacggtatgagattgcatattgctcttggtacatgcaatataatatgacacgaatcccattaacatataagaaacggttaatcatttataatactttacattaatataatattagacatcttaggatatttaatagtaatcctggtttaaagatgatactaattattgagtacgtacaataatatatatatatatatatactagttaaaagttacgtgcgaatgcacgtaaatattagttttatttaaagtttagtttttttatttttatagaaaataattgttcagaattgtttgcag

SEQ ID NO: 305028 - DNA, 1115 bp, Cannabis indica
taacaaaatagagggtccaatcggtaacttttgcaaaatacaaggtccaaaatggtatttacccaatatatatattcttagtaaaacagtatttatgtgataattattattattattaaatcaattttaaattgtgagaactctaaattacagaattatgttcaaaataaagagaaagaaaaaaggaacagaggaaggagaaagatgaagaagataaatgaatggaaaatgaagctcaaccatctcggttagctcagccgctatatttatattaatcaagtatagttatagctcaacaattcagtataactgaccttaacaaacaaaactgaccattaactaacatgtaactaactttcctattcagttaatctaatatatcccccctcaagtaacattggtctaaaccaagtgttaacttatcgtaaaggaactgaaaagttgtagttgggagtggctttgtgaaaaggtctgcaagttgatattctgaggcaatataacgaacatcaaattgttgagcaatgactctgtctcgaacaaaaatgtcaacttctatgtgcttcgtgcgagcatggaatactagattaattggaggctaaagacactgcccgtagattgtcacaccacaagattggacactgggagagtgttatgcctaattcagtgagaatagactggatccaaatgagttcacaggtggccaaagccaatgcttggtattctaattcgatactggatcgagcaacaacagtttactttttagagcaccaactgattaaatttcttcccagaaagatgcaatatccagaagttgatctcttgtcatcatgacatccaacccagtctgcatctgtaaaaccttggatatcaaataagttggctggtttgaagaggagactagcatccaaagtaacagcaagataccttagcacgatcttgtgggcagacctgttgggaatattttaccaggatctagatttactaacaagtatgttgcattaacatcctaaatatgaattctctaaaataatgaaataaacacataagggtttcagaaaaccttacattgattgcaacggaatataatgactccttccgttcaagatctctagccc

SEQ ID NO: 305029 - DNA, 1489 bp, Cannabis indica
ttataaattattttaaaatttttcaatattttacctaatatcttaaataattataacttacacataatcataaaaaaattaaattaataaatctttctaaatgcgaaagagttaaaaatggtaccaatacacctaattttctaaaaatttcctagaagattttaacatagtaattttgttaataattatgaatattattggggacaaaacaaagaagaaaaacttgcataaataatggataggaagaagcaaacacaacaagaaggtaggtccccttgatcgaaagagttaagagacaatccacactttgtttttatatattacattaattacatcgggaacgctcatgccaattgccaaccccttctcttctattcacacataaatctttcaactcttctcattcgtccacgtgctaaaaggagagcgatcaagttcgttggcctatgccacgtcaacacaccctactggttgcaaaaactttcttctgcaaataaaaaagaaaaagcctcattgcgcgccgtgagtatataatactgttattaaatttattttaatggaactatttagataaagcctaaagaaaagggctttaaaaaattaaaaaatttgagtcaataatcactcaaaaaaaaaaaaaaaaaaaaaaaacgaagggcaagactcaaagagagggatttgggtggggttcattggatgctttgttaccaaacacgaacagtgtttaatgtttatcatcttaaacacagaccataactaaacaaggaagaagaaaaaggaagaagaagaagaagggtggcttagtgttagaaggctctgtttcttgtttttctctttgcttttttttctgattttctaattttcgacgctaacgaggcttccatttataaacaccctcccactttgcataataattattatatttattactttaataccaattttttgctctacttttaagggaccctagttcagaactagaggaactttgttatggccgcctaaggctttcatcatcatcatttccatctcttcctatatttatatatattaatagttttctgtacgcacctttctctctctagaattatcattctttctgtctctcttcaagtttcagacagccatactcaggtgagtttggggtttttcttttaggtccaattttctgtttttttttttttctttgtctattcttcacgtgtgctgtttttttagtatatgtgatctggttgtttaaatgtttaggttattaatttgatgaatatctttcatcggtttgaaattgtggagttatggattgttggattattgaatttttattattttattcagttccggagtttggaacgggtgaaacttatgttttcaaagagctagattaagtttattgatctgtttcacaagtaaaaatcagttatcaattttgctatggagatcagatattaaatcttcctgatatgatattctaagaaaatgaaaaaaaaaa

SEQ ID NO: 305030 - DNA, 1352 bp, Cannabis indica
ctcttagcttaagtttgagtgatatatcactcatttacataacaaaaagaaatagtacaaagtgggagggttatgtgactctatagtttaaaggtttattataagagtgtaatatatgaaagtgaataagtttagaaaggagataatacagagttgactcattattcattattgttacttaatttccaatgtggaaaattaaatcaaaaagagaaaattgtccctgaagataggttagttaagatgtatgtaccttattagtggtcctaaagaattaaattaataataaaggagctagcttcggttgcaccaacacatgagtagtctctggtaattactaattattaaacttactgaaagggacaaatcgaaatggaagagcctgtaactaaattgaattgaatatttataaaccgtttcctagttatatatataattgttgtcggaagaatttagacaatactaaatttgtatgagtattcaaataaagttagaatacaaatatgcgagtattctcttagaatagcgagtacttagactttgggctactaaatagataaaaatgaaaacagaaatagaaagaagacgagaatttggtaatgatttcagcttagtttatttgatttggatcactcatttatatagaaagcaaatgtcttttaagattccataactgatggacttagaaccgtttttacaataaatgacagtatttaatcaaaataaacatttaaagaataaatgaagaaaaattttattcgttcttaaattaagtgcagcaacgtatgcgacttgataagttgtgagttgcccgttcatattccaacacgcgagctcgcaggctctatggtgtttgtactcccaggatggccttcgggtttattatttgaatgtctgagttcatatttgatcgcgtagtctgacattctgtgttgaccacgtggaacatgcaagtccctgtcgagttgtcgaacacattagtcatttagaccaaacgtatgtaacgaaacaatctttactagtcgcaagagaggcatacttgatcatcgcatataattggtatatgcgcggtcagtattaaatctcttggtcctacttattcatttttactatgcgaggcataatatgcgattacaccctatctcgattgcatctaattcccataagtttacatcaagcgatattagctctattggagctatctattgacacgtcattcttttcactgggaactgggtccacatgtcagtcatctacgagactgtacttatatttctaggcaagaaattcgtattataatacatgcccctagttttgtgatgacaactgtaacaccctaactatcttaggcg

SEQ ID NO: 305031 - DNA, 1344 bp, Cannabis indica
ataattttccataattaaacatattaactgctaattttcaaattaaactaagcggtctttacaaaaaacctacaccaaatccatctggccctcggcttttagccgaatgaataccaaaaagcgcctctttcacatccttctttgcaaaaggctaaattagtttcacctgttgcaccatatttaacttgttaccatattcaagacagtcattctccacccttctagtagcagagctatttctccccatgtagttgacaaagtgatttagaaagtgatcaatgacccggtcatagtcatcaacaacctccccattaacgctataagaacaaatcttgttttccactttcctctttttcatgattgagtggaagtagctcgaattttcatccccatatcttatctagcttcgagttctggtgaaggtagctaaaatattgtttttggatctcctggaaagcctcataaagctttctctcccccctcgctgctacttcattgtcgggattactagccgactgctcctgagcattgttgtaggcctcttttgcagctttgtaactattgactagatcttcatttttggagacaaagcatctttcaaggacatgtttgatcctaaatagctgctgataaaagctttaaagatctatcgtagtcttcttttcccaaacctttagcacattctccttgtagccttcttttgacatccaataattacaaaaccgaaaaaggtttgaaacccctattgttaatcgccaattatttaatgaggcagtagctatgatccgagatcgccccccatctaaagctagctccagtatttgggaaggtgtcaaatttatttttacatgcatgaaaattgattattgttatattttaaatttggttttaatagaataaccttttaaaaagaaattaaattattggtggttacatatttattcttatttaaattaaaaacatattaaatttagataaattaatatttataattaagaatactaaatatattttaattttatttagataataataataataaattattaacaagattatttactaatagatagtttagtcttagggggtattcataaaatactcgatccaatctaatctgcaagactcaataaatatgttattcttgtatctggtaagggacacgtgaaatctaggtcagcatcaaaggtccaccagtgggtcccaaaaaagacaatttgggctaagcccaaattatataggaccttccaagaacttaccttagcttcaagatcacgtgatctttcgccagtgaaaactcgtattcgaaaagagatccatgatggaatttattttaccaggatc

SEQ ID NO: 305032 - DNA, 605 bp, Cannabis indica
tttgattataaataaatttatttatttgtttttttttcttataaagtggttattaaaaaaaattgtcatggtctaaaattatgtcaaaacttcataatttttgagattttacagttttattggagaagccctaacactatctccaatagttttgctatattttcattaatttgatacaaaatttattacttttggtgcaatagcttcaataattcacactaaataaaaatattatttaaaaaaattcacattttatatattaatagccaataataattaattttatcttaaaaaaataataactattttataatataattatgtatattggatcaataaataatttatgatttattttttttaaaaaaataaaagacaggttagaatgaagaagaaataaagatatgcatcatttggtgtaaattcaaaatctaacaccatgaataatgttgtaatttggtgcataccaatatagtacattttttttaataaatggtagaattttatcacatcaaatcaaatgacaaaatacatattattgttaggctaaaattagtctaagattcgggtcatatttcggttagttttcactctttgtttctagt

SEQ ID NO: 305033 - DNA, 1699 bp, Cannabis indica
ttttactaacgatcctctttcttttattatcaaatttaactttccaaagagcgatcatcaacataatttaatagtttcatatttttttcttaaaaaaaggttcaaaatttaaattcccacaaaaagaaaatcttaacttctttatcaagacagtgaaaacagcctggtattccaagacacaatctacaattctacactattatttctcaaaataaatagatagatgtcccaatcctagatgcaaaagtttggtgtatgaattaatttaggaacatgcgttactttcaaattgaaatctattgtcttcttttctttaaaataatttctgtaatatgtactatatgcctcggtgtaacttatatttcacagtcacaccatttatgttaattaactaatttaagataacgtgggacatgcatattgacagtacatattattttaaacaagttaattaagtttataataatactttcttaaaccatgcatgcaacctctatttgacccaaattttagctaattaaagccattttattactgttaccttaattcactccaaagaatatctcgtgtttaaattatcaattagcaatgaatattttagtgtaataaatgtaattaataagttctttatatttaaaaaataaaaataaaatgaattttgattagagcccacagtataaaaaagagcaaatcgaatatatgcaataatctatataaggcacagtattttaattaatttttatatacaattttacggtcttaatttagataaaactcaattcaatccatattaaaatacttattaataataaatattagtacaaccattcctttttaatttctttttaattctaagatcttaaatttaagggctgaaaataaatcttaacaataaaaaaccatcgtcttcttctatagtctccaatggtgttacttctatgctcatattcaaaattcaataaatttttttgtcaaaaagaaaaaaatttcaataaattcttattcttattctatagtcaccgccgcctaaaaataatttattagatttatctagctagtgggttaaccccaatgtaagttaccactcacatacaccatatataatatatggactttgggctctcattaatggatgtttggtgaagtaaaaacattttacatagatgttatgttatattattgatgctatttattttttttaataaaatattaaagctaaaaaattattgtagctaaaaattagaatatatatattaaataataatgtgtgaaattataattatagtatttttaaagaatattgtacattggaatatttttaaaagtaagagtactaaaaataatataaaagaaaaataaaataaaatattatatttttaaataatatgtaattagtattattggagatgctctgaaggaagcaaatcacaagtcctagtatattgaatattctatgtgtggattcaagtgtggttttttttttcttatgtgaaggattcgtgtgtttgttgtggtgctgaacatatatttcacatagaatgaatttcatctggttactattaatttcactttgttttagtgcactatttatttcacttaaaaattttggtttgaattcatgatctctttattttttcatttctcttttactactaagctagccttagtggcttttgctttaattaaaattgatgatgaa

SEQ ID NO: 305034 - DNA, 1700 bp, Cannabis indica
caaagaatacaaatctattatgtttgaaattatgtcttagttatgtgagtgtgtgaggataatttaggtacaatactcataaaaagagatatatttgaattaaattttatttggaggtaaatttggttaatgtatatatatataaaaaaaaaggtattcttcaacttctcccaactttttttcggctaattaggattttttcctctccaactttgacatgtaccaaatcatgccccctgaactattgagattgttggatttaaggacttttgtctaattttagtaaaaaaagtctaacatggatgaaagttaagggaacatgatttagtacgtgtcaaatttcgagaggcatgatttggtagatatcaaagtctggagagcatagtttaatacacaaataatcactgaaatagtaaaattgaatgaaattagacaaaagtttaaatctaacaatctcaatagttcaaggagaattttcaacagccagaaagtttcaggggcataatttagtacatgttaaagtttaagggacaaaaatcttaaatagctttttttttctcttaaagtccatccaatctcaggcccggcctgggatgactagtttagtgttgttgttgatcttggtgtgaacaagtatttcaagttataattaattatgattggatttatgttttgattaggatgtgggtcattcaattctggaaagctattcaagggtgttggaaagcttagccttcaacataatggcaagggttgatgatcttctatacatagatgatgccactaaacgacgtgcaactatagactcaatgtgtttgtatgaccctggagctggaagggttggcaatagtaataataatgttgttggtgcactaccttttcctagacagaagcaggcattaaccagttccagctcttttgcctcatcacgaccaaaacacccaccaacaccaatacaagcgttccattctcgtactcagatgggtgtaaacccagttagaaggaccaatagtctttcaatagataggattaattcgactagtgatacagaggatgagaagtttgataagcattatgctcacattaaatagctgttattctgatttgtaatcacgtttttatatacacacacactttttatttgtttgcctcaatagctacctagaagggttatgtaaatagcaatatgaggtaggcacccgtgccagtgccacttcttttgctatatataactaaactattggggcacgggcctcactttgaaagacaacctactcagtagtttttgttcgaatgtagacttgtaccaaattccaatttgcttttttgagttttattattatttgtttggtaagtgttagggcatctccaaccacattgttgtctaaaattttttaaatattatatctaattataagtatccaatcacaagtaagaaaaataacaaaataatttaaaaaataaagtttgagaaatttttgttgaaaagtcaaactaggaatgtaattggggcgggatggggctagtaggaatgtcaatggggcgggtcggaactgatccgactctgatccgacctgatccagatcatatacggatctgacccgccccgccccgctggatcagatactcggatcggatctgatccgacccgccttatacagatcggatctgatccgatccaattttttttttttaaaaaa

SEQ ID NO: 305035 - DNA, 1126 bp, Cannabis indica
cttgggcagtacaaaagtaatgaaattgggcttgggcagtacaaaagttgtttttgccgtgtcccagtataaatgtaaacttttggtcaaaaagtagtatttttgtaaaattcccaattgggtggcatcgaaaatgggcttaatttattgggcctttcttataacaaagatgcctttagcccaataagcatgtcattaagccgacgtctatcctattatcgaccccaattaatagcatgcataactagaataataataatattacataaactttacacaaattattattgtaataaattttttagtttaaatattttttttttacattttaaaagtattttataaaaataatataaaaacaacaaaaaaaaaaataaaaagcaataagaaaattatatcaaaacaatatacaaataacaaaaaataaccaacacaataacaaaataacaagagtacaatataaaaataatatgattttaatgtaaaaaaaaaaaaaatcttaaaaaagtgtaaaaatatttaaaattctatacaactatatttttataattttttttttattaattttgtatatttatgaaataatccctattcttatactatatatattgagcattacaattacgcattttacgtgttcaatatcataccaatatgacacgccgtaagtggttagtagtttcttatattatttattaaattaaaatgtgtgtgacttgatattaaattacactaataacagtatatcatattttatgatgcttgtcgctatgaggtacccttagcatttctcataaatattatattaaaccatgattatatttagtccatataaaaatattctattagtttattattgtgttatatatttttgtgcatgttttctttaggactcttaaattgtgtttgattagaggtaatgaaatagaatataatgaaaatgaattaatttttattcattattttgtttggttgtaatttaaagtattagaatgttattttaaatggaatgaatttttcactgttttggtgatatgattattctattttaatttagaaagagagaccattccaatgcaagatataataaaaaaaaaaactatttagactttgtattttgtaaaag

SEQ ID NO: 305036 - DNA, 3691 bp, Cannabis indica
aataaagtaggataatttaatttaattatttatgtaaaatcatttgaaagagtctcataatttaaggagccatcttttagattccatgatgatatgccccgacattaacatgctcaacactcctagcctgtctcgcaagcgagtcttactttcgtaaaagctctttatcttaaagcattcaataattcatatacagaccccacaacacaagctccttcttctgcccccccaccaaaaaaaaaagtagtagtaaacttattcagcttagaacatacaggttctaaattgaatttaatcattttttaactgatcaagatggaaggtgtttttaaaaccatctacctgtttattcaaaggacaaactatttggatttaaaaaaaaatagattcgaaaagttatgatttcatcaaagttggatctatcattacatttacacatgtgttgagagagaggtatgaataaaaattaccgaattaaaaagtgattccaagcattggattctgtttcactcaccttgattatgatgtcaatccgtgtgattaatagaatggcactaagaacaagggaagtcagcatttgttttttgtctagtatgttagaaacatcatcagagtcccaaaaatcaaaatactttgaatgattccactctactttacattcttccaccccattattaaattatatggcttcatcttacacaaaaacataattattatttacaacaatcttccatacagaacaggacaaaagaaagaagtaaaattaatcacgaaaaccgaaaagaaaaaaaaacacattcttagctagtaatcattctcaagagttgtaagacaaaacaacaaagaaaaaactgaacttcttacagtgtatgacatagctcagaaagtaaaacaatggctcatcaggatattgaatgccgccgatctttagctggttttgtccgagttttgtatgaaggtgtcattccatctgagcggacaaaagggtaaagcctcccaagtttctttgacactgagttcatgaatgattttcttggctgaggaggcttatcagcaggtgatgacatgattgttccgataggactattcgcagcagttgaccttcctgtgtttgatctttcaatttcttttagcttcattttcattttcactagttctaatttgagttcatcattttctctgcgcaggctggagagctcgtctgaaatcgggtgcatgtcattggaatataagttcatcttcactgaaggaatagcaggtgattcgctgcctgataggctaccattcatcacttctctgaatctttgttgttcgtagtaaagcacttggaccacagtttgtactggcagcctatcattttgagccgcgtgggcgcaggcctcccgagacagcttctggcagtccatcaagctgcataccttcttcctctccatgtcacttagagcaggatgagcctatcgttttgtgagtttaacagaaaaggaaaaaaaaaatcacaactcgtttcaccaatgtatgtgagtctaatattctttgattaattcacacgtcaaaacattttcatgagataagtgataattgtttaaatgaacataactgttattgatgataaatgtaatgctgattgtgttaatggagttttaagaatgttaaactgaagaaagagttgggtgagtgtgttcacctttagataaatgtcaatggctctatacatcccatcttcggttacccttgattgctctggaataagttcagcaagactgttgaattttgaaacaggtaagtttctatcagaagctatttcagctaggtagttttccattagcttcccaactcgttcgagctcactttgtggaggggagacataatcatcatctccattaaacacgtaacgagtaccactcatttcgtaatcaaggaaatttgtcatgatcctctgaacactgtccacatcaaataatgtgtcaccagtgaatgaatatgaaggaattaagagatcatccaaaacagcctgccccaactgcattcccatccttttctccaaatctaggcggcaagcaactgttgtctcaagatagagcgctgcacggaggagcattgaaagaaagctaactgacatagcatttttctccttaggtagaagactcactattgtttctagcacaactctcttttcatgttcttgtcttggctcgattttcttccttcccttaccaaatatttcctgcaccagaaaagagtacttttagcttttagttcttaacattgattgaaacaatgaaaaacagcatagttcttaccaaacctctcagtgatttttgagcataaagcatgagaattggcccaagagcgtattgcttgaaccctcttgccatcatggcaactagaactctttggaacatatcgattcgaagaacggtcagatcttcagcccaccaatcaacaactggttttgaaccagaaactaaggaagaaatgacaccctcacttccactttcagtgctccttccggacatacagaattggctatctttgcaggctatataggcaattgcatctatgcatttgctgaccaatttaactttctctgctattggtagaaaattttctgaaatatgtagaatagaggctgctcctgcaagagttttgagtgccacttcactcaagaaggcttcagttcttccaactaagtttccaactgcatactcctcagtcatcccaagatactctgctacacatctcagcatgacaatattttctgtgcttatctcgaaatttattccatagcagaatttggcagcaagttcaaacgcttctgccccaccaggaacatcagcaagagcgattacacaaagatcaggatcattagaatccgataccagttttcgtatatgtccactcttcgaaactaatggaaactgccaataaagtatgcagtagataatgaattaagttatagttgtcatacaattgataactgagtaaaaacttggtgctgctcaattcttatatgaatagtttatgtgcaatagtatagccatgttagttctatatgaatagttattgtattcttttaccatacaaattcataatttagtgtttgaaattgagatgaataataccttgtgtaatgagaatgaaacttctccaactttgatagtaacatcactgggaatctcttgagagaaaatcctgcaaaatttaaagtcaatcttggtaagaaaaggtcaccaatatagtagcacgagtagtagtatgacataataattgaataaataagagttgggaaactaaatagataaaagaaaagaatattaatggaaataagaccattcactggttctcttcagagcagtggaaagaagttccttctttttggaggtcatatttacatcaataggtgcaggttgctcctgatcaagatctaccatggcagtgacagaagagtcctttgtcatgatcatttctgcatcatatatactaaactacagagtgaaataatgagagagagagagagagagagagagagagagagcttcagttcagatgctgctcccacaaaggtagtgatgaggcaacactaattgtatgtctaatccagggtactctttgtttcttttggtaccttttttcaaaagttttcattgagaaacagaaactaaacattatgcaataatatagccagtactga

SEQ ID NO: 305037 - DNA, 930 bp, Cannabis indica
aagtcaaattataagcttgcctgtttgtactgaaactcaatggtataagagagaagcatgggactgatatcgccggtgtcgggacgtgacacctctaaaattgttgccataggaagatcatcgaaaatcctcgccgccggttctccccattgccggaaagagtgagacgccgccgccggcatcccacctagaagcttctccgacgacatgatcttctatatttaatacttcaagctttaattttactcaaaacccaattgtcttaacatatcagtgtgatattgaatataacaaaatttcatggtacgtcgtggtttatatatataaatataaatttaaatataagtatgaaatatctttttcatgtttccctttatttttcaagaatagaaggagattgtgactctgctaacctacggtaaggttactgttcttaatgctgataaataggatgcttccacgtggcataataatgagtttttttggcttcatctgacaggtggctgtacccgaacacgattgcatggagttcccgaatgagtgcgtaacatgcaattagtagttgtgttttgccaaaactaattaattgattaattacacaattggatagtgaattgtctaaactgccctccaattattatattatatcttttattatagcataataacaataccaaacactataatcttttggaatttagacagagaaagagaagaatatttaaatagaaataattacataagacactattttttgtaaaataattatatttttatgttcaaagaatgtttttttacatttttacggttttccaaaaaataacacgaaaacaacacaaaatcaacaagaaaactacataaaagtaatattaaaataacaacaaaaaataacatacagataacaaaaattaacaacaaattaacaagatt

SEQ ID NO: 305038 - DNA, 1219 bp, Cannabis indica
tgttcgtattaagcattgtcttcaagttggttgtattaaaaaaaaagttgtcaaaaattaagctcaaggtcctatttttactattttagaaaatatagagtccattttgtcatttaacaaaatacagagtctaatctgtaacttttgcaaaacacagagtctaaaatggtatttaccctttgtttaattggattcgcttttgaggttctggcaattcttttttgacttcttcataaaatggaggtattttaattatcattgttattattattattttttttttttgaagcaaataagaagaatttattcccgagatggaaaaacaaccggaccatgtctggacctttgtcacaatcttatagatgacattacacaaggcaatcttaaatcctttatagaagtaggacttctatttttaggaataagaaccagatttgtgttgttaaaacctaagggagagaaccagtaacaaagaacttctgtacctcaagcacaatatcatgcccaacaatgtaccaactttttttttttttgataaaaacttagactaactagcaaccttgtcagggtacatctagaccaaagcactctgaatttcttcagcactaactggattccaggtaatgtgattgctggaacagcgacttgtggagtttaagtcagagcaacgactggtggagtggatgagatccgagatccaataagtaatcaaatatttcagatcaaaagtgattcttcagatcagagctccgactcgatttgaataaatagatttttttgccatgcataatttcctaccttagacaaacccaaccccataataaaactcccttaacctacacacgaccaccccaccctattgaaccactagcctaacggtcaccccaaaacaacaaagcaccaccactgccctagccccaaacccacgaactcgcaacatccccacccactcccacaaccacacccactctcaagagttaaagataaatcatcaactgagaacaataaagatattggttgaagatcaccacaaaagagccactaaaagttgttgtcaaaagaaagagacgccactaaaaagaaacataaagacttaacaaacagaaagaatgttcgtcatagaagcgtttattgcaaaatattactttaatggtaccctatctgtcataaataaagaataatttgcggtataaatacctaagtttaactctcagttgca

SEQ ID NO: 305039 - DNA, 2256 bp, Cannabis indica
ttttcaggttacctcttgtgaacatgccttctgcaaagcttgtttgattgattacgctgcttccttaggacaagtctcatgcccatcttgttcgaaattgcttactgtagatttgacatcaaatgcagataatgggaatcacaccagtaaaactacaataaagggcttcagggcatcaagtattctaaacagagttcaacttgacaattttcaaacaagcacaaaaattgaggctctggtatgtgtataacttttatcaattatgtattgacttgaaattctttagttgatgtgacagtgttctatgtatacctaataactatgctgctacgtgatttgacaagtattcatgtatattatgtctcttttaaaattacttggatagtttttttcatcctgttatatttagtagttttgctgcccagaatattttatggcatgaggacggttttaaatcgccagtgtatcttaacactaacaataaaattagatgttataaatatatttatataaatagataacatccaactatcaactttagctgtttggctggtgttaattgcatttcgttacttgtaatcgttatgatttaattgtttgcagataacatggttttattatcatttatttttgggatatatttagggacaaaattggtgacatgattccagtggcaaaattgttagcttacaccatcttgtgtacattatttcttacaaatcttacgttgaaatctttttactgataacaggcattgcgtgtacaagtctgtttttttgttcatttgatgttgctggactagaaggccttttatctgctatgttttttgtatggatgctgcttttcagttttgtggctttttgcatgttactaagttaagtatgtgggatgcagagagaagaaatcaggttcatgattgagaaggatggttccgcaaaaggaatagttttcagccagttcacatcattcttggatctcataaactactccctcgagaaggtagtactaaaaaaattcttaaagagctcttaagaaaatccctttgagtaactgccatattaattatgtcagtctgatggaccttgtgcagtccggtataaaatgtgttcagttgaatggaagcatgactatggttgccaggaatgttgctattaagaaatttattgaagatccagaatgcaagatttttcttatgagtctcaaagctggaggcgttgctctcaatcttactgttgcatcacatgtaagttttatatcatccatctgacaaatagaagatttcctagccttttcaaataataattatgaatttgccttcgtctttgtaattcttacaacttgaatacaaatggactaaatgacccatatttttgggtcactataggttttcatgatggatccatggtggaaccctgctgtcgagcggcaagcacaagatagaattcaccgtataggacagtataagccaataaggtggcatttgtgctttttttttaagatcatataatattatattcacttaagctaacctctttcttttgttctctaaaatctgtctctctgtacagaattgttagattcgttatagagaatacaattgaggaaagaattctgaagctgcaagaaaagaaggaactagtgtttgaagggtaaagattaatttgttatgcaagttttgtgatgcgtgatatgtttttccccacatagaatgacccattgctttttgccttttgacagtactgttggtggttgctcagcagctttgggaaaattaacagaagcagacatgagatttcttttcacctgagagaattatccgtacacccttaggcattaggtagtggtgaaccctacatcttttggcttatagtttagttcgttgcacagtaagtatatagttttttcttttgatgcgttgttgcatttaagtggccaagaatcttgaaaacatttaatttttctttgtagttcgggtcacaagtacaattttttgtgattgggtgcgaattgtggtgataaagcatatcggcttgagaaatttgtcttttgcaaaatgtgttttaactacatagcactcacattagcattttttaaaggctaattaggatttttttctcctcgaactttgacatataccaaattatgtccactgaacttttttggccgttaaaaattttccctaaattattgagattgttagatttaagtaattttgtcaaatttcattcaattttactgtttcagtgattgtttatg

SEQ ID NO: 305040 - DNA, 2470 bp, Cannabis indica
aaaggatgctatatattacactttgaattgagagagaaaacacagcctgaaaaatccataagaagttcaataattaaagacaaaattgtagagaaagtgcacacaaagttttcaggagttaaaccttcctaagagcacataacttctctaaaataaaaatatatatatatataaattcattaaacttatttaaaataaaaatatatatttaaaatcatttaaatattttaaaattaaaattagaaaaagaaaaatttgaaacctaaaattttatatttgctccatatacaacagtaagaaaacaatcaaatcttccatctgctgcagctatcttcaagtgcattagttgactggtgcacttgaaaatatctacaacaaacttagtaggatcccatgctatcacaattttccctccttgatgccatgctatatttgacgccacaccatccattgaaaacatttaggtacaaggttccaagtttgtgaaccttgacccttgtttcgagaagcccaacaaaaccagcattttaacccctaataaactgctttattagttgctatttttgctggttgttggctccccgaacattccacacaatgatcttatccattaccaagagagggccccccccccctctcttgtattagcattatcatagtcatcattctgcacttttagacctactacatctgttgttatttccatgtctgcacactcaaaaagtacctgaaatccgtttccaatcttggcgcccgaggactgcccctggtccctaatcttcttgccattttgaacagcttagaaaccttttgcatcaatagcagcagcaggtttttgtggccttttttcttccttgataatccactcctgcttagccttattgttcttcctacactcagccgtaggatgccccatgcctgaacaattcaagaaaattattggcttccattcatagtttatacccacactaatgttcattccaaattcatcttcaaagtccagcatattgggaaggggttgattcatttgcacttcaattaacactctcggataattcaatctttctagaaaggaaatagatagtaaatcaaaagataaatctcagctcaaattatgctgagtaaatgcattgccttttatagaaagattttacaattagtggccactgattacaagacagatggcagtgtacaattggacaacaattaacagcaatatcagcatggggatttgttcaatgattgcacaaatcccgggtacaatgtcgctagggaatattctagaatagagttgagttgtcctctgatgtatagggttgaaatactctgctgctgcactccacaccaactgctgtagagactcaagtcttaacaccacctctcaaacgcaagggtgaaggtgtcactccaagtttgggcagcagctggaatcttgatggagaaagagctttagtaaggcaatcggcaatttgatctgatgagggaatgtatctaacttcaagttctttcttcaatatcttgtcacgaacaaagtgaatgtcgatctctatgtgtttggtgcgggcatggtaaactagatttgaggcaagtgcactagcactcacattgtcacaccatgttatagatgttttaggtagaggaaactttatttccttcagcagcgattctacccatgtgatttctgctgtaacctgagcaagtgccctatattcagactcggtgcttgatctagatacaacagattgtttcttcgaagaccatgagacaagggtgtccccaagatagacacaatagcctccaatagatcttctatcatcaatacaacatccccaattagcatcagaataaccagtaattgaaagtctgtcactgtaaccgatgtgtagaccatggctcattgtacccttcaagtatctaagtatttgttttgcagcatcgcagtggacagatatgggagctttgagaaattggttcaatttgttgattgcaaaactgataccaggtcttgtatgacataggtattgaagggcaccaatgaggcttctataaatcgttggattgtgtagtggttcaccatcagttaatgatatggacctaccagtgacaatgggggtaggacacggtttcagattagccatgtcatgctttctcaatagttcctcaacatatttcttttggttcaaatagatgcccgtatcatctctgatcacttcaattcctaaaaagtagtgtaaggcacccaagtttttgagagagaacagtttgttgagttttgtaatgaactcactgagtttggcttcattgttacctgtgacaataatgtaacgccctaatctataggaacgccacgtgtgtgaatttataaaactagtttaatactaatatagtaattaattattaaaaactgtgaggataataaaaacttgactaaaataaaatactaaaaacggacattataacgtcagtaaaa

SEQ ID NO: 305041 - DNA, 1835 bp, Cannabis indica
gtttgaatttgattcaaaattgaataatacaatcaagttcttaatagtttacacatatgctatgtactctagttttgaaagtatatatacaatatcccaaaatttaagcctcattctcattccctaatatatttttgtgtttgtgaaaatgatcatctttcaaaaatgcctttgacatacaccatacccttctcactaagcttaagctctcttctcaactggtcaacttgttgatcgtccccttgaacgatgacctccgacaactccccatcttctccgactatcattttcaccttgatctgttccgtcctcgtagctcttttccaatagtatgctcctctgcgagttttcggtttccaaatggacattagttagtaacactcatgaaaataaatacacaatacaaaaactacgtgatagtaactacttacgctaatggacttaagatggtgagccaaaaccaattgttgcccacatctggatatgttatggtaagaacaagtgcaacactagccaagcttatgcaagtacaaaatgtgagtaaagctgcttggcctctacttggtgtcattacaccctcaaacctgaaatttcattatataatatccataaaatcataaaataaggtccaaaattcttctatatatatgattttacaaactatttaattatactttcttcaaactataagtttaaccaaacaaagccgcatatgtaagttatcaccaattacactttaactagataaaacaaatgcccaagtatactattttcaaagaaaaagataattccaattacaaaaaattaagatacatgctaaaatttcgaaaattggtaagggtgacaagtactataagagtttatataacgttattcgtacattttaatatcagttttcacacatttttaaatagaaaactcttaactaattataagatatcttatcggtatagtattagacatcttaaaatatcaaataacaattttttaaattcatgtgttcaaacaaataatgtaatttataaacaatcatattatttgctttaatatttaagttaatcaatttttgtaaaactcctcgtatagttttgatgcctataaaaaagtttaggtatttatctaaaagtatagatagaagtttcaccactaatataaagagtaactaaaacataactaaacttcgtaacaaataacaatagtggtgaaatgatagttgagagaattttaagcatttatccaattatcaaaactcgagaattgagagacttacgtaatggtttctcctctatcggtaacagcaaaattattacgagtaaagaatgaaagaatctccccagccacttggttaggtgccttctttgcttcatctccttctcctataaatgtcttcttaactatctgttaatgtaaaattacaaccaatcattttcacaaacacaaagaaataaaaaccaaaaaaataatttgtgacataaattcctaacttcaatttccggctatagataaatatttaaatttaatttttgaaattttatttctaaaatttttgtaagtacttaaccgttaagtatcaagtcaataacaatatggcagtcctttaattgatgcaaaaatataacttagaccatctctaatggaaaatgtaaaatttatctaataaataaacaaaaaaaaaaaaagagtatgtgttatatttagcccactatttataattatgaactaatgtaaatatgtaaaaaaaagtattattattattgatatcatttaatattttattaaaaatatataaatatcattatcttttatttttttattgcttaaataatagtaatata

SEQ ID NO: 305042 - DNA, 1225 bp, Cannabis indica
tagtgtgtaagactgtgaagaatccaaacacaaggaaggagtttcggactcagatcttggtgatactctgctacagaaaggatacaagggttagagatctgagtggaaagagtcatttaattctgctgcacccactgtaaggtttctcaaactttatatgtgtttaaattatattgttttagaaattcatattaagatgttaaataacatacatagtagtaaattttgataaacattatcatcttataattaattcacagtattaattatctagtctcagttattgttaacaaatttttgagttaacaagtacattctaataaaaatgagtgtatcaatgtgtcttttgcatttttgatattcgaaaagttatttttttttaaccttattttcaacatgtgatattattataaatttttgtaaaattatgtctaaaattactatgatacataatgtcatataaaaaaattcctattaaaacaatctacatatcataaatacaaaaagagtgcatcaatttacttattttttgtgggtgcaccaaaaaattttcaattattatattatttcttataaatcactaaatttttttgcaaagtattcttttttaatatatatatatatatatatatatatttttttttttttttcatgacccaaatctatgttaatattgttgacttttaaatatcaatgaaattccaaatctaatttccaccatcaaatagtttaaggtatagaaaacggatcagacatagttgattcaaaagattcctatttcaatagataggatcctctttcttgagcagagttttgttatctgcacttcaattagagaactaaaataattaatatattattatgtattttaagctatatattcatacaatattaaagatctaactgttatcttctctcaagctactataaaaatatatatttgttttattgttaattaaattatggtgtggttagtctcgtggatctcttctgcaaagcttcttgtagtttttttttaataatcttttaaattttaatttagatgctaccctctaagaaaaagtaggacaaaaatacttggacaaggaatcagttaaaagagattccatatacactcaggactcgtttagtacgttatattgtattatattaaattggattatatatcatattttcatataatactatattaaactttaatttatactaaaatattatatactta

SEQ ID NO: 305043 - DNA, 769 bp, Cannabis indica
ctctctctctctctctatgtcttttattataagtttcgttggtatcaaattaatggtaaaatctgaatggccgcaataataatgccgtgtcaacatgagtctcttgaacatcatgaaaaggcaaaggccatattttccctatttctcttatcttttcttctctcttaacatttatcagaatctttgaccaacactctgattcttttcgatcttctcagagagcacctaaggtacgcatagattcttttattctttaatcatcattattttttttaatttttttaaaaaaaaaataataataataataaggcacttggagagagggttcctttcttccgggaggaaacggaggaaaaatacatgttaagcaacaatttaataatgcttataaaaatcattaattgagttacatggaatagagagccaggtaattatttaaattcgatccatcgcatattagaagtaacatttcaggcttctcagctagctatatatatatatatagtaataataaattaaagaaaatcgtaaagggtaccactggtgcttagtattctcttatagggccgggccaagtattttgggggccttgtgcgaaatttttaaattgggccctttagaaaaaaaaaaaaccatgtacattaaaactacaattctattagtagcttttttttttttttgaaaaattgcttcataaattttcaattaaattttttttatttatgtataaataataggaaaaaaaaagaaaaaaataaggccttttttt

SEQ ID NO: 305044 - DNA, 2452 bp, Cannabis indica
gaaaatacaagggaggtagcacaaaatataaacttttaacaagataaaatgtcacctgaactccatcgatttcacatcgatctccaacatcaaaagggtgcatcacaaataagaaaacgatggcttcaaaaactgtcttgcaagtgtttccaaaaacaaatgccacaagtactagttgcgaactgacgaaaagtagaaacttggtcgtggcaattcctaatagaagaagccatatgacacctataacgatagcaactattatgtttaccatatgatgaagtttgtttacagcagttttggtgtcatttagtgtcaaggcaagtgctctccgttccctgaatgcattaacctgaataaaaagtaactttttgaacaaatgcttgatactaaacaatagaatacaagctctcatttggtgcattaaaacaccaaagtttgtattattatatatatatcagcaacgttgaccagaaaatgaacttaataataccatgctatctgcaagttcttgtgtgcatgtgtgcttaattctagccaaacataataaaatgagaaattaagataagaagttagagtttcattcttaccacccagtttttcaaagaagatttgctaattctctgtgtctcagctgccccttcaaagagactcatggtcttgtgagcctcatcttctcgcatgaaacgcattatatcctcaaggtagataaacctggcaataaaatagtaaatcataaaatttgttaggatgagaaaatagttaattagaaaaggaaaaagaaataaaggctaaatgaattatttgatataatcagctcacataaaatcactcttcattcaacaaaactaaaagagctccccattgtaacgaagtgagaataaaaataaaacagggagttttagtgggttggagttggagggagattattgacatgttgccttgtaaaaggtttgaatctttcaaggttttggagggttgttaacttgtgcgacataatagatcaataaaacaaacgtgaattccttgaggggggttcacgaggatgtaacaaaaggtaactatagagagctattagtctgtgaaagtgaaattaaggacatgaccagattgagttgacaagagaaaatgatatttctaaattgagaaaatgaccttacatgccaaaagaatgaaatatataacgaatcatttgtaattgtatgaaactcgatcgaatcactaagaaacaaaatgcttattattattttctgtcgatattgcatgcatcacatccttttagatgtctaataataattatgtgtagcatttttcttttgataatttaaatatgtaattcaactgaacttgaattgcatgaatccattatttatacacgagagaatgtgagaaagaaaattcatttatgattgcataaattcagaaacattctacaatctagagtgaggtgattcaaccatgggaaccaattcaggtgtcctctctttcaacaacgtgactaccaaaccaagcaacattaaaggagtagaatcaaatgtcaaaaattgatacaaaaaaacatgaaaaaaaggttaatgatataagaaacttacttggagcctcgcctggctacattgtgaaatattttcttggcggcagccttggcttcaacttcactccgaatctgcgtagcagactcatcaccatgagtggaatccattatctgctcatcaagcgtagtaagagcgccatttcgcaccattctcataagccttttcatattccaggcagacacattcttgggattcaacttatgcaagtgatcaattgttatgccctcctctgaatccttgctaagtacccgagagagtttggcactattctttggcttcgacaaccctccactcccaatgactcgactcgttctcggaggaggaaacccagatgagaaagctgcatccttaaggtcaggtggtatagtagccccagcattctggagcttctgaacgtcatcggcgagcctctcatcctcttcctctgctttgcaaatctcaatcaatggtggacccgaaagcgtttcaatcacaaactggttgaaaagcgagtcctgaattctatcaaagaaggtactaacatggaatgaagaagcaagaacttttactatgagggtcttcaccaaccaaagcaatgtacccaccaagaaacaaaccaatactttcgtcacatatttgagacccacacttctagtctctctctcaactttcttgtcgaacaaaaagtgccaagcaatcaaaacaaggcctagccataaacaattctgaacagcttttctaataccataaacaaaatacagaacccttttacgcaaaagaaaattcctttcaatgaaaaagaccacaatccgaatcccccaaccagagaccaacctcccacaaatcagaaccgcaaccaagacctcccatttccatagcttcaa

SEQ ID NO: 305045 - DNA, 2849 bp, Cannabis indica
taattattttttaattacaatttaaataaatcatagatttttgtttattttttttttaattttaagttcgtatttataattagtataagttgattaatcatttaagtgtgtgttttttaagtatttaatttaatgtaatgttttgttctactttatttaaaaataaatataatactaaaaaaatattattttagagtatttttagtatttatgattggaatgagtttttaacaccaaatttagttttagcatgacactaaattaactgttaaggttagagagatgctttaattacaataaactaatattattttaaagtgaaaatttaatataaagagtgagaatacaaatttatttatcatattttctatcataaggataaaagaatactagaccgttagaaaaaaaaccaaaaattgtaatatttattcatacccaaagtgtgcactatataaatattaagtattaatttcatagaattaggaatgtttataaaataactaatttaattcatttgcacgatttaatcttatctaaatttataaaagtgtggatatacgtacttgtgtagattagattggattaaaaaattgaatattgattgacatgtaaaataactgatccagttcaatctacatgtatttaataaaaaaattaaaaaattatatgtacaattaatattttaatataaaaaaatagtaatttaaaagtctaatgcatttaatacaattatattttaaaatttaatagatcaaatgtatattccattcttatatataatttttttttctacatacaatttaaacaaaattaaacatttctttatagctatttatttttttattaatttcttccatttaattttttatttgttattttatctattttaatttgttatggagacataaaataataataatttattttattttgttgctagatatttgatttttttcataaatattaaataatttaatattaaaaagtcaccataaaataactgatccaattatatgcacttttgcagattggattggatttgagctattgtgcagattagattagatctaaaataagaaatatgcacttagtgtgagcaaaatagtgtgaattgaattggatgaacaccctttttatataaaaatatgtagcgagatttacttcataattgtaaggaaagtatatttatgggcttaaattttatttgttttcatgtattttgaaactttcgtgtgtgactcccaaggaagcctactaaaggtggggagcgagaaagtaggactgtttgggatgaattaatgctaagagaatgataatatgaaacaacaacttttgtttgttttaagggtttaaccttgaatgttattctcttataagtaaaataactattttaaaaagggataatattgatacctaaaaaatagtgggattgaatcattcccttccattatactaatttagatagtattttttaattattaaataaatttaaatactattaatattatgaattattataaacaaaatattacgatatatatttagtatatgagattatttttttcgattgagttatttttatgttattatcaataatatatatatgtattatcttaatctttacccacatgatgtgacacctctacatgaccaaaagcaaaagacacgtgcaagacaatcagcaccaaccgaccagagtagtgccgtgcaactctctaaccctcaagatcttagggttgcgagatggactcaaacaagaagagcatgaagacttacaagatccacatcttcaaaattatgagacaattaagttcatcctgatattgaaatctctaacaaagctacgaggatcatgaacaatttcataaaaaaaaaaaaaacagagatgcacaaagtattgacaaggccttggtcaaacctctagttggctggccaagggtgacaacccatatactgggcaacctccaaatatggctgaccgaccaatactcgtattacgccctaacatttgtagattttctcgtgggccttgtaaaagattccaaatataggaacaattcaaaacacccacaaaagtagaaaagttttgccaaaatatatctgccctatattctatttattatgtatttcaaataacaacttgtaatgctctaacattatataaagagccttaaccctacgtgaaaggaatctttatcagttcattcattatatacatgcacaattaagagctcagaagcactaagaaatcagactctcctctttcacaagtcttctcatgcttgttctcatttttgtatctcaagagtaaatacaaaaaggagtcgttacttgatcaaagtgacagaacctctataaatcttgtgtctttcacaattattatcattcaactcatgacagttataaataaaattagatcctagtcagactctatgttagttggctaaattcacagtcaacaaatatgcattatacataaattttatgcgaaaggtatacaaaaatgatacagctaacaaaaataaataacacagttataaaatatataaaaatgtttattttaattaataaaaaatacaataaaattcaatatttactaattaataaatatatatctttaatgaagaattattttatttttatgtataattaatattaaatagatatattgttaaaaaaatattaaatagatataataaaaaataattttattttaattttttaaaataatatataagatttctgtactcaactaaacagtgtaattcaattaacgggtatataactatactaggtgattgttacgtgccaagccacgtagtgttagttttatttaatattttagtttt

SEQ ID NO: 305046 - DNA, 1622 bp, Cannabis indica
tatcatttattagtttgtaatattgactaaaaaactgtttaggcgacccacatgttaaaaatatatttcttgtagtaaaagactaaaaattgcaagcctatctaaaaaaaaataacaataattgcatgtctataaaattcatatttttctaatttatattatagaatatatatacaaataaatatttatgtaaataaattaatgacaatttaagtatgatcaacaataatcaaaatctgcgcacataccgaaaatattcaatagaatttaattgtaggctcataaatttaaatattcaatagaatttaatgaaattaattcaaaaaattggatattaaaataaaatattgaccctattaaaagaacctcctaagctaattttattgtaggctcataaatataaatattcaatagaatttaataaaattaattcaaaaatttggatatacaaaaataaaatattagaccctattaaataaaaagtcaaggtataccataccaaatacactaatatcaattaatatttgtatttttaaataaggaaaagttcatggacaattaaaagaaaagaatatgaataagagaattgcaaagtagcaattattgattaattttttttaaaataaataagattaaaacatctctactcaatcgaactcattagtattttcatttaaattttagatgagtaattaaactttatattattatatgcttaaaatatatatatgcatatatgaaaattaagattaaaacattataatctaattcaataaatactaaatctaaaatattagataaatttgaacaatgcaataaatatacatgaaatacatttaatatatagagccgatctaatccaatatctaatggatgttggatcgatgactaaaattaattggatcaaatctgaatatgcctaaatatattgaatatggccggttgatgcaaaaaattagttcaacaataaattgttattaagacttcgaattctttacaccagatttgatctagtcgaattacattctcaatcagtttacacaatttttctctctcgattaagtttaggtcgcttgcttgctaagctcatcaagtgtgaatttaagggtgtatttcaatagagtttcgactagtctagtactgtgatcaagaatttttttactttttcaatgagggaatcttctatttatagcgggaaggaatgcctacttccttctattttctgttctaatttatccaggtgcgttaaatctcgtttgttgctcatcgcgcttcctctttctttttctgccttcaattaatgtattttatgatatatatttaagtaaaataataattaatgaaataaaataaaaagtacgtataattagaagcacttttctcatctatatacaagttggataatcattaataattgttgttaaactttctatttagttttatttactgtaaataataatttatatgaaaagaaattgatgacaaaagtatctaaaagtacatttttttttgtagttaactataaatcttatgtgcaaattttttgatgatacttattctctttcaactacttcagtttatttttgggcattttacaattttgtatacattattttaattaa

SEQ ID NO: 305047 - DNA, 2462 bp, Cannabis indica
cttcacttacgactggataatccgaacccgacgtagatggttactggaacgacccgctccacccgagaaacttcatagcggcggtacttggtcccaccgggtcagttacggtggacttaacgaccgtttcggcttaggagacctcaacacctcaatagtcgctctctcacgcctctccctcatcccaaaactcgactcggccgggttataccaactcaactcagaaacctccttcaaagctcaactcaccacccaaggcgtgccttacgtcaccaaacggctcccgttctgtgtggtgtcggatcggatgtacgaattccctcccacccagttcggcgtgccggttacggcgttgtcgagccgcggtccactgagtggagccaagtgtcggccttgcacggcggcgtgtcggggcgcgtgcgttgctgaagtgatgccggggctttacaagagctggagctggaccgattgggccaacgggacactcgagctgtgcgacgcgcatgagaagtgggaagatggttgggagaaattatttgaccgagtcgccgggaagaaactcgccaaagaaaggaaaagagttcaaagtttgactttgaaaaaatgcgttaacgattttgaagaaatgaagaaacgaacttggaattgggaggctccgcctccgaggcagatatgtaatatgggcttggaggcccattgaaatgtttttgggctttgcggttcgatttgtaaattggggaaaggtgaaacagctgttaaatttgtttcttctttctgcagaaaaaatagaaatagaaaataaatttttgtagtgttttaatatagttttaaagatgtcttttggaattgtatttcttacgttattattttgacattcaatatagttataacagttacaattcaaatattattctctttgaagattccagaagttaccactcgtaaaatggttacaaatctttaaaaacatgactagtcactgaatcagtaaacaatagacaaagctccacaactactactactaatttagaaaattccacaatacaccctcttaaaaggacctattcctattttttttgtcatttgaaaaaatagtttagctcaacttttttatatttatagttatttaaaatattttataaaattttaaaaattttaaaaaaattaatacatcaaaaatagagtttaaacagtttcttggatgcataacctctttattttatatgcgtgtgaaatcgactatttgaatattataaattattttaaatttcttttaaattttacaagatgtcttaaataaataaaaaaaaaaaaataaactaacaaattttcttaaatataaaaataaataaaaaatggatcagtgtacatcttttagaaggtgcattataaaatcaaatggtaaaatttaggttttcacaattaaaattgcaaaattttaaacaaaaaagaaataaattagaaacagtttagtgctttactacattcactctttctatgttttatttatgaaagcatttttttttaatctttttatgattctatattatgtgagttattgctaacatttgatagtgtattgttcattcttttgattaattatgttaataattggtgggagaaatatttcatctatggagtcacatgccaaatcatttacataaacaagaaatcccatgtggtgtcaaaatgccccacaattgttagtcctccccgctataatcagaaagtccaaatcaatacctacctaccaagttacaaatagtcacaataaccaatggtaaaattacaagaattagttttaaaaaaattctttgaaaatacttttaatttcttttttataatttctcgtgttgctaaaagtaccaagattaatggttcccaaacaaaatttaacaactttcataatgagatgaaccaaccattaatgatgttggtaactacttaattactatctcaatcacttattttcttatggaaagaaatcatattattagaagacaaatttgaatttccattcttaatcataccatataattcaaaaaaatcatttcatttttcactaatcactaatccaaaatatgcttatcttatctctactttcttttcctttcaaaaaaacccctctcataagttttaattttttttttattatttttgctttgttggtgtttggtgcatgtaaaagaatatgatttgtgggaaaaaaaattatgagagtgacttctttgaaaaaaatgtagagataagcatattttggatataggagaaggttttaatagttacatttttattgtaatcattatggttacattttttttaatcattggatcactattaaatggttgtgattaatttggaaattaaattaaaataaataaaaaataacctgtaacatgatattaacctgttaatttatttccttttaaaactttaattaggattaattatattttaaaatt

SEQ ID NO: 305048 - DNA, 1144 bp, Cannabis indica
ggtaaagcaagttaaaaatagcttattagaaaaattcaatgaaaaagctacagactaaaagctagaagctggtacaactaactttagaatagtgttatgaattaaagactaaataattatttttactactaatttattaattattattatatgttaataaaaataagtactttttaagaaaatattaaataatatattaattttatttgtttaaaaatattttatatttatattgtattattaacaaatatatcaaactaagtttcttataaactacaattttttttacaattgataaaaatataatttaataatattaaaaattatttttatcaaatgtatataaatttatactatagaaaaaaaaattaaaaatatatcgaaaataaatttttatataacatatttgatatatatttgtgattttaatgaaatagattaaaatattattattatcatagaatctttctcgcagcactttaaaatttataaattacaaaatactcagctcagtttttttctagagttctgctacagctgcttttccctacagcacaactacaactgcttttccccacagcacagctgtgccaaactagctcttagcatgattagtcacccttgtcgccttctctaggaatgtttaaagttagtgttgatgtagcacttcggttccaatccaataaacatgtctatggtgctataatttaagactctcaagacagacttatcgcatgtttctcctcctcatccttttaaggtctccctcccatttttgctgaagcagaggcccttcgtcgtgctttaagttggtgtcaagcagttcgttttcccattcaacttgtcattttagattgccagaatttggtctcaagaattcaaaggaagcttaccaactgctcagccctttctagcttcatcatggatattgtctcatctttgtcctattttcctggtgcttcagtcaaatttgctcctagatcgaaaaacaccatggcgcataatctggctcaaacaactttaaaaactggagaagagtctgtttgaaacaattagaattctaatctttctagatctttgtaacctgatttctttagttcctttctttggttgaaaatcttgttcatttcaaaaaaaaaaaaaa

SEQ ID NO: 305049 - DNA, 1125 bp, Cannabis indica
cattttatatagaataaatataattactaattagattcgattattagacaaatatatttttttaattatttttcaattatacataataaaataatatatattataaaataagaatattaaataagggatatagataataaataaattaagtaatactaatcaagccgaactaactattatccatctccatatactaataagacaataacaacaaaacaaagaaattgtaaattacaaagtcattattagtacccattaaccaaaattttctttataaatccatgcttttgtcttttttattttattatttttttttgaaaaaaaaattaaaatcaacacatgcaacaaaaaacattaagataaacccaaagaaaaaacactaatcccacatatattctcaagtccagctatagccaataggtcttattattagtttttaattttaccaataatatatataaatataccaaaagtatatccacattatattcctttattttgtactatatatatataaattagaattaaacatatagtacgtacgtgtgttgcatgccattttttttcttttctttgatttgtttgtttagtggattattaattagtaataattttgcaaatgagtagtactagtagtgttgatgagaagaagaaagaagttgttatcatttcaagtagtgaaagaagtttgagatttgataagcttttaagatatggagatggtttggattggagtcttatggttttgggtagtttagggtcaattgttcatggcatggctcaacctattggatacttacttcttggcaaagctcttaatgcctttggtgataacattgatgatattcctgccatggttaatgccctctacaaggtatgtttaatacttttaagtgaaattatacgattagttagcgatgttttataaaagttattttcttaagttatatgagactcgttacttaattacaccaataacggtatgacaacaaagaggatgttagacactagtgatgcctttagcaattctctttatataaatatatgtatatatattacagtaaaacctttatttaagaatactctatttaagaataacctctaatttgttataaaaaaatcaag

SEQ ID NO: 305050 - DNA, 2965 bp, Cannabis indica
aaatcacgtaatacgcctaaggtagttagggtgttacagccactatttccactttcattgcaccattccatttaggatctttgagtgcagcttctaatgtcaagggtgtttttgagctgatatagactttgggtttataaacaccggctttagcccttgttgtcatgggatgagtgtttgtggtgactggaggaggtgctgctgctgcggatattggggaagattgtgctggtgttatatgtgtcgaatctgtcgatggtgagtcagaactggttgttggagatggggatatattaggttgatcaagagaggaaggtgtttgttttgttggtggctgggaggtagaaatggtaggaacaagtacggtagaggtgttaggttgagtgaaattagtggtggtaggataagtgtgagctgtaacagcataaggaaacttgtgttcattaaaaattacatcccgtgagatgtaaattctaccagagtgggagagacacttataacctttgtgtttgatactgtatcccaagaatgtgcattcttcagatcgaaaattcaatttatgtttgttgtatggtctagtattgggaaaacatgaacatccaaagactctaagagagttgtaatcaggctgcagattatgtaatttatgcaagggtgtgtctcccttcaaaacagaggatggcaacctattgatcaagaaggcagaggctctaacagcctcatcccagaattttaatggtagagatgcatgagctaaaagtgttaatgtcgtttctatgagatgtcgatgctttctttcagccacaccattctgttcatgagtggtggggcatgaaagtctatgatgaatgccatgctctacaagatatgaagtgaaggcttggaactctcctccccaatcggattggagatttttaataggtaagccaagttctttttccacctgagttttaaaattaataaaggtctgaattgcatcagatttattctttagcaaataaacccaggtgaatcttgaatatgcatctgtgaaatggacatagtaataatagtcatttgatgaaatcataggagatggaccccatagatctgtgtgtatgagttgtaacggttgagtataaactgtttcagaattagggaaaggaaatttatggacttttcctaaacaacatgctgagcaaaaatcagaaacagttttattaatgttgtgaatattacaactgttgagtacacttttgactgtcttggctgctggatggcctaatctagagtgccatagatgaaacaaagtattattatttgaagtggatgttacaggtggctgattacagtaagaattggtatctggtatagactgtatgttattacagattgcaggcaaagggatatatcgattacaggattgatttctgtctgggatttttggtaggttgagagagtgaaacacatataaaccagcttcaagagtaccccgcagcagcaccttctgggtcttctgatccttaacaaggcagaaatcaggatgaaattcaaaatagacaccattgtcagctgaaaactgaaaaacactcatcaagtttttagtgatttgaggtacatgtagtaaattacttaatgtaagtaaagtggattgatcagaagccaaaaattgagttgtacctatgttttgaatggacaaaccacttccattacccatgtaaacttgctcactggtttgacactcattcttttgtgtcaggttttcttcatttgaggtacagtgatgagttgcacctgagtctgggtaccaagactcatcgcagacagtctctgcagtggccaacattgcagaaggcaagccttgactttgagatccaacaccagggaatgaaggattaaatctttggtagcatttggatgcataatgaccagttcgagaacagatttggcagaccactttattgttattcatccctgaaacacgcccagaattgttaggattagatgaagatccaaaggaattgaacgtgttacctctatttccagaagtgggtggtctgtatggaggattatttgatgaattgtttccagatctattgttggcatatggattccagtgattgttgttgaattggccagagttatttcttgatctgaaattggagtttgcaagattgattgatgcagagtcaagatccttattcttgcattcaatgcgatgttcttgggctagaagaagggcttccaaagcagtcacttccatgggttcagctcttgagttcacggatataaatgaaagtgtcatagtctggtgagggaaggccacgaaagattgcagaaatgtgtcccttgatgaagtcttgtccccaacagagttgagttcatcaatcagagaacgaaccttgagaaggtactcattgagattatgagaacctttcttgaaattttggagttcagtagtgtactgatcaatctttgcttctgtctgagatgcaaagtaggtggtgagaacagaccacaatcttgcagaggtttcacagttcacaactcgtgtgagaaatttttcggtcatcgaggatagcagccaagaatacaacagttgatcttgttgatctcaatccgtgtaagcagggtttagaattccagcaacgcgatcttcttctgagatgtattgaggaggaggagtgaatgaatctgagatgtattgttgaagcttgtgtcctctaatggcagaaaggacttgaggtttccatagcagatagttatcgtgatcgagtttagttgcaagtttatgagaaaagacaacgggaacaaacgaagtaccaccagaagcagcagctctgttctggctagttgcagtggagagaattggtgaagaatccatggcaggtcacaggagaacaggaacgatttttcaagaacgattgttgaacaacgaacaagagtcatcacggctctgataccatgttaaacgaatgaaagagag

SEQ ID NO: 305051 - DNA, 1549 bp, Cannabis indica
ttatttttaagaccaaatggttatgtgatgtcgataagataccaattggttactatttaaaaatgatccactttaaaataaaaatatctcatatatgtaacattttaatttttgatcgagttacttttaaagtatatagtcatttttagattgtgttatgttgtttaaaatacttttaataaatagtgtgtgaataattgaagtaatatgtagtagaatgaaatgaatctcacgtaatttaaggaaaacgtcatcaatattatatataaacgttaaatcacaagctattatttctaattagaaaatcaacgttaaatttgtaaattacatgtaaattaaggtgccacatgtaaattttcctttttttttgggtaagtatacttatatttcatcaacaaacataccctgtacaaccaatattgctatcacatgaatagctacagatttacaactcaatagaaaactaaatcaatctcaaaataattctttaaaccaaattctatcatttataaagctctgtacagttgaacttcactctcccaagtcccaatataagccttgtccctagtcctccaaaccatgtattactagcattaaaaatcatcagtatgtatacctactttggcagtttactatgcttgcttgcacctgtcaatccagttaagaagtcttttgaatcgttattgatttgtgcatataccaatccaatttaatagctgactaatacaaagtttcctgaaaacacatgaaaaacaagaatacaagtaatcatgtgttttttgttcacttagtgctttaatatgaataatatatatgagattataacttatgaagtagtaataatttttttaattattgcagattgtactatgggtagcaattccatctctattagaaaaaggatcagtgacgatagtaatgacggtgttcttgataatatttctgttccaatatctcccaaagatttaccactccgtctgcctcttgcgtcgcatgcaaaacctctctggttacatctttggaactgtttggtggggcattgctctaaacatgattgcatattttgtcgcctcccacgtaagtactacttctattattttataatatataaattatataaaatctccaacctaaacaacatatcagttttaatataatcacctttttttagtcgctagtcaaaatcatttaaatttccatccaatatattataaacgtccgtactatctcaatattgtcgtttcctttttcacatcttaaaaaatattattaataaaaaatttaatcaaaaattgcaaaattaaaagaaggaatttttaagtttgtaatttaaaatatactctaccaatcttcaataattacaactggattattatatttttataataataaacaggtcttattatacatgcacaaatttaagagtataatttacataaagttcaagcccttaatttattgtgtacaattagaaaatttatggtggaacattaatttgagatataaaaatcattaaagtataggtcaaatcaaataggattacttatat

SEQ ID NO: 305052 - DNA, 1864 bp, Cannabis indica
gaggtcacacctgcttttacggtataactcatctttccctttctccacagaattgcgagcagcttgtcaacatcccagcagtagtgaatgagtaaggttcgtgcgtggtgctctttcaatgataggacttccatcacattactcaaatcctccctctacacaattcaataccaaagtttatcacaaaagcctagtgcacagcaacaagtacataacataaagataatcaaagtgctggaattacctgagcagctaatagagactcttttgtaatgacctgcaaaagagaaataaaacaaatttccttaattgcaaagacagaaaaagagtaggtgtagaatgtggtcacactcttttgtaaaacttaaggttagttgtaggcatccaacttaatgtttcatatcacttcaaaagattttacagttttttttttcgaatataaaataaaataaaagtttttacaatctgaatcaccattataaactatagagcagtcacagctgctgctttaaaataaagaaaatttaaaaatatgaagaattggtcccaaaatcctactccaacagatgctttatattgtgagctattatacatcagctctattcctaagagcttctttaaatcattttaatattattatttttttcaatttctctcttcaattggatgtttgtttgtttatttttaattttttattatttcttctaattgtttaatattaaaaatatgttaaaatataatatttaaatgaagtaaaaaataaaatagagaaactggtgtaacataaaaaataaagaaaatgttgttttagtaatgtattttaaagaatgaaataaagacagtcttgggagtgcttagtgtgatgaaaaaaggaacaacctttcaaataacagccatggagtttcacaaaaaagagcctaactcaatgtgtgatcgaacaatagacaaaacgaaaaacagaaatacaaagaaaaccctataaatcaatactagtcgtaccgtaataacggggtcttttgatataaaagtatcgtattcaagacgctgaagctcaacatattgatcttcatcatctccagaatcgtaatcgtggtaaacagaatcatcgtcactgttggtacaatcgcccatactgaacctatcaaaagtttgataagcaatcaagaaaactgcctagcaatttacctgggaaaaaggaaaagaaagagagaaagaagaaatctttgagatgaagcaaaaccccttcacaaataaaatacctgtcgagaaaaagaggaagattgtttgagaacgatagacgtgatgatgagaacttgtaaagccgtgtgacactgaagaattcttgatcacgttaactgatttttttgtttttttatttttctggtttaatgctagcgccgttagaagacgctgttatattgtcttctttataaatttattattatgtagtgatgagtgagaatagtggtgaagtggccactatagtaaacgctttcttatatccctctctgacttcagtggctaaatacggtgaggagaattggtccttttctcattcattccttccttaccaatatattgaaaaaatatatattttcaaaatacatgctatttccttatcttgcatttcacaagataactgttctcattttctacttaaaatgaaaattgatgctatttatctttaattttagtaaaaatttattatgaactttgtaataatgtttattatttgttataatttttatttatttttcttactaatgtatttttttatttatttggtagatttcaaacattatctctttttaagaagtccatctcacacaagtacacaatcttccatttatgctgctaagatttt

SEQ ID NO: 305053 - DNA, 3113 bp, Cannabis indica
agaggttttgctaaatttttgattaaattttgatacagcatttctttagagcacaaaagaatttttcgttgagttggagaacctccgcctgctgcagcatttttctagcaaaattttgagcactcaacaaagatttttgctgaatttttgtggaaattttgctgcagcaggcgtaatctcacttggagtacgagatgaaatatccacatattacatattacaatatttttacttaaaaatatatattaattaatattacattatttttatatttttcaaaaaaacaagagaaaaaaagcatatatgtatatagatcgtattacattatgtttagttaaaaaaaaaaaaaaagaagaaaaaaaaaatccctatcagaacccagcgtattcaccatagccatcccctccatcacaccttcattcaccatagccaccactcgaaataccaggcccgactacccccttctccagccgaacatagccccaaatccctatcagatccccccatcgcctccttctccattaccatctcaccttcaccatcaccagacccaactacccccccaaccatttcgacccctttctcaattttctctagaatccgctcctcaccattctctcatccctccaacctgaaatccacattcatctttctccatctcagcaacaacaactcaaccgccgagacgacaacctcccctctttcttttccctatcatttgccacctccaagacccaatctcgcacgccaatgatattccgtaggtggtccattaatctctatgcggctctgtcaagtaattttcagggtcgtcgctcgtcgaaatttttgtaagttttgagaaattttcttgcgatataatgagcttgctaagataaattctaagtctgaaaattattctagtgtgtgctatgctatgttgatcattgttattaattggagctgtcattggctatttgtggtgagatttctactcaagatttggtttgtgataatgtcggggtagatttctgttttaaacattttgaaagctatcattgctggatattcaacatttgggttgttgtcattgtcacctaattgtggtgaattgctgaactcagtgtagctcattgatttttgttctaattggggatattggtgaggttgtatagcagatatttttacctcctgtcacaggattttgagcctcttgttgcgatattgagccatggcagccggcaaaactaaatctcgtaagcataaagctttcagccaaaaccttgcccactcctcaactgcaacaaccaatcaccacaataccaccaacccttgcctttccttcccccactttaataccaattattcccgaatctacacactcaccaccccgtactcgtacccgttcggtctcagcacctaaacccaaagctccatccaccaaaacaactccctttacctccaaggcccaaccaaagcctaagcgcaccacttccacagtcccaccacctaaacctaaccccaccactcatcctaaagctaaagccaatcccgtccctcattaagagcggtttgagatattgcaaacccgcaaccagttggccaaacttggttttctccctgccctggaggctttacctgcctatattacaaatttgattgcggagcaccagtgggagaaattatgtgcaattcccaagcctgttgtggcctctattgcccctgcattttatgctacacttgatccaaagaatcctgatgtcgtttgggtgaggggtcggagtgtccccttttctcctgatgtgattaacgacatgtataggttgacagctccgctataggatgagtttgctattttgaggattaatccagcctctatcccatgtgatgtcgtgcttcgtactgttgctcacccgggttctgaatggtctgtctctccttccagccaccgcactttgttacactcggctttatagcccgaagattgtgtttggcttgcttttatgaagtgctctttgatgcccacgacccatgacaccacactgagtcagacacgtcttttcttattgtattgtatcctggtgggcaagaaaatgaatgtgggaaagatcatttatgaggaaatttggaagtactttaagcaaaagggcggcaagctatttttcccagctcttatcacttagatttgcctagcgagtaatgctcctattgggggtgatgaaaaaattctaagagggcggatcagcattgatttggtttcgattcagcgtgtttccactcattgcacgccctcgactgctgctctgaaccgtgaccagccatccagcaaccaaccggctcccactagtcctcctcatactcagcgggaacaaatcatgaatcgcttagcgcaccttgaggagaaacaacttacttacttttgctatgttcaggcgcgtgatattgtattagctaaatctttgaagcaaattgcgccaaggccaatagttgactttccagtgttcccacaagaagtgtttgctcgatggactgatctcgaagctcaggatgattctagctcttcggatgatgatcctgagagttagacagagggagtgttctttctttcagctttagtatttatatttcacttgtcttttcggtttgtgttcttgtttatctgttgtggttgtcgttgtttgtatttttgttttgtgttaagggtgtattctatctttgttagtgttgcctagggtgctcgatgacgattttgtgtttaaacctagttacttgaaactgaatgtctttctttttaagttttaagctgcctactttaagttagcatgttggtttgtacttcgttgttgaaagtgttgtctctttcgattgtgctcatatcttgactaaatggttagtatcaactaattagttcgagctaaacccttgtagaaagtttaagcctctagaattacttagcaatttttcccttgaaggcaaaatcctaggcatccccacaccaaggaaatagatataggccgtatttggaccgtttgaaccttcaagcctaccctttatgaatagtttatccctagtcttccccctttgagcttgatattaacattttcctttcttagccactacatagcctagctaga

SEQ ID NO: 305054 - DNA, 984 bp, Cannabis indica
atggggcaaccgcaagcaggaatgcgtcctgggtcaaacatccctggtggttataatcccatgatgggtggctacggtggtcctcaacaacaatatggtggctaccgatgagagctgaataaaaacccttaaaagagttctgaagttggaaatcaggggtttgttttttattgtttgcgatcccatcttgaccgagtcagtacccacattttgtattttttgaccggtattgtaattttcttccagggctgatgtggttgtacttttagtcttgtcttgattgttaatctgggtcgtcatttctttttggttcacaagagctctattggctattgctgcattgatgcttctagctgttgtggcgttgtgtagcagagcgataaccattctctggttgtcttccattatttttctttttctgtttcatatatacatatatatatatatttttggtcactcgtcaaagattacgacacttctccttacacacatcgaaatgatattatcattcattattctatcggtatgctttgtgattaattgtgtacttacctaataaaagattaatattgttgatatatttcatacttttgggtcttgcttcttgaagatgaatgagtttattatcccctttatttgaggggaacttgcatatctatattttttttcaattttttttacttcaatactgcacagtataaataacatttatatcatggctttcttttttactttaatactgcaatcacacctaatcccagtccagcgaatttattgtcgaccacagaaatagagaccacttccataaacatgaagaattgtcaatttctatgaatgttggtgagaataacctaagtgactttaattaggaggaataaaaatataaaaataaaaataagaataggaatgaaatgaataaaatttaaaatatattaaaaaattgataaaaaattcataacgtttttcttatgttatattggaatg

SEQ ID NO: 305055 - DNA, 2314 bp, Cannabis indica
ttagaagaatgctcagctggaaaattgagttgtttcgccagtttttggtccgaatacaactgggtgtgagcaatgggctaaaccttgttttggtgagacaaaggttaattgtgatgttgctgtctttgaggatgataatagtcttgtttgggttggattgctcaggatcataatggtttattcattgtgccatggcagttaaaacttatggtcaacccgacccgttcatggctgaagctatggcattgaaggaggcgctcagttgggtgaaggggaggtgggtagaggggggtgtgcctgctggtgtggttatggagtcagactcgctgctgctggtgcaagccgttcaacagaagaagtggttgttgtctccggtggggcttttaatcacgaactgtgttgctctaatacagtcctctcatttgtttcatatttcaattaattttgttaaacggtccgagaaccaggcggctaactttttagttcgttcttttggttctattactggctgtgtttcccgcgggggttatgtccctgctggtttggaagctactttggtagttgatttgattgaataaaagttaattttctggttaaaaataaaaatgtcaaatggttcaatatttgtgatacataaatttacagggtcaaataggattaggagtgtatttagctaacattactgcactagcaatgtgagttaaaaggtaaaaaaattactatttcaccaaaataaaaattaatattttgataaaataatattaaaagaaaaatctattgtcattgattacttaagctgattctatttctttattgctccattcctgttacaatattaaaacaagaaacaaaatacttaagttgcagcatttttgtctgagaatgtttttggaatataaatttgaaacataagagtataacatttcacaatcatatatatgaatatctgtgtactatttctttcaataaaatcatgattttattttagtgctcaaaatgatgtactattgatatataaaaatgtattaaaaataaatgagagagaagaagaaggaccatctttgattatcctctacatttatgggtcctgcacattcaatcaaggagaaaagagaaaaaaaaaaaaggaagaaaaaataataatatatatggtccaaattggcccacgaaatttgtaccttttctttttcaacttctttttgctttctttatttctattttttccctatttctttttccatgtgtttgatttttcttcaaagtcgtgttcatcataagtccagcctttagtatatagtaagtacttacaagtaagaacacaaaagatttggaaagatagtgaaaatcttaaagtaatgatatttttgaaatacaagacatttacataagttgggatttagttgaattcttctagacagtcaatttatatccattactttgatgaggtctcacaagttcttatgacaattttgaagaaacttcgtaacattaaaggacaaaggtataaaaaaaaaaaagaaaatcaatttgagatttcatcaaatcttaatttatttttgctaaaaaaagaggggaaaaaaaaagtcttagccatgcagtttgaattgcaaatcaagtaggtgaaagtgaaacctcaaaaaatatttgttacgatatttgcattttattcatattcttttaattatttatacctaatgtaaaacttgttaagtaattaaaaaaaaaatgtaaagttaagaaatttaaaacatgttaagtacatgttcataatcattttaaaaaaaaaaaagaaaaaatggaaatagtttgatgtagttaaaaagttgttttagaatctgatacaatttaattaggtgagttgttattttgattaggaaataagtgatgcttcataaacataatccttggaaataaacagcttaataagaaaatagtagtaatattttgataataatctttttttcctttaaaaaagaacatgtttttatcagtgtaaaatattcaatttatcatcaaaacaaatatctattctatataaaatgtgtctatataatataattctttgtttatttgggtgactttttttttaaataaaaaaaataaaaaatgattatagtactttcaaatttcaatgattatcactacattaaaaattattaattttaaaattatgatattaaaaaaaactaaaaactaaaataaaattaacatacgtgactttggcacgtaacatctatctagtatatataaatatggttgagtatataactgtaaaatttttatttttagacttaagttaattatatatttaaaa

SEQ ID NO: 305056 - DNA, 1974 bp, Cannabis indica
tatttctttgtaaaatctccatcgatatcatacattccgttatcattagttataaactaaattgaattttttttaacggctgcacgtacggggttgaatttaatacatagttaactcaccaaaataacgtacattatttactgaaataagattaagacaactgttacagaaattatccttaatcggaatggatagatagtattataactaaacaatagtcttattggatgttcacttaactattgatcaaaatgagttccacgcacaatatataaaaaagccagatgtcagttcaatcacatgatatccaccgttatatgtactagcatttgatgttaatgcaaagttttatgaaaggtccttttaagataaattatttatttttacttatttaggctcagactcccattgaaagagctttaatgaagcccaactgcaatttcatgccaatttcccatttttataccctccacacactctcactctttacttcatcattacttactatcactgaaaattctctcgttctaaccaggaagttatttctcccatggcttcctcattctctttctcttcttctcttttaactccatactctcacctctacttcaccctcctagcgatcataatttcgggcttcatattcttcctaacacagaaaaccaaatcaaaaaagcccaatctaccaccgggcccaccgggctggcccatcgtcggaaacctcttccaagtcgttcgctcgggaaagcccttttaccaatacgttagagatctcaaggacaagtatggatccatcttcacactcaaaatgggcacccgaaccctcataattattaccgacccgaaactaatccacgaggctctaattgaaaacggcgccgttttctccacgaggcccagagataacccgccaaaaatatcttcagtatgaataagttcaccgtaaacgccgccgtttacggtcccatatggcggtcattgaggcggaacatggtccagaacatgctcagctcgagtcggctaaaagagtttcgcggcgtcaggaaccgagccatggatcgattcatcgatcggctccgcgccgaggccaaggacgagaacggcgtcgtttgggtactgaaaaacgcgcgtttcgcagtgttctgcatccttgttacgatgtgcttcgggatagagatggatgaggagaccgtcgagaaaatggaccagctcatgaagagcatactcattactgtggacccgagaatagacgaatttctcccgattctgagtccattcttctccaaacagaggaagctagccctgaaagttagagcacagcaaatggatttcatcgtccccttcattcaacagagaaagagggctcttgagaaccctggatcggacaattcagcgacgtcgttttcgtatctcgacacactcttcgatcttaaagttgaagggagagattcaccgccttcgaaggaagaattagtcactctctgctccgagttcctcaatggaggtacagacacaacgggaacggccatagaatggggaatcgcccaactcatcgctaatccagacgttcaagaaaagatctacgaagaaatccagtcagtagtaggccacggcagcgatcgtaggatcgatgaaaaagacattgagaaaatgccgtacctagaggcggtggtgaaggagcttttgagaaaacatcctccgacaccgttttctcttacacacgccgtgacggagccgacaaccttgggcgggtatgatatctcaccggatgtgaacttggatatcttccatgctgggattgcggaggacccgaggttttggagggagccggaaaagtttgatccgactcggtttttgggtgaaagggaaggggctgttggaaatggaggaattatgatgatgccttttggagttgggagaaggatatgccctggtttgaatatggcgacggttcacattgagttgatgctgggg

SEQ ID NO: 305057 - DNA, 4598 bp, Cannabis indica
gtattttagtaaaaaaattatgactataaaattataaacttttccttaaaatctaatatttttggaaaaactccaattttggatgtggctctatcattattacaaaattacccaccataatagaggcaaaggtggttctcccattataaatttgtccatatattccattttgaaatcttaatattataaaaataaaaatgattaatggttactgataatatgtgtgtttggtagctatgtaatgcttatacagaattgaatgatcctgaagtgcagcgcaggttatttgctgaacaacttaaggtaaaggagctgctcttaaattaattatagctagtttaattatattctgttaattataaataaaatttaaaaaatataaagagtgaataactaatataatatggaaattaaatattgaattgttattaggaaagggaatcaggagatgaggaagcaatggttttggatgaaacattttgtattggtttggagtatggattgcccccaactggcggaatgggaatggggattgaccgtcttactatgcttcttactgattctataaatgtcaaggtatatactcatctcaactcccaactcatcatacttataatactaaatatttacgttttgttatgtactaatttttttttataatgaaaagtgagtacttgcctcataaaaatttaatatttttgaatttacacacttaaaattttatttacgcattacaaaaatgttacgtttagtcacaacaaaacttgtgactaaaagtgaaaaaattataattaatcataaatcattattcttatatatgttctgactaaaaggtctgtgcctaaagatattaatcacaaaaattataatttgttgtgattaaatatatttttaatcacaatactttttttttgacatgaagtcacaatacttattgtgactaaaactaaattagtgacaacttataattaaatattatgttttagtcctaagtaataaaaatctgctactcagaaaaaaaaaataaaaaatctagttctctaaaaactactagggatggggtgtttgtttcagaatatgagctactggaataagaattataatagaaaacttatatttggtatggttttagtggaatattaattatgattaagtgggttccactattaaacttatttttgagtaattttaatctttttaaatacttgagtttgaaatttttttaatctagccccacttttccaaactcattataacatataaccatccaaagcttcaaccacttcttttcactttttccctacaacttcttttctctcatatttcttttctatcaaatatagagtatactcaagactcaaacatattaaaaaataaaacctaacctcattctgttttaagttgctagttgcttgttgttaagatagttagttagttagttttctttttttgttttcagttatgtacataaccaaaatctctgtctataaataaaaattttgctctaattgattgattagcttttgctaagctaatttcaattaacatttttcgtactatgtcctttgttcttttggtcatgtgtttctacatggtatcaattgctcttgaccaacgttaatgtcgtcttctacaatctatcttgctcctgcaacaatggcaaatgccactatttctgtggctcctccaaatcaaccatgaaattcattctctaattctctcattcttaaactcaatcgtctaaactttctgccatggaaatctcaagtggttccaactgtgattggccacgatcttgacgagattctgttcactggagttcctctacccaagaatcttgttaccagagtaccaaatcttgagtatgctcattgacggagggaggaccgactcttacctttttggctttgatcattgatgacggagagtattcttgcatctgttaccaatcacaacacctcctatgatgtgtggcatgctctgtaacaaaaatttgctagccaaaccaaggcttgacatcttcaactcaagggtcatgaattcttcaatattcaaaagggaagtatctctatttctgagttggttgacaagattcaatctatttctgatgccttgagtgctgctggttcccctgttaatgatcaaaatctaattctacatatcttaaatggtcttggaccagaatttgattctgttgtcttaattattacgtcaagaatcgatgccctcaccattgaagaagttcaggccctgcttctctcccatgaaaatagattggaacatcatcaaatcatgtcggatcttgctgtcaaaatgcaggctaatcttgattttggaaatggcagatcaggtggtgttcgaccttttgccaacttcaagaatcctcaacatgaattgcctcaacctttctcaggtcatggcaggggttatcctcgatacaatcaataaagcgtaatctgtcaagtgtgcttaagaacaggccatacaattccagtttgccactatcactttaacaaaaattgggtggttatgaggtctaaccaaccttcagcaagggctcatcttacagaggtggtttttgagtatgatccttaggcctactcaacaacattgtttcaagactttggtgataattgttcttggtatcctgacactggggccacaactcatgttacattcgattcaactactcttgaaactcagtaggcttacactgggactgagaccctagcagtgggtgatggtaagaaactccttatttcccataatggtcaagccaaaagcatatatggccgcaaaacatcctttgccagagtccctcctcctaatggaactgaaaaatcttaaagatgccttacaaaatctctagtggcttgcctccatgaatgatgaatttggtactcttaaatctactggaacttggacttgtaccctacatatctaaaatgcatgtcatagataacaaatgagtgcacagggtaaaactgaatgttgattgtaacgtccccgcttcaagcctctattgggcccttacacccacgaaatgatgactcttatacacgagtacgtcactttggctgcttcatagaatgacgactgaccctacaaactaacacgagtatttctaacatactttgtcctcactcgcacgcttcttggaaaactaagaggtcacccatcgtaaaattacccaggtcaagcacgcttaaccatggagttctttcatgatgagctacacaaaaaaaagatgcaccttgttgatataggtagtaccaatcaatccattcaagccatcttcaactttgtagtcccatacctacacagtctcagaatcatcacacatgaccttctccaggcgatgtgagattgcatcgcttacctgtatttctccttacggatcagaggactaatgactgtcacactgatggtacactagatcagttcaagttaagaattgtggccaaaggatacctacaaacaccataaactatgaagagacttttcccctattgttaagctagtaatagtcagaactgttctttctttgactctctctcacaagtggtttgtcaaaaaacttgatgtgagcaatgtgtttctcaatgggtctctaactgaaatagtttacatgcgtcaacccccaggtttcgtagatccagaaagactagatcacgtctatcttctaaataaaactatctacagtttcaaacaagcacctcgtacatggaatgataagctcaaaaattgtctcattcagtggggtttcacagcatcaaaagctgatacctcactatttgtttacaacttaggacctgatttgactcttataaacaagctcacatttgatctcaacaaacactttcacttaaagatctaggggaagtccattacttcttaggtgtggaaattttttgagatttaactggtatgtacctttttcaaataaagtacatcactgatcttcttgtgaagcctcatatggaaggtgcaaaaggtcccctaatccaactaatgctgccactaaactttcattagctgaacgtgaaccatttttagacatgacactgtatcaaagtacaattggagcattacagtacttgtcactaacaagaccagatatgacatttattgtgaataaactcagtcgattcatcaaggcccctactacttgtcattgggaggcttgtaaacggttaccaaggtatctcaaatggttactaaactcagtcaattctacggtaagaaacgtaaactagatcatagttgtagcattgattcatagcagagaaatgtaaattattgactggtcgattttactgcttcatttaattaaagttaaaataataataattaataaataaaaaatatttattttattaattttttttttgtaaaaattaaagtgacaccacatcgacccgcccgctagctcagcacgtacggtcggacgacaatggtgtgcgcgtgtatggtggtctagtgtgagtcctcaccaggcgcacaaaactaagtgacccttacaatccaaatccaaatcttataattgcaccttatatagaggcgtttggttgggaggaataaaaatataagaataggaa

SEQ ID NO: 305058 - DNA, 2405 bp, Cannabis indica
aattaacaaattttatattatattttattaaaatttactcaattttgagagtttctttatatacctttaccttccacctaaatatagtatatgatttaaattaatttaagtgtagcacgaattacgagacttctgattgtcagaatcacaaaaaatttggaccatttctcaatttgtgcgtgtcatccttgtgcaggggccatgctaatcttctctttatcgttccaattttatcgaatgttttaattgtgacagtcaatagtcccgtgatctgtaaggggacatactgagtaagctgtacaatcccacatcgcttggagaaggtcaagtgtgatgattctgagactatgtaggtatgagattgcacagttaaagagggcttaaatggattgattggtagcccatcacaaaagaactccacagttaagcgtgcttgacttggggtaatttcaagatggttgacttcttaggaggttttcccaagaagcgtgcgagtgaggacaaaacacgctggaaacactcacgttggtctgtagggtcagtcgccaatccaagaaatagccagagtagcgtactcgtatataaaatctattattccgtaggtgtaagaacccaatagaagcttgaagcgggaattatctgcaaacaatgaaaagtaaataaatcattaaatactccaatcaccaatgtgttgtttctatattatatttatattaaatactccataattttatttataaatttatggcattatgattatattatattttttgtgcattgttatatagaagtagttttgtttatactatataagctaaatattttatgagtactattaagttagagtagtctttcacatgccatgcgccctaatctaaaccaacaacaattcatacatcacacatatatatattaatttgttctaatttaattggtgattttctttcgaaagaaaacttttattctaaccacaaagaatattatatgcaatacaagagagccaaaaggcatgacacaacacactgacactgcactaccctttcaaatatacctaaagctttcccaaaaagctcaaaccaccattaaaagatacagtgcacggatatacactgacaatgaatgtttaaaagtaagatgcaagaactgagtagtttatcaaagaatagttatcttatggaggacttccaccctggcattgttatgggcagtatggttggaaagaaacagtcatcatctgataaactactcagtagttcctgcatcggtgttgttctcataataaatgcaacctttttaaacgagtagtgacaataatcgaggaaccatttgatccacattctaatacatatttcaacttgtcccattactcatgatcttcattccacacatcatccaaaacaatcaagaatctctttctttgaagcatatcctcaagtcgtttctgcaaaggatcaatcttcattgcttcacaaacttttccagttccagattctatgattgctttgatcaatctacgcacatcaaagtcttcagaaacacaaacccacatcttcaacttaaaatgttctttaaccctctcatcatcgaagacacattgagcaagagttgtccttcccagtctccctaaaccagcaatacaataaacagacgtatcattgcagttgatggtgtcgttaataagaaacccaacaactctcccctcgtcctcttctctcccatacacatgtggttgagtaataacagaaccagtctaacaactatctctaatttaatttcgtctctccccaacatcaacctcttgcaagtgaaaatccattcgctcatttccgatatgatccaatctatacccaatctctttcatctttttagcaatagcatgactaaaggaaagatgtttaggaccgaaacaagataaagaagatcgtaccttatggatccactgatgttgatgatcatgttctagattattctcctccaaacggaaggcttctgcttcgcaatcatccagaacatcctccaactcaagagaaacatcttccaacttttgcagccaatatattcttgatagaacaatttttcgattgtctctcctcaacatcttcaatcacagcagaaatgtttgagagcatgctccacatcttttccatctctttctccacccaaagcagatccaatttgcttttggatgaatgagctcagattctctaggacaacagtgagaacagcttcagccatgattcctggtcagatcaaagcaagcaaagtgttcagacttgtgaggaagcagatttggaaacaaagtatttgagatggattatcttagcttcatggaccttatgtaacccattccacaaaatagttttattctccaatcacatatttatatttatacttttttaaaaaaa

SEQ ID NO: 305059 - DNA, 1114 bp, Cannabis indica
atctagattatagatataaatgtagatgtttgttttcatctttttattaggggaatatactcagcacttccaataaatatgtataatagctacaaaattaaaatatactcaaaacttttaaaaacacccttccaataatagatgaatagatgagctataatacttcaatattttagctcatgaatagtgcaactccatattaagctaagctttacctcttagctaaatatttttattaatagagaaaaaattaagtaattgatgatgtatgatgttatgtaaaaatttaaggtaaaattaaaaaaaaaaaattggtaaagtatttttttaaaaaaaaaaatagaatatagtaactcatgcaagtatactcagtttctaaaaaagaaagcttttgatatcttatattctcaataatcattttggagccccatataaaaacctttgacatgtcaaaaatagactctgagcaaagaggggaagcatataccttgtgcaattcaaaataagacaattaactagattcatttatttatgaaatgagacaattagattcattacataataaacattgtatgcctttgaaattgaataaataatttctcttcacattcttggacaggaaatatgaaaagcataaaagaaagaagaaaaaagcatagagcagtgagcaccattaaacaaatgtgttctgcaccaccatattatatgaataaatatgacacatgcatatcaaaaaatacattgtaggtatataatttgtaataattaatgaattaattataatataatataaatcagagtagaaaaattagtgtacttactaatctattgtttccaagagtataattaatattggaaaaaaatagtgagcaatagaagagaattttctctgatgtagagtataaaggaacattttttatacaatgacatgtataaaaattatataataaccataagaataagataattagtatgaagccggtgccggcttcttaatgttttattatcattccaatctgcaataatcattagtttcttttctattgtgaaattttcaagtacttaataattcatttaaatattcacatcatatataggtaataaatgtccatat

SEQ ID NO: 305060 - DNA, 3609 bp, Cannabis indica
tcgcttatcaaaaagactcattgtcgttggctaaaagcgaagtcaacacccttaaatcacattattcgcaaaattaatgagtgacacactaaatcactttctggggactgaaactaaaagtttttctattgaaaaataacatggcaataccctaaatattgcaaaaacgagaaaaactaggattcccgaaactaccccaaccaatagaccggtttcccatctggaattccagttctatcggatttcttggggaccaaccggaagttcggttcctataggtctcactaaactggttcaccggtttagtggaggaaaagatcaaaacttcataactcactcaaatcgacctcaaatcaaaacaaactttccagacgtgttcaatgtatcccaaagaacataaacaaggcaacaaaacacctaaaaatgcacaaaattacaaaacaccattagagagccaagctttagttcttaaactgaaagcttgctcaaactcaacaacagctcctaaaaccacttctattcaacataatacaccataatttaacttcagaaaactacagcaaacaccatttactatcacagaaccctaaatctataattcataaagaaacccaattataaacataagaaaactaaagagaaaggtgccaaagctattaccatcaaaggatttacctagaataaactataaaccagcgaaaatgagatgaagaacaccccaagctactggttctccaagggtttcgagagacagtgaagagagatgaacgggttactttgattttttttctaattttagctaaaataagataaagcttatgtctatcaaattaattaagggataaaattcaaaataacatattctactaaagtccactaaaggacaagaagtcacaattagaaaaaatgaccattttgccctccacatagccaaaaagtcataaaaccacctaggggtaatttggtcaactctaaaatttcaactaatcccgacattgtccagctattgtccggctatactaaaagtactaagatgtgattctaatagccaaacaccacgttctaaagttatcgtgcataaaacatgtaaaaatataaaatttcatatatgacatataaaatgcattctgaattcaaataaatctccgtaaattggtaactcataactgaaaggcaagtttcataattaaactctatttatataccaatttcaaaattaaaattaagcggtctttacaactaataggtatttaaaaatgtttaaactacgggaattttctcgcccacttattaaaggtgggccgcgccgctaatactattagcggcggacattagcggcagatcttcccactaataattttttaaaaaaataaatgaaaatggactatcagtggcggacaatagtagcggacctccgccgctaataatttttccttttccgaaaatataaatggattattagcatcagaatttgggataggccactaatactactatttttagtagcagagatgccccgccgctaataattcttcagcaaatgaacaaaattattgtagtgattggtaagtcgtagattgtccattcatattccaaaaatgcgagctcgcaaaatctgtggtaatctaatcgtgtaatgggccttcgcgcctacttgatttaagtaatgaatgtttgcgatcattcttcatagtatattttgatattccttgtgttgacaacacaaaaaatgtgtgttattaaagaaacatctaatacattagtcatttagacagaacctatgtatagaagcgatgttcacttgtcgcaagagagacatacttgctcattacatatagtcgatatatgtgcggctagtattaattttaatggatcatgcttatctattgactataccgggcatagttcatgactagacattgtctaaggcggatctttttgcaagtttaagtcaaacacgattagctttactagagctatcaatcgacacgtcatcattttccatcaggaattgggtccatgtctcaactatttatgagactgtactcatattttttggtaaaaaaaactctcactataacacaccactaattttgtgatgacagttgtctatcgagtggcaaaattatatcaagggataggcgagttgtattttaacataacggtcgcacttaggtatcttatgagggttttaaaaatacaattataattatgaattttgtcctcccaagatggcacgtcatcaaacccttttgaattatcgtaggcatgatttgagataatcgttggattaaaagcctttttgtttttgagtgcaacgtgtcaagatcacaacatgtgatcatgacaactacaataaccctctttatacgaaatgtggatttttcaatttccctcccattctcaaactctctcaattttttctctttcatagaattggatgatttttcatttaaaatcgttgcaatttcttgaaggtttttccagaaaaagtttagttgttatactacttaagatcatgcaaaaaaaaattcttttagcagacttttcatttggatttaaggatggttatatttttgctttggttatttctgtataaattgttgaatgatcacatatcttttgaatttttaaggttgaaaaatcttcaaactgatagaatagtttatgagcagtagatttcttggcaaagacggactgaaaaaggttactttttctagaaatgtaatcctatttcttgaaaatcctcatcctttttgaacaaactttgaatattaacatgctttctgctagagcacttaaaatattcacacatgcatataggtttccacttagtagatgaagaactatatgaagactcgtgatttttcaagtattttctgctcaaaattataaatacatatgtgtgaggacactcaccttttttaaatcatatgtacaacacgctgaaaagatcttctatctttaagatgagcgatctctcgaacttttagatattcaaatcttaatgggggacctttgtagatgagccccaaaggagtgacaacttcatacctacgtccctgtcagaggatgtggctctagagatggcagtattgcaaacatcaatttccacaaatgaaatactccacatggttagggatttaacaaaactcgtggtggttgaagtacgaggaagtgaatccactgtgtctactcaaagttttatccatctaagggttatttttgatggataagtggaggaagttcaataggagtttgacttgcctactcgcgaagaggaagaagagagtgatgacgaagtggttggggtctttaatgaggatgcacccctcgacgaaccttttccttgtgtggacctcaaatcgagggtaaggctatcagatctagtttcttttcataaacttaatcttattcgaattggttatacaaaaccggtaggccaggaagcgaccacatcttcctttcattaatccagtattcattccctctaaggtcgctgattcccatacttcgttgtggagtcacggctaaaaagaagataaatggttgagtactcatttctattcataatatttagttcactgaagtatcatttataggtggcta

SEQ ID NO: 305061 - DNA, 1844 bp, Cannabis indica
atatatgtataaatatttttttaatgataaataagtccccacaaagtaaaaattctgggtctgtcactgtatataaagagctttctttttcttcatttgtaacaaattacaatttacctaaaatagaatcgattctcaattctattatacaatgttcatataaataaaatgcaacaaagtcacaattttgttttcttgtagaaaccaaagtcacatttattgtaagaaaaactagtatacataggacattaattattcaatagaaaagacaaaaagtcaaccattttttttaaaaccctaatatttctattctaaagtattgatcgataagcaactgtaatacatattttttttttggttatgaaacaaacgttcaagtaatttatttttttccttatgtaaaaggagattttagtcatctgaaagcttcaccatcttctttccaacattagaaccatgaaatagtccaagaaaagcctgaggaatgctctccaaacctattgagatgtcttcaagtgtctgaaaaacaccggttcgaatgtgatcaacagtagccgaaagaaattctggatagatgttcaagaaatcagcagccaaaaatcctctcatcataattcttttgtagacaatgtccaacatattgggggcagctctcttgtttgtgtctgtatactcagatatcaccccacaagccgcaattcggccaaaagtgttcatgttagccactgctgcttctagcatctcagctcctacattgtcaaagtatatatctattccatttggaaagtacctaaaatattaaatttgtacgaaaactattagtctttgaaacatgtattattaggcaattttaagtattgtaacaatttttcgacttactttttgagtgttgatttcaagtcagactcgtctttgtagttgaatgcatcatcaaaaccaagtttttctttgagtaattctacctgtaacataataataagaacaagaatatttttattagcatgaatttgtttgaaagacttattttgttacaagaatcaaacattgagttacaaagggttaattgccttttctttgcttccagcacaaccaacaacataacaaccaaattgtttagcatattggccaaccaaatgacctattgacccagcagcagctgacacaaacactttctcacccttcttaggcttcccaacttcaaatagccccgcataagccgtcaatccactaaatgctgcaataattaataataactaaataagtacaataaaagactgtatatgactagaatttcaaaaatcaactaatgtataactgagattcattcagctgagattttcatcaacacttttgttttctttaaaattataattaccatgaaaaaattacattaattagagtaatgaaaaatcaccaaaaattccaacatggtgtgacaatggaaaccccatagtgtctagtttcctcaacatgtacgtttctccttttaagacactatactctccccaattaatcattccaacaaccaagtcatccttctcaaactcaggattcccagatgccacaactttagccaccccataagcatcaatgacctgttcaattaaattcattatatgtgtatatatattttctctattatataaatgtttatctaacattttttgttatatttcttaacgattttgttgcgtcttaacataattttatgtatttttttaacaaaaaatgtttttaatagaaatataacatttatatcctctcacaaaagaggtagtcattaaaaaaaaaagcatccatttatatctttatatattaaaagtgcctatctaacggcatttctt

SEQ ID NO: 305062 - DNA, 2210 bp, Cannabis indica
ggcctacaaatttttttaataaactgttcgagttgaattgaaattaaatatataacaagttttttaaagatgtaaaattacttacatgatgtgttcattacgcaatttattgttcttgtagtggaacttttgaaaaatgtctacgacactagaaagttctcccgtctcgggattagcctatttttatacataaaaaaagttagaaatgtattaatttgagaaaaataaatgtaaagtttaaaaataacaataaaaaaataataataatacaaataatatattaatatttatatatattcaaattaaactaaaataaataatattaatgtgatgaatattgattgagattattccatgagttaatattatttgatcatttcttctttcttgcttatgtgatttatttatctttgtgcttaatacctatttgagactggtcaccttagccataattgatgatcctaatataaaatctgaaaagtgaatattgggatactctaaatgaatgaacatagattttgatgtgatacaaaagtatttacatagcttatgtaacttttagattattgcttaatgcaaattctatgttattatatcagagatacaatagttgtcatgcaatttaggaactttatgatctgaaaagagtttaggttgatttataatctgtcatcacatagggatagaagaatggttaattagtattaacaattgtgtaattaaagtaattgaagtcatatccctaatttcacatccattatcaaattttttatttgtttgttttatttaatttttgcttagtttatttattttcaaatttatctatttgattgccaaataaaaataagaattcaattgattggtatttacctagagtccttacaggaatgatactttactttcgttattattatttgttaacgataggtgcactagcgtagcataattttcgcaacaatgaatagatttaaggtgcatttggtaacactttttaataatatttctattttttttttaattagaaaagtaaaaatattactgaaaacatattttataaaactgttttcacttttcaattttgtaactaagaatcattttttttttttaagcacatttttatttattatttttaacattaaaaaattaaaagtggttattatagaataaatttttgtttttcaaacaatataaattttacttttatttttataataaaaaattaaaaaataaaagtattaattgatgaagttttgatcatgctattaatactctcaaccatagtttagacattaatcgattcaacatcacacaaaaggttgaaatgataagagaaaaatagtagcatatatatgcacatatattgatatgtatattcaggatatataatgaagttttgttcatgttcatttattcatctttctatacatatatgatagagaataatgatgatcactttggtatcgaggatatctccatgaaacctgaaatattttagggcagcgcccatttaaccacattatgggcagcaaagttacaacactttattttcaaaaaaaaaagaataatgatgatcacacaagtggggtacgtgataatattgtccaccactcatctaaattcagtgtacgtcaaggtcaagatccttgcgttttcaaaataagattcatacgtttaaatttggactgttgttttgataattgattactacacgtgaaaagtgcataattataagatgaatttaattacacactccaatataaggactaaaaatgccttgacaattgagatgacgttatatacagtactgtggtccatcaccataagtgattggaggccctccttgtctcatcatagtacaaatcatttttatatattttaaattatacagtttttaaattgtggcagtccgtatgttatattatttatcaataatataatgtgtagattaaatacatgtaacaaattaatatgtaacatatgacattatatattatgtgtcatcattttgtaatatttggaggagttgttactatgagtaacttccaccattatcaccaactttaagagtgtaaaaggtgttacacatctttatttttgtaatatttggaggagttgttactatgagtaacttccaccattatcaccaactttaagagtgtaaaaggtgttacacatctttatttgaaattcttaatggtataggagttatg

SEQ ID NO: 305063 - DNA, 3623 bp, Cannabis indica
gaacaggaccgggacccagacccgaacccaatatacttgaacgaaacccacaaccaagacccagaactggaatcagactaggaccggcataaggaccaagaccttggaccagaaccagacccgaacccgaacacaaacctataccagaagtcgaacccagattgggacctgggactcagacccagactgagacctgaatccggacttggacctggacccagatcgagacccaaacccaaacccggattaagacacgagacccaagacccagacccatgactcaagacccagaccaagagtcagattgagacccagaccggaacctgaactaggacctagatgtagaatgggacccaaaatccgaacccaaacccaaacctggaccaggactgggacctacgacccaaacttggagggtggacacaaaccttggaatagggcccaaaaattgttaacaagatttggggctcgaaactgggataaagaccaggatctaggaccctaccaagacctatactgaggacctaggttgggacctgagccttggaatccgagatcctaggattggatatgtcggtgtctagatctaggactcggactaggacccaaaccctgacaaagactaagagcaggacccggacccaaacaacgacctgggaccaaaaactagaacctgaactggaaccagatcgggaccaaggaacgggactaggacaagaacctgggcctgaacctacaccaagattgagacaaaacctaaacccaaatgtaacccgaaattagagttgtaccggggaccaggaactggacttcggtccaaaatcggacccaaatctgaatccaaacctagaccagaacccaaactgggacttagacccaaaccaggatgtgggacttgggacccaaacccagacctggagcaggactgggacccagacacagacttgaacttgaactcgatccatgacttggactcagacccaaactcaggatctgaactcgaacccgaacctggacccaaattgggacccagtatgagtgcctagtatcaggacctagatgggggactcagacctaggacccgggcccctaacctaaaccttgacccaaaccgagaactaggatctggacctagatgggggacctggacctgggaactaggactattacctgggacctaaccctagacgcaggaccaaaccgcggacctagaccctgacctaggacctcgttcgggacccagggcttgagttggaataagatcgggacccgtgatcaagatccggatcaggactcaaggcttggactcgacccgtaatcggtgtttggatctgggacccaaacccgtgctcggacccagacctagacccgtacttagacttggacccagactcatttttagacccaaacccagattgggatttagacctagaccaagacttagactaggactcagactccaacctagacttcgtcgtgaactcggacgcgaacctatccccaaatgaaaatctaaacctgtattgaacaaggattgggaccaggatcagacctgggacaggaataggacccaaacccgaacccaaactctcatcaaaactcggaccaggacatggacccatactaggacttgggacccgggacctaaacccaaactccgacctggaccagtgacaggacccagacctagatcatgactgggccttaaacccatgatcggactttagaccagggacctgggaccatgtccgagacacagacctggattgggaccgagacccagacccaaacccaaacaggtacctatactcagataaggacccgggacccaaacccaaacccaaaccgaacctagacccagattgagacctgagaccaaaacatagatgggggacccagactcgggacttgggcccctgaactaggtctaaaaacctgggcctcagaattgggatgaggacacaagacccgaccccaaacccaaacctggacctaggagccaactcaagacctaagacccaaactaggagtaggatctagactagtgatctagaaatagaggcttggacctgacccatagtgagtgtcaggatctgggacaccaacttggaccggaaccaaaacccgaacccagaactagataagaactgaacttgtaccctagaagcggactgagacccaaatccataacaggtccaggccccagagccacactggaccaaaacactgattcggaccccgccctgaacccaaaccagactcggacctagaccgagggccgaacaaaaacccaaacacaaaatcaaagttagaaccgaaattggactaagacaggacccagacccgaacccaaactggaaccagaccggaaccacgacatggacctagaatcaagacagggactaggcaacataatagggaccgggaccaaggacccgtccctgacctggacataaacttaagacccagcctgagactcgacacctaaacaggaacaagatcgagacccaagattgggatttggatctggactcggggcttggacctgatccgtagttggtgtctagatttgggacctaaacccagacctgaacctagaaccgcagctagactcaaacctggaccaagaccttgactgaaaccttgtctcgaacccaaacttggaaccgaacacgttccctgtgacccaaaactgaaagcagaccgggacgaggacctatattcagagcgagaaccaaacaaggaactagagtcgaacttaaacccacacctggactgagacccggacccagacctgaagataaacctagactaggactcaggacccgaacccaaacctaaacatggaatcaaactcggggtccaaaacaagggccgagacacagaaccagacccagtcccgaacttgggacccaggacaaaaacaaaaaccaggctggtacccgtgagtgggatttggatcttgacctaagattcgagaattagggtgatacgaattacaccaacagttgtgatgaaacctaacaccaaatatagtagactctaagaattctcaaaatttggaagtggaaccgtgacttaatgcttagttaagcatgaaccttggtatgaaggaataagccaaaaatggtggtggaaatccgtttgataagtcaggttgaatgccacaaggaatactacttgataagtttgaatagttctctcaagaaatcaaaaagaaaacctctcaaacttttattcaaaaataatctaattttccaaagtgtttacaaggctttatatagccaacttacaaccaagaagaaaaggaaactaaaagaaagacaattttccaaataaaacaaaggcagaataatgggaaaacaattaagaagaaagttgtcagaagccttgaaaaacatgatcagccacagcataattctaaattgagtctaagttgagtctactttgattagaagcacaaatatttgttctccttcagtgttgactgcagtctcctcttgttttaaaactttgttgactaagttgtaaagttctcctttaaatctcttggctcgcgccctcatcatcgagccaactggaacatgacttgtttctttagccttggtgtcctcgtcattccc

SEQ ID NO: 305064 - DNA, 1644 bp, Cannabis indica
ctcaagtaatgcactaaatgaaatcccattgcctatagatagcttccattaaaagagatggcagtttcagctttcataagaaaaatgctgctcagatatgcaatcaatcaaaccagcccagcccagcccttttatgatgagaagttcctggtataaacataatgccacagctttgggatgctggatcatttacatcaaagcacaaaagacaatgatgcatattatgatgtgaatctcatgtctaactttaccacccataggctctaccattcaaaggaaaaaaaaattaaaaaaaataaatattgtggtattgccatcagaagggataaggtatgaaattgttctcataaccccagtgtgataaagtaccggaatcaaagcccttgcgcaatttcccaacatcatttggcatattaaactaaacatgaaatcagcccttgttttaaaacagaaatatccaaaaagaaaactcaaattcaaattcaaccatttttaggtgctcatcttcatccttttttccaatccaatccaaaccaaccattttgcttaaatttcatcaaatccaattatagtttggaattttaaacatatggaaaagacccatgattagcatttagtaaaatgaaaatgcatttggtcatatatctgaaaacaataagttatacatacgcatatatacctggagggagggctgaatcggagaaggagaaggaggcaagccgcgcctattgagaaagttaggagagttggatgcggttagggttttctctaactctaatgagtaactttttgtagactcttctctctcaattattttgcttggaaaaaataccccaaactatagcatttgttgacttttgtccattccgtctaaaaaattaatgatttactgatgtcgtaattaaaaaaaatatattttatgattttttttataattttttatttttatattttttaaaagataagtaatattaattttttaaaactataaaattaataaaaaacttagttttaaatttcttaaaaacaaaagaatacctagaactaagtaaatacaaacatagataattatatctaacattcattcaagaaattaaaatatttttttaaaggtgaaacactaataaccaaaattaaaattgaaatatgttaggccttaggattagtaaggtgggctagcatatattaaataaaagggtaattgagtctttgtattgagggtagtgttttggagggaatacaatagtatatatagaatgttaaggggaattgagtggtatgcaatgtttgagtaaatctctatttgcaccaaaggggcctaagggctcctatcatttgtaattgggtttctaatacattcaatatacattttctattgttttgctactgttctattcctacttttgctactgttttattgaattcttgagtgtggagttctcgggtcttatcaattggtatcagagcgagcgtttccggtggacgccgacgacgcgaatggagaaattagaggatcaatggagatcggagtcttatgaagatccctctgaatttaatgcactggaggaccttgcttcgcttttggatcaagtacttctcgggcaagtaaggttactccgcctctcccgcgatctccgaagtcat

SEQ ID NO: 305065 - DNA, 3842 bp, Cannabis indica
actataagaaaaaatttaactaaaaaattatttcggtaactaaaacaaaaaaaggtgtatcggtatatcccttttaaagaagtccaaaattttcctaaaatataaattgttataaaagtgaaaaaaaaaatatattttattctattagtcggatacaagttaatataaaagttatatttcaagaatttatttaacaagcttccggacaaaatttagtgtaaaaagttttgtagcgaaaatactattattctttaaaaaaaaaatgacggttatctagtttatatttagcttaaaagccccaataaaaatgtcattcgaagtataacgacatcaccatatgtagatcactcaacaactcccacaacaaaacacagaaaggagaaccaacaagagctttaggaaacggttacaaacattaaaacaataataatagtacgaggcgtctgtaaatacccacgcagacaaaattaaacaacacacgaaataattcagtcccagaaagaaaaaccaaataaagcacatcatagtaatcattcatcctcagtctccgactcagcactctgaagccaatcaatgaagggttgagtattcttccaaatctgagagtctttgctgcctccttttgatcctccttcaaaccactgaattatgacctcttcctcaaggatgtcagcgtcgtacaatgctttcagaaccagcgcaacttctttcatagagttggatgtcaaccttctgaaaaatgcctccatagctttaagtaatagcagctgacatccctcctcctcagcagcagccacagcgatgtaatttttatatttggccactaccttcgtgaaccctctttcaacaccgtcaaagattgcctcaaacaaaagagtcatcttttcctgagctgattccggagaagacgctagaagggactgcagctgtttggctgaagcgcctttctttatgtttgccttcagttcatcaataagtttcagaggagcaactgagtttccattctgagcactatcacttgttgtggttgctgccttggtcttcttgtctagctcatttgtagaaagcataaccatatcagctgttacagcactcaactgctcttgaatcctttggttaactgcctcgagcgatgtgtcagtttgccactgaacatcatcatcatcatccaattctaccttatcatcagcatagctgtgcggcggtgatgaataaccatcatcagatccacctgctttctttctggaagtgctatatttcgtaatgccatcttttgatgatgtgccctttttcttcacatccttcttcactttctttagttcctcatcagcagcctccccttctttcattcgctctttctcagctcttctcattgccttcttgtctttggatcccttcttctgttcaggtgggttcttaagaatgaaactggtaagcttgtccctcatatccacatcagacacaaacccacatgcagcacacttcagttggagcatctgagtttttgtaatcactatctcagtttcagggtttccacaaccatagcactggacgtatttcttaataaaattttcaagaagtccagctagcttagaagtttcatgggacccgttaacaagagaagttccagttttctcatcaaatttagactgggctccaagctcacaaccaaaatactttgtcgtgtaagatgctggccttgccaaagcctttgcaatatcaaccatgttgaccacattcgtcttaatgccatttcccctgccctcaatttttgtaatcattctgggcatcttataacggtagaaggcatcatcactgtttgatgcacctatgttctgtaaagccatctttcacttcagcaatagagttggaatttaagaacaaaagtggatgtcacagtagagataagctagaatgactataagcagccgaagtgtttccttttaggaatctctcaacaaaaatggattgatcttcagcaaaaagaaaaagctgcatacacttgcaaccacaccaagagtattcctcaaatggcccgagatgcatacagccaacagctgacaaggacctgttcttttttcttgatgaaggacaatactcaccaagcaacccaattgtttccaaaaagaatatggcctgttctgacataaaataaattacaacgttcacaaattcaccttgaaaagcagcagacaacagaaaacctgcaatgtttcacaacaaggatatttcgaattagaactgtaaacatacaagtatttctgataattataaggaaaatgttaaattaaatccagtgaaaaactattaagacaaagatcacaactgatgattagacaacaacacatgtaagatggttatagtgaatcaaagacagtttaaaacacgacgtaactctaccagcatggctgagggcctgagaacaaaaaataaaaaaatgaaaaggtaaactagtagacaatcaatacgagctactgcacacaaattaaactgtggaaagaaaagtagtacaaaaaataaatcaacacacacccattccatatgagaaaaatttacagtcatgcattggttaacttaaatacatcatagtgcattacaataacgcaagacaataaattaagccctcgggaaacggttagtaaataaagaatcccaatagctagtttccctattgcaaaacattgtttgtgtcaataataaaccgcagctcaagtaaaaattaaaactctacaaagaataaactatattgattcaataaaattaaatcaaactaaatatataccaagtacccatagccaaacataaaatactaaaatcaatgccctgaaggtagtgaatgttcatacatgataagagatatcatatatgcgaataaataaacatttgaaaaacaagacccaagaaaatttttgtccatggtagcatacaataaaattaggtgtcccatagttatgctcatcatataaaagtaaatctccatcgcagcataataagctagacagaaatattgagaagagtataaatttggtggaggcatacattttacgaacacgcagcacaacattcttttcttaatttttcttttttccttatatcacgtaaatcataaaaaccctaacatcggctatttccaaatacgagtaaacaaacaaaatcgaaacaatgaaaacgttgacggatcgaaacaaactaaattctaagaaaagagatgataagaaattaagttgaaagtaagataaaagagaactagggatacctgtaattgtaatgagagaagacaagaattagggtttcgattcgatctattgccaaggaaagagcaagagagagaaaaagaaagagaaggagattatgagctgtgagagagagaagggcggcgaaggtgtgtcttatatatgcatagggttggagcgtgaaaggggacaatttcaattttaacaggaaaaaggatattttccaaggaggaaacagcgtgttctacttcaactttacaatctatatattgtctaaaaaaaattgtggcaatattattaattaattcttgaataaaattaaacactacgctctcaaaaaaaattaataaataaataatcactataaatttaaggaaaattctaccatgcactcccttaaaatagatatattgataaattttaagaaatttagaaaagtttaacacgccgaaaactatgttcaaacagtgtgttgcacgcgtgactattttattttatacgcgtgtaaaatagactgtttgaacattattttctatattgtaaattattctaaatttttcaaaattttgtaggatatcttaaatacctataacgtacatgaatatgaaa

SEQ ID NO: 305066 - DNA, 2910 bp, Cannabis indica
ctgatggtacctccaatcaccatcatgatgataaacttgattggaatagctgttgcagtttgcagtaacaatatatagtgtcataccagagtggagcagcttgcttggaggtgttttctttagcttttgggtcttggctcatctttacccctttgcaaaagggctcatgggaagaagaggtaggacaccaactattgtttttgtatggtctggtcttgtggcaatcactatttctcttctttgggtggccattaatcctccatccaacaatgaccaaattgggggctcattccagttcccttgaatacatatacaactgccattgtttttttaaacactttttttctgtgtccaattgttattcaagtttatctcaaaaaaaaaaaaaaaaattgatattcgagttcttagcaggcaagcatatgtagctaattgggtagattctttttgtagatgtaaatttctcttgctattatttactcttgtttgtccatgggaaaaatttacatgtattcatctattcattctgtctagaattattacagtatacattcacaatataaaaattagattcgattaagtctatttgttgtcaatttttttcttggttttttcttgcttaattttagcttcaatcttgtttgtgtaaaccttgaagggagaaagagaagttaaacagagagtgctaaaagaaatattattgatggtcatttcccttgtttaagaaattaatataaaaaggatagtcaaaccactatataatatgatcagttttaggaaattaataattacaaataacaaaatttctggcgatatccgaaaccacgacaaatagttaacgcttcagctaccatggacttgtaaggatcctcaaacaccaaattgtccatgttatgtcatggacatgaaggatagctccaagctgtactttctaagaggcaaaattattagaagcattccttgttgtttgggaagcctttcattcctcataacaattgcctagtcggattatctttttacaagaatataaattgtcttagcgggataaatatgggttttaaggaaaataccaccaaagtacaaggttttacttagaggttgtttgatcgtgttttcagaatagtattttcaaaaataaaaatagaaaataaatttttgtcattttaaaatttgatggtgtttgactcattattgaaaattattattatttttttttacttagaaaaaaacttcaataaccatactacaacatgaacttagctgaccttaagcttgactccagacccgaacctcgaaccctagaccccagacctagaccacaacctagaccccagacttggacatcaaacttggaccgggtctagtgtcggaggtctggatcatggttggagttgggattggggcccgagatctgagtttgggtcagggttcaagttcgaggttggggtttgagtttggggtccaggttcgggtctgtgttctaggtcggggtctaaggttagggtcttaggttcaggttcggggtctggggtctaggttcggtgttcgggtcggggtctaggtctgggtctaggatcggggttcaggttcgggtcgcggtctgagatttagggtttgggaacaggtctgggtttgggtccaagtctggggtctgagtatatgagcgaaaatataaaaaagaaaaagttagacaaaaaactaaaaattgtttatgaacataaaaaacaacattgtgatgtaatctgagttgagattgatgaaatgagctgtgtttgaatacacaagctctgtgatatttatagatagaacaagccactacaatactaattgaattctgttaaataaaggagctgtgaaagagtaacaactcttttctaatcgcacaactcactaactaacaattaactgagaaagagccacttgtcctaactaactatcttcactaacacccccctcaagctatacttggaatgttccaagtaaagcttgttacataaaaactgaaatcgaggagaagacaaaggtttagtaaacaagtctactatttgatcctttgtaggtatatagcaaacttctagctttttcttagcaacttgatctgtaaagtagtggacatcaagctcaatgttcttcgttcttgtgtgaaaaataagattcaaggcaagagattgggcactctgattattacaccataaaacagggggtgttttatggagagttgtgccaagttcagtcaagagagaattaatccacacgagctcagtggttgcagaggcaagagctctgtactcagactctgttgatgatttagctacaactttttgttttctagagctctagctgactagattttcaccatttctactatttgcaatagctttctttcatgttctaaaatcttgattctaaaaagtgtcttacatgtccctgctatacataaaaatcttattagtatttaacaattctatgctgacaacaatgttgtcattaaattcgatattaatcactattttgtcattgataagatcgcgaagcaggtccttctacaagaaactcttaatcaaggtctctacaagctgtctcttccatcatcaactcatcctttcactgcctcttctcgagtcaattcctcattgcatccatctaatgtgcatttaagtacttcttattgttggaaatattttacgattctccttcttgttgattgaattcttcacaatcttccacactatgattgagataccacttgatgtgtgtgggcactcactcattcactcaaggttcaaaaattgaagaagaaaagaagagggaaagtggcggctagaaagttttattctgaaggaatgagatgcatcatctttttcctgaagccatcactacctatttataggtaaccacctaggtttaggt

SEQ ID NO: 305067 - DNA, 1757 bp, Cannabis indica
ttgtttgttaagttgttctagggttagtttagctatcttagttgttttttttattttactgaaacacaatatttttgtaatgttaaaactttaacacattatttttgtaaactttgtacagtaaaaatgtgaaaaatctccgtctcccagtatttttgtaaactttctcctattttacagtatttttgtaggttcccctcacgataagaattatgtagttcatgatttggcaaaatatgtcattcggttaaacgatgagctatcttggtttgaggaggtactgccgccaattgtaaattgttgtatcgttaatcatgtgtgattttgatcactacgtcaaaaaatgcatacattttgtattgttaattaattggagaattttcaaatatactaaaaaacttaagagaaaatatcaaaaatacgtatgttgtttacaaaaatacggattacaagtttgtgagcaacttttacatgtttgcaaaaacttttacatgtttataaatattttttataaaaaagtttagatactgtacatttgtaaataattacttatcaaaaaagtattttttttttttttttgttgctgaataaaacgaaattaattacttatgcggtaaaatgcgaattttctaaaaaaaaaaaaaatggtgtggaatgtaattttatcaaaatttgatatgttaccccctctcagtagaaactgctgtacttcaaccttcagtgtgggtcattgggccaggcaaaggccttctcacaccaccttgggcctcactacttggattgggcaaaacatctcaactaacttggtgatatatatgagttcatcaataaaacatgaaatggtgcctcccattaaattaagaatgatgtaattaatttttttttttgagagaaatgatgtaattaattaatcatattaataattgtcaagctataattattgtatgctttgactagttgtacctctttggaggtttttttgtgcctcttttggaggtttttgtgccttcttgggttgtttttctacttttttttttttatgactattgtatttgaattgtcaagtctcaaaagtttgttcttctttatttgaaatcccacttattaaattcttttatatagatctaagtttaactcttacgttaaatatttaatttgactatattatatgtaatttttcttttattatgggatagtgatggccttcaaataatggagtgttgagagttgagacgttttttttttggaaatttacatgtggacacatgtttgtatatttagttccaataataacttagtttttctaattattaatattatcattactttataccgtttttaaaatttaatccatttcagttgctttttgaacatgctgaaaatagggatgacgtcagcaacagttggatgggacgtgcgtcaggaggcgcagagcacatgatcatagtttttcaaatttttcatatttttttaaatacctccttctgtaaacctcctttgtaaacatattttacaaaactgccttagtcttataaaacatggtacctgttgcatttatttttattttttttctgtaatttcttagtattgtatataatattttagtttacatacagattgtataagttaacgtttattgtatttattgatacaatacatagttatatgtaattgttgtaatgtattattgttaaaatatatacataatagttattatttgatttgtggtttaccagtttaagtttttgtgttttggt

SEQ ID NO: 305068 - DNA, 740 bp, Cannabis indica
aaaattttaattaatcacaatttccataaacctcgttgattagcaatgagctgcacagtacgtttaaaaatcacgtaatacgcctatgctatttagggtgttacacctggtctgtctttgtgatatccgtggtgcatcttgagactgattttggttgtctgcaccaggagcttctgcagcaggtatttcttcagttggttttattgccggtgcatcagttggtgggattatttgctcctccattcctcttccatctatatcatgcatcgaggtagctgaatctgtgtccttggggatatctcataaacacacaagttcgtgctctttgagaaaatgtagttctatgagcagttaaggttgatgcaaaagtaagacagccaaaagattgaaggtgatcataatttggttgtttcttgaaaagcaactcttatggggttttatttttaaggagaagagtaggggttctattgattaaataagtggcagtaagtatgaattcagactaaaattttataggtaatttggcttggaaatataaagcacgtgcagcattcaataagcgttgatgtttcctttcggcaatggcattttgtttaggtgtctcgacacaagtaaattcatgcatgatgccatatttagaaaaaagatctttaaaaaccaattcgggagcattatctgacctaaaaattttgaacatgtcattaaattgagtttgaacatatgataggaatgttgggttt

SEQ ID NO: 305069 - DNA, 1337 bp, Cannabis indica
attcttaacccaatcgacaaaaacattggagccattctttttcaattgagccgagaacccatcaatacaatcttttgcatctaagtgtgacattagattcattctctaaccattgtaaagctacacacaaaagacaaaataaaacattataaactaaagacaccatggagtgaaatgttaagaataatttcggattcagattcagattctccctattagctattgcttgctagctactgccgaaacttggctttattcactcagacttttccttgcactgccacttgtctatcatatcatatcattccatttccataaagagatataaaagaaccattttgtagtaatcagaaacagaccatcagatttgaattggagaaagtcactgatttgtgatgagggatatctcagttgataataatctaatgctctagtcttacacatatatacaacaaacatacggtatatttcttaaggaagaacaaaaaaacaaaacaaaacaaaattcagtggaaaggaaggaaaatggtacctggaactagttttgattcgtgggttccggcaaaacaatgaggagggtaaggatgttcaggaacgtttggatcatgggagtccaagaaaccataaacaggccattttctctcgcagaaagctctggcgagtctcgctgactcatccaccatttcagagatctgcttatcggggaatctaggcgcctatgtttaaccaatttcaaattttcaatcaatgtcccaattaaaacaaaaactcagggttattatcataattatataacagagagagaaaaaagttttaccatatttccagctccgactgtacagaagccattgacgatatcgacaaggacaagaccagttttaacatccccagatatgataaagggttcttgcttaacgggaagctcgtcctgaagcaaatcaatcgtcttcgaagccatttccatcttgctcgctcttgctattgcttctaagacaacaaattttcctcccaataaatattagattgaagaaaaaaaaacccttcaaaattcaactctcacacgtctttaagaaccctttaaaagaaaccattgggttcatttcaaaaaaaacaaaaaagaaagaaaccattggctctcagaagactttgaatggtgagaataaaaatggaagctggccaaaagtatcacagcaaacctacaatgggtccctcgattacccgacaccaattaccaaatctgagtcctctcctactcttgacttgactttgggaaagacaattggtttatttttttattggagaggtgttacactcaaccttttattataatttcttaa

SEQ ID NO: 305070 - DNA, 1225 bp, Cannabis indica
aaacaaaaaggaagagagaaggttcaagttgcagaggtgataaatctaataaaataatagagaacaaactgaacagtataaaaagcgaaagaaactagagaccgtacatcgagggagcacaaatgaacacaaaaatgaagcaaaatagttggataaagacaagaaccaacagatctaatccataagaaaattccaaaacaaaagcataaatgacaaaaaaatacacagaaacatttaaaaggaaaatagaaaaaaaaaatgcaagaaaccaaaacgctcacagtaatatatgtacggacattaatccaaagctacgaaaacacggatgatcaccggaaaaggacaggaacacttacggagcagccgagtctgcgacgagatcagagacgagaacagtagagccagcaagcgagagctcagcagagagaatgagtggcgtctcttgctcggccttacgcttagagtgcatggtccggccaacctcctcagctccaaacgcagccttgtaaaactgtacggcgtcattagccttaggtgcctcaactgatatctgaggcttcacggccgtgaaagtgacggtagatacggcaggtgctgctgcgtccttctcgacacctcctccgttctggacctcctgttgagccatggaaggctaaaaagagagaagagaaaacgaagattgtagagaaagaaagaagagaatcgaaaccctaggagagagaaattagagtttctggataacgaaaatggcgtggggtttgggttgagagtgtggtggggtacttatagaagcggggaagcgcaaccgtcagtgctgtgtgtgtgaggatagaaccggtaattaagacaaaattgttaaattacgcaataacccctaattttttgtataatttactaattatgccactttctctcttggtgcttttccctcgaataaacgcctaaagcttgtcacgcactccaactaagtcgtttcagtaaactcttctatgctatttactgtccggttcccttctttactgtactgtactttttatataatattaattaattaatttcccaacttttgtaaacaataaataaattaatctagttcattgttaaaaatatatatatatttattaatctaacctggctaatattaaaagaaattaaaaatatatagaaatcaagttgtgtgatgattaaaattaatttgtttatttttatttttgaactttttttt

SEQ ID NO: 305071 - DNA, 2233 bp, Cannabis indica
agtctctttcaagcaaatataaggtcatcatttatttctcaatatatattagtttaattcatatttataaattttttttttcttcaattataaggcaattgatcacccttctctcacaatcactataaaaaatagttacttttagttagaaccttttagtcataataaaatattatttgtaaccaaaacataacatttagttataagttgttactaatttagttttagtcacaacaagtatcgtgactaaaaacacattttaattacaacaaattgtaatttttgtgactaatacctttagttacggaatttttaatcacaacataagaataatattatatagttaattataatttttttacttttaatcacaaattttattgtgactaaaagtaagatttttttatagtgaatagtgaccaattattaacaacgataatataattattagattgaagactttttaaggctatagcgaggacggaaagtcccatgttgcgatcgtcccagttgtgattgcatagtaacaatcaatatgttgacctaacttatgtactaattaaaatatgtaatgaaaaatttatattaattattactaaagtattttatgtttaattatatatttttttaatatataatatgtatatatttataccatgtgtagggagaaccttatacaagtcgagtaaaaaaactcgacgaagatgtgaaaaggatgctagttgagatggaaaactctttagctcaacttgaactcattgacacgttacaaagacttggagtatcttatcgttttgagaatgaaataaatactattttaaaagaaaaatatgtcaatattaatggtaatattaataaccctaattataatttatatgccactgctcttgaatttaggcttctacgtcaacatggttatgctgtacctcaaggtatatatacatatattaattaaatatatataaatatttatgataaaaggcaaaaagaaaaaaaaaaaaacttataatacttcaatttgattgaaatcggaattttcatagaattgggaaataatcatcgaaaatttttattacgacttgtaaatttttgtataaaatagctaacaatgattcaattaatttaactaattaatcatattatttcaaactacaaactaaataaatttttgtaaaataattaataattgctcgatctgtgttattagcagagacttttaattattttaaggacgagacaggaaaattcaaaacaaacataagtggtgatatcatgggagtattggccttatatgaagcttcattctatgagaaaaaaggcgaaagcattttagaggaagctagaattttcacaactgaatgtctcaaaaactacacaataatgatatcagagcaaaagaaattgatgattaataataattatgattattattacgatattgaagtagtgaatcatgctttggagctcccacttcatcgaaggaccacaagaatagaagctaagtggttcatcgatatgtacaagaaaaaacaagacatgaatcctattttgcttgagtttgccaaactcgatttcaacatgatacaatcaacacatcatgaagatttgaaacatatattcaggtaatgatgattattatcatcataattaaatgaaaggttatattattattaatattaatatattttatgcattcataattttttattaatacttggtttattatatataaaaatatataattaaggtggtggaggcatactaaacttggtgagaaattgaattttgcaagagatcgattgatggaatgttttttatgaagttggaataagatttgagccaaaattcagttattttagaacaacaactgtcaaattacttgagctaataacattaattgatgatatatatgatgtttatggaacattagatgaattagagcttttcaccaaagctattgagaggttagtatttattaataaaaataaataaatatttacataattagttaattaattaagttgtgttacttattataaaggattaataatataaaattaattatttgtagttcaattacttgattatataaaattattatatatatatatatatataccattatgcatgcatgcacgcgacttttatggggtgtaagttggactaatgcacaggggcctaaaaaaataaagggcaaaaaaaaaaaaaataaagagtctaatatatatttttt

SEQ ID NO: 305072 - DNA, 1448 bp, Cannabis indica
tggtaaaataatttccaataaaaacttcattggaaaagttagaaatctctatataattccaaaagcatagggggattaggtttcagatccctgaagttatttaacaaagccatgctggctaagcaagcttggcgaatccaaacaaaccaatcacccctccttactactcttttcaaggccaaatatttccctcggactacctttttggattcttccttgggccactccccttcttatgtttggcagagtatacactggggaaaatccctcctaaaagatggtctctgcaaaagaattggtaagggaaccaccactagaattcttgaggatcattggattcctaattgtcgttttcttcccatttccctcccaagtcaccttgcccatgtctctgatttactcctctctaacggtgactggaacattccccttcttcacagatacttcccgcaggacattatcagtgaaatcctctgacaatacccaagttgactcttactattggcagcataccccctcgggccattactctgttaaaactggttatcatgttgcaaaaacctccacaaacactgcccaaccctcctcttccagtactgatactcttagactctggtggaattccctttggggcctttaaatcccccctaaaataaaacatttcatctatcgtctgtctcataactccatacctactgcagaaaaatctctataacatgaaatatcttaactctcccatatgtcctcgttgtcaccatttcactgagtctgtccaacatgctttgtttgattgcaaggatatgaaaaaggtgtggtcaggtacgcccattaaacatgctctgaatgatttaagaaacttacacatactagatatacttttatatattcagaagaacttttcacctaaatcttttaaccttttcattttcatattgtggaagttttggaatagtaggaatgcgtgtgttatcaggaattactgtgagaatcccagcaggatttagcaggatgctcaagaatatttggccttttaccagcaatcccaacaacataataggaatcaggctcagacatcctcccatcagaatgaagtgtaatggtcatttccaactataggcactccgatggtgtaaggacaatcatattaacattcatcaagttgaagttgactgtaaaaatctagtcactgatcttcaagcacaagacaacattctatcgagctagcgattgtaaattcaattcaacaggtgttatcttcgtttcccgctgtttcccttcatcatattggtcgacaagggaatacaggtgcacacaacttggctcagatggctttagaattagataacacttggtgttggaatggtcatgacccatatcccatccctttgtaatctctcttttgggtcattccatctcaaaaaaaaaaaaaaaacaaaaaacgaaaccat

SEQ ID NO: 305073 - DNA, 4544 bp, Cannabis indica
gagggaacgtctgagagagggatttaatttagggggtattttaggaaacttttaaaattataggaataaatttgtacaaattataaaggggtataaattttgatataggttgtattattagggtcaaaaattgaaatttcccaagtaatattaccaatcttgtataataaatataatctacttaaaattcgtgtcattgtttgaattgaagtcatacaactcgtaacactagaatatcaaatatactaagtgaaactttctattaaatacacttggtaagaaaaactttcttatatgccacgtaagttaaataagtagagtgataaaattccatattgttcatgtgacaaatcacggtctccccatttcagaaaccccaaactcctaagacaaacccatcactactcctcaccaagtccaactacaaaatccttatcaattcttgggtctccttgagttttgtctacccattattcaaccttgtaaatatctttgtctactcctaatttaaatgtttttctactttaatggctcagaaatgacatttggatataatggcatttcacctgttcgatgaaatgcctcactcacaattatatatgcttcgtaatatttacatgattgttattgttagttactgatcaaagcactcatttttattctttctagttttggttttttcaggtttactgtctgttcaagaaaaaacaaaccgagtgggggtcatcatgtttgggactgcagtaaggtattttgccacaaaaccaaagccaaaaatgaaacccatcgagctcaaaaccccacctgagcagacccagacaatcacagagtcatcttcgacattgttaaggagcatggcccactcactattgcccaaacttgggatcacgttaaggtattttttgctttattataaacttaaaactattgtctttcattctatttttgtttactttttcaaaacaaatcctcaatatgggggttaaggattctttgggtctcactctaagtatcccaaatttggtttttattttcaggaagttgggcttagaggactgacgagtaagagacatatgaagatagtattgagatggatgagagaaagacagaagctcagacaaatatgcaaccatgttggacctcacaagcagtttctttatacaacttggttcactaaacacaacaccaccaccaccaccaaccacaacaaaacagtaaatgatcctccaaaacccaagtctctttgaaacttgtctactatttttgaaacaataaagactcttgttagttgttacacacattatatgtttaaacttgttgtggagtgtttgaattttgaatgtaaatttggtgtttggtgttcgttgtttgatgccacagtacagattactaagaaaccagatgctttgacatggctttaactttcaaagcacattatatataaaaataaataaataaaccaatcccacaaagcagaaaattacaacaaaaacaaatgtctacttagtcaacgctatgcaagaaaaatttgtgttacttgtagttgcatcaactcttctatcaacaggctactgtctttatctctttatatgtacatcatgtacaaccctttcagtacagataagagtagccaacatgaaaggacgataatggtatatctgatttctctgtataatagttaacattccagatgaatgaaactagtagcattcaccagtcaccaccactagaattaagggaaatgagttaagaatctgtgtggctcttcgacctgcgcaggacttccttcagaacagtcgcaattctatctgccatgtgatgttctaaaaacctctccttcaccttttcgtatcctctcttccccatcgtaagccttctctcgacatgggtggcaagcttgactatattttttgcaagaggagtaactccttcctttccagcagggtgtaagaaacccgttgttccgttcactacaatctctgtggtgcctcctgctgcagttccctgatgattttgttttttgggaaacaggaaaaggaagttaaattgttagaaaagttgatatgctttcagatatgacaaaagctgcaagtggcaagtccattaccagtacaggaagctgaaatgccattgcttcaatggttatcctgccaaaacattcacctcgtgcctacacgcattagagtaaagtaagtaaataagaagataaaaccgcaagagctaaaatgatgctacaagcatagacagactacctgagaattttgaacaagaacatcaattgcagctaaatatggagcaactgtcagagttttgttcacgaaatgaacacgatcttgaattttcttctgaattacatagctacgtagttctgattcgaacttggtctgagcattcatgtcgcttcccacaattacggcatgcatcattggcacctgcagctttttctcttgaatcatttgcaaactttcgtagaaggaacgcagaaatagatcctgcccttttccacgcgaaacacctgtattgacatactattagtactaagtactaacaacacaaatccaaactagcaacaacaataacctttaacatcaaataatatcactctagccttcatgttcaattgtgcagaagccaaattaactactaatgtcatcaacaagactatttaaattttgtaacttaactagtgtcttgatcaaattaacagaagtatgttctatggcaaagtaaaataagtgttgacagtttggtatgcatactgtttatgatggcaaagactatatcttcacttcgcactccaagggattcccggacgtgctcacgcagaacccttttcgctacacgatcttcagcgacatccattagttccttgctgtttccaaggtgaacaacatatgtatgcggcattttgatcctgcaaagaaaatatgatcatctaactattgtttcaccattgataaaaaggaaaaactactcagagaaattcgttaatccaatcttaaactattttatatgaacctcaaacgctctcgggtcctgttctgccaatattcagccgttacatgggaatcaatcatagcaccagaaactaaaggcagatgtttgacataatctaatttgaagtaatgtcctcgcatctcatggatccaccataagactttcgggagaacacggacaacatgttccttgagaactaagtctaaccatttcccagaaacagcagtgttcaaaacaactaagtcagctttcagagctgtatccacagcttcttgaccccttgcagaaaacacctaatcatacaaaattacataataaaaaatataaaaccaacacttttatgtctaaaaaaacagagacaaccctcaaatcaaaaaccatgtttgaaatcattacctgaactcctctattcaacatcttatgctctaaactgtataccacttcacctgtatcaactggcttttgaattgtaacccaataaatttcagcaccaacacttcttaacagaaatgctaactccatcagcaataaaggtcctcctgtaagaacagtaacccatatataaatatatatatatatgtatatataaatacgaaagtcgtcacctttcctaagaacaaaatcataaaacgaaaaacccataaagataaaacgcaaaatgccaacgaatcgaaagattaccagaaagagagagctcatgggaaaccaataaaaccagcttagatttcataaacttaagtgggtttggactagctcccacgatgaaatcagagtagggtaccgtactgggcctcttatcgacgacatcaaggttccgatcgcaagtatcgaaggcggctctgataaagaaggcgatcaaggtagagaccgaaagcatgacaaggaatgccagaagccaccgcttctgcgaggcgacccaaccaacagagtgtttggccatctgtgagagaactcgaaaactgaacaaagcttcctccctaaactgagtttccgcattctagggtttggatttgggactggaaatggtgagttttacacatttggctaaatggggtggtttgagatgaaaatgaatgacgtttcagagagttttggggttaaagatggaaactttgcattacatttgggtagagacagattagaatatattaaatttgattgattttgattgaacagaggaagaagaagaagatgcaccaatttcaattgggttgagatttaaagggcaagggaaggctcagtggtcgtattctcagagaacgaacattcctctttagttgaaaagatgacaattttgtgtaattccatcattttattttaacttttttttctttttcttttgtttttctcgctggaatattatactttcggagaacacttttcctttcttttcttttttctattgtaataaatataaagaaaaagaaaaaatgctactattttctattgaaatttttacatgaaaaatccattttacacaatttattacaaaaatattcctacacgtctacattaacttttttacttaccatgtttgttttattaca

SEQ ID NO: 305074 - DNA, 2431 bp, Cannabis indica
gattgtaaaaaaaaattatcaaaatagtttaccaattaattgaaattgttgttttttttcataaataagcataacagtagaaaatagtaagcaaattattaaaagcacggagaaatctaactgtaactagttgaataaaaaaatgagtttgtggcggagatgtaggagattgtattgaagtgaaaatttcacgtaatattaggttgggacaaactgaaaccttaatttttaaaaaaaaaatataaaagagaaagatgcgtcaaacggttgttgcaaaataataattagatgtaatttttaaaagtttattttagatagagtggaaatctaaattttgtaccaaaaaaaaatagaattttattataaatattatagttaaatggtttaaatgttaaaaatattataataggaacctaaatgtaaaaataaaattatttataaatattaattgttaaaaggattttattaaatatttaaattaaaattaattattttaaaaaattattaattatgattaatttaattctaaaaaaataatttttatacatcggtaattttttattataagtaaaaaaaatataatcatcatagttataataaaaatgtaacggttaaataatcatccctttatataaataataattggtttaattgattcaagagggaaaacaaaagatgcttttgccgacaagaaaatatattggtagatttagaacttagagctatcattttgactacttatttattttttaggggatcatttttactattagcccctctctcacacacacatcaaatattttgtagaaaaattggtattattaatgtctttctcagcttcttttttaccctctcacctcatgaaaagataatgttgttaactcaaagtgacacctgtccctatccaactcaaatgctccaaaaagttatacctcttttcctcacaaaaacccactactactactactacaccactaattattcaaccctatttctcatgtcattagaagaagaagaagaagaagaaaaacaaaacacaatacagtagagataaccaattaattacccaaaaaaatatttcttagtattaaatgaatttattttaattaaataaaaattaaagaatgaaaggaagtggtgaatggtgatcagattactccaccaccaaaccataatgtttttgtctcatctctagtgcacaaaagctacaagtaaaaaaaaaaatggcgggaagagcgaggtagtccgtacaaagatcccgcaatctacggtcaccatgatggaatgggaccctctcaggtagttgacacgtgcgccatcccaagtggtccccacaagactcgtgcacccacgtggacaaacgtactagctgtcggcaacagggcatgcctcgattactgagccagggcctctcctcctattcgacacgtggccaatgaattgaccgttggatggatgagtcgtggagagtactgtttattccgtacgaggaggagttgggtattgtgcctattttaatttgtatctatctttggccgttacctccttttgccatatatagggggaacgaaatcgaatgaaataaaaaaagaaatcgaatgggaataaaaataaaatatttacattacttaattaattacaatggattatcatatctccacactcaggggaccacttcttttttttttagggaaaccttttttttaaggaaaaaaaattgttggtttgtttagggaattgatttttcgtttagggaattgctttattgctttgtttattataaagtattttaattaatgattcattaatgtgtagttggaacaatgaagaacatgtgggctagtgtataacctgttgtgttgaccaagtatccatcactagcccaatagctagctatctcatcaatctctttttttttcttttctttgttctttcttctaacgaaaattacaataaaaattgatgaaaaaatataatcatattttcatctttggcaatttgtatttgtttttcttttcacttaatatcacaaacttcttattggttattctcattagagttataatatattttggatttaagcttttaaaataagaagtatgaggaacctcataactcggtaacatattcaagtttattatgctataaagttataaaccaatttgcacattacaaataccttaccttaaaattgctacttgtgagaagagaatattgcagagattatctacttgtaattaaatactataaattctaagttttaaagttaattacaaaataacttgagcaaatgggtttacccgtaattaaagcttgtgaaaattacatgaaatatgggatttcataacaaagttagaaaaatatggcatttttaggtttgccactcttctatggcatttttttcacattttaagatttttttatggtattt

SEQ ID NO: 305075 - DNA, 2570 bp, Cannabis indica
tggaataaaagtgcattagattagtaattttaacagtaatctactttttcttttcttaaaaaaaacaacactattattaccaaacaacccctagacttttatctaattttgacaaactcccaaatttgaaaaaatatatagcattatacaacagtgcattagagataccattattaattattttctttttcttactcacattattgtagtacaaccaaattgtcccccccataaaaggccacaacctatcaaatattttacacatatagactctataaacaatttaaatacagaaagtgaaggaaaaaaatatatatttagatcaaaagagtgtagattttttattttacaaaaaaataaataaaaaagagtgcagattttttgtatgaaaaagtgcaacccccactaatttttttttttaaaaaaataataaaataaataaaaaaaaatgcaatattttggaaaaacttaaataaaaggtgggtagtgggtagcctatctattaaacaatatgcagagaaatgcaaccatcaaagacccctccactagcttgtttggtgggaaaattgtctacatacctacattaagtttttattttttttttaattttttatacatatgaataaatataatttatgtttatgacaataatttctatatacacttttgcaaaaaaatcaaaatcaaaattatctattatgatatgtgtactacttttattataggttcataaatgatgaatggagagatagctcggcccatttctttacaaaaatatcaatatctaattaatatcttatatagtacaactctttaataatttattgttggcttcatttttcttttgtcattcaagttttgtaaggtctttgtttaatttagattgttaagaattgtaccttttatagtctttttatttatttttgtgttctttctttttctttgatttttttttctttttttgaaaataatgtatgatatattaaaagttgttagaccaattggtcattacaatcaagttcattggaatagagttaacatcactattaccaatgatatccaaacccaaagcttaattcacaatattatgggcaaatagtatttaacacgagaaatttagaaaaattatatcccaaaaataatttaaaagaatttaaacaagcagtaatataattacatttctcatctactattggtatcgttgatagcattgattactatttcaaaatcactctctacgatcccataagagatgccctagctaaagaacacaaaaataaattaataaatatactaaaaaagtatatttttttggtagttttggactatttatagatatggataattaaattgtggcataagaacttaaaattttacatttgtaagtgtcataaatccaataatttttgttagcagtataagtactcaatatttgtaaaactataatttttcttatattttattagtacataatttgaatttttttaaaaaaaattaatttgaaagtaactgacattacatgtttctgtctatacacaataatatagaatttgagacttaaatatttattgtttaaaataataataaagtatatatcgacgaaactgcaaaaaaataaaacttttacaaatattagaaaaacttatgccgctaaaaaaatattagaattatgccgcttacatttaaaattttgagtacttatattattatttactctattaataaatataaaagtatgtttgctacattcataaaatttgagaaattcatgccaatatatcttaaaataaaataaataaataaataaagtcaactgaatatgggactaagggcgactcagatcattaacatttccacacttatatatattgatgacttacatttttttttgtttgtgataattgtatcacaagagtcatccttttttgcacttattgacttagctaaaaacaattaagtgtaaaatattaaaatatgaatcatcacccaaaaaaaaattgatgtggacggtacatagttgtatatatattcattacattgtcccaaaaaaaagattattcaaaccttattataagaattccattattacttgatgttatggttcagttcagtgcactcgaccgatatatatggtacatatggaaaatgaataaaaaatgtatcataattctcataaaaataataagaaaaaaaaatattatgtcatatttacaaattattcaaatgaaaataataaaaaaaacatatttttataaattatatgatttgatgaagagatagagaatatatatgtggacaaatatgtatcatgatatttatatatataaatgtattaattagttgatttctccctaatataagagacctaattttcaaactctgcaaaatcatggaaatgtgtagctattataagctagccttctcaattcttataaatgtatatacatgagttttttacaatattattatttaatttaatatagcatttaaaaaaaaataagaaaaagaaaaacaaactaataaacctccttatgacaacaaactatatatatattaaattatatatatat

SEQ ID NO: 305076 - DNA, 1364 bp, Cannabis indica
aaaaaattaaatttaaaagtattataattataaactactttggagtcgattctatgctaatttgaaatttaagcaaaaataaaaaataggactaagtgaaaaagttaggttattaagaattgcactgaattccccataatcaaaataaaagaggataggtcaaggagtttaatcaaattaccacttatctgtaatatatacattgatttgatattataagtattaattttttttttatgttattactaattttatattattttatttttttcgaaatagaaatctgagcggtggaaggcttaaggcggctgtttccttcgtctcactttaggaccggaaatttgaaatctcaattcgttgctcgggcatatatcccatttcaattataaggaggatagatattatagtaataaagagtccaaaggatgtcaacaaaattaaattgaattttgtagacatcctagtccaccagccaaagcagattcttataggtctgatcaatcaacataattgggtgattttgagccttttaataatatatttatatttaattttatttgtatatacatgttacttgttacacccttttaacaaaagcctaggattctctttaaatgtattcttttaataccatacccacgactttgaaaaagaactacatattattaattattacattaatatataaattcgtttcaaataatacatagtctttttttctgtacataattatatattaccatccattaatgacattaaaaaggcttgatgattgtttaattcatctttttctcaaatgaaaaccgccaaaaaaactaaatcgaactcaactcaaatcgtcaaaacatatgaaataagtacactgcacattagatctaatagcaatttcaatgttctaatgtcaattaatctgtgtaatcgtatatatatacatacatacatttatatatttcaattgaagatagtagaaatttcctttaaagagagaaagggctaaagtgtatatacatggtcaataaagggaccgattaatattgtaaaattcgtataacaggtctatgctgcataggggtgtttattggatcacatttaatatttttaggcctatctagatccgatccaattatatattagatgttagattttaccatccgatccgattcaattaatttatatcatccaattgatctaactttcattggatgttggattggatcggttctatccattggatgtatttcatatatattaatttgtttaatttgggtttatctaatattttagacctagtattggatccatccaattttttaaaaaaaaatagtaaaattttaatgttaattttcatatatacatatagattt

SEQ ID NO: 305077 - DNA, 1112 bp, Cannabis indica
tttttttttttttaattttaaagccctcgattaaatattaccattaattatctgtgagaacttaaatatcttatataaaatataaaggtcgacgttattcttttcatatgatctattaattttaaactaaaactcatatgtattaccatacactataataataacaacttgtgactatatgacaatattgttttagtttcataagttacaaataaatttttattatgataatttttttttctcttgaagatattatagattaatgaacaagttcattacaacattaacattaatatatcagtaaataataataaaaaaaacatatataaatgattttagtagatgaatgttgctaaggtttaaggttcatcactatggatcaatctattaataattagtactcatctttaaaatttgaatgatcaattgctagattcatttcttgaattgagattaatacataattcgatcgaataatgttcataaaattatcctcgtgtgttttaacaattgatggttctagaattcattcataattaatcttattagtcatttgatgtgtaatataagaattaacaattatgacaagatttacgttatgtttattggtttgcacttaataatgaataataataataataataacacacactctttgtcaaaagcttaaatcattaatagtactttgttttattaacaattcagaaaataataattaataagtaaacaaatcacacatattcaatttgtaatctaatgatataataatatctctaacaaatgaaaattgcggcttattagagaatctataataataaccttgcacataataactaaaaactccacaaattagaaaattaacgatcgagctagggttttaccttcatatatatatttttcttttgattactttcttgacatatttaaaggtattttagatatatatgtcaaagactttatcaaatcagagttagaatataggggtgtgcagaaagtcattcaatctaatcccaaccaaccgatccaatcacaaccgatccaatagaatcggatatccaatcataattggatcggatcggatgcaaattttaaaattcaattggatcggatcg

SEQ ID NO: 305078 - DNA, 2539 bp, Cannabis indica
tattttgctaaatgctgaaaaaaaaaaattggtaactgattactagttattaaattttgaacttttatactacaggcgacatgtcgcttggccaaattttagcatggactttttaacgttttatgaacattatgcttggctaagaggtaccataacccccatatcaatcatttatgtccataaactcccaaacattgctaacaaccaaataattatggtggtcattcatgttcaaatgagagtgaaaactctataaatagagtttgtagtgttcacttgaaaattttgtggaatacactttattttaattagaaccttgtgaagatatcctcatctttagacactaaactcagcatatgaggcttgaaaatccataagagcatttctagagttttctttaaaagaagaaataatttttaagacaaaggtcctagctttggtcaagccaatgatcttgatgtgttgtttcttctcaaattttcttggagtcttgatgtaatacttttatttgtattttaaatatttttattataatcctcttattcccttatataattccctaatataatgaggagatctccaaattttatttgtatatattttaacttaaaagcaagttaagaattataagatttttgggtgtggtggttgtgttatcttgagtttatcttaaaggcaatgattcaagtcctcataatgctattttgtttttaaatatatgtaatttattcttaaaaataaatgagctaaattacaattttttttttttgttaattgttatttttttaattttatttactactcactacaaaaaattttatttttagtcataataaaatttgtgactaaaagtaaaaaaatagtaattaattataaattatttttcttatatatgttgtgactaaatgtatttttagtcatattatttgttgtgaataaaaccaaattatagtgacaatgtgtatctaaatactatattttagttacaagtaaatttttactatgattaaaagttaaatttagtcacaaaaaaaaatttatatttataaactaactaaaaaattgtcactaaaagtagatattttttgtagtgactacataaccataaattcatacaattaaaataagcacaaaaagtgttaacttcaaaaaaaaaagaaaaaaaaaaaacctataccccaagtagcttaaattttgggtctgccattgattacgctaataagaaaaacaatgacgcgtgcagtaaaatatttgaatattattttattcggcattataagttatttaaaattttctaaaaaattacaattaattttaaataactagaactttcttaatagatacactctttagttgatgtactagaatttttttagatttttattatttttccattttctaagtttgacatgagattgtatttctttccttgtttttccttacttcaagagtggtggtatttgtttttacctacttattgcctatgtgcttcaatagtaggtcaagtcctcatctgtaatttcattttgattcattatgttatgcctatataataaagcaaatatagtcaaagtaattaaacaataatgtaaacaaagattaatgttactaggctttcattcttgcatattataatgttatgatcacattaataatgtttatatttcttataggcacaaaaataataaatttgtggaagatgccttctgataggaaaaaataaatgttagaatctcttggcaattaaaagaacacttgttttatataccaccttaccttgattaccttatcaaccaataatcacaataatatgtctatgtatgttaaaaatatatatatatgcacaacacacacattactcaatacaaaaacgaaagtcacgtgtgtgatataatatataactttactatatgggaccaaatataaacatgtacacccaatatctctttattcccaataatttcatgaatgaataagctctagtttataccaactctctaccaagcaaataataaaaataaataaatacagatccaagtgagaatttggcacaaacaaacaaacattcttaatcggggagaagaaacctcttatatctgttcgatatacagtattaaacaaaatgatttcatccaatttttcaatcagtaggttatatattctacgatatttttactacatatggttcaatattaatatattaaaaaacatgatcgagaaaataaatgtatgtttggcatcataaataaaaaattatttttttaaaaaataaataaaaaactattaatgaaaatagttaggcatgtttagtcttattatttgaaaacaattttcacattacaagatttcaaaaacaagaattatgagaacaacaaaatgttattttctgttttaaaaaataattcacttttggttaatatttttttttcactttgtctcatatcattatagtcatcattttttatattgttttctctcatcgcaatctctatcattattttcttacattattttctcacactttctctctcattatttt

SEQ ID NO: 305079 - DNA, 1891 bp, Cannabis indica
tactaaaattagaaaaaagtccttaaatccaacaatctcaatagttcagggggtattttcaatgaccttaaaagttcagggagtatgatttggtacatgtcaaagttcagggggtaaaaatcctaattagccaaaaaaatatataatttgtggcctaaagcacaaacctagccagcctatgttcaggactgagcccggatgttaactaagaaaagtctcaaagatggaagaactccatttgcatagccttagaatgatgtagattttacaacaaataaacatatttaagatatagaatttaaaaatatctttcattccaaatttaacattaccatttatacttaaattacatgtaaatggtctaaaattatatcttcaagacctctagagtatcatcttttacacaaatagttacttatataagtaccaaaaacaaaaaggtggagaggcctttagtataatcttttactcaaatagttacttatatttttatacacactatcaaatgaacatggttaagaaaactttgagcaatgagatttgagtgtcttatctcttttggaagttaaggaacttgataccataagcaaagacaaagaagaagagaagaacccaaccaagatgagcaaatatgacatatataagaaagtcatactcaaagcctaaaaattctttgaggaactcatccactgcctttggttttgcacccgaaatttcgattagagtcttcttgtcaccaatttgggatgtgaaaatgccatatattgtccatgctactggtgaacaccagtagtaccacctccaccagattggaattagctgcaattatcattaaaaaaaaagactcaaaagtgttaagaacttgttttgatgttattgtttggttcacaaaaagtgtcataatattatgttataatatgaatgtgacaaagctgcatcttcttatttgtaatcttgagtttggcttgtaaattggtaaaaatagtacccttaactcaaatttgaagtaaactaaaaaaatggtctgaatttttgttgttggtcttatgattggatttgtgagaggagaaagtggaaaaatgagatggaagagaccaaatggttgagttgggtgtaccatattttttaaccaatttacaaagtatagggtcctatttgtaattgattgaaattgagattaaagaagaaattacaaattttatgggttttatactttttgtacaaaaatatggtttttttttcaaaaggttattttatggaaaaattgaagaaaaagttaaaaaatataagaaaattgagtaaaggtaactaggtactcttatgagtaagggttactattatcaaagggtaactaggtaccttatgctattttttttcatatatttttttattttattttttaaattttccataaaataacttttttaagaaaaagccatatttttacaaacttatactttaaaaaccataaaaaccaaaaccccccttaaaaaaaagcacatggaactaaaattgtataaacctcaaaaattattgacactaaagccctttaacatgtaaaactactttccaaacgattggtatgagagttagacttggtgagaataagaatgtcaaactcaacccatgtctgcagggccggccctgaaaatatatgggcccaagacgaattaaattttggggcctcaaaaatatatataaaaaaatatcaaaagaagagtgttatgagatttgaacccatgaccttggacattatgccatccacctcaaccaactaagctatgaatatttgttacttataatacacttaaatttttctttaataaaagcctaatatttttttattttttattttgggcccccgaaaagtgtgggccctaggcacgggcct

SEQ ID NO: 305080 - DNA, 2744 bp, Cannabis indica
aaaatgaaggatcgatgcatatgtatatacagaaaagagcaagagaagagtgtcatgtatatataatcttcaaataaccagagaaactctcttgccttatttcaaaagatagaagtattatattggacttttcgtggtccactcactactataacctacgttcatatctaatatttgaatatatctaccaacttattaattttgttcttggcaattattacttgtatagtgtatagtgatccccacatctctatctctctccttctaactttacctcacgagttccattatttttaataaagttaattgttgctcatatcgaatcaaattataaagagagatgcaatattaggtcataatcttaattaattcatgaaaaattacattttcatgccttttttaggagaagaaagttaccttaaaaataattaattacaaatatactgtattcaattttcgtaaaatactatttgcaattatttataaatttgaaaaagtttttttttttccttaaatttatgttgtaaggtaaatttgtaaaagttgtttacacactactaaagaccctatctcgatgggcctccccaaaattgatttatcctaacagttaatgctcgccgaaaattagttgtcgagattgaaaaatgtactaatctcagtaatttatgtttgctgagattgctaatcctgtctcaatggtattttgaagcccatcgagattgataaaattatgacacatttatgaccatatgttgatgccttttcaccactgaaattaagtccaatctcgatgagtaccaatagaccgatgaaattggtggctttagtggtcaatttggaaacttttaggtactggaactgagaatgaccttttttagcgatccgcatgaccaccagacctgttgagactggtaaaaatagggagtctttatatttttatttgttaaaattctctaactttccaactccaaatcacaaaagtaacatcaagacgcatttaggtcttagaaatggtaaaactcaaaagaaattcatgcgtccacaaattctttaaacaacaacccaattactcagcccaacctaaattaatcagcaccctcaaaccctagtatacatcaaaaaaaccttcaagatacactcacacacacattcacaatggaaaacttagggcttctagatcaaattcacacacatagatcacgataacaatcaaacagagaaattagagagattagggtaagagtaattgtggtgttttaatcacctcaaaaataatcaagaacacaaaattactattagtgcaataacatgaactaacaaattaagagattaatgaaaacagaaatcaaatcacactaatttaacgaggttcaatcagttgcttggtagtggcaactgtctacttcctgaatggaacaacctttggctttaatctttaatgattcacacttgatattgctacaatggtgataatcaccaacaggtatgaactcgcaagaggatcaagttcatatctttatttatgtacatagagaatttagaagaggaggatgaagaagttttgaaaagggggttgtctctgactgtagaagaggttggtatttaaaggcaatgtctaagagtgttgaagagacagtaactaaatactaatcggacataactaactttaactaacaccacaaatccacctttagttgaagttagtgaaatcagtattgaatagactattccaacagcctctaagggtactagctgctagtgtctatacttagcaggtttaggcaatgcctaagcttgctaatagagacccctttggtgagcatttcagctggattgttcttagtattcactttgcttacttgcacttcatttctgctaatgatgtcttgaatgaaatgcattttgatgtcaatgtattttgacctctcatgaaacaagggatttttcatcaaatgtaggacacttttattatcacattacactgtgatattttcttaattgaagccagttccctagttaagcctttcacccatatgtcttctttgattgattcagtagaatacatagctactatcttttgtagggttaatttcagacttatgcatccactttgagctgtgaaaacataaattgtaagtgatctcctaatgtttatgtaccaagcataatcactatccacataccctgcaacttccccttttggattgcaactagcataataatctaaataagtgtcaatggttcctttaatctcattatccattttagagcttcccaattgtattctccaaggtcagatataaacatgcttgggatgctcatggcatgtgctagatctggacttgtacaaacaacggtatacactaggcttcccactgcacttgcatatggcacactatctaggatctttctttcctcctctgtttgaggtgactgatcttatgagagtttgaagtgagcagccaaaagaatggtggttggttaggcactgctcatgttgaatttgctcataaccttttttaaataagtctttcgtgatagacagatcttcccaagcctttttcttgtgatttttatacactacaacatttaacactaatagcggcggacctctccgccgctattagtctcatttctggccgctaaagggtaatagcggcggacctcggccgctattggtccgccgctattgcttggccgctattaatagtattagcggccaaaaacagggtccgccgctaata

SEQ ID NO: 305081 - DNA, 2252 bp, Cannabis indica
cagatctctgataacataagttcctcaaaattgaaaaaaggagagtcttgagataatctgatacaacaagaaaacaaacaattaagaaacatcaactcaagattcatataccaaagtcacaatctttccatagaggaaaaaaaaagtcttctcatccaataaaatgagtacaaaaaagattaaattcttaaatttgaaagattcaacagtaatagggtcttaaatcccaacaccccagatccaaattcaaagctttttcactctacctaacaaatgggtaatctgggatctactaaaaaaccagtctttcgaaggtctaataagtcaaatttcataacgaataaacaaatacccagaaatgaacaacaataaagaatacaaaagcatacaagtttgggataaaataagatacttacaagtgaaaaaacatgtaatttcgagtaaagttcgactcttttcacgattttaatggagttgactgcataaaaaagattacttgaatctgacactacaacacaatcttggtatggaattttatctaatatgaaactttgaagaagaagagtatatggagaattgaatagtttgagagaaaccgacccatactcacatttattattatttattaatttaatttaattttgattttgattttgttttccatattatttatttctttatttatttatggaccacttttgacatttgtaattaattcatatttatttttatttaagaaaatgtttgtttatatgataaatgcaagaatgacttttggggaagaaaagaacaacatttagcataatttttagggttttatttatgataggtattttattgaaaaaattggcacaaaatactaacaagaaaatgattgtttagaacattaattaaaagtttttttccttgtttgatttaatagcaataatactaaatagtattactatgtaataatgtaaatgtgattaattggtattgaagtaaaggccagccaaatgtgttagttggattattatatttatatttattttgctaatttaaattttttttctatggaactttaattaaattgtattttttgataaattgttgagattattaaatttaaagacatctattcaatttcactaatagatattaaatgtggatgaaagttcatgggacacaattaagtacatattaaaatttaggtacatcatttgttacttgtcagaattcggggcttgacttagtatataaataattgtcacgtttgcaaaattaaattgaacggtatcaggcagaagttcataaatctaacaatcttactattttgaaaagttctggtgtgaatctcaggaacttctcaagtctggggtttgttgggcaataagttctggtgtgaaggttgatattttgcatcagccatgacttttggatgatgggtatccttttgttacttcagatgcccaatgtttagtgtgccataagatgaactcgttgatgtgtacagacaagagagaatgggatttagatattattaaagatctttttaacgagcgcaatcaacaacatattttggcagttctattgagtcttagtatagttgatgatcgtttttttttctggtctaaagagcatcatggtttctactcgatgagtagtgcatacaagttgatgcaagcttagaaagaaaattggattacagctgattcttttgagttctagcacaagctctagaatttgaaggtactaccgaaagctctcaatttggcatggtgagctgaaatcatgtgtctgatttatcaaaaaggtgaggaaattatttttcatgcgcttattttctatttatgcgctgctcaatgctaccagatgcttttggttaggccgattgttgttgctaatttttgcagctggtttgatcaaattttacaaaagtgcagtaaggacaagtgtgggaagactgttatgttgtgctaggggttagaaaggctcgaaactagttggtttgtaacgggtctatggatccattcaactgccaatttcctatgcccgcaaatagggctgaacatcgggcgggtttaccgggtttcgggttggcgggtttcgggttcacgggtttcgggttcaaaaaattgaaaccgaacccggacccgaatagggcatgggttggcgggttagcgggttggcgggtcacgggttggcgggtttcggttggtcgggtttagcgggttggcgggttgacccggtcaactcagtcaactcggtcaact

SEQ ID NO: 305082 - DNA, 541 bp, Cannabis indica
ttttttttaattaaataatatcgttgaacaaaacgtctctaaaactaaagcaaatagaaagttcagaaaaacagcgatcagcgggaaaataaggaagttctagctagatatagtgagctatcctattagtagaatgtttaaccaaaactaagaaacaagtccttaactcgagtaattaacaacacttgacactcctcaacaatacaaccaaaataaggtagtctgtctctattgtagtatgctgccgggaattcattttgatccaactcaaggcttctttcacactaatgtggcttcgactagctcaggttgaagttagttaggtttggttaagcttaggctgctgttagtggttagttttcagtaagttggtgttgctctttcggttatgagttagttagtctcatttgttagctaagagctctataaagcagatttgtaaccaactgtattcattcaatggaatcaacacattcattcttttttctctataggtgccgtttgttaacactttttttaatcagtttttctgtttttaaaa

SEQ ID NO: 305083 - DNA, 968 bp, Cannabis indica
caaacaatccctattagtttttaaaaactgtttactataaaactgaaaacagtttttgagttatgaagccaaacaacctctctattagagtgagagagtaccttcaaatttcggaatatatatttatttatgtttttgtttttttatttctaagaaaaaaggtataataaataatattaatattttcaggttattaatagagaatctatcggtggtcatatatatctcacttatcaaattagtactactactagctgtaaattctgatgatcatgatacctcgtgaccaaatattcctctatatcataaataatatttattattgatgaataaaattagtatatattgaagtaataaaagcatgttaacatctaattagttctatattaaaatgtatttaaaataggtatattaattaattaattaatttggttttaaatactttggtagctatccatatatatagcatcgtttttgtttaagatgatcagcttttgttttctgccaagctgataaaaagcaggacactgaatcttatagtaatttctataataatatatatataaacaaaatcacatgatcatcaatattagcattaattaattaactggcatattaattctccataaagcttgcttaattatatcttcatccccgcaaaaagagaaaaacatgcatatttattgctgaagatacacgatgatgatgatctgtgttctgttatgttttaataaaacatactttttcataaattcttaattaacccaacaaattaaggtatatctttcccataaaatcaaattataatttttgtcatgaaatgttggacaaagccaatgacatatatatcacttttgtctccacaaccacacaagtagacacagttctacataattaattaaaactaacagatgagatataatgcagttgttgtgagatatatatgtctatatatatatatatactag

SEQ ID NO: 305084 - DNA, 2812 bp, Cannabis indica
gcgaccgcagtgtaactaattgggcgacatcagtgacccatcttgttttaaccaaacattaataactttgattcttaaggttaaaaaacctacaacggtgactcaattgaggccaatcagtctatgtaatgttctatacaagctggtatcaaagactattatgctcagactcaaaccatacctatctcatatcatattaagttcacaaagtgctttcattcaatctcacctcatcacagataatgttttagttgcttttgaattgttgcactctcttaagaatttaaagagaggcaaagaaggttacgctgccatgaaacttgacatgagtaaagctttcaatcgagtcgaatggtattttcttgagcgagttatgtatgttatgggttttcatacagctgtggtgtcactcattttatgatgcattcagagtgtttcttattcttttttttatcaatggatctgttcaaggacatgttaatccaagtcgtgggattagacaaggggatccactttccctatacttattcattatttgtgcagaaggcctttccagatgattccatcatgaagaaatttgtggtcatttacatggattaaaagttgctcatggtgctccaactgtctctcacctcttctttgcagatgatagcttagtcctctgtcgtgccaatccaagatcggctaatgcagttaaacggtgtcttgattactattgtcgtgcctcaggtcagaaacttaacctagaaaattctattttttcattctcaccaaacactttgccttcgatccaagcaaaccttcagcaacttttacttatgccaattcaaccttgtcatgaacattacttgggtcttccatcttattcgggaagagataaacaagttcaatttcgtgagattaaagacagactttggaagttactttctgcctggcaagaacagttattttctattcgtggcaaagagattcttctgaaagcggtggctcaatcaataccgacctatgatatgagctttttcgtgtctctaagtctatcattaaccaaattgaagtaatgatgaataaagtttggtggggttcaaattcttcaggcatgggtattaattggaagacatggaaagctctttgccaatccaaggttgaaggtggtgtgggatttaagagttttattcactataaccagaccttacctgctaaactggcatggaggattttttccaacccagattcactattgacctgaattcttaaggctagatattttaagaattcttcctttttagatgctggttatggttttaacccttcactcacttggcaagagatcatttggggtaaagaacttttatccaaaggcttgagatagaaagttggtgatggacaaaatatactttgtgctacggattcatggctaccaggtatttctaattccaagccattaatatttaatggcattcacagaagcttgaaggtctcacatctcatcactacttcgaggcaatgggacactcctttgttgaagaccctatttattgggtatgatgtagaaaaaatacagagcatccccttgaccttgtactctcacccagatcatcacatttggaaccatgaaaaaaattgtatatacacagtcaaatctggttactttctagctacacacttggaagaacaacattctacggttagttgttctcaaacttcaaaattctgggctctttccatcccctcaaaggtgtgaattttcatatggagggcaattcatgattgcctcctagaattctccataaatgacatattgctgattctcctaattggtctttgtgtcgctgtgataaagagaccaccaacaatgcactatgtttttgccaacgacccaagaaagtttggaaacattctcctttctctcttaataatttattttcaagctaaatgagtctcaaagaattgttgctcaatgtttctaatatatggaatgatttacaattggagcaattcattacaactctttggtgtgtttggaatgagagaaaaaaagaacttaatggcacaaaactgaagcctcattatgttctactctattttgctttaaattacttcgaggaatatcacttagcacaatctgctactaagccaactgctgcaatagctcaacaacgatcagctactgcccccgaaaaatcaaccatggatgaatcctccattaggcaaaatgaaatttaacacagatgcaattgttaacaaacaaaaacaaacctccaaccttggtgcaattctacgtgacagcaatggtgaagttgttgctgcaatgtccacgcccctacctggctgttttaaaccggaagttatggaagcttgggctctaatctatgatctacaatggcttaaaaatcatcacttacaagtacattacattgaaacatactctttactagtggtaaaagggctgcaatcttctcaagcttccattttagatttccatagtttgttaactaatatttctcatttagcgtccaattttcctggactgtagatctcttatgttaatagatctgcaaatattgttggtcatgttttagcaaagtatgctcttttggtgaactatatttgcttttggtcggaggaaataccaccacccctaatgcctaggggtgggcatcatccaataaaatccaattgaaccgaactgatccaatccaatccaattataattagattggattgcatgctaaaattaggattctaattggatttgatcggttattggatgtcaatctctgttatcccaatttttgcactctgacgtggcatc

SEQ ID NO: 305085 - DNA, 956 bp, Cannabis indica
aaaaataaaaaacgtaaaattactcaaaacaagagtaaaactaaattaaaaatacattaaaattaacctaaaatatagtactagcttattaacacaaacaaaaaccaagtacaaaaatacttttccaaatcataacaaagacacgcggtcaaaaaataacacaaataagagaatctaaccataagaaaacacacacaatccttaagatgagcaatttgacaagactttacaaacaatattagacaacaaacactaaagctcaacgagtgagttactttttatatgcgtaagagtagaattcataattcacaaataagaaatctcataattttcactaatgacatctctagcgtttaccatttattttgtttagttataattacacttggtaactcgtcaccaatggtaaccaaatgtctaatagttactcaaataattatgagtttcataaatcggacttgtttctaaaacataccaacacttaaaaagttcttaaaatatttcataaatttaagcaagtttagtaaaataccattttaagtgtttacactacttaaacactatgtgaaatttatcctgtactcaatattttagaagtaccataattcatttatattttggaaataagaataataatgataataataataataataaaaagtggtataagtgtagtttagtaaagagcctaataaaaaacacacatccaagacaacatgggcttttcaaactttgttgtattaaactttaacaaagcccaatgttaaattagctcaatcaagctactaatttagattatttttgggtcaacggattaaatattagactatttagaatttttgtcccttcaactataacttatagggctgtacatcggtcggtttatcctacattttatttaacccaaagtataaatcgggttacaaaattttaggtgcaacctgcccaaataataa

SEQ ID NO: 305086 - DNA, 1450 bp, Cannabis indica
gacctcctaaccaaaagatgactttgtcgatcttctcggtttaagaggcgatcgattcaattacagaaggaaagtgaatttcactgtgaagcaaactgtctaaggattaattacgttattaataatatcatttctaatcgatgctccccgttctagcaccttggtactggcactagattgaagttgcattcataacaaactcaacctatttgtctcaggttctaatgcttttgtgatgatataaggtccctttgtctctcattgggagtcttccacatcactttcttggtcaatatcttccaaacactcatatgacacattttcattattgctcccctattcctgatcattgttggaaatagcaagggaatcttcctgagtgtcccctctcctgagtcatcttgagatgtagggggagattcttacacaatgctttcttgctcgaggttgtcttgagaaatagtagggttctcgtcatcacaatctccctactcatgatcatcttaggaaatagaagaagagtctgtttcagtggatgcattaagtgttgattcttcttcactttcttggtcaatgtctgtttgagacttaggaaatagataagcagtgtaattggtttcttctggttgagcaactcctctgaccttattgaaagcttcttcgagcttacttaaaccgttaactctctctaaaagctctccttacaagtttgattgagcttcaagtctttcaagaatggactcattactgttagtccaactttcattgcaatgaccttggcgtcttcacttagtgtcttcatttgcatggtttcctctaagaatcatcgtaagtaatcctttagaggtccatcttcttgaagcttgatgtagatcaaactgttgggctcgaatggtctatgccttgatggggataattggtcatagaatactagcttgagcatctcctaagaatcgataaatcccgagcaaatctttagataccactacaatgcttcttttgataatgtgcttggaaagatttgacaatgagaatcgtctcgaatgcatgtcattctatactttgaagttctgtatgtgagagagagggtcttcttttccagtgtatggatgctacactggattttctgaactttgaggggatgtctaaagccttaatttgatcagagtgaggagaaaattactctcaatctaacttgtaatctattggctacaaagtagtgatacccttaaccaaagcagcaagggtgtcaaattctgccctacacacatcatgtgtggtaatgtgtgtatcagttggctgcttcctaaggatgttgttatataggctcttttgtcttccacgtcgatcaagggcattgattatggttttttcctggtcatgtggctctgctagcaactgtgggggtttatcttgtatgatgataaagtcatctcttgagtgtttgctt

SEQ ID NO: 305087 - DNA, 1067 bp, Cannabis indica
aagcttttggtcgttttcaagaatatggagatttttgttcatatatattttcagctgagaaggggagaaaagcagctgtaagaatgacaaatatatgcttgtagcttattgtgcaattgacaataaaggtccttatttattagtggtatatccattcatatattgaaatattcctgttctttcttttttgtttattataagcctttaaatattttcatgcatatttcatcgtaggttataaggaaatttgtgatagttttaaaagtataacgcaatttgtaatagggagtatacacgacgacagtttaaaatcgtcgcctatactataaggcactgtttagtataagtaataacagttataaaccattgtgtataccttgagtataaaaacccccaacaactacaacttcgtcatttcacacagcaaaaaccttatccgaccccagctaatgcagccgaaaatcccaaatccaaaccccaaacgccattttctcaaagaaaaccaccacccaccgctgatgaaaacatattttctctcttgttctcatcgcttttcctccctctctctcacttgatcactcgctctcccattcggcgaaaaccaacacccactatccaccgccacccaaacctctctttcacgttctcatcgtcctcctctctttctctctcactcgatctctcactctctccttctattattatttgacgaaaaccaccaccattgacccaaaccttcatttttgccttgtacctcggtgctctctccttctcacggtatatgtacacatttatttatttattagtccagattatgtaattatatttttatttttttaatgaatttatttatttaaatatttagaatttaaagaataaatatttataaattaacatataaattaatttataaatatatatttttagtttaattgtatatttgtagaaatttaatctactttatatataaatatgtgtattttttaaaaaaaaatatatgtaaataaatgatttgtttaatttgtttatgaaaagaataattagttttgtaagtgtaactttttttt

SEQ ID NO: 305088 - DNA, 2839 bp, Cannabis indica
gatgctgtaaaccaggtatatatatgacctatatattacaaatatatacaaaatactttaagctgagatgtagaacgcgtgtaactatttttaactgggcatttgatgtctaagtttcctcagagatggaatgcctgtgctgataacttgatttattcatagatccattaagtagttgtttcattttctattacaggatcttaatagaagtttagctgaaaagaatcctactgttgtttttgtttgggtaagattttgttcaagtgtaatattgtatggtttatgagcaccattttgagcttttaatctatttatcttcttttttattaccttgatgctactactgattcaacatgcattattattatttattggattgtaaggtgtattatctagctatacgaaatatttctatctagttgattttgcaatattcattgtagtatcttctacatagacttttctgattccatgactttgtgactgccaggtggtccgggcagtggaaaaggtacccagtgtgcaaatattgttgaacattttggttacactcatcttagtgccggtgaccttctgcgagcagaaatcaaatctggctcagaaaatgggtaagatgtttacaataaagacgcaagcttgtgatggtcataaattctacactttaaagtgaaattttaagtatattgtgtcttctatgattgtaaagcatttgttcttattctgacttttatttggatgtaatgtgatcataaactttgtgtgaataatttaagatcggaccttaaaaggttacacaccattcaagtagaaggataggagggccagctaagaagggggaaatagaaaacctcactttcataatgtattataattgtctcacttaattaagtttatttccttaccttaatattcatcaagtcaagacactgtagaaagcttatcttgaataagttctctggcgtgtcatctattaagtaaaataaaccaactatgttttagagtttagctgttttcaagaaagggtattgataccattatacaacaatagtaaacagtgtcataagtgtgcagaaatgtcaatagattaattgaatactgttgattgatttaagattaattcaaccagaagaatttgtgggaacagcatctagcttcttggttaaaaaaagttccttttttcctctttaactctgtcgactacttgattggaattgcttgggtttattttcatggattcactaactagtcaaatgaaatttctcattattgttgcttggtgatgctgagttagtgatttctgaaacaataataataatttattaaataataataatgcatattgtatgtcttgcagttttattgatttgtcttgtttttagtgatcattatgccgggagtggttatttacatattttacttttattctatgaagaaccatgattcaggagatgattagagaaggaaagattgttccttcagaggtaaccattaagcttctccaaaaagcaatgcaggatagtggaaatgacaaatttcttattgacgggtttccccgtaatgaggaaaaccgagctgcattcgagaaagttgtaagccttctcaagaattatttactgtataagttttctagaaattgaatatgacaagttgaagatccttgtgttaagtgatgagtaatggcctgaaactggatactggttttgcagacaaaaattgagccagcgtttgtcttgttttttgattgcccagaagaagagatggagaggcgtattttgagtaggaaccaggttaggaaaatttgatttattaatatctctggttctgacttcttttatccatacttatgtttctccgttcatgtttacagttcttatcctttctatttacttttatatatccttttattatttatatcattatttaacaactattctctatctttcctttcatttttgggttgtttttagggaagagaagatgataatgtcgaaacaataaggaaacgtttcaatgtttcctagagtcgagtctccccgtgattaagcactatgaggccaggggaaaagttaaaaaggtaatactgctatattagatcctaatattgtttttgtattcttaaagaatcatttgtgttctaaaatgctattgcatatcgtgaccgtggcttttttcccaccctcagattgatgctgcaaggcctgttgcagaggtttttgagacggtgaaagggatttttgcccccaaaaatgagaaggtaaagggttttggccatattttgaggtaacattaattgctctaaattactgtaaaaaataagaatcgaaggtattgtttgaacaatgttcagtggtagttttctgtttaaaatgtatagtatagaaatactgcttctgggattgagcatcatccattggcaccaaatcaagattgaaaagtcattttacagtttaatgccatttgtcatgaggataaaggtttaccatagatctgtattctgtagtaagttatttattgtaaagaatgaattagtggttcaaataataagagaaaatttaagttcctgtccttttttatttatttcccattcagtctggaatgcaagtagacattttccccattgctgatgttgatttttatatgtgaaggatgacttcttttctcttcaacattcatttatggtatttgcaggttgagtgaatgctgcatttgtacctgagattcgaagacatactatctattgaggtaaaaaataatattatagtaaaaacttttgattataaactttatgaatgaatcatcagattttatctgctatgacctagttttttgtatgtgatta

SEQ ID NO: 305089 - DNA, 1061 bp, Cannabis indica
cctggtaaaataaattcctacaaaaccacctgtctgccacggcatctgatcacaggccaatccttttagacaccaatgtcggggttaattgtaggggtcggctgttcaaatacgagaatatgtaggcgagggacatacactgtttttgggttgtgaaagaggcatgggccaagagacttcacttgcatcccatgatcaatttccatcgtaaagtaagacacacttgccgcaagctgagtagttggaacaagaaacaattcagaaagctaagtgttcaagtccatgaggccaccgtagagttggaagaagtggagacaaacagactggatgattataaggcgatagaaacagctcaaagtaacctcaacgaggctctgatcaaagaggaaatacattggaaacagaaatcacgagtgcaatggcttcaagagggagacatgtgttcgaaattctttatggcctcaacgataatcagaagaagaagaaattacatacaatgcataaagaaatctcccgaagacagctggatccgagatcaagatgagattgctaagtgttttcttgacaacttcaaagaattatacaaagggcaatcaacccatacgaagcctgtactaaatgaagtgtttcacaagcagcttgacgaaaatgacaacctcttcctcaacaccatctcggatgccttagaagtaaaggcggcaatttcgaaatgggcaaggacaaggcttcgggacccgatgggctgcctccaagcttttacacgtatcattgggcaacagccaacacagatcttgtagagatggtttccttcttcttcgttcacaaggaactgccctcatacataaatgacacctcaattgtcttggtgccaaagaaggaaaaacccgactctaacaaaggattatcgccccatcgctctttgcaatgtagcatataaagtaattgccaagataatagctacaaggcttcagagtgtcattcaaaaaatcatttctccaaatcatgcagctttagtcaaagggagatgtatagccgaaaacacaatgatagctcgtgagata

SEQ ID NO: 305090 - DNA, 1757 bp, Cannabis indica
tcttctatttttttttaataagaatatatattatagatatttaagatatattctgtaaattttttgataaattgataataaataaagatcaaaagaagactcaaacttaaacttgttcatgtgcttaaaataaattatttcaactctatcttaaagatttaatacaattaaaactatttaaatgtcttagatgctctaaaaaaacctttataatatataaatatatatttatatatgtatatgtatatgtcatagatttggtcattgttcatcatttttgtttctttatatagttctttaatttattcaagagatcaggtaagctttagcaatcatactaagtcaatgccaaatatgttcttacaaactacaattaataaataaataatattataaaatattgattagatgaattattaattatcatttagtttcttaaacctactcgattgctctcttaagtatttgacaatgtattggtcaaccaaaccaactgctcagattcttgcactgttgggaaaaaaaggcatgcaatttttaatttattgagaatttaattaattaaataataaatattattatttcaatttatttatgactgtgtagattatagttatattaaatattttatcatttggagaaagaagaatatcttccatagttataatgtacataaaaaagaattgagatgttccaaattgctcgattgtttatttctcgtatgttcataaatgacgatacgaaatagctttgactagtagtgataattttgtcacacattttactttgtgaaattattataacctaacaaaattaaagttcaaaaattttattttaaagaagtaaaaataataataataaattatttaaatgtcatttttttcacattatttaatcaattgcaaatgatatagtcttttattttatatataatttaagtaatggcatgcatactacaagtcatattatttatttatctttccatttttcttaaacctacttgagcaaacactcaggagaaagaagtactgaatcttatttcatacgcatataaaatagaaaaaactataaaagtaacagactatttgaacttttcctttgaagtgttaattttttttgaattttttaaaattttacagaatgtcttaaataactacaacctacacaattatgcaaaaaaaaaaattaaactaatttttttcatgattattgaaaaagaagagggcatatcagtgcactcgttttaagagagtatactatagaattttccaaaactatattaattttttgtagtgtaagaatattaatgaggcaggcgagcgggcgagcaagctaggtcgtccgtggggcattgtcgactctcgcgcccatattacatccttacaaaaaaaaaaaaatcattgcatggattgataagtaaagttgcatattaataaagaagattaaaaaaaaacctatggatcaattaataatgtgcactacattagtaaaaaaacataaaagatgatgattttttaataagaaattagcactaattagatagtttaattaattaataactaattaatatttagtttatttgtaccaaaaagtaatgacgcatgcagcattatagtgatctgaattagtttaaatcaaacctaatccaaatagacgtatgcattaatattaaagtaaatatataaatatagggaaatttacatggtatactaacttttgttatttttttacaaaaatactcccaggcggtatttttt

SEQ ID NO: 305091 - DNA, 2560 bp, Cannabis indica
gggttatgggttcggatgcatgaccttcaaacagggttcatgacatcacagttctcgaaggttgtgggagattatagtaagtgtgtttgtcgaatcttgtccttataattatgagaatatggagggattacatgagagttatagtcaccgttgatctgtctaaaccattgaaacgacacatgcaactccgtaagataggagaagagtggatatggatcactttcaagtatgagaatgtccctaccttttatttcatctatggactgttagaacactcggagagatactgtgagaagttattcgacactcctatgaatgaaattacgaaactgtgttgtgaatggatgagagccccgcttcgacgtcgaacaaagcttcttggagctcaatggatgaggtctgggcttaagggtggtggagctaattttgctggcggccaggcgacactggttggtggctccaatcaacattcagtgctcctaattttcaagacactaatgttatgtgcatggatcgtgagaagcaattaatgacatatatgggaattgattatggtattggtcaacttaaccattcattgtaacacgtggtgaatgagttggcaaataacaactgatttctaaaaaaggtactctcaatgtggaatctaaaaaaaaaaggactaattatgacttgggccaaaatgaagctatgtgtgtagaaacaaaattgggccttgagtcaaaatgaagctatgtgtgtaaaaatcgaattgggacttgacccaattttatttttctttgtgagatactatgtcaaaaataaaaagttgatataattaaaaatgctattggatttgagggcatgtttcagtaggatctcaaggacatagtggtggacttgcctttctttggaggaataaggatgaagttatgttgaatacattaagcccaaatcatatagatatcattatttttgtacccgaatggccagagttttgacttacaggattatacagttaaccaaatcgattcaaacaacatcttacttggaagcttattggtgaccttgttactacatctccattaccatggtgtctaattggagatatgaacaatgttctcaaccaaagtgacaaaatggggggaagaccctatcctaattggctcatagaaagtttccgaggagtattagatagttgcaaattgatagatatggagtagggaggctattcgtttaaatgggaacgagggaaaggtacatataaaggggtagaggttctgcttgatagagcccttgtcactccaagctggctggataaatttcaaggcgcttagctcttatatcttgaggtttctacctcagatcactgcccaattcttcttgctccagttgtgcaacttgagcatccttcatgtcagagttttaagtttgagaacgcatggctccgagaaccaatgtgcagaaagttgatcgaggtgtttggctgctgaatcatgagtcgtcccttgatgcaaaaattaaaaatgctctaaggtactggccgattggggaaaagacattactggaaattttcaatcgtggatttctcaatgtaaaaagagaattcgtctactaaagggtcgttgtgatgtcaattcagctcagaagtatcaagaggagaacgagaaacttttcgagatgctcactcaaaagaagatattttagagacagagatcaaagtaactatggttgaaggaaggggatcataactcaaaatactttcacgcaattgccaaaacaataaaacgcacaaaccagatgaattctcttcgtaatgaatttggacaaatggttagttgggacaacgaactccaagaagtgatggttaattactttgagcaattacttacaccctcagatacaagatggaatcaggttgttgattgtattccaacaaccattaccctcatacaaaactcataacttttggcaccaggacagcgaagtaaagaaacccttgttctaaatgcacccagataagtccttgggaccggttgagatgagtcctggtttctatcaaaatttttggagcattgtgggtcatgacatggttcaattggttaaagatttctttcagaatgggttctttcatgatcatttgcctgataccaatattgttctaatgccaaagaagaagtaagaatcaatgacagaccttcgtcccatttcactatgcaactcttatagaaaattgtctccaaggtgctggccaatcgaataaagtcagttcttgatcaggtaatatctgaaactcagagcgcttttatccttggattgattattgataacattataattttctttgagataatgcattacatgaagagaaaaaatgcagggaagaatggttttatggcactaaaacttgatatgagttaggggtgttcatccaatccaatccgcactattttgctcatagtgcatctgatccacacaatagcttaaatccaatccaatccaatccacaaaagtacggattggattgattattttggattggttactttttcatattaaattatttaatatttaaaaaaaa

SEQ ID NO: 305092 - DNA, 1213 bp, Cannabis indica
caatacgacctaatacggcgttccaaacgagccctaagagtataattttgtacatgtgtttaggaaaaaaaatcttaattttccaaataattaaataaataaataagggtaatatagtaactaaaggtggagagaagaacattctctcaccacatggcaaaggtgttggtttgggctataaaaatgtttttgttccccaagaaaattcaaactatggccttcagaatcaaaagatgctccagatttgaacgtgggttgttcgattcctcgagatattcgaaacttttgatcgcacggctgacattgcctgtatcacaaacaatagatggcttagtatgacgacacgtgtccaaacacattctcgtgtgtcgtgtgatttaaatgtggtgggtgtcactcgtgtcaggactcaggagtgggctctcaccacacgtggggcccaataagaatttagaattattatgattgggcgagaacactgtggcccaatacctcggcctactttgaaaagggccataactgaaccagctcagtttctaacagttacaaaacaaaataattaaaaagatagaagaaaattattcctcaataaaaacaaaaagtaatactactaaaaccaaggaaaaggaaaaaaaaatcctaaattaaatgtcactgagttagttatatatatcaagagtgaagatcaaaattaggtataagaaatctaaaattaaattccttaatggttatcgatgagtgaataagttgtgttataataaaataaaatagtagctaccaaaaaagagtaaataaggtttgtataataaagtaaagaataattgccaaaaaagagtgaattagttgtgtaataaaataaaataaaataatagctaccgcaaaagtggtatgtaaatatatatagttttacttttatcagtgtaagaaaaatatataaaagagtaatttgcggcataaatacctaagttttatgccgagtagcagataagtacttgagtcgtatttttggcggtaaaaatactttccgtcactattgtggaacttccgtaggtacctaaccgttatgtgccaaattagtgtccacgtgtcactatgtgattagtccaaatcatttaatttttattttttatttgtaaatcaatttcaaatattaaatataaaacaaaaaatagtttaaaatcaaataaaataataaataaataatattcatatt

SEQ ID NO: 305093 - DNA, 1528 bp, Cannabis indica
aaaaaaaaatactaactaattttaatgatatgacattgagcattaaggtaccaataataaataggaaaaactatttactaaaaaatagtatataaattaaaaaaaataaaagattaaaaaaattaaggacaaaaacaagtagtttgttttcattttttctaactattgattcttattatagatattatagatatatattacataatttttttcatctaaataaataaggagtggagtcttgtatataattgacaggtgaaccaatttttacataggagaaaaataacatgttaagtgtataaatctagataaatatatgtccttttttttaacaaacctgagaactttcattagaagaaaagagaatacaaatcaatcaggttaaaatgaaagacaaataaccattccaaacacgctcactgttgaatcctagaccgattctagggaccatgaggtaatttgtttttctctcatggaacatacactacaattagaccatgactgagtaccattaggccttaatacagctaattacatcacttaaaactgaattattacaataagaactattaattttatccactacacttttacaataagaagctagaatttaaactggaatcttggtagcttggatctaggaaataacaaccaaaatagctttagcttcagctacatccgggggaacaactggtgcaagtggaataacaaaaccagctttcatactatcattatcttcacatacaacaaccctaatcagtattttttggagacatcatcaatggtagcatctgtgttgaatctccatgccctagcagccaacggaggtacctgttcaccaatttactacttctgctttgacagtttaagtttttaatgatgagccatatcacattcaaagaaatagttaactgcataatgaaaaagtttcgttgggggaaggctctttttattatgaaaaaggttattctgctgattctaaattgtccaaacaaaacaaaacaagacagcaaggttgtgtttatcatataaatcaaaagccttagcaaagaatatgtccaaagtatcatctttacggctattatataaattcaaaaaggcataatgtttccaagcctttttaacatgtcgacattctaagatggcgtgcttcactatctctgaagtcagttagcaaagagggcaaattgaggaaggaatgatagacaaaaagataaagaataggcaataggtatagtgtgggataacactcgccaaattaaatgcttaactttaggaggagtagtggatgaccaaacttttgaccaaaaatacttacaaccttcaagtgaggatgtaacgccctaagtaattaggcacgctacccaaaatgcttatgaaaccctaatcccctaatcgggattactaattaaaatagcgcagaatttaaacttttatattaatcagaatgaaaataaacttgtaatatatttaaacttttcaaaatagttgggatcccaaaaatatttacaaacttattacaagttct

SEQ ID NO: 305094 - DNA, 3697 bp, Cannabis indica
tttttttttttttgatattgggagagggttccccttggtaacttattttatatttatgaacaaaataattattttagattagtagtcttctgcaattgacactacaactcagaattaacactcaggattcaacgataaaagcgttccaaccaaacaaaatatttaagactaaaaaaattaaagaatatgaaataaaagtacatatataaaatagagaacaacaattaccagttttggtatgaaggcagctaatgtgctgaccgtaaacgatgacaaagctccaagaccgaccaaagtgttcatgtttggagcccctctaaatagactcttcatgccatcaagaataagtttccggccaggaccaagcagtgtaaacaatgacaatgacagatgaaatccagtagaatgaaatgcatggatccatgcagccttagctccaaataaatgagacatatgaccgaaaaggcaaacagcacataaggcccaagagaatgcaagctcacgacctataagattaacataacagactcaatttccagtagacaaatcatcagaaactgcagcttcgaagcagttataataggagctgaaatatcttttcaagataacaagaaaatgaaggagacaacaaagtttacaatctgaaattaaaacataaacaaataaaagaaatgatctataccactttctttaaggcgttgttgtttttcttccattttctttccaaaaactttaagaaaattatatgctcctgaatctgcatgtaaaagaatgatgaattagtctagccactctgcatatttatttgtacgttacaaattgttgatgtgaagtgatctagcttttaagatctttatgcaaataagaattagaactctaaaaatgaaataacttgtaagccaaggaaatagacatttcatgggaaagtaggccacaaatccattgcaaataattgatggcaagtaaaggattaagaatagcacacaaaatacgagattgagaaggttataaatttaaatcattttaagagaagcacaacaaggaacggttaccaatcttatgaggagtgaagcatacacaaaatcatatctctggataatgcttctagataagcatcaaaaaagaagtccaaatcaatgtgattatgataaagtactattacaagtgttttattcaatatatccatgtcaataatgctcatggaatacaggatcagtcaaaatagtgtaagtcaaatgtctaacacttaaacaaatgaaatacagccatttttcttttctattttcttggatagggtacaagaattttttaagagacaaattaataactaggaaattgctaggcttggaatgtggaacagctcattctccaaagaaatagattccccacaacagaaatgccactccaaccaatccataagctgcatagacttacctattggaagaagtagcaataaatcaataatcagccttaagcctatttgttcacttctaatacaatggagttgaggtgtatagaatcttggggacataccataacatttatggttgcagacaacaattgtctttgcatttctatggggatttgtctccttcaatagcagcctcaccctcacctgccactaaacccaccaatcttcatattaataatttaaaaaccagtaaatactcccatttacagttagaggtgattcatagactaccacacaaggatgtgtaatgtaagtttatctcttgggcttattattaaaagaacactacattaccccctagttgttgtcaccttttcataacaaccctatatgaaaactattaatactgatgcctcctaaaagtagaaagaacttcggatttggccgaacaaacacctttacacattggccatggagttatagcatagtttttgacaaaacaacaatagacaaccctgaagaacatggtccttgttgtaatattatcattcatcaacttttacttttaatatcagtttgtggtcatagaaagaagagaaaaaacacacacaagaactatgcaagtcacagtgaagtataatttagcaatacgaattagtgacatcatactagtaaggctgcttacctcgaaggttagacttaaacccgcaatctgtcaattgctttgcaagtgcctcccctaattcatgttgccagttgggaacaaccttggcttcagcaacaggccacactatggctgtttcagttgtgagattaacactagctgatgacacttgaggctaccaaaaaacataaatgcagaacacaaattcagtttacataataaagcagagctaactgcataatatcatctctctgtcccctcacccttaaaatctataaataatagttcaacatcttaaaagtttttcaaatctgtatctctcaatttcactttgcaaagtaattcaggaatagtaccaactgattaaactttttctatgaattcccaaatacccataaatccatcacaacaagaaaatctcaactttaatagaaaaaagcttacttgactttctaaaattctcttcacactagctgcacatcctccacatgtcattccctacaaattacacacaaaacaaaaaagatacacctttaagcaaattaatggcggaaaacataagtgcatctttcttctctgcttctggattttaattattttttaataaataaataaaagataatgaagaagaagaaacatacagtaacatcaagaataatgacgtcagaagcagcagcagaaccttcctcagctccactagcggccaatttcgccttcgcatcaccaccttcagatccactaccaccaccttctccgtcaccggaacctccgtggccgtcattaccaccgccggaagaaaacgaggcaacaaaacgacgtcgcagtggatacttatccgccgctaaggggattctagctctaaagaaggaagaggaagaaacagagccgggaaaagaggctggcctcggaagtccgtaaatgcgactgagtctccgttcgacgagtttagaagcgagtatgcagtaagtaagagctgcggtgttgatggtggaggaggctacgctgcgattgagtgctttggagatagtgaagagagaagttgaggtggttgccatagttgagaaagcggactccattggagaaagactgaaggtttcaatggtggttctctctcaagctcttaataataataataataataataataataggaactacaatttttatataaaaaataaaaataataataagtataattaatttgtgggttaagtgtcagggaattcgttggttattaaaatagaaacattcgttacaaaactgtatatatacgctgaaatatttatctatttcaaatagaaatatactaattctaaataatttacttttatcttttttttttcttgcaagaacttactttatcttcttttctttcttctaattaagatattttcttttttgattatcattgatcgaataactctataatattactgaataacatttaaaattattctttagtttttatttaaaaaataaggtaaataccatttgtacttcaaattttacaaaagttggtaattagacattcagttttattaaataataaataatgagaaaaaaacagaaaaatacaaaaaagaaaaaaaattcaaaaatactatgggccggcccattaaaca

SEQ ID NO: 305095 - DNA, 2395 bp, Cannabis indica
cacagaagtacagaaattattccgttttcataacagacttcacatacacatccacatgagctatgtattttgcatttctactatttattagttactaacaataatttatgattattaaaactgatgacgtgttatgctgttggagacctatcaagtgtggctagcaagtagacattcagtaaatgtagcaattacattttttctacacatagaaatgaaaacaaaccacttaccacgaacacgtccattagatcttatatgaacatcctctggcagaaacttctcaagaatatctcgaagaacagcctgtacaaagatcaaagtggtaaaaattttgacaataaaaattaaatttgtctacaactttcaattgaaggtttcatctacaaaagaagaaattgtagaagtcattaaatggaaatattatttgcttttctaaaggacttaaactatctgcattttaatcattatatattaagatatttaagaaaataatacgaaatcctgttaagaattaatgagtcaaataacagacaaattggattacagaaatactattcaaaaataaatcaccagaacattaatgtaggaaagataacgagaaactagtgtgtgtaacgttatagaggtatataccccaagccgaaacgctgtccctttgctccgacaatcttcagccagtatcttagtagctttcaatgcctcatccatactagctccagaagcaatcaccgcacaaacaatggccccagctgaggaaccagctaatggagtgctttcctggatcaaaagcatagcttgatatgagaaaaagtcataattcaaaatcttgaaagaaaaaataaaacttttattagaaattagagaggggaaagaggtaagtaaaatacgcatgcattgatgtacaccacattgttaaccacatgaaagagggtatcaccacttcaagcacacaaaccagtgacaaacatcatgactgggaccactgggtttccaataaaaaattacactaatggttttatcaaatgctcacactctccaagtaataagaggaaatggatagttggatacactattttaacatggcaattcttaagtgaataacaaaataattactgattaatgattacataacatattctgcaagaaatcatcaaaaatgattaacaaaatcaccaaaatccaaatccaatttttcacagcagagtctaaacttccaatacgcacaaatcaaaactaaagccagttacaacaaatgcgttgagacaataattgtatagagtaaaagatctcaagcacaatgagcatcaacgaaaagaaaattctaacagcaatgtaatgatatatacttggcatagacagacaaaacaaaacctaaacaaaacatcataaattttaaacgaatctcaaatagataaaagagctgtcgaaaacaaaaataaacaaaaagaaaattaaaagggtatccgctgatacaaactcattatcccctaaaatgtcagagacattaagaaattttttgtgaaaataaagctcaaagaaattcagaaacttgttgactatattgagaaaaagaatcaatttttttggtacgaaaatgcgaaattcagtcgaggtaaacaccaaaagagaaaaaccaccttaatgtacccattctctatgagaaactgagcaaccccaaggtggtatgggaagagaagtcctgcggcggagaagctaaacccgggactggtaaccacgcggcgttgcttctcagcctcgacgtccatcacgctctgctcccacacaacatcaggctcaatttcatcctctatgaccgccccaatcctctccttcttactccgaaccacactgccatagttttcgaacatagcaaccgaggccagctcctcgccatttggtccacggctgggcttgttaatgaggcgcgaagccaatcccaagaagagatccccggtggcgacagcaaaggactttctgacaggcggcggcggagacaatggtgacggagaaggcgatgactcatcggtgccgggggtcggggatgggttggggttggaagcagagcggaaggtcagggtacgtggggaggtgcgagaagggagggtgagggtgtgactgtgagtgaatttagggttaggattgtgggaagagaaaagagagtgagagtgaaactgaaggagagatgagagagaagaaggagccatgaatgaaaatgaagctcgcttacctttcctccatttgtatgacatcatatttaatatgtttcttcaagtttcaaacaagaaaaatgggtccaaatttgttctttttttatttttatcaatgcaaattattcttttttttatttttttatttatttaaaaaaaatgcatgagtgatttgtttttttaat

SEQ ID NO: 305096 - DNA, 1761 bp, Cannabis indica
tttcctttccattccattccattttattcccaaccaaacaccaccttaatgttttgaaaaacttggtaggttaaaagaatcaagcaaaaatatgaggtcatatttccaaatgcacaaaacagatatgtagttatgtattgaacatcactgaaaaatattctagactgagtgaccaaaattccagcaaaaccgagaaacaatgtgtaaaaaatcataacaacattacaacaatagacaagtatgaacaaggaatagaaaagcaattgtccactgacaaaacgcatcgagcaaacacctgaatatggacagtcaaaataacatttacacatgtgtgagtggagattccatcattttttttttctttctataaactaaaaataacaagtcgaggaaataacttacaccatgttattgctaagaaataaccaaatacttcaatataaatgatagttgtcgttcattagctaaacatgttgcataaattgacataacaaattgcatcaaccaacatgaaactgaaaattaggaaagaaaaaaacattgtcaaggaaaaaaaaatgttttgacaaattattagtcaaaggttttattgcatgagacctcaagaaataattccatcgctcatgtatgactaattcaattatagcctttcagcagcttaagcataaaacgagtttaagcatttttcttacaatatcaacaattcaatgattataattacatagatttcatgtccttttgtcattgccagggataggattaaggaaaaatcacaataaagctcaagtccaaaccccggatccataaaactcaatacccacttcttaacagagacagtaaacatcaaactaagaaaaccaaagaacaatggcaataaagaaagaaaaaaaacttacgagtagagagccagagctctctgaatcacatagatagctttgttgtactttgttttgagccatcgatcatcactttctctgattgctttatcaatctccatcaactctgacatgcaaattccaataaaaacaatcaaacagcagccaaaaaaagggcatcctcagatttaataaaccaatcaaatgggttctccaaaatcaaacaaatttatttcttttaactaaaaataagcaaatggggtcccaataaaatgaaggaattcaaaaaacacaggtgaactatgaactacaaatttatctctgaatagtcttaccagtgatttgaagtttggaagagaaaagatggtattgaaaaactgaaaatgtatgagatttttgtgaaatgattcttctatgaatcaaaaggaattgaaatatagatatgttagagtaatagaaaggtgtttcttagttgccacaggatgtttatctgagaggggaaaagattgtcttttttcccaaactttggtttctttaagcatataaaaaatctctcgagaagaaagccaagtcattgaaaccaaaattggaaaaataaaaaaacaacaaataattctattttgactttatatattttatttcaataatactaaataaaattcctcaaaaaacaaataaataatactaattaaaagttgtctttctttcctttttttttttttccttcaatttgtatgtaaaaagggaataatatttttttgtactatttttttctagaagagtgctaccgtcgacatcttgttacaaccttttagtcaacttctacgctcgaaaatacatataagaatattttttttttcacaggagtgttcgttatgcttacaac

SEQ ID NO: 305097 - DNA, 2621 bp, Cannabis indica
gttcacaatataaaaattatttaaataataaaaatattaaaaaattgagtttttttttttttttcattttttatgggatattggcgacaaaaccactcaagctttacatttttttgttatattattttatataatataatatttagattaaataattaagtgtgacaaagtataaattttatcaaattgtaacatacattatggagttacaaaatgtatgtagaatgatcacaaaataggagttgcaaatcctttaaattgatgatcacttgaatatgtaactctcatctctttttcactcttaaattagtaaaagatgttactaattatttatgaatgtgaatgaatgatagctattaaaaatatagttgttggagacttgatttattcatttataaggtgtataaatggttcaaaatcaagtgggaatgatttggaacactttggaaaagaattggccaaagctgaaaaaatggtaactagtaactagttactgtttttttcagcatattattgcccacgtttttgaaagtttgagagcctttgtaacagcccaaaactcctccaaatcacccaattaataacataaatgcccaatttatgattggtaacatccaagggctttatggtggtcattcatgttcatatgagagtgaaaactctataaatagaggccatattgttcacttgcataagaagtggttgaaaccatttgttgtggttagaaccttgtgaggatatgctcatccttagacactaggctgagcatatgaggcttgataaatccttaagagcatttctagagtttccctaagtgtccatatgagggaggaaatgacttttaggacaaaggtccttgagccttggtcaagctttttgtgtgttattcttcttcttcttcttctctagatttcttgtaatcttgatgaaatacttttatttgtattttgattgtaatccccctattctctcttgtaataagaaattttccaacatttttagcacttatagctctgacagagttgtcggttttcttactccacaatagggacgtatctcatggggtcataggcatctgactctcttatcactggaacttcttccttaaggttacttctcttgaagtttctctcagtaggacctcttccttagtttggtctagtttgagtttatgctccatggggctcttttctcgatcaacgtactatttcttcttccatgactggttcatcatgttgagtattctccatgacaaaatggtttggttaaacagagggagatgtggttcgagttttttttttttacaaaggctctcagtgaaagtaccaaacagttaacacatatttttgttaacaaaaatgaagccttataaataaaaactaactatttataataaataaatatagataaaacaccaagaacttttacgtgattttgtagttaaaatttacatacttcacgagttagtattatttatgagtatttctttattacaatgtctcttgattacaaaagaatttctctagatctttactcaatctcacaagggttttccttccaaaaacgagtgatcctttttcccatatgttctatccctaattaatagggttttaggaatgataattattctcttttgatcttttttaggtaatcgttcatgaaacgtggacaatccccatattttatatttacaacatgtggataaatgaaataactgttgataatcgccttttgtccttatccaagagtagtttccgttgccaagataatatattcaaaatatagctcgcattcttcaaagatgtttgaaaatgactggttgcattctgcgagacactagctagtcaggatgtttgtccttgctattgccttttataataactcttggactagtcttttaggaatcctgagataagtcacattttgcttatttcccttagtctttcaacatactcatgagtatgtcggttaatgagttgtaaactcttacaaaactcgttatctatcatttccaacgacattacttcagtttatatatgcttttgagcgatccgttagctccgtgatgaccacagaatgttgtcacctcacaagactgtgtatttttatcgtcgtcatgtgttagtgatattgtaacatagcacaggatatatatatctatgtttatggtcacttatctcgaggcaagatagacgttgtattcattatcctcttttaacgttcaagattaatggccacgtgtcatgtccatatttatgtctcaaaatatgggcgtaacaagaactattttctgaaataattaaatcaaaaactaagtgagacatagattaaaatagaattgtatctacaacaatatgactaaaaacaaataatacacaataattcagaaattatttataattaaaaaaataaaagggaattaattccaagaaaaagatacaaaattataacaaaactgattccacaataaaatgagtaaaaataaataacacgcaataattcaaaaactggtactaattaaaaaaataagagggtagcaattccaaaaatactgaaacatattatattaaaataaaggttaattagcaattcccctccccccccgaattttgacatatacc

SEQ ID NO: 305098 - DNA, 2196 bp, Cannabis indica
attttcgttgagtttttcagtttatatctttcgtcaagttatttcaatttagtttgaacgggttattcgagttggacggtctacaaaaatttttgtacagtcctaatacgtatagctggttttttcaaatttattttcaaaacagtaaattatttaaaggcagacaaaatatctattataaccataatgcatattgtcttacatttttcacttattcaaaattttgaaaacaaattatgataacaagtatctacattatgacgtagcacttaaaaactaaattatacgttacttaaaaactaaattatttttttagtaacataagtacctaacccaattttttttttttttgtagcataagtactttttatttaaattttgttgtattttcatagtatattgttattaaatatcagtggagtggtgttataagaatgatttgtgatatttcaaaaattatcatattaaattatacgaaactcaatacttaattgcaccaaataagaatacaccatcttgagtagtactaggcaccactgatgccttaacatttattgcgaaagtacctaatttaccaaatatttgtagtaaaagtacttaatttatgagatatttgcagccaaagtatctaattaaaaaaatatattttgtttaattgtaccatgttatatgattagaagaggtatggcaaatctatttaacaagcctaaagaaaagtgttcctcaaaattttcaaaacaccttaatgactttcgatgtatgatgatgcattttaacatcaatttatagaaacaaacctctcaaagtcactctcataattactttcaagagacttgcctcattgaattgagtaaaaaataaatagaagtaaaattgaatagaagacatagaaaacacctctctccctaatctgtatttctggctctagtagcacacaaccactgtctcggggtttcgagatcatcacctgtcatcgttggcacatgccaccgaccatcctcggattcctgcattcatcaaccgaatatggcaaatcatcatagtttgttcggaaaccccaaatgaaagtataagaagaaatataaaattgattagcagtttgattaattatctaacctgaattacatttgaataaggtggtggcatgtgaagctgaggtcccctagacgacactgataaccgagcctgcaaaatatgatcaaaacacactcgagtcaatacttcccacagcgattcgggtatgatgtttttcttaatgcatctagcaaatattaatacctgatgtttttccttccatcttgggaaaaagctagtccctaacaattggaataaatggtctctcatttcatcatttgttaccagtaaacagttgcaactaacagcagcgtataaccagtacctgttaaataacacactaatgaatgtttgagctatttgggtgtagagatagaatatcatacacactaacaaaaaccaaccgacgaaagagcaacttgttcaaccaacaaaaatgatattgcataataaggtaatccaattcattaatagaagaatttttgaaggaattgagaaatcagcggatgatgttagggcgagaatcagattttggacagtcacttggatctttagaacgaaatgttttgagaacttttccttcctaagtggagttcgttgatgtgattagattggatgattttttttgttttgttttctctaatttgtactaaaatttttgtttaccaaggtttttctctgccacaagtgaggttctcaatacataaagggaggcggctagtctaagacaagtgatttctttttcgaaaaaaaaaaattattaataagtaagggatgcgaacgaaccaatcatcatttgagccggaaggagtagcataaagtgcaccggccttcttccacatttctatcaatttcttgttccttggatcctgagcaggacccccatttacacgacttgtgtgtaatataattagtggcaatttctttgatggactaatttgttgtaattgatgaacaacagatttaagctacaacagataaaaaaaaacagagagaacataagtcgatccatctatctaatatggcataaagaaaactgtgaacattgttgaaaatttatcagtgtaaagtaaaactcacctggaaaaaattgaaagtatgttgatttataagaccaacgtt

SEQ ID NO: 305099 - DNA, 2154 bp, Cannabis indica
aaataaacataaagctaaatatataaatacaaaaattaatatttatatttggatatattactaaatacaatatatttactaaaattttaatgcaaaattaaaagaaaatatataaatatatttacaaatttatttatattttataaataatgtatatatatttattaaatatttaattaatattattaatctttataattttattattaatttattatgcttattaccataatattttaatagaatcaatattttttttaatgaactaaaaattttatattccataaaaactgtatttacacaactgtcagcccacacaagaccaaacatctttgattacatataacattatcccttttataattcttctattcaatggagatcagtttttttttttttttttttgtcattttctttgggaaaattatatacaatccacttttaatatcatgttttatatacttaatgattgaggagaatattaatactttttgataccataaaactttatttatatttctccaaaggtgataaaccactgccactagcaccatactaattatttgcttcttaaatcttgaccatctcgcttttaaaatcgaccttagtaacccaataagctgtcaccctggtattctccatcatagccacaattttatagcatctaaacaactcttgttatataaacattcaaacaaaagaggagtgagctcttccttttgatccccacgaactagacaaatgttgtcttaacaaacattaaatttgaatagtctctcctatgtttataacctatttcttattgctgcatgatgaattgatgcttgcgaacattaaaatatatccccgaacatgagtactctagttaataatctcttcactcaggttgagcaaagaatagcctttactgattgaataataagaagaaacaaattattgctctatacgtacctgtttaatcttctctttcactttaataatttggtgccactaccggctactattaactgaaggggcgaaattccaccatgaccgattttttagatacacattgctgacctattttacccaaagaatgtcttgttttgtctccatcatccaaacatactttgccaaaactgctacattcaaagaagctatgtctcaaaaatccaatcctctattcttctttggtttgtaaatttcttttcaagctactctaccaaccccaccataatctgcaacatctttccaatgaaatggtctacaaataacattaatttgtttcaatatactcttaagaaagaatactatttgagcctgataagcatgtttagacattaatgttgagttgattagaatgaatctcctcgcaaaggataaattcctagagctgcaaacacgaataccagcaaccattttctcaatgataacagaataatttggagcatattacaatgcctaagtaccgaaaaggtaacttactttgggtgaagcctgaagcatctaatacccgtttaacttcgctttgctccatttcgtagcaatatatagcagattttgctaccctcagaattaagcctgaagtttgagaaaataattttggctcctaaaacaataagaaaataaacctgaaatctcctttgcaaaataacaaaacattgtctacaaagcagaggtgatttagttgtagactatttattagctttgaatagcagagagaaattgaatttcattaattggaagaattggattacaatgacaaagggtctgctatacatagcagagtaaagtaaagtaaagtaaagtcggttgtgagataacaaaccaaccgaaagtataacagttataacaaaccataactaacttaactaactaagcctaagtctctaataggccccttcaagatggactgtagagtttgttgaggttcatcttgcaaactatgtcataaaaatggctagggaagagtggctttgtcaggatgtcggccaggttggatttagaagcaatgtgattcattttgatggtgccattgttgatcttctcgcgaatgagatgacaatcgatttccacgtgtttggtgcgctcgtggtaaacagggttctctgaaatgtggatggttgcattattgtcacaaaacaaagtggatggaagtcggttttgaatgccaaa

SEQ ID NO: 305100 - DNA, 2044 bp, Cannabis indica
gtaattggtcgggacagagaattaatgttaacaagtcaaaaattctcttgtctaaaaactgtgagatgaatgtgggggtggcaatctcggatagcttaggctttgacataatgaatggagatagaaactttccggggcaatccgctagtttgttagtggaaacagaacgaaagaacttccaatttatcattgataatgtcaggaatcggatggaaggttggagggcaaagctcctatcttaagcggcaaggactgttctaatcaagaatgtgatctctgctatccctattaattctatgtcagtctcctttcttccaaagaccatcacagactcattggatgctctggttaggaggttctagtggaagggatctagtggagtgggggccgatatctctctttgatgaattgggatacgatctgcaaacccaagggctgtggggtttagggattcaaaaatttcgggacatcaacttctgccttttagccaaactgggttggcgtgtggctcaaaacaataataacatctggtgtaagaccctgatgggaaaatactgcagttatagaagcttctgggctagatctatccctcggggagcatcttatgttgcccgaggaatatggaaaacgagggaattcattaaggagaatggagtttggttaattgggaagaactcttctgtagagataatgcattgctcttggtcttgctctgatggagtggttatatgaccctcggatataaatccgcagatagatacagggacgatggtctgtgatcttttaggtggcgacttgagccactgggatcaatctcttgtggggagaatgtttaaaccagcaactgcggaagtcatatccagatgtaacattgaggagctccccgagaacgattccttagtgtggaagtctgccccgaatggtgaattctctcttaagagggtgtactgggatctccttggccccagagctcgtcaagataagatgtgtatgagactttggcgctctcctattcatgatcgccttaaacatttcatgtggaaatgtgctacaaactgcctccccttcagtgctagattgggcagtattttcggacatccgtgtggaaaatgctacctatgtaacactaataattcagaccatgcgactcactttttctccctatgctctgttacgaagcgactttgggggtcaggtaaatggcaactaatgatcgagaatgtccctcttcacttcggtgaggaggtgataaaatggatgcttgatcctgggaacttggtaggggcgtgcgaccccaggaacccaaaggtggaatttatgctctatgctgcagtgctgtaccataatctatggttcgtcaggaatgacatcttccacaaaaagacacaatggcgctttgaagaaatgaagaaaagggtggataccgactttaataaccattggaaatgccttgtgactgctaaggaggaatcccctctcgtcaatgctttgcctagggtaagtaggggagttccaagaagtggcagaattcgggtgaatgtcgatttcacgactgggaatggtgttggggcagttggagtggtggtgagggatgatggaggcaacatccttgccttattcgccactaaaacgagctatgactcagttatcgagggggagctttgggcggtcttctggggagtgaatgcacttttgaagatggaagttcctactgcggatttgttctcggactgtcaggtgttggttttggtggttttggctcttaagggggaactaccctctgtggaatgtttctagactgttttctaagtctttatcgttattgtcgttattttctgtctctctgttttggacccctcgttcctccaatgttgcagctcatgtgcttgcacgttggggtttagaacaaaactgtaagggtttctttaagtttctaggaggtgagtcccaatgtactcaccaagatagttgatgattttgaatgaagttagttgtttcttcagcaaaaaaaaaaacttattatatgtactggttgtacatttaa

SEQ ID NO: 305101 - DNA, 2882 bp, Cannabis indica
aaaggaattaacagaagttaagagaaataacaaactgtaacaaacgtaactaactctaactaactctttctaacaaacagctaaactgaatagtcactcctaacaagcacaatctttcataaaagaaaaatgatataacataatactataagcacaccaaaagtatatgttaatgttaatttgtagttaattattgtttctgtatagtagataaaactgtaaacgtttatatatctcagcatactatcaaattgaatagttttatcatcattattattttatttttcattacataaataaattaaatagaataaacagaacatttaaaacttacttattttaatatgatttaaaatcaattaacttaattttaaaaaaaaaaattgtgaaattttataaataactaaacatgtaatatataattttttttaggagggtttattagaccacatctaacatttttagatatccaaatccgatcaaattatagattagatattaaattttaccatctgatctgatccaattcattttagtctgttggattgaatcggttctatccattagatgtatttcatgtatatctattggtttaattcaagtttatctaatattttaggcttagtattttttggaccggatcgattcatctaatattttagatcaatatttattggattggatccatctaatctaatccaaaaagaggtaaaatgttaatattgattttcatatatacataattttttttacgtataacaacataaaattaaattactcatctaaactaaatgaaaatattgattagtttgattggatgttggacgtataagatttttggacactccatccaatatccgatttaatctaattagatatttaaaaataacatccagatctaatcctaattgaacatccaatatatggcgatcaattattattcaatcagtctgttatcattagattaaattgatttatgcacgcataccttttgtacccttaaataatgagaatttgaaaaaagtatttcacacaaaattttatgtttataattatcttatcaacaatatgtagtcaatattgaaattagatttttaaacataaagttattacactacgttagtattataaaatttcgtaataaattgaatttgtaactcacaaccacttttttacccttaaattaatgtgaatatatatatacacatactattttacaaaaagtataattttttttaattatttttataaaaatatcaaatacactaaatttagactctttaagcaaaaaaaatacgaataaaataatgaaatatcatttatttatttaaatataactaagaatatttcatttatttcgttaaaagttgaaaaagaaaaagaaatatgttaaaataataatttgttttatagccacaattattaaacaaatatatccaaaaaataatctcaaatagatggctttaggctagaaaccaattagtaagataccctatgttttcctcttcccttattattatcactaatttattttattttttgttgtgttgccttaccaatcattttttttttttataaagaatatatttataataatattaatataaatattaaaaaagaatctaaatgactcaaaaaaacgacagcacattatttattattattgtggggataagcatttttttcttctatttatatatgtattaaaaaaaacaaatagcattaaagaatcttgtacttaatttttatatacattgtcatattcctcacttttattttttattttagtttgaaagtatattcttcacctttcaatccctataatatttcaaatgggagttattataaaaattatcgtgccctaatatttgtcacattatgaacatacaccaatttttttattgaaaaaaaaaattaaaaacatatattatcccttttgtaagtgacttttaatttatactttattttatagtatattttctcaattaagtgcgcatggtagtagaagtatatgcttatctaaaccattatcattactataattattattattatcattatcattatcatcatcatttattattattatttcatttgttaatgtttttaatactttatagttatttttcttacaacaaaaaggacaaatcttttccactattatttaccaaacccttgataaagtttagcaaatattgaaattaaaaataaagaagtgggtccactactcatcaattgctgaagttggagaagtgacccatcatccattgggatcatcttttagaaaaaaaaaattatattttataagtttttttttatatatttttacatatgtgtgattttataagagataacattatttttttatgttgttacaatgttatattaaaattcgtaaaaacgtgtaaataataattttttagaacaatctaaaaatgacactgtgtaattaaaaaaaatctataaaaatataaaaaaaaaaattgtaaaaacgtaaaatttttattatttttgggtatttctgaaataatcccccaaaaaatatattattcaaccatattactataaaatctcttatttgtgagaatttttttattaatattagatgttaaatactactgaataagtattattttaaagaaaaatagttaatatgatatagttaaaatcaagattagaattagttacataaataacacattatgtcacatcaagtagtattagacatattaaagtctctttcttagggaagaaataaaaaataaaaaagagagagaatgaaaaaaagagtaataaagaagttttttttcccttgaaattgagaattacccaaatattatttttttaattttttttcaaatttacggtttggatttctaagg

SEQ ID NO: 305102 - DNA, 1691 bp, Cannabis indica
agttaaaataaaataaaattaaacaaaaaataaataaaataaaactatttccttgctattctattataattcattcccttcaatccatttcatttccttcaatcaaatgtcacctaacagattttgccattactgttaaaatactttattagttaaagttaaaaatgctaattgtagttagttgttaacgattatgtaataaaagttaaaagagatgatgataggttgagaaacttcatattatcgattcactcagattatgttttcttggactcttgatgatatttccaatatttttagtcatctttatatttccaatggaaggatatgatgatggaaggttaagaaacttcaaataatcgattttgtcaaattatgcagttaatctctttagatatgggttccttgctaactagtgccaaggttggttcaacctgaaatttgctacatgagtactttgtttttttagtcaatggttgttgacgcttctcctcaataaatgggagtgagagaaatgcaatattagaatgtgtgtttttttattggttttgaattcacttttaggtttctcaattacagaattaattttaatttgttggtcataatatataatttttaatcacattattttaattggttttttgatttatttcatttttattttcttacaggtatatgtattgtaaaaaggaaatacaattatttaaattttcgctgcaagaattattcaaatctaaaaattacaactaaaaatacaattcaattatatgccgattcaaaaaagataaaatatgaagagcgtgaaaatattttactgttctatccgtttaagtgataagaaattaaaagagtcttcaataatgttttctattaatttttcgttaagtatcttctctttaaattttacgtagtctttccatttaattttcaaaacatcatacaatttgtttttttaattttcaaaacattatgaatgttttcttctaattatcaaaacttcacactatagttttcttttatcaatcattaaaactttactatacattattttactttcaattttatatataacttgttattgcgcttacagtatatttaattaatattttgtatttaattaaattttacacaatattttacttaatcttttttttttcagaatactattatgttttcttctcttagcactttacattaaacatcatttacttctaactcatatatgacatttaaaaatcaaaatactaaacttaaaataaaactaaatatatacgttacctatgtaataataatatagtatatataactatctacaatgggagcattgcaggtttttgttattactagattacatatcaaaattttttaggttttagggtcttagtaagggatagtaatcctaagatgatgatgaagtaaaatacaagagttaagttgctactagccaaagggtttccctttggctagttatagtattttatatggggatctagtttttcaattttgagttttgagtgttttgatcggattgattattttctaataaatttttttggttttttgatttgttttcagtttattcagattcgttagctttggtgacgactatcaacaatggggagatgtatttcaacaagttaggagtgttgtttgaagatgttatagctttattgtctaaatttccgggggca

SEQ ID NO: 305103 - DNA, 2610 bp, Cannabis indica
aagtattggaatgtcactccaattgaatgaattttcaatcattttggtggaatgactattccattttaaaatggaaggaaatattattccaatactagatatcaattttttttatgcattttaaatttgattctgttcctattctcattcttattcttatgttttcattacttccaaccaaacgtcatcttagggtttcatttatttttcctattctatttattcaaaaattgctaataaaaggctcaagctaaagcccattcaagtcattaaaagcctaaaaattgctctgaaaaatagctctaaacaaaagcccagtgagcccacgaaacaacagcccaaggctgaggcatgtgcctcatcagtgtgaggtgtatgcctcaatgacaacagctgaggcgtagcctcatgtacgtttttgcgccttgcctcccgattttcaaaacaatctgcgaacaattatgatagttttgttctcttaagttttaactatcctgagttacaatatttcttcctttgttttgcttaagcaatatttatcttaaattcaccattatgttattcattttattggaccgaggcagttttttttttcttaaacttatcctgctttacatttacttgcctgagattgttcctatggctacttatttagttttttcaatttatttgaatttgtagcttgaaaagctgagtgacatacagtgccaacctgagtcacagctaaagttcataacagaggcctggcttcaggtaaaataatttattgacctttttttagggtatgtcttcttggctcaaagaaatgaaatactattttttttccttttcagattgttgagtgcaggcgtgttttgaaatggacatatgcttatggatattatttaccggagcatgaacatgccaagagacagttctttgaatacttgcaaggttagttgttttcttgagtgtgttttttttgaaggggttgttttcttgagttcgatgctaaacttttcatcatattgccctctttcaagttttaactttggctttttgttcaggtgaggctgagtctgggttggaaagacttcatcaatgtgctgagaaggagttacatgtttacctcaatgcagagggccaatcaaaagactttaatgagtttcgcacaaaacttgctggactgaccaggtagttgccaaaccaacaatatacttacctttttactctgaatcagaaagtccagtttcacttgattattgtctcattttaactctgttagatctttgaagcacatgctttattagtttatcgtagtccttgatggatgagaaaatactcagccctttgtaattgaaattgtcatatatgacggagataaacaacttctcaaattgtctaattatttgttttggcaaacagtgttacccgaaactactttgaaaatttagttcgagctctagagaatggcctatccgatgtggactcacatggtgcgtgtagcaggacagcaaactcaaagagcttgggaggtacaagtagtaaggggaaagccgggaaaagcaaggcaacaacatccaaatcaaacagaaacatagatgacacaggccactggtcttgtgaacattgcacctttgccaatgtcagatcagctcctgtctgtcagatgtgccagcaacgccggtaagtctcttcatctttgcaaatagttgggctgggaggagcctgagctttctttcaatgcttgataagtgtggtggagaactaccctataaggttactcgagagatcctgttctcgcccgtcatcgtctttctctggaattttgaaggcaaagcattgtgtggtgggggataagaaggttacaaagaaaaggaattataaaactatattttgtctgtctgttacatgagctgttgtatatagtgttgcttgttcaacgtatcttggctgtctagttcccatgcaaatgcatattcacctgtatttttcttgtttattattttagttattgctaaactgtagcaaaatttggggcattttaggtgtggaagaacaatttgggggcaacgaactgaattgacctctgcatttaatgaaataaatatgtactaaatatttcattatcgctctgctgaaaacatgaattgaaaagcttgtcttgtcaattcccatagatttcaccttactgaattgtacttgttatctatatacacagttcaatatatttatacaagcatatctagggattggacattctttcttgttgaatgtgacattatggctgctggggatcctatgtatgagtgtatattatgtatcagtagacatttctactagactaattcgcaacttcccaacaatttgttaacccagtttctttagaccgtatacatcgagagttaaggtttctaatatactgcatactaactccaactaattaggaaattcacaaattagttaagtctctaattcattccgtacaattaattgtgtcttagaccatctccattcatgtaaaagttgtgctgtatttagcacaaaaaaagtagttttgtagtatatttacaccaaattttaactttgtgctctaatgcacaattataatgtaaaatttaatattattaa

SEQ ID NO: 305104 - DNA, 588 bp, Cannabis indica
tattatataaaaatatgatatataatccaattcaatataatacaatacaatacaatacgacctaatacgatgttccaaacgagccctaaatcatcttctaattcctataatttaactatgcgatcattacattttatactggaattattttaccctagttcgggaaacccaaacactaaccgcctagaatgtgtttctaaaaaaggtgaagtttgtaaatctgtgatgttcatcttgatttacattttgtattttagcttttaataatccttgtaaatttattagtaaaacaactagattttactcttttagtatataataatgaattgagagttattgtctaatctcttgagactcttttacatgtgagtcacaattttaatactatatggattgattaagtatgttcttagactagacgatggtgagcattcttaaaggtaatttctcatctcatatattttttagacaaaaaaaagaaagactaattaggattttttctccccgaactttgacatgtaccaaatcatggcccctgaacttttaaggtcgttaaaaatgccaattgaactattgagattgttgaat

SEQ ID NO: 305105 - DNA, 3784 bp, Cannabis indica
aagttgaatgatttttcaaggtttgagtttatgttttcaaactagggtttttttttttttttttcctagcaaaatcttttatcaatcggtagtggttgatctttgatttgatatttttcttttaatcaagtgatttccctgaaataaatggtgtttcttcgtttgcaagcgttgattcaccattgtcgagctccgtcgatttcaggttggaatcgtttctctggtgcaaggaatgtgcagctgcaagggtagagtacatgtatttttgttatttttttttcttggactgtataaaaatttattaggccagcccataatatatttgtcatagggattatctcacaaatacacaaaaaacaataaaaaaattacaaaaatacagtttcacaaaattttaaatatttttacgattttttgattttatttacaaaaaatacggtctatttatgttatacttttgttaatttgttgttgattttttattatctgtatgctattttttgttgttgttttgatgttattttcatgttacttttatgtagttttttttttgttgttatcgtgttgtttttatgaaaaaccgtacaaatataaaaagaaaatctgtaaacgtaaaaatgtaattttttttaataaaaaacggtatcttatgtaattatccaattttaatattgttattttttttggactataagaaaaaaaataccctaatcgaaattctgtccacacatagtcctttaccaaaggagctctttcagaaagaagcttaactcaaaatagcatagatgtcaaaaaaaaaaaaaaaaaagcgaacatagcagctagagggttgagacacaccaaagggtacaactgacaagcccttaaattccaaatacaaaatggcttattaaaagttggtcaccttcagttctccagtaaaagtgcatcaactccacatattttcccaagaccaatggccttgtccggttgtttgtcttatcaattgcaacattcgccgtttataaagtaaattataacttttctacaaaaaaattataattgggttgtatacttttctttttttttcttttatacaaaaaaaatatatatatttatatacatataaaaatcttttaatttactaaaaattatttaataacattccaatattttgtattaaaaaaattatatccgtttcattgattttatccaattattcattttttttggaaagatataaaaattcattcattagttttaattaatttttttcatttaattaagaataatttaatttttacatttttcttaatgagatagaatggtgtaaaattaaacatttaaattaagagaatatatcaattttgtccctatttttagcgcaaaaacgcgatcaatttttatattttattaaatgataattcagattttatattttacaaaatataaatcaaattgatgttccagttcaatttttggtcaaataattaagaaattgatacattagacaaactttcaacagttactttagatctaaaagtaaacgacaacttcatatttagttatatcaaataacttattttatcaaaactaagtcaccagcatcagtttgatttattatgcaaaatatataatctaaattattatttaacaaaatatagaattcacgttatgctaaacatatgagttaaattgttattttttgttaaatgaaaaatttataaatgtaatttaaaatgaatattgctatatgatactcgtcgtattaacatcatgttgattaatgcaattaactattgaaatttaaatattttgtttaaattaaaatattaatattgaattgcattaataacgttaataacgttagatagcccactacaataatattgattttaaatatattttttttacagatacatatttagaatacaattagttttctttttttttaaaaaaaaaagtagaatacaattatttttaaccaatatttacaatacatttatgtatgtaacattttctttttgacgtataatatatgtataagaattttttatatagttctttttttaaaaaaaataaattggatttaaccttaaataaaaataaaataaacacttttatcatgcaaacacgaaaatctgatttaccaaacacgctaatcatacacacacaaaaaaataatgatcatatttgctctgtttcattatcatcactttacttctcaaagtacaagtacaagtaaagtcagctgatctcttctataactggattagtacagtacaaattagggcacgattctacaccaccaaattcctccttccgctgcacactcccgagttcttctctctaaagtactcctcaccccgatccatatgcaaactagttgacgattcccagttgacttttgactccagccagttcatttctggagtcgggaacaaacacctctcctcgtctagctatggaagttttcgatttcaaggttgacgaagagccttcggaatcgatcgctgcaaaagttcttgacaagctcaaaaaccctagttccgatgaatccgtgattgtgaagtacaattttctcgaatgtggtatgttttcccttataatttttttaacatatatttatatatttactgaatgttgagtttagtcgctttgtagtgcaatttttctccagaaaacccatcccaaatagccaaaatgagctgtttcgtattttcgatcaacagaattttaaaaaatgtactttttttttcgtgaatttgtttattgatttgcttagacgaataggtagcgagattttcttgaggtcttgatcttctattaacttagttaaacaggattttttgattttcttttaacctagttaagctggccctgacttaacatgtatgatcgatggatattatcaatgctttgtctaaacgtttgtaaataatttatatgtgattttagttgaccaggggaccagcgtgcaaagaacaactgagagtgttgatgcagaccactgtgattttgcttctggtaatgctattttggatgccaactcgaataaaattgaagagaatgcccttccaacgactgataatgctgaacaaatgaagtttacgggtcatgaagtatgttctaaagtcaacttaaacaaccacgaatccagaaatattttctgagaaatgattctcagaccttaaatcttcttccaatgagaaaaatgagctgaactctgttcattcaaattctccttccactgtactagccttatgttcactaactttgaatgatcaatttatatttgaaaattcttacattgtatacatttgtgcagggtgaacttgatgatgtgacttcagatgctgaggaaagcatgggtatgagttctcactcaaatactgaatctggaatgggagaggatgatggtattttttcattaactggatgactgtttatactgtttttttcttattatgtgttacaagttgtcacatcgagtttgtgatttcttttttcagtctcgttgaacagctatgcactcgatcattgctctgtgatttggaattggtaattctcttacgttcatgtaatgcattcaataaacacaagtaattgaaaatggaaaaaacttggaaatatttggataagcacgttaatgtgtaatgtttagcatcttatctcttcattctggctgtttccaaatcacctttttgagtttcccgaatagtgtatatattttctttttgtattctattttacctgttcttttgtaatttgtgtatcatttttatgttttttgtgtttttttcgt

SEQ ID NO: 305106 - DNA, 2707 bp, Cannabis indica
tgccatagtgtcttccgtggatgacttgttggattctagagatgccatcttggatgatcttcgaatgcatcttcttcgagcccaacacaaaatgaagctctgttggaattttcagttggagacatggtctatctcaagctcagaccataccgccaacgttctcttgcaaaacgttccagcgaaaagctctcagctcgttattatgggccatttcctatcattcaacgcattggttcagtggcttacaagtttcaacttcctgaccacgcccaaattcaccctgtttttcatgtttctcagctccgtcgagctattggcgctgaaccagcgacgcccaccattcccccacaactaacagctgacctacaactccaaacggagcctgaatcagtgctcaatctccggtttgctgctgctagttccctcattccttcggaagtcttaatcaaatggaagtcgttacctgattatgaagcaacatgggagccttacaacaccatcctagagcagctcccttcttttcaccttgaggacaaggtgaaggtgttcgaggggggtattgataagcgtccagtcaagttaggatacgctaggaggtcacgagacatttaaagatagggctgttattttttattccagctgtaattgttttgttattttatctagctggttattttatcttagaggattgtgttttattaattctttttagatcctagctggcaattaaattattctgtttaatacatataaatagggggctgattcattgtgtaaaggaggtgggaaatagaagagaatagactctaggagagagcagccctctcgaaaggttgtaattggagatactagcatctcgaaagctagattattattttatttcatcattaataaagagattttctttgagggcttttataattttgtgtaccaatttggatagatacttttattctctaagaatatcatatcactttctgaagttaaatactgaaagaaattatgtctgtttgcggcttgttaatactttcaggtgctatctaggggtggaactactgaaaaatgaaggaagtgaatccattctcaagtccctttggcaacatttggatgcaatcctgtgctgctctttgaaggtaattattattataattattattattctgaaaactacatttgcctaagcttgagttttttaaagtaccagttttctaagcttcaataaactctactcaaggcaatgcattctactcaaatgataaattttgtggcagtatactgtataccctacatgcctaaaaatcttaaagatattgatgaaatctgccaaaacatgctgaaatattattagttgagtaataaagtactgatcttgaaaagctttggttttactacaaattgtttagtgcagtaattggttttatcatggagctgaaatagtctcttctattcttctgtgatttaaaattattccatgtttttgcaggcaatgccggttttcacttttgcaaatcaggcaggactggacatgcttgagacaaccttacttgcacttcaagacattacattggaaaagatatttgatgacaatggaaggaagaccctttgctcagagttccctcagataatgcagcaggtattaactgttattagagtccattttgcactttgatcttgccttgataattctttgcaaaatgattactgactaaatccagataaggtgacaggaatattccacatattaattacttgaaaaaaaaaagaaaagaaaagaaaaagactattttgccaaggctcccattccatatcggtttaggatgataacaaaagcttttgggaaaaataaaagatcataagaaattaatataccaattttgagcattttcaggttctatgcatcaaaccttttctgatgttggtattttcgttcttcctccacagggctttatgtgcctccaaggtggaatctgcatgtcaagcatggggaggccagtttcgtacgagcaagctgtcgcatggaaggttttagacgaaaaagaaaatgctcactgcatctgtttcatgtttattaattggtctttcgtatgagaaatactttgattaattagataacttaattagctttatgaagatctccggtaggttagagcatcgttttttcctttttcctttgctatggacgaacttgtaacatgccttaaacagtctggatatgcagtatttaaatgcattattggtgcctaatttttgttctactatctttttttaaggtgcttttgaaaagctataatgtaattggattttgtgtgtgattggaggtgattatagaatttagtatgtttgttttatcatgtaattacactgttattgtgtaattaaagtagttaattaaaaggttccaattacacttggattttcatagtctccgtgagaattgagtgtaattacatgcatttaataatttttttttattttaaatactaactactaaaaaatattattttttatgtaattattaatatattaggaatttatatggaattatcactttatattcaactacactttatattttaatataggctaattactattagtaattttttcccttgaactttgacatgtactaaatcgtgttccttgaattttttttgccgttaaaaattcccccgaactattgagattgttaaatttaaggacttttgtc

SEQ ID NO: 305107 - DNA, 1968 bp, Cannabis indica
ccttcaatttagccagtccatatatatgtatgtatgtatgtatatagctatatatatagggtatagttagtagggtaattaattagtgccgaaatcattattagggtattgaaaaattaacaacgtatgaagatttgataggaattttcttattcttctctctctgattgggtagttttgttaatttaagattaattattattacatgttttgcttaaccaattagtttattcatctaattatattaatgtaataactaattactacgtgattcaagtggggtaaattctcactctcatatatatatatatataatatagaggaatatctatagtatgtttatatatatcattggttttatatatcttgatatgttttaaattaattccaatttaactttgtttattattattatataatcatgagtaaattaataattaaaacactaaaatcaaatttgactttggattttacttattataggggatgatatataatgtgattaatttcttaataagcatactttataatgatgataacaatttctaggattttaaagggttatatatttattaattttatttttacagcacctgaattagtacatgacacttctgttaatttgtaattattatttgtggtaagtaaagatattacaatacatatatttgtgatcgtttaattttatattctaatttaaagttacagggcttaattgtttttttttttgtatatattaatatatattattacaaagttttaggaaataatatatatatatatgtaatgatggcatctgccaaaataatgttctggataagttaccatagctagcttgcaaagaaatctaattaattagcaagagaatcaattactacatgcaaaaaattaaacttagagcgttaaaattatcacataataaagctctaatattatttagaattaaacccaaaagaaatatatatctagattaatcatggacgaattagagttcgaatcaattaatccttgacaatctaactcgaactgaatgttgtttaatatagtctttaccctaatgaaaaacataaaattgaagattaataaatcaaaccttagtatatatataattaattactatatagtcttattagattctcttgttcttttttcaaaattatttttcggtcaaagtgatgttcatgttaagtgtgtgtctactattatttttgcagacataatcaattagtaaagtttaattatttttcaaaaataaatgctgaattatataacttgttcaataatcattccagtaaataattactacaatgacaaaaatttctggtgttaatattataaaatgaagcttgtttataggttatggaatatttgctactttataattagaaaatttggcaaaaacagaaattgtatatataaaagcaaaagttatattactaaataacgattttcctataaatatatacataatgaatttatttttcaagtatatgaatgttaaagaataaagatctgtgaggagtaatatatataactaaatgtgaaatatttatgtatagctagctgagaaattaataaataaattactaaaatcactagagagccaacattaatatcatgcaaaatagatcagaatcttttcaaggtatagttagttacctaagaatctctttgaatgactagacaaattatatctatatatgaatatatgtgtataacacataattggtcaatttttagttttaactattcttattgatgaataataattttatattagatactagcggtgcgataggaaaaaataattgtagctatactgtaagaaaaaatagtagtagcaaaattgtaaaaaaaattaattaaactgaatattttgtaaattataaattttaaaatattattgttaagattttattatattaataatgacaatgtgacaatctagttcataataatcataaatat

SEQ ID NO: 305108 - DNA, 1220 bp, Cannabis indica
ataaaataagtacatagaacttctcataagcgaaacccataatccagtaaaacttgttacaaatacatcccctcactaagctcactttatcatctcatattattaaatatgttacgaaattctaaaattttctttgtacgttttcttttaaccttttcggaaacaaaagctacctaaaaggtttctatttttctttaatatatatatagctagcaaatgaattaaagaatttacaaacaaaaaatatggttatcaaagttatacaaatcattccatcaaaatgttaagcatacaactcactcaaacaattatattcaattacatgtaacttacaagcaaccaagaaaattacatatcaaactgtaaaactaatgagaagactgtagcagctatgtaacgttaccttggaccatcttctgaagagcttcaatagctaatgaatcagacgtaacaaaaatgggattccgcgtcatgatcttcgatacaattgtctgctccggtcttaaaccctccgctataactctagtggcaatgtcctgcaatcaatataatcagttcagcttaccaactaaccgaaatatttatatagaaattgaaagaaaagaaaaacagaaaatgaatgcattgcttgctcgccttgtcagtaacaattccagagagcaatgcattggcatcagttaaaagaacagcatcgacacgacgagccgccatgcgccgacaagcatccgatactgtaacgccttcaggaattgtgagggcctttgataacctcagcttctttacggtcctctccccacccaaagaccttgaaaactccaagcaaattaggaacataaaaatcagaataatcggaacacgaatagcttcgtcccaaagtaaagacttacgatgaggaggagagagggttttgtggctgtgccattgacggtgctgccgttatcggccggtgccgatttttttaagggcgccgagggacctcgtttggcggtgagactgttcctcttcggaagcacctggctgctcatctttgattaggttaggagttggcgatttctggtccggtggaattcaaatatttgaatccctgaaactgaaactgaaagaggagcctagggtttacgcccagggctcctttgccacttatcgcccttctttctcctgtggtctttacacgaccacttctcatcactatcccaaagggcaatattggcctttcaaca

SEQ ID NO: 305109 - DNA, 1164 bp, Cannabis indica
ggtcgagtgacttttcttcttgccaagaccgagtaacttcaaagtcacaatggccgagtgacttcattcttggtaacgattgagtgacttcaaggtcactatggccgagtgtcttttcttcttcccaaggccgagtgacttcaaggtcaccatggccgagtgatttcattctttttcatggccgagtgacctctaaagcacatggccgtgtgacatctcaaggctcatggctgagtagtctctcaccaaagccttagggtcgagtggcctttcgtcaaacccagaccaagtgatcacccgagatagggtttggtcgagcagccctgggacattagtgtcgactcaatcattccttgaccaactcttaaagttgatgcctctcgcatcatgagactaattgttcactataagaaatcctatcgattttcgagattaacacacaccttaaatttaaattccaacctataattactaaagttacaattgcctaatttctataaatatatcttttaattatattgcaacaataactttttaactttgtgataattctaattagttattataattattatattgaattatgtagtcattatatatatagagagagagagtgcacaagaaaaaaaaaggggttgaggtttcaagagtcgacgaggcagagtatgatctttggatgctctatttctcattcaaaatctttttcagccttcaactttcggtacaatctttgagctctcttgataattttagctaaattctactcttggatttgtaagaaaattacttagacatgttagaatagtgagagaaaagaaaaatctttcatttgttttttataaaactaattaaagttttatatattttatatacttttcagtcaaaaaaagttaaataaattttaattttaataacattaattttttttattttaattattattttattaatcttttgaattaaatatgattctaatggaattcaatgaatttaattggaataacagccaaaggagcatgactacaatcaaatagtaattttcaaaaaaaaaaaataattaaagttatatgtgtaataatctcaaataataaaagaaatttgcctcaaataacctaatattatattgttaaaataatttaaattatattgaacccaaaatgaaac

SEQ ID NO: 305110 - DNA, 1196 bp, Cannabis indica
agagagagagagagaaatcacttgctgaagaactgagtgaagattctagacttggaaagaagtgcagctttagagagaaaatattgatgtcgaatgatggtgtcaaactgagttcttctacagatggacgcttgagacgatcaagtctttccagaatagtacaagcttgatcgattaaagaatctatttcagagttaagatccagtgctaacggatgcctcaaagacgtgcaaataaccaccagggatggtgcatttggatactctcgagccctaattcgaagtagaagattggatttagtattcaatatcatacttcaaaatttctcatttcgtaatcaaatatcttctctataaactctaaagaaatttgaaatttgggtaaaagtggtaaactgtggcattacgaagtatttatacttgggagttgaaattggcatgaagtgcgaatcgatggtctatatttactctccaaaaaacaaattcgatctaacgatccagaattccatcagtgaagcattaaatgcaatatatgggaccgagataaatcgcatgatgatattctccttgagatttgcacagatataaatagctgatagttcattttttttcgcttcaagcgcctcctcaataaacaggtactccatgaaccaatgatgcatcgccacacatggccttaaattcaaaaaattaaaagttatcttccattcatagaaaatatatggaattcctaaaggcctcacctttaacctccacttgtccatccatatagtccgaagcaagcctttgcaacccacatcgtttcaaaagattaggggtcaattttatatatgtttttggcagaggacacatggaatctaaatagccaacacagtccaagtaatcaaagcccaacggtgggcccaaacaatatcactaggccgaatccataagccatcaattcttccgggtaaataacgttcaactcgtctaagcgagtccccatctagcatgggcaacatcggaaagacatgggtaaatggcggcaaaacccccaatactttggttttagtttcactaaacccccacaacccaaatttctgcgggtaaacccccaaaactactattctgttagcaaaaacacacttccgttgaaatttagctgttaattgccaggttggattggagcgaggacacgtggcacaattttattggtcc

SEQ ID NO: 305111 - DNA, 3462 bp, Cannabis indica
ataatttattattaaaaaaaataactgatccataataaccgatccaatccacactattgcggattggattaaattggatccaaaatataaaatccgcacttagtgcggagtaaatgttgcttgactaaaaaagtgcggattggatcggatgaacacccctactataaacaaaatagttcggattaaattaaatgaacacccataagtagaggaacttagacctaaacacttccttcaaatgtagcataacttccttcatagttaaagctcctcttgaatgccctttctttgtaacttcctacgaccatcaccatggccataagcaacttttgcttattggcattctttgaatagccctcttccccaaagcaatttctattattcggtctcacgagggtcaaaagaaaagtagaggttactaacgatctatcgttcatgtactcataaataagaagcatatgttgtccctcattgcagaacccaattagcagtataaattcttggtttgtacaacaagtagacattacatgaactaacttctcaacgatacccagcccagtgatcactgatctctgaagggctagttttgctgcaaaaaagcagatccaaataatatgttgagaaaaagtgtgtgagagaagatacacaattcataaaagagttgcccacatcgaaggaaaatgcatgaagattacacaacctgaaatacagtttgttccccttatccctccttgtaaaaatattgataaacaataaatattctacaataaaaatccataacccactggcactgtcgcattttaactgagttttttccaggttacaaagatatcatatgagtggttacaccgagtttaatttccaaacagcttctttgctacaatctctggccaagtaattttgggcttgagagagaaagacataagttacaatggaagtgagaatactaaaaaataataataataaaaataataataataagcaaagatagacaggaaactagaagttccaagagcacacaaatgcacaaaaagagatggacaaactaacataaacaatgaaggtggcaatagcacgaccagggcacaagagatgcagagagttaggaaaagcctctcagcaagttgctgaactgtacctcctaactttagtcctaatgcagtgaatgcctgagacaatttaaaacctataaatgaagcaaggaaaataataggtatacaaatggaaaagaagttgaacatgtgtgtacaatctcaatctttttaaccacctcttttaacttttcaggattcactaccatcagctcttcaactatgttatactaatcaagatcatgccaacccggtaaagtccattaccttgacctttaccctcccatctttttattagaccaattttcccattgctcttcaaattttgttataagctgtgcaacaaaatgaaattgtaggagaaaaattgaaacatgtgtgttaaacgaaaaagaaataaataaataaataaaattattattatttcattatttcttttaaaaggggaataattggttttaaaataataataataaaaaataataatcagtcaaattaagagagtcaaattaagagagtctctctactctttaactacccactttcctattttctctcactcattaagttacatgggtggtgaggttgataaaaaaatatataaaaattaaattaaaaataagctttacaaatatgagtagttgagagcagaaaatggatcaacactttgaaaaaaaagtctgagaaagagagaaaagaaacacggagaaaaaaatacatacgatactttttggcaacaatcaaaaaagcttcaagggtaagtattcataaatgaaatcattcctatttgtttttcttttgatgtatatcttgttcctctcccattcctatttctctctattcatttacggaatgccctcattctataaatgaaattggatgccatcatccatagaatgccctcattccaccaaaatttggatgctctcattcatgaaatgccctcattccaccaaaatttggatgctctcatccatggaatgccctcattctataaaaaattgaatgctctcatccatggaatgttcccattccacaaaaaaaatagatgctctcaactatggaatgcccctattccacaaaaaatagatgttctcatccatgaaatgccctcattccaaaaaaaaaaaattgaatatcctcatctccataaagttatcgttctaaaatataacctctaattacgaactagagtacattaatttttacactgcactgaatatatcacttatgaaagttccgagtaaacgaatatatattattggtgtcatttttttagagctttgtgcctaaagaaactttgttgtaatgtgctcctcccaaaagtaaaatacaattaagttatgtgtcaggtataatttatttatacatatatatggaagcacatatatatgaatcacttacatgcgtaaagctcacatggacgatattaacagtacataaacaaagatgacatatatgtattttatttgtatttcattttcattgattatttaaacaaaaaaaatgatgtagaattggtatacatataaatatgattataccaagatataggctcattaaaattcatatatatatatataatgctgaatataaatatatatatataacgtatcgagataaagactcaccaaaattcatataaatatatataggatgctcaatataaatatatacacgtaaatgtaacgtacctgtattatattgacggagtgagacacaaaaattaaaaattgaggaatataccaaaagggccttcgggtccaaagtaaattaaaacttgcttttcacttaaaaatatctaaataacatatacgtatatatatattgtgcatacagtgtaaaagtcaaatgggtatatataatacactgttttccagttatataattcaattttaaataggaattgaattataaaataaacatcctagatactatctctaattttaattgaataatataaattaaatttgagaaaatatttaacaaaagataaattattattcctcaagtttcggaataaataattaaaatatcagccaaataatacttttatttataaaagataatagaaagatcccaaaattcaattttatcacaaaaaaagtggtaaaattccaaagccatacaaaatgacacaaaattcccaaatgagctcactaaaatcaatcttggaatattaaagaggtcattcacctcacaaaatttcaaagaagtcattaacctcacaaaaatctcaaaaatggtaattgtacctaaaaatttaatagtgcactaaaattcaaagtcataataaattaaatggcattccaaaaaagagaggtcattcacctcataaaaaaattaaaatcgaaactacgtttgacttgat

SEQ ID NO: 305112 - DNA, 2014 bp, Cannabis indica
aaaaaaattaacagagagccagcacattgatttattttattaactaatttaataaactcattcagtcaagtgacaaatttgccaagtcattttatgtctcctttacttccgttaaggtaattgttttttttaaaaaaatgaaaatcatcatcttattaaacgattaactcagtcacaaaatttagtaacaattcaatagggacatcatgtctaaattaaaatggcgatcaaggtgggatatagaggctctaacgacggaatgagccactatattttgttgatcgctttacaaagtgaaaagaaacgttacgcaaaacagataataaggtcttacaattgttaacgtagattttcgctaaccaaatttgagcctcacagtaacgatttcacacagaaaaaatacaagctataaacgtaaaagtacgaaaacagggtttttttacgtggttttgcagttaaaattctacatagtccacgagtcagtcttattcaggtttctgattatttttcagggctccttttttgatcttgtttgccactattttaattacatagcaaacagttaattataaagttgactgtaatatgtttacaacgatcatcccctaaaatcacggggtttgattacatatcatgtagtgtaaatgtggttatgatttgaaaattatatggctgtgattttcccgcttttactgggtcaaaatgatcgtgttttaaacatgtctttaattgtcgtatctagagatgtctcgacagaagcttggttccagcgatctcaatagcgagctagggctatttttccttccgaggtcgacgatgcatgtcttgtgacgatcacggttcttatttacaaagagttcttcaaagctcatttgaatgttagcttctgacttgctagggttgtaagcctcgcagacgtaactgcatgaagttatagtaagcattcccatagcgagacgggcacctcgcttacttggtctcaagccgatccgactattacacttagtttgtacattatacactaagggctttggcaattgatatgtgtcgctttcatcttcctatgtgtattgtccttgatgcctcgctattcgcattcagcgacctatggtttctcactaatatactaagtcccagattgtatattgattcctcgcctaagatcttatagtcagcaggttacaaatatactctgatacttacgtaattaatgagttattccataaaaagcgattgcatctatcaatattccctttatcttgacacgtgtcctccaccgagatggcagccgaattttgagtataacaacaatcattaatcactttgccaaacatagaaatcataacaatagtactatgaatggcttgaactatagaaaagcagtccgtttccaagatcacatgtgaccaccgatggtctttcatccagctcaatgcttctcggaccccaatagcttcagctacttcaggcgataccgaaccatggaagagttttgtaccgcctttcaccaaaataacatttgagtctctagccacaaaaccaactccatggttaaaagtctcgctaaacaccaccgcatagacattaatcttaatactattaacacctggagcgacccattgctctaccctatccccaggtatgtacccagggaacaacaagttattgcttgatttttgagcaatacgccattgattaaaatagtttgttgtcgatgtaacagtgctctcaacccccactgtcctattatgctatactatatcattccttgcgttccaaatcgtccaacacacaaccaccatcaagttggaatgatccttctccaaaacaaagaaccgcccgatgcaccagtccaagaacgaggtgtcttactgcatatcatgcctattcccacgcgattccaaatagcaactgcagtagggcatgtgagaagcgcatgagaaatggtttcagcaactgaattgcaaacaggacaaagaatattaacctccacccgttgttggaaattatttta

SEQ ID NO: 305113 - DNA, 2650 bp, Cannabis indica
cttaactgtgatttttggacggaggtgtgctaaacaaaacggaactagggtttaagtaatttagctgctaaaaattcagtttttgtggttaagtgttacaaatcgtaaattttaggtggtttagctgccaatatcccttatattatatattagttattttaaattattaatgtaaataatataaaatgtaatatttttttaagtaaaatatatttattttgtgtgatatttaatttgaattattaaagatattacactaaacggtaaactattctatattaaattagtgtaataattgtggatggtattagaaaaaaaaacaacacatatatactatgtctctaaaccaggggctatcattgcacgtggttttctagttttccaaagtaaccgcactacgtacattatctttgacactttgaccatatgaaatataagttgaccaactacaacatgtggcccacctcttacgtgtgtagcttaaaagcttttgtcaattgatgcattgcctatttttatgaacaagtgatgaagtgatcatgttgattttgtttcttaatttgaggctgcggcggcttttttcacagttttttttttaatctgtcacttttcattaaaaactgataagcattgttaaaatgaaaagttagttacagctagttactttctgttagaattgttaattgagatgtctactagtgaattgctttttaaagtgacatttggtaaggaggaataaaaatatagaaataggaatagaataaaatttaaaaatatttagaaaaatagatttttttttttaatttttacactttaaaaatattattttattttattatttttttttttacatttttacgaaattctattcagaaactcctatagcaactaacggagcaatctaaatcgcaatcaaaatttgtatagcaacccacatagagatcacagaaaaaactactagagcaacccaaatcgtaaatttggaaaaaaaaaattaaaaaatagtatatgagacaatttccctaaaaaaattaataaaaaaataattaaattttttctcactttacattaaaatattctttcctttcatttcaaaatgaaatagtcactccatcaaaatagtagaaaggtcatcccattagaatgacattctaatactttaaaatacagctaaaaaatggaataaaaataatttctttttcattctattccatttcattacgtccaaccaaacgccacctaacagatttattatgcaactcctgtttaattaataattgattgattgtataaagttactattatggctcataacgagatcaagaacctttcattcaatctttttctatcaattttttctctcttttctcttcttatctttcttatactttatctctgtttttcttactgtccaagcacaatgtcaagaagaactattatggtaccagagcatgattttctaaccttgataacaaatattgtcacaaattctggagatgaatttcatccataagcatggaatacctcgaattaaattagcatagttcccctacaaaatgcaagaaacagggaaaatggtgattactcacctatcgacttcaataacactctttccatacacttgaacaatcacaactatctcctttagaagcaacaagttcttgtagcaaccagaggaaatcgacttcaggcttacatccaggaatcaagctctcttccatagtacttcacaaaataagaccgagttggtaacaatgtcaatcataccttttcaaattggaaagttcaggatcaacttcttgtatcttggcttttgtcttcaatgactgagagcttgcttaccataatggttggatgcaattcagctagccaaatctggagcacacttgaaaaatacttcacactgcaagtctctgcaaagatccttaagtttcgaaccaagttcaaaaatctagagaaaggatcactcagccttaatgaatatcttctcaaagtcaagcaaactatcaatttgattgcatctgttggagaaattctcaacacaagtgatcatgtggcacctatcttcaaaggactctctagtgaatgtacctttttcatatccacaaacacaagaattgaaagctgcacagtggaaaaaattgaagcgctgtttatagcttctaaatctcggattaaaaagacagacaagaaatagaaatcagtgttagtgcttaagttgctattatggacaatgatcttcttgaagctaatctggccaatatcaataggagctttaggcaagggaactttgctcgatttatctgaaagaatgagatgcatcatcttttccctaaagtcatcactacctatttataagaaaccacctagggttaggttagatttatttgacattaaaataatggaaaaaaataaatggtaaattgctacataagtggtcgaccatgatatggattaggccccactttacaattttgccattgggtgactattcaatggttacatttttctttgacctgtaatagcaggttactagtaggtaaacattcattttttagattaattaaatatttaataagacatcttttagtaattaatatttataaataattttttttaatatttatattttaatccttactctaattat

SEQ ID NO: 305114 - DNA, 1911 bp, Cannabis indica
tttttgattaactttttttttttaatataaccaacttagaagacaattcctaactatgaacagatataaaaactgtaaacattttatcataacacctttagatacggattattattaaattttattttgacaaaaatccgttcaggtcctatgtatactattttagaaaatacagggtctattttgtcatttaacaaaatagaaggtccaattgataacttttataaaatacatggtccaaaatagtatttaccctaataaaaattaaggaagtaaaagaaaataaaaaaaaaggctaaagtttatttgaaagttagatttagtgagaaaagaaaaaaaaagtaaagaaaatgtagaaaaataaagtgcagtatggagaataaaaagaaaattaatttttcatgtttggtattattttttttttcttataaattttctttttatactaaataagagatcttattttattttcctacatttttttaccttttcaattttttttatcaaaattcaatagccaaacatagggtttttgaaaatgcagagaaagaaaaaagttagataaataaaaaactgaagtaccaaaagtaaaatttttgctttgaagaaacttttggcttcaaaggatggaattagtttcataaatttgtttaattttagaagaatatacttttttgaaggaggtgatggtggagtattattctattattacttatatggaaactttatcctagttttaatgtcagattattaaaacagaagctgtatatatcatagacgtggttgtcaatgtgttacaattattacaataacaggtccaacaaccaacaatgactaaaattagtattgtgatatggttatctcaatcgggtatcccaattgggagccaatacacaaggctggccttgataaacctctacattttcacatgcctcttccctcatctcccacataaaatttaattaggagggacccagatagagatagtgacattgtaatcagccacaattaatcatgttgactgatctattgaataagcattttcataaggaacagatgtcaaaaataagtatagccataattcaaatgcttactcgccggaggctattgtttatttatgttttgactcgtatgactaaggagacaagtttgtggaaagagtttccggaaaatatatgttaaatgagagtatggtgcctcactaattcgaatctctaaaattggacaagtgttacatatatttataggaaagattgtcaaaacataaaatatttcaattaaggttgatctgtgcgaaataggatcagacaagtgttttactgatctgtcttaactcttaagtccaaggagttagtatatagtgcatcacttcattgttggatgcatcattggttttagtagccctaaacaaaaagtttttatatactctattttaaattattacacctgtcctaccgacaatgaaatataattcgggcactacattcaaaagtttgatttttcatatcatttttttttaatttgctatagagtatagcaaacctatcatagactgcagattttcgtcataataaggagagaactgcatacccaccaccatttccttggaggacatgggtagagaggaaagaaggaaagaaaatacatacatacatatatgaacctttgtatgtgtacattatatacaaatacatacatatatgaacattgttaaaatttaaacccacacatttggcagagagtgacaaagcatacactaccctgcccaagggtgatggcgaaattaaaatgcccttgggtaggttaattcttcccttaccattttaaaggaactattatctatatgatataataagtaatatataattaatttctcaatatctattattatacactgtatcaattaaaaaa

SEQ ID NO: 305115 - DNA, 1928 bp, Cannabis indica
ttaattaaggagataatgaacggttctcttaaaaattgatttttttcataatgccaaatacccactctttactcctaaatctttcatgacaaatgagttttctataataatttagagatgtgttaccaaatttggtacgaaagttacaagaataaaaaaaattataacttaaaattaattattataatttctatatctaattatgcgattactacactccatttcaacgagtcaattctaattatacaattggttccctaaaaatgtacattacataacaagttttttaaaaatgtactcttttctttgttaagaccttagattttaaggaaaagttcaagccaaccgttcattatcaatggtgcagatgcaggctgttcttttgagtttgcagtgggccgagatgcaacactgggataatttcaccattatctctgattcgaaggtgctggtggaggccatccgatcaaaaaacaccccggattggaaatgttctgcccttttttctttgattttaggaaaactttcttttctttctacatgttatgttgtttttgctaaaagagaacattttactgtagtggatgacttagccaagtcggctagagcatgtttggctgatttccagttttcaattggggagggatttccccctgtgaatcccagctctctggttttttcaatataatctgaactgaggttctttcaaaaaaaaaaagataattctgttactttatctaatggattcttcaaagctcatcgtctcaatgtattcaaattgacttccaaaaccttgaccttggtctagttttgatttgttgaattttcaaattgactcccaaaaccttgaccttggtcagtctactcaattactagtctcattgacattcatgtgttacttagttgtcacacttattaagtcatgccatttgtaaaattttattgaaattgagggtgtggaaacccattaagaattggaattagatgtaattgaaggtaattacataatgtaatatatttatttggccacgtaataatacaataattgtataacgggagataattgagagatttcaattactctctcttattctcgcacttttatgagaattgactgtaatcgtgtaattatatactaatattttttatattatttaattaatataataattatttaataaaatttagtcctttttttattttcttttttcatatacaaaatttaattttttattctatatatgatactattttataatatataagtacgtgcaagtcttattcatgagtccaacacacttaaattaaataacagatagatgacaataacatatttctacataacaactaatttttctccttcagaataaatactgccaattattttgtggtaagtctaagattaaattgcacatacataattgaactatatattattattactgtgattagtagctttattattagtattttagccatttttgcagattattttgtaccaaatttgatagcacttttgattcatttttatgaaatagtttttatgtttatttattatagacttttcctccaccataagtaaggactctattttctcttttcaaaaatttttgtatcacatttgaattaatcaaggggatgacttactcaaatttgggtctgctgtccaattcatttctaataactacatttcatttatttttgaccaattttaccccatttcacacgttccaaactatattattacattacccaaatatttactaattaattattattatgtcaaaatattgaactataacacctcatattagtaatatatatatatatatgggtgactatttaatggttacatttttattgtaaccatatggttacatttttctttaacctgtaatagcaggttactaataggtagactttccttt

SEQ ID NO: 305116 - DNA, 1544 bp, Cannabis indica
tgtccattcttagatattattaattatagctatcgcagggatggcatcagttaatatgtgttttgtcatgaattaattcctattcattatttaaaaaaattattgccatatttatgggaatacaattttgagctaatttattaccatatcaatatataaaccagacatatatgtacatattatatgtagattccaggtaaatatattttttctaaaagaaattgatagatcatagattaatatttagtaatttactcctaaattagtgtgaatcttagtttataatattctaatcaattaaagtattaattactctcagtaggtctcactagctagactaataataataggtaggtgtactggtaattaataacaggagacacccgtaaagggctcctttatatatacacatattatatatcgataaatattgtcaaaattaacattttcctcacttcaggatatctttcaaaatttataaaaatttaatatggcaaaaacaagataaaaataaattatttaaattttattttaaacatgttaaattttattattacaatacatatggattattatgtaagaaaatctttcaaatataaaaataaataagagtttaatcatttcatataaatatatacatgtccgtaccagctttgtaaaatgaatgcatctaaatgtgtataatgtttgtgtacattgcaacttttagtaaactacagcttttaaatatataaatttatatatatatatatatatttggctcaagtcatatttaatttaatgaatactttgaaaaaagaaaaattcaacataataatacactagtatagtggtccattaattttcagagcatttttgtagagatgagtaaaatgtttttgttttgttgtatatattatagacttcgtacgatcatttaataacattcaactaataagatagatgtgtatataattcagccataaatgtttttttctgagaagtaataattaatttcttgataccatttattaattttacgtgaatcaattcagtttttccagattattaattttctttcattattttttctccttttctatatagtctccagctatagctgacccccatcttcataatattgattcttccatatcttcctcgttattttcttattcctcttaaaaaaaaatgttataattaaatcaaatatatttggaatgtctaaattctatgaaccttataatatgagctgtccagattacccctattgatgattatgtgaacaatggcgcaaagaaattaaagtacttataatattagctagttttagacatgaattattctaaattcaccctaaattaattaagggtaaatatcttactatacagtgataaaaaaactacttgcctagaagtgcattaatattaatacacgagtacgtcattctggctgtttcatggactgatgactggccttacagaccaacacgcagtaaaagctagcgcatttcgcaaactgcactgataaagaggtcaaagttttaccaacatacattgctaaaa

SEQ ID NO: 305117 - DNA, 2792 bp, Cannabis indica
tcgaggaggccaaccaaaccaacattttgtgagtagatcaattgcttgaccatgttttgcttttgtttgttgttaactcctcagacattccaacatagtagcctatccattttgtagaggaggcactccccctcctccactcttctctgtttctgcaatagcaatctcctgaacaccttttgcaattaccacagtggcacatgacccttgctgatcgtttaagacctgaaaagagttttctgtctttgttccagctgttgggagttttgcttttggtttctagcctttagttacaggttggaaatcattagtagcaagaatattgtctgcagtagcctctgttagtgttgtgtccttcttttctttagcaacccactgctatttttgctggcctggtttcttcctgcattcatcatttatgtgtcccaaaccattggaatttttgcaaaccagaggcttccattcgtattttacaccaactaatgaattataaccatgttcatcttcgaagcttatggttccaggcaattcttgctgcagtgtgacttcaatgaggattctgggaaaattgagcttatgtctcatttcggtggtatcatccaccattatagggttaccgagctaccctacaattttgaaaagaattttatcgccccaatatttcaggtctagattttcaagttgaatccaaattggaacaattcgaatatcttccttcctgaagttggtatcggggtcccatggcttcattatgaccggtctattgttgaagaaggtatagcctccattaaggatggtatccctgtcttcaattgtaacaaatcgaatgatgaaaacgccataagagagcaatccaactttatcaaccttatctttctagactcgacgagaaaaaccttcaaggattgataaaggcggattagccccaagcacatagcaaacaatggatgaattccaaaaaaaacttcctcttctatatcatccatagttatcttaattttcccttttccaacactactttcctttttgactccagagttctcagctttgttaaacaaatcattcaaattccttaaaaccgtaccagatcgcagtatagggggaccgatgaattacctttctcaagctctttactacattggatatttgcttccaaaaacaatgcaaaatcagatcgaacatcatcttgttgctccaaagctcgaagtgatgatcgaggtgataatgcctgaaagtgctcatcgtgagcagttttcccttcaatagagttttcctcttcatctatcaaataagtagcttcaattccaagtatggaatccacggatttgaattttttggtttcacatgatgaactagggccttgtttcttaacaacattggttttctttgttactgattgttgcttcctttgcgccttggatctcgtttttgccatgaacttcttttcttctttgaacgagtctttaagagtagggaatttgagaataagaaagagcctctcatccattaaggtctaagttgcaatgtactctaggcatcctcaaactcctagtgcggaaggttttcttttctagcccatctctttctcattgaaagatggcacaacctcgagagctgagagagcaagaaacagaggatgttttagttttcttaaaacatactattaaaataaactactaatgcaataaaggcttactgaaccatgagacgaactgattgttgatgatggttgtacatgttctgacaatcttcagaagacaacctggaggctctgataccaaattgtaacaccctactagtttaggtgtgttaacgtgatttttaatttaattgtgcaactcattgctaatcaacgagtttattgaagatcttgaataattaaaactttatttaactatttataaatatcaaaacattatacttatacatagtactcgaattccgtttacaaaatatttacaaaagtttcacaacgcataatgcaaaaattttcgcctagcgactatacaaaatatgctcaactatcccaaagaccatacgctcaaggcctaactgccctgacatgtataatcttcatccgcccgctctcacggttgctcaacctaagccttccctttacctacacatgcaagcaataattttgagttgacagacttagtaagaaaagcgtaatcataaacataaacatatattcaaaccgcagccaggcgccaatacacctaatcacaatctactaactgagtcaggaacattctcgacaaagtatgaataactgtgaatccagcctatactcagtactctagtcgtactgatatggtagcagttagttcatactatctgatagcctagcatatatctgttggcatctttgtgcaactctatgtacacctcactgataccctgatattctaatctgatggctatatattagcctaacatatatatatatgttggtatctcggtgcaactctatgtacacctcactgatgcccagatatgttattctaacggaaactaacacgtacgctaaacatgtatacataaatgcaaccattatactaatcttacctcgtttccaaattcatgtgagttggtcgacctgaacggaaaacttcgtgctggatggattccctaatcacaaaacataaataggtacacgacgcgccaaaaaccaggaaacccaaacttccaacttaaggttttgctatgataactaataccccaatatcctaagtataaaaaatcaaccaaccaaggctctgaaactaacacaaattgacaacacaaaaaat

SEQ ID NO: 305118 - DNA, 909 bp, Cannabis indica
ctttaatttgacaaaattaccattattatagcatgtaattattttatgtttatagatttttaaagggcatatttgtctttttcatttttaattaataaaattaaaattaaaataaattaagttaggaatgggaaatgtattccctataaaaatagaaggagaacctttccctttattttctccctaatttgtgtgggtcccactactttttctctttctaaaatttagtaaacaattgtatgagaattataaccatataatttattcacattctctttaagtaaatatgtcatgttatctattatgtcatccccctccctttcttttccaagtgaatagtattttcctttttattgatgaacactcaaaaaactttcacatcacataatttaaagggaaaattcacaaagcatgcttaaatgtggtccaagtaactatcaagttccatgagctagtgcataagcttgacctctaggaggctagctggatatcgaggaaatataattgtgcggcccatgatgtggctcaatgggcaatccaatcaggccagtttggaagaatcaaattgtccaattttgacagcttcccacatggtggcaatgtggatggctgatgcgtttcttcttatcattctacttcaaagttctcttgttgttttccttttttagactctcattgtataactgagttcagaatttgtgttgtttactactttggttagttctgtgtgtaaggagttttactgctgtggtttgttttgttttatcctggctgctcttttgaggcaccatttataaaaaaaaaataaaaataaaaaagtaacaaaactatctccccctagtaactctttcaaatttatatttttctatctattactccctaaaatacccctcccatttcaaaatcact

SEQ ID NO: 305119 - DNA, 2075 bp, Cannabis indica
taacggccaaaaaaattcaaggaacacgatttagtatatgtcaaagttcgggagggaaaattactaagtagccataaaaaaaataaataaacaggtcattttgacatttataatgcctatttatatgttcaataagttcattttacagagtaaactcaaaattgaagcgcattttctaaattcaaaatataatactccaaaataaaacgttagttatcaaatctccaaaataaactaatgtttcattattttaattttttatattagtaaataaatgtagtaaatatgtatatatatatatcataatttcattaatagattaatataaagtggttatttttatattaacatatttatgctttgtttattaatatgtacagttaattgtgttaaattaacgtgttaattttttattttagtgggtctacttaatttttatttatgcaattaatttaatcatgtccatctaatcaagcttaacctatattttaacccatatacgtatgttaaatgtgaacctaataatttcatgttatttttgaattgtaatatcgcgagttgtaactaaaatattatctataaatcataaaaataaagttatcatctttatcaaaatttcttataattaataaccaaaatcattattctaacacattggtagttactactttcttaaaactaattttagacaaggtagaaatatatatattttaaactcataaaatgtactacgtacagaaccaaatttctcctaaaaggacattaagtaattagttctatgaccaaaagaacaaatacacttacttgatgtgtttgtatatatatattatattagcattattattgtgcattagtagtgtttaattttttataagtaacatcgtatgattagttaacgatattttttaaaagttattttcttaaattatataagataaaataattaattacaccaataaaaatataacaccgagaaggatactatagtaccttttgatatttctcatgttatatatacaaaacttggtagcatttgttaatcggtcaacatatcccatgagtaaagctcggttgagtaatataattaaggtattaggtaatgaagaatgatttaagataaaaagcttaacgaatccaaataagctttgtcgattatatatgtagatagcaaatcaggaaatttcggtggctttttttccttaattgaataatgaacttaaaatttaagcacaatatttgcctcccatcaattaacaaagtgacccaactaattaaacaaaaacaagttggtggatggagttgaaatgaatataataaagcttctttagttagtttagagtaataatttaagagtttccaattcaacggttcttcacatgtcatagtcaacagctcataattaagatcataataaaaacatgcacaaaattattgtagcttttgttatggactttccttttgtttattccttttccggataagagattggttgaaacgcttgtcgttttatcctattgatgtcgtttgaaaattggttaaagaccaacctctgtgctgttgggtctctaacatgacaacttaacgacttttgagtgttagtcaattttctaattaggaagaaaaaaaagtataaatacagagtcaataaatcttccctcgcctgactaatgtgactgcctgcctaacggtcactgtaacttaaatgggccgagtgtcatgcttagcccatttacttttaaaactaataaattgggctatggcccatctaggtctcacattgagctggtaattgtgaatgaaactcaacttgtaaagggcctatgatccgcccttaacctatgcaataagattgactttccaattaggaatgttctggaacattcaaagttttaagtcttaattatatattagatgttaaatttattatgcatccaattcaatagtttagtcatctaattgaatcaattttatctatttgatatatttcatgtatatctatagtttaattcagatttatctaatatttaaacttagtatttcttagatgggattgaatctatctaatattttagatc

SEQ ID NO: 305120 - DNA, 5349 bp, Cannabis indica
atttcagataactgattttggtaatattggtagttttgttttctaagtaataaggttttcatgttttgtttcttgaagaactttaccaccaaatgcttgcaagagctttagctcatcacttcaaagctaagctgctgctgttggatgttaatgccttttcgctaaaggtaaactacagcttccttatttttcatgaacatgaatttttatacagtaatactaatgttagattactcttaattccttacagatgcaaagcaagtatggttgtgccaaaagagaagcagtaagctttttcattttgaataaattatgattacaaactgagcttctcttaagtggaaatgttcctcaccatcactctctatcttcttttgtagtctctcaatcgttccatctcagaaaccgcgatggaacgcgtgtctaatttgttcggttccttctcaattcttccttcaagtggagacactagaggtatgaaaagtgaataaatgtgttctggttgtgttcaatttcaaattctggttcatttatggttttcataggattttgaataatgattcccaatggctgaataagaagtcacatcccatatgaaacaagagcttgttattggttctttctcattcatggttagcttttattctgatacaaatgtcttcttacaggaactttacaacgacagaacagtggtatggatgccaaatataggtatggcaatggacattgtttcttctccattgttcattatagcaagagccatataggttgaggatcataccatttactaacttgttgcatttgcaggaatagtgaaggttcaaatactccaacacttcgcaaaagcggctcaagtaactctgatatgagtagcatggcttctaaatattcctcttcaagctcaggtacttcttaatatgtttcgaaaagacataggtgtttgttcttcctttccttcccttgtaataaagctatgtatatgaataaattgataagtttaatgccttttctcagctcccttgaagcacatgagtagcagctggtgttttgatgagaaagacttcattcagtcactttacaaggtaagaaatgtgtgaaaatcctagttagttgaatgtttcctttgattatctcaaaatggatttaacaagatgaagcattgatttctcaggttgtggctgcaaaatcagaaactcgttcagttatattgtatataagggacattgagaagctacttgtccaatcacaaaggttcttcaatttgttccagaaaatgttgaagaagctttcgggttcagttttgattctaggttcccgcatgttggaacaagaaattgtttgtggagaaattgatgagcggctttctgttttgtttccatacaacattgacattaaactaccagaagacgatagccaattcggcaactggaaagataaactggaagaggacatgaaggctgttcaaattcaggataacaaaaaccacatagctgaggttcttgcagctaatgatctcgagtgtgacaatctggcttcggtctacaatgctgacacaagggttctcagccacattgaagaaattgttgtaacagcaatttctcatcatttgatgaatactaaagatccagaatatagaaatggaaagcttgtcatctcatcagagaggtaagtgagattattaaaatatgttaatagaaaagtggaagaaaactgtacttgactacaaatatggattttggaacagtctgtgtcatggattgagcatattcaaggatggaataagtggtgagaaagatactttgaagttggagacaaatgcagaatctttaaaggttgtctcatattctttttgaattaagttatggttcaatgaattttcaagttttgacataaattatttttctatttaggatgatgctgttggtgccaagaatgaatcaaaatctgaaaacaaatcagatggagagaaatatgtttcgtcggggaagaaagatagcgagaatgcatcaccagcaaaggtatgtgtcacttaaagttttgaattgcattattctataaacataattgttggtcttattgaagtttttttggtggtgtttctgcaggaagttcttccggacaatgagtttgagaagcgcataaggccagaggttatcccagctagtgaaattggagtgacatttgcagacattggtgccttggatgagactaaagaatcactccaagagttggtaatgcttccacttcggagaccagatcttttcaaaggtggtcttcttaagccatgtagaggtatattgctctttggaccacccggtactgggaaaacaatgctggcaaaggcaattgcaaatgaagccggagcaagtttcatcaatgtatcaatgtccaccattacttcaaaatggtttggggaagacgaaaagaatgttcgagccctgttcactcttgcagcaaaggtctccccaactatcattttcgtggatgaagttgacagcatgcttggacaaagaactagagttggggaacatgaggctatgaggaagattaaaaatgagttcatgactcactgggatggcctattgaccaaacccggggagagaattcttgtacttgctgctaccaacaggccttttgaccttgatgaggccatcattaggcggtttgagcgcaggtacacaattgcatacactctttctattcaataaggcatttcatgcaatttaatagtctgctaaatttgacaatttttacagaatcatggttggtcttccctcagttgagaatagagaaaagattttgaaaactcttcttgcaaaagaaaaagttgagaatcttgattacaaggaacttgctactatgacagaaggatatagtggaagtgatctcaaggtatgtttactaatcaatataaatagtatacaaaatcatcactaactgaatttgaccaactaatgagattaactgctggaaacagaacctgtgcgtgacagcagcatatcggcctgtaagggagctattacaacaggaaagaacaaaggatgtggtacactactcactatcttttcagctcttcctcactcaaaatactcatattgttttaccatgttttcacatttagcttaatgcatgcatgatgttactcacaggaaaaaaagaagaaaagttctgaaggctctagctcagaagatgatgcttcagccaccaaagaagaagataaagaggagaaagtaattacactcaggtctttaaacatggaagatatgagacaggcaaagaatcaggtaacttgatcaaaacaactctctatttatagttccacaaaccagcacacaaaaaatttcaacatgagtagttctaactgtttacacacatcatagtgtattctttccttaatgaatttatcattacaggttgctgcaagtttcgcctcagagggatcgattatgagtgagttgaagcagtggaatgagctgtatggggagggaggttcaaggaagaagcaacaacttacttacttcctctagaataatatcttataagacatccaaaaccactcatcagcaccttcttagtgagaagaatgtcagtctaagaaagcttgaaacttagtcaattccatacacactttttatggcactgcgcagggcgagtttctagcatcgaagactcggcgaatcagctcctaggaatcccattaaagcttgtttgtgcattaatagtaactccaaatgatttatcttggcattcaggcgttaagagagggctatcggcatttgtttaagccaattgccaaatagtcctcattaggattggtcatgtgttctttttcttttttttactttattttatgaatgtatggtttttggaagtgtgtatgataatgataatggtattgtggggaagtaggaaaaaacatttatggacttgtttgatgttaagtttttgtattgtatggtttacgaacatgctctggtagagtatattattctgtaaattggttgtgtaatatttaaatagtatagtattttgcctcataactttgtattataattctattttcctcattgctctgtttggtattttctcattttcattagcaaagttacactaataaaatgctaaaataaaaatcagatgtagaccacagatgttcccaactttcaggatcaagactaggagataaaagtgtgtaatgcttcttaagtaagaaaagatattaatgatactattggacattgtaactttaagaacataagaacaagtgcagagcatagagaaaaagaagcacagatagtttaagcagagcaaggctaaaaaaaagcacttcgctttttaagagacaattttatttatagtactagactgttacaaattgtacaaacgagaagatctaacaacttttaactaattaactaatttattaactaactacaactaattctcatggttaacatcccttctcaaacgaaaaggagtgatagccatttgaagtttggacttgaggtatgagaattttgtactagaaaaagacttagcaagtccattgccacttcatcaagtgcaggaacatattgaacagaaagttgtttctccattatctgatctcgaacaaaatgaaaaatgaatttcaatgtgcttggatcaggcatggaatactagatttgctgcaagggttgcagcactttgattgtccattcaaattattagtggctgagaaactggaacttgaagttttgttaggagagaactaatccatttaacctctgctgcagcatttgctaaagccctgaattcactttatgtgctagatcgagccaccacttgttgtttctttgctgaccaagagattaagtttccagtgaggaacactacatagccaccagtacttctccagtcttcaacacaacttgcccaatcaacatctgagtagcattctaaagtgattccaacaacaagtttaagaagcaatccttcataaattgtgcctttcagatacctcagaagcttcttgcaagcttcccaatgcagtgttgttggagctttgacaaattaactaagcttattaacaatgaatgcaacatttagtcttgttagacttagatactgtaaagcaccaaagtgcttctgtacagtgtaatgtcttcaaaaggatctccttcagtgaggcttattctgtttaaatactgacgtatctttgtaaattagcaactttaccctttaaaatttgacaactatcaaatcgtactccctcaaaataaagttgagaaatattcaatttttttttttttttgttaaatcttaaaaagttaatttagaaattaaaaaaaaatattttgaataattaaa

SEQ ID NO: 305121 - DNA, 2261 bp, Cannabis indica
ctctctctctctctctgtgtgtgtgtgtgtgtgtagacacattattcctgacattttggctccagctcattttgatatatttacatattgtaattaatattcctttggggtttaggtgaaaaatcttctcacagttcgggcagagacagagactccagtaagtgctgtctccattcggagaattcctaggtgtgcccttttctcctcatcatcactcatgttttaatatctttcaaaagtctgaccttctcatgcttgaatttaccagggtcccagcagacatgccactgtatgatattcttaacgagtttcagaaaggaagtagtcatatggctgctgttgtgaaggttaaaggaatgagcaaacgccctcaccctgattttgatggagagaaaattgaggaagacatggtcacaaatgcaaaatctcttctgacaactcccttgcttaaaaataaaatgtacagcgataaatcagtaagtgttgttgttgacattgagaaagctccaagatccttgccaaacaaacaaacctttcaacaaaatggttttacaacaaatgggttgccacccttatcagaagatattgaagatggagaagtcatcggaataatcaccctggaagatgtttttgaagaacttttacaagtaatctatgctttcaccataacaataacaataacaataacaataatggcttctaagagtttaccctgtttttcaatataatttgtctttaaatgttgttgcacatttatgatacttgtcaattgtgcatggtttctgctgattttcttcccaaatgcaggaagaaattgtagacgagacagatgtatacatagacgtgcataaaaggtaaactgagatctgttttctcaattctcactatctttttctcaacttgctaaacgattaaccaacttaaaaaactggtcttaacatcttcagaatacgtgtggcggctgctgctgctgctgcttcgtttgtggcacgagctccatcaaatcgcagactggttggtcccaaacctgctgtaagtaacttctttcctgttcattccatgtcgattgtctgagaaccttaagttggatgacgagagcaataacctacatgacaatataactaatgtatatatatatttgcaaatggtgtgttaaataaatccatcttgtattgtcaattcttgaatatccatttctcatttatcacactacaagggaaaacataacttcaaaacattactaatttttcctcacaattgtgcaactccaatgaaactaaaatggcctctgaacatatctcaattatccttttagggagttcaaagtaagccagggcaagccccgagaaaatctgcggacgatgatccccctatcattaggattgcaagggaatccaatgactcttctgcgggtgacaagagatgactccaaacccagatggtaaattagagagtcatgtcagcctctctcattgtcttgttgccaccaaattatggtttttgttaactaaaagctctgaccacttgtaagttgtattatgggttgtgtagattttagtgcgtacatattctcaatatgtgggtatagtatgttcattaatagtttttttttttttcttcaagtctagaaccacttgtttggtatgtaacaagtatcttaaatttaaacgagtagtgatgcttagcttcattctgtgcattacttttcacgtcacgttccttgtcatttttgagacctaaaatatgaagagcaaatattatgtaaaaatattgttggttttcactattactttcaattaaattaattaagggtaaatactattttggatcttgtgttttacaaaagttatcaatttaactttctgttttgttaaataacaaaatggactttgtattttttaaaatagtacaaataggattttgaactgactttttatcaaaacaaatttaataataatataatctaaaagtgttataataaaactgtttacattttttgtatttgttgttcgtgttaagaattatcttcaagttagttatattaaaaaaaaaaaaggtaaatagcggcataagtactcaaagttttaagtttgtaagcggcataaacccaatgtttatttttagcggcataagtacccaatgtttgtaaaactgtaattttcctctagttttgtcagtataaactccgttttggatttattaaatgaacatttggatactacatgtttctgtctagaccgaataatgaaaaatttggacct

SEQ ID NO: 305122 - DNA, 1265 bp, Cannabis indica
aaaaagttgtcactaaatgtaacaattttttgtagtgagagacaacttttctcataaagagatgactctttatttggaaacaaaaaaaaggaggatggatacaggagacgtgaggggagggagtgatgtggcaatggaaaatgaagacttgggtatggcacaagaagttgagattgaagtgggatcaaaaaacatgataaagttgggccttggttctccagcccactagaaattatgagtctaatctcttggaattgtcatgggtttgggaacccatgggcctttcaattcataaaggaccttgttgtccaaaaaaagcccaatatagtttttctttgtgaaacgttgtctagaaaggatatggtggaaaagttgcgagtatctcttgggtttgaaggagctatggcttttgatgtacaaggatgaagtggtggtgttgctatgttatggagggataatgctgaaattcaggttcttggctttggtacaaactataatgacatatctgttaatagtagtgagtatggaagatggagacttacaagcctttatggggagccgaatagaaatttgaggaggagcacttgggagttattgaggagtttgaaggagagatatgatcttccttggtgtattattggtgaccttaacaatgtgacatctcaacaagacaagtgtggtggcaatttgtacccgaattggcttattgagggtttttgtggagcgttggaggattgtgaacttcaagatatggaattgaatggttacccgtatacttgggagcgtggacgaagtactaatgattggatagaagtttgaattgatagagctctagtttctcaacaatggatggatttatttctcatgggtaaactctttaacttagaggtttctacctctgatcattgcccgttgttattgactcctgttaatgtcgtggcccctgttaggaataaaattttcaggtttgaaaattgttggttgaaggagcctatttgtttgaagatggtggaagatatgtggcttcacacagctggttttccattgatggataaagtgaaacaatgtggagaaatgttacttgcgtggggcagtgactatacgggaaattttaagaagagaatccatgagtgtaaagctgaaatccgaaggtggaagaaagcaagagatattgctgctgacaataattataaagctgcccaaattaatttgaataatatcttgctgcaccgcgagatattttggaagcaaagaagcaagcaact

SEQ ID NO: 305123 - DNA, 2641 bp, Cannabis indica
taaaaaaaatattatatggggtaattccattttattttattcacgtatgaaatagactgtttgaacattactttctatattgtaaattattccgaattttttaaaattttgcaaaatgtcttaaacaactagaacatacataattataaagaaaaattggagtaaattttgttttctagataccatttagataccaatccatcagtgcacctatattagtgagtactatagaagcacttgaatgttgatactaaattatacctataaaaataataatagaaacattaaaataaacattttagaattattacacaccttgattattatgtttgctgccacaaaataatcagactcaacaatcaaggtggcactatcgacagttccatatttggccgctgtgccatcgtaggtgagcgtgggaactgctttaggtgacccatacaacgtgatgaatggcttacttctttcgatcttaactttctctttgtactctcctcctccgagtacgatcattacacgctttgtgttcccattagggacactatttactgcctcttgcaatgttttgaaatctccactcccatctcccatcaccttaatcactttcgcagggcctgactcggccgccactagggccgggtctaggcccttgctctcggctacaggcttcacattctgcctgaaccagccttccaattcccctttcgaggctggaattggcgatgcatcatcggccttaacaaccacggcgacactaatgattatgaattggagaagtgtagttgctaagtattcctttgccattgttaaatgaaatgttaatttgatgagagaattaatggaatgtatgtacttaattgaatgtgcttattttatatagacattagatttacgtatatactattaatatgtgagaattgggagggcttgtcgcgtgttttaagtttctattcatagtttctttctattattattaattaagaacttctatatgtggatgagatgaacgttaataatatctgtatttgacttctacctgttgtaattcttctttttatttcatgtaatgtattcgtaatatatattttacaatggttattagttgtaaaagaacatgttattattagaagttaggtgttcatataaaatactcaattcaatttgatgtaatccgtattattcaattcaactaaatctgcaagttgcacatatttttatttgtacggatttaattgaattggaaaatctgaagttctaacttatacggttttaatgttgatttacatagggtatacataaattaattcaatcctacaaccaactgataataaaagtattagtttaaaatattatagataaaaaatatacagtataattataatatttttatgcatacatatacaatacaatagaaggaattatctttatggaagttgcctatttttaggaaactttactttatatttttctaattgatgaattcaattttgccatgattataccagattaaataattaactttatttggcaggtattgaagctaaattgtggtcttggtccattttgaaaagtttcttgtttggtcctgatctaatgcaacagagtttgattttgatgctgcaaattaaggaattttttaagaaagttttttatagttggaaaaatgtatttgtgactgtctctagggttttcatgttctataaataggacctagagagcagccaaatgtttctatctcttttagtttcacattttcatatctatttttgtgagaagagtgtttcttttgtaaaaattatagaatgttcaactaggctttgattttcttgttatgatctcttacaattcatagaataagatgaagaagctttgaacaagcctggatcttcgggagaagacttttccaagtctcatttcgagaggaagtgagcatattcgagaaaaaatttgtttaagctttactttaggaggaagtaagcacatatcaatagctaaagggagtttactatttggtgtgttttagagattagattagcaaagtggattacaaaaggttgcaggaaattattagagggagtctaaatttgcttaagtcaatcgcttttgtaatctttgatactttactaattgatttcattctctggacgtagccccgtggactaatagtgttcaaaagaaagttaatttatcctatagtaccattaattcactagagaaagttaatttaaacttatctaaatttgtgtacaatttttcagtcttacaatcacttaagctaagaatcaatatatttgatctattaagaaagttaggattccatattgtaaattaaatttccaaatcatctacattagatttccaaaataaaaattgtaaatctaataaaaaaaaaatctaaacatgattcacgattttttaacatgagccaagatgcaaaatgaccctaaatctaacaattaagttaataaatgtccctttttatgaaaaattaacaaaatgtccattctattaaaagtttgataataaaattacaattataaccttgaataattaagtgtttggtatagttattttgcataatagtgtatcgtttttatgtgcaattgtatattaaaaaaaattgaaaggtagtatattagtt

SEQ ID NO: 305124 - DNA, 1593 bp, Cannabis indica
aattgaataaaataataaaaaaaaagtaataatatcatatagattttaaacttcaacttcaataactaaatacaataaaaattattaactataaagtctagattttaagttaaatactaaaatattcaaactttaaatacaaaatagtttgactaataaatataatttatgtattatattatatacacttttattaaaaaaatatattaatcgattttcggtttattcaagttaattgggcagtttagaatgatttgtaatccaatatattcattaggcggtttagatttttattgtattattttgagttgtattttttgtcagtttattcggtttggtttgggtaatttattcaggttggacggtttgtaaattttgttgaacacccctactacaaatacatgcaaactcagttggaaaatacagatcagaaagaaattggagaggcaaaggcttacagtggttaagtcttggagccctaagtttagggcttggagatccaacccaagaaggagatatacacagaagtgggagttagcaaaatattcaaagagaaagagagaaaaataaatgcaaaaataaaatggattaccaatcgtacctgtgatttggaatcctgctttgtaactctttgatcttaaagatcttatactagaaacgagctattttttcaagcgagctcgaagaggatgtacccaacatttggggaacctctataaaatcttggtgcaatctctctattttttttttgctcttacaattttatatctgtttgtgtatagatctaggagctgtttttgatttgggaagggatctattggatttttagattgagatgcagtcttcgagttctctgctaggctttcgagttgtgttttgtgttctaagtatgtgtttggttctagagggttcgaagggttattttggggttgagttcaaacgacttggcgttttggtttgcttttgttgtttaactcataaatcaaaggagtcaatcgagctttgactcagggtgaaatgtcgattttgaccttagaggaaacttgatctgtttttgttgtgtgtaggttaaaagagtgatttcctacagaatgttttgagcttcgggcatctttcttggaagcccttggtcaaaacacttcaggatttagaagttctcggagttttgggatctattccgaaaaagaataataatgttgccctttgggcaggcctgaccctgagaatatataagcgtaaggagaattaaattttatggcccttagaaatatataaaaaaggaatattcaaaaaagagtgttatggaatttaaactcataacattgtataatatgtcatagggaaatttgaaaaactatccttaaaaatctctaaaattatttccctaaatctatacctattaaaattgcccatatatgactccatttgatttttccccataatacccctcccatttgaaaaacaaatcccaatcaaaaataaaaaattctctctctccctctcggtgaccacgcaacaccacgccgccctaccacgcccggccaccgacgaccacccaccaccaccgacagcagcctccgaccacgcacaacc

SEQ ID NO: 305125 - DNA, 1354 bp, Cannabis indica
aatatatttatatatttcccatatcagattcttagaataaatttattacagctttttacttgggatctggtcataagtttatttattaagtttggtaaagatgatatggatttaatctttaaaatgtgattcaaagaaaatgttctatttctttatgctgtgccatgttcacctcccaactatattttaattagtttttgcaattaaataatctttttactaatagttatcaatctttataatggttaaattgaagaaagttatgcaaatttagattttctttctaatttatttacataacataatccgctaataattggcgaatatgttgccattaagcatcaacattgcttagtaccaccactataggtggggtatatgaatggttagtaatattttatagagtaatttttaagagtaaattttaatttttaatgataataatatataatttatacttgtaaaatgtcaaaccattatcatgtatcatttttttatcatcagttctagcatttcacggactaaatagtatgcaggtgtataattttcgatttatatagtcatcttgttggaattggtttggactttgaggtcgttttcattatatttaaaatgtgtaattatgtctttgtcccatagaatttctattgaagtggttgttactttttttgcccaccgatttaatattttcatacacgaatccaatccatatttggttagaaaaattgagttgatcatgtcaactttgaaaattgatcgtcgaaaaagaaaaacaggaacaaaaagtaatgtacaagaatatcatagctagtcttgttttcattcttcattgtctcgattaatcttattctcaacctacacgaaaaaggaacttcttttttaattataatgtaaaaattaataatatataatttcattatgcataataaggttttaaaaaaaaataaaaacaaaaactgatttaaaatataataaataaaaataaatttcaacctaaactttaaactaaaccaaattttaatgttgatttaaattccctaaacgctaaattgttgcaacaaaaataagtttctatagtatcaccgtttcaaatttttattgggcccttatatttacggaatcatggcttttataaatagttacatcactctgactatttcttggaatgacgattggttttacaaaccatctcgaatattttcagcgtgctttgttttcactcgctcgtttcttgaaaaaatttctcaagaggtcagtcaaccatcttgaaattatctcaaatcaaacgcgcttaattatggagttctttcatgatgggctaccaaaaaacaaggtgcaccttgttgatataggt

SEQ ID NO: 305126 - DNA, 1541 bp, Cannabis indica
acagtgtacattatagttataatatatattttattaatttttaaaaaattatgaataatttagggtgctagcactatagaataatccatatacttttataattacaatataaatcattattatatataaaaaaattatattataatactcacatgaatatataagaaatttttatggtgaagtatttaaaaaagagcattcctattaggcactagtggtgcctagcacctagtcgacatgtcacgttgcgattagctagcgatactctttaaaagctattatattaaattatataggacccgatatttagttagaccaatagcgatatcgacacataagagagtgctagacaccaatggtaccctttagcatttctctttaaaaaagaccccattcatggggcatttaatttaaagtatcaattggtcaagtgcatgtcaatacaatggtcattaacgcatcttatagaaacttgaattgatgaaatatgttatcacatctcttaatgcatgtcccctctctgagtcaattgttttccatttgaatagattcgggactataaatagtgaaggagttttgttcaagctagaccgaaacggtgaaagtgtattcgattcctcctccgctcgtaacaatatcaccaccacacttttatcattgtcgactccactcagctctttaacatttcccccttttcaaccattgataccttgagtagaggttgtaatcgcagacttaggaggtagattattgcaggaggtagaataagtacttttggtaagttttggtgtttatgattgtgaatttaaacatttttgagttttatttaggattgtttaatttgattttggtgagttagttttgacttgattacaccttgtgtactaggtggagaaagacaatttcactcattcaccccaaacccgattacaccctagagttattactctccacaaacttgattgtctcttaactttctctaacactctctacctaactctttatctaacagaagttacaatcgaaataaaatggagttgaattttttttattatataatgtgtcatagaagaaacatgagtaacagttataattaaaaattgaggtgatcgaataaccgatttcaattaacgatgcgtagttagttaattttgatattcatgttctggaagattaacttccacatgtagacggttgtaccgttgtacatgtttttgtgacttttcttgaacttggttttgaactctaatttttgttctttttgtgttcatttttttatacatgcgtaggtgtgatgaatatctataaacaagagttcagtcaattagttagtgcattaaatattattgagggtattggagaacattgtactacatggattaaatgtaaaagtattgagccatatataagaacatgggctactccactcattgccaattggttttgagatggaaccccatgattctcaacatggtatcagagccatatccctagcgggctttcgatccacacctatccagatggttagccagccgcacgag

SEQ ID NO: 305127 - DNA, 2118 bp, Cannabis indica
atccataaataacaaagactcgtggactaaggctcattaacgccccaactacgtaaaaatccttcactcactttcttatagctcaatagtataatcatattttattagttgccgaaaacctcggtcaacagtagagatattagttttgtcagaatgtttggggctattttttcactttgattgttgatctaatagtaataaagatgagaaaatatgataataacattgaacataattatagttaatatatttttattttttttattcaagaaaagagacttttcattaatcacaagcaaaaacaaaaccaagctctacaaggaaacccgcgaaaggcctacacaaaactagccccaaacataactttcctattaaactatacagtttttgtaaaaaatttcatcactagagttcaaattccttttaaaaacactatacaacctataacgaagtaacattttaattttattaactatacacacaacatattgaaaagatcctttaaaaacaaacttgttacaatttttccaaattccatacacagttgcagcaaggagaaaattattgacgtaaattactaaccccttcctagtagtgttaatcctttaggtccagcttttgaacttctgaggccaggtaataatgccagtcacgtgaagatcaactgtatcacttgagaagataggatacaatcgaagaatagatgagaatggctttcactagttgaatcacaaacaagacaattgaactctcaattggaacacagaacttgggaagcaaatctcaagatagaagttgagaattcaaggcctgccatagtataaatctatgtttaggaatactcaatctacactgaacattcttttgatacacaacagtaggttgttgcacttttctactgtagagtttggaagctttaaaattaccagtttgacttgtagcaagaatacatttttttcgctaaaattctttctcaaatgacaaattttgccaatgctaacttgtatcctacttcaacttatatcgccagaaattagcacccttcaaatagattgtattaacccatttcacccataacaagtcatgcttttcaatgatatcccaaatgtatttagccaagacagctctgttccaaagagggccttttctaaaaccgaggcctccaaagatctttgggagacaaaccttctctcaagaagctaagtgaatcttgttcttttaccttttagcccccaaagaaacctctacaaagcttctccacctctttaatgatactttgaggtaacacaaacatgctcatccaaatagttccttaagcctaagagaatataatggatcaattgcacacgaacaacgaaagaaagatgccttgtttcccaggttaggagcttaagcttaatattcttgaggatgatatcaaaatcttcaaatctccatttggtaggtcttaaagggactcctaagtacttaagaggaaagctaccttcctcaaactgaacttcgagcaagatggactcttttacacctgtaggaacccctatcaagaagacttgagactttgcttttattggcctgtaaactagaagcatttctaaaatcatctaaggcaattttcaaatgtctcactgcttgaacagtccccttacaaacacaagattagatcatctgcaaaacacaagctagtaagctacatatattttatcaggatctagatttactaacaagtatgtttttaacatccacatatgaatttctaaaatgatgaaaataaacaaataaaaggtatgagaaaccttacagcggttgcagcagaattaaatgactcctcccactcagatctctaacccttgtatcatttctgtagcagagtatcactaagatttgagcccaattctccttcttgttgatttgattcttcacagttttacatactatgaatgaggacaaacttgttatgtgtgggcattcactcaatcactaatggctgaatttgttttgtgaagaatgactttggtatttcgaaaattcaagaggaagaagaagaaggaataggtctcatcaaacctagagagaaagctaggtttttagctttggagtcattagttggatgatgagacc

SEQ ID NO: 305128 - DNA, 1886 bp, Cannabis indica
ttatttttcctttttttttgctcgcttcagcctttgctccagcgacaacccatgggtttttgctcttcatggacttccaaaactctaggaaaattttgttttggtgtgtcaatctgtccactaacatcacttggcataaaaaacaccaaattcattactttttactcataaaaataaattttcttacaaaactcgaattatttcaaaaatgatgaaaaatactaaaattactaagtaacatcatcctctaactgtggagaaatcagtaatattagagcgtaaaaggctcttatcagtcagaaaatggcactaacaaacacacttgtctattcagcgtgttatatggtttgggatttgttcagatgatagtcattgaaggatcacactttgatcagttcatcttagactcaatccctatgctccgcttaggtccaaatatattgaacacgtgtcaacttgctgagtggcacgtcacctatgcaaaatttaggataacaggtttattgatagttactagtatgcgaaaaaaatgaacaagggttggatcattgaatgggaggtgtcatttccgctatacaatctttgtaagtattttgtactcactaaaatttatgttatagaaaattagtattcttgtaaatataacaatttatgcaaaaaaaaaaaaaaattggatcctgttaaattctcaacaattcgtccctccacgaataagtcttgcaaattttattgattctaccaagaatatacttttgcaagatcacatgttaagcccaatatgtatgaatggccaataaaaaataattacttaagacacatctatcaacataagaaatgtttctcaagctctatataatccaattcaagaaaattttgaataatttacaatactaaaataaagtttaaatattcactttatttttagtattgtagaatattcttgaatttttaaaaatttataagtaattttaaataactataaagttcatcattattaaaaataatagattaaaaacctctcgcaaataacaaaatacacctacatattttcactatattataataattcaatgaaaaaactttaatttttaatgagttttatttcattattattaaaaaagaaaaaaatatctttgtgagctgaagtaagatctgagtagtttgagaaatcgaatcaataaaaagcctatagtcttctcttctacttataacaatgaggttctaaaccttgttcaaatattctaagggcatcttcaatggtgatacctaaatttggtgttaaatcaacaccaaaaaattaggcatgtcaaaaagatccatttagttggagcggcttggagctccgatccgacggatcacctctaatccgaaacattccgatacttattggatcttggattagatcccgccccgcctaattttttttttcgggatcggatctgatccgacccaaattaaatttattttaaaaaaacttaattcaagactcggaccccaaactcggatcccttgagacttggactcggacatggacccagactcggacccaaacccggacccaaacccagacccggacctagacacagacctagacctggaccgagacccgagacccaggcctgaacgcggggctgggacccagaccctaaccttgaccttgacccgaacccggacacgggactcgggacctgcacccagactcggacctggacccgaatctggacccgaacccagacctggaccttgacccgggaccccgaacccagacctggaccttgacccgagaccccgaacccagacccagactgagactcggaccttgacccggatctttatgttgggttttatgccctaaataaaactccaatttcaatgtaatctttatc

SEQ ID NO: 305129 - DNA, 4017 bp, Cannabis indica
tctctctttctttctctctcataatttgtatacactcttttctctctaaaatatttcaagtttcaaactttaacacaaaaagaaaagctctgccttatgaactctctctctggtctcttcaaattcaatacaaaatcatagaagaaatggtaagaaatttaatttatatgaataccaatatcttatttttgaatgtttgtttttctaaacaataatttatgtttttttgagtatcattttctgggtctttagctcttttctctgtttttcttttcatttctgataagaaccttttgatattccatataatttatttatgctaattactctttttttggcttattagaaagaaaaaaaacatagctttcatcattaaaaatggtatttttactttattagaatttatgatatttctattgatttttctttttttctttcaaaaaattactggacaaccccactatgcttaataatgtttttaaacaaatttctcaaatgggttttttgaattacataaaatcatcatttgggtagataaatttttccatattgaattgtaaaaaagaatacttttttcattttggtactaattgttttgatatgggatttgtttgatttcagattggatgcaatttagtgataaagaaaaagaagaagaaaacagattggctcaacactctattgagactaaaattctttgatacatgtgttcatcatgaagaatacagaaaaaatgagaagaatttattctgtatagactgtaatattgggttttgcaggcactgtgtaacatctcattgtctccatagaaggcttcagatctgcaaatatgtttatcataatgttgttcgtcttcaagacattcaaaaacaccttgattgttctaaaattcaggttataatctaatctctctctttgtttttagcccaatttgatgtgacttgtttttgttcataaaaattcccaagtattatattggtgtgagtgagtgatttggttgagaaaatataatttgtgtgatctatgttacctcatcaaatcattcaattttattttttaatttttgccttttaggtagtggatgacagtctcattttgtcaaataataatgacagtcaaagaaaaacagtacattttttctgtgaatcttgttattttttgatgttgttggcgtgatatattaagaactatttgagcattgttattgagcatcagtagcagtatgataccgagaagaatgttagtccccactcgaactatttatatcctatatgccctacttgtttgtattcaataattttgaccattattgttaaagtgttttaccttttttctaacttcttaaactaagttaatttgttgtgttttaattttcagacatataaaatcaatggtgaaaaagctgttcatctaaatccaaggcctcaatccaaagatgctaaaccatcaactaaatctctttgtgctggttcatgtgaagcttgtaatagatatatacaagatcctcctaatagattttgctcaatttcatgtaaggtaagaaaaaacattatatcaaatctctctcatatattcactcacttaaatcattcttatatcaaattgttcaaaattgatactaatttgtaacctttttcttttcttttgcagatcacaatagttccattgaagcctaaagagagtagcaatttcataacatatgaagatttgtcatgcaaagaaaaatcaattaactcagaaacaatgttgagtgaaattgaatcatctttatcattggctgaatcatctgaagaaattcaaccttgttgggttaattcatcattgaagccaagaaaattgctgcacaagaggaaaggcatcccatttagagctcctctctactaaaaaaaataaaaataaaaccaaataatgaaacttttcccatcatactttgatttgtcaccttttttttattattattattatatattttttttcacattattggtttacattttggtatttaagaaaaaaaaaccacagttaaattattattattattattattattattattattattattattattattattattattattattattattattattattattatctatttaatgatagaaaaaaaatacaatctcaaggagacccccattttggtaatttagttggggttagttgaggacttgagagatattgtctgatgtgagttctttgatgttgtacagcataaaaaagaggaaatggtaatggtggaagcaagctttttgggtccataataatcaaccaaattagctttatataattatttgttaatttttattaataataattattgttatctcttgtggggttcacttgaacaatttattatacttacttttcaatatttgttgatttagatattcttttaataaaataaccttttttatcactaaataaatatactataattacgccgaatagattttgttctgtttaggtatccattctttttcctcttattaccatcgttaaattaataatttgagttgatcgaacataaagtatactaaaataaagagaacttactctatatactattttttgaccttctttttttaaatttaaagtttgaattatttcggtagtttttccaataatttttatatgtaaaattttgtaaaaatacaaaaaataattgtttttaagtgtagaaatgaaaaagcttctaaaataaatttcaattttttttacgaaaaagataaataaagattttctttcttgggttcttttcttttcaattaggggaatgtttctcactaagctagcaatgaactattgtttatttttttttaatttaaattaagatttttttttaattgttgaaaccgccatagattaagagcttttgtctgaatatttgtcggatttgttggtaatgagattgtagttgagttgttgttgttgtttttagttggggccctaacttagctctttcatttatttttcaatcttttgcattatggcaactatatttttctttatgttttcattctaaatgtggcagacataaaggacagaaagcaaaattaaagggattattttttgtgactcaataggatggccataactataaaatgttatttcaaaaattatgtaaaatttttaataataattaaaagtttttgaggaccataatatacatgctatgcatgttgcacatggaatatcaaatatggacttagtttttttttttcttcttatatttttggttggctttggaatatggtccaaatgctgtatatgaccataccatgttttacactttttttttttttgggttgatccatgatttaaggatatacataaaatgaattatctgatcttttgtaaaataattgaaatgcaattttgatcaaaatcttaatttgatgtatttcactttttttttttaatataatgaataaaaattgtttgattaataattagattagtgtaaattgtctctataatggtattttttttttttttttggattttggattaaatctacttgtaattcaatcaaaattaatgttgaccttgtgatttttgaaacagaaagaaaatatgagtttggaattgttgctaggaacttgagttctctcattgaagttaaaagctcctaattacatggttattatcttgttgagttagtggaagcaatgagagtgaaagaagcgcgcgtccttgaaccgagtgaagggttctggttgagaacaggtgatcattgaaattgattagtcactgttcaaactgtgcgttctaatatgccactacaaaaaacaactatcttaatttatgttgtgattaaatgttattatttttagtcacaataaaaagttacttgtgattaaagcataatatttatatacaaactgtcgttaatttagttttagtaacaacaaatattgtgactaaaaacacatttaatcacaagaaattgtaaatttttgtgactcatacttttaactacagacattttaatcacaacata

SEQ ID NO: 305130 - DNA, 1659 bp, Cannabis indica
tttttgaattaaaaactaacaatgataattatatataaaaaaaagtaaagaacggtttggacgagttatctagaccaaatcgatgaaattattgaacggattgaactttttttaatttttaattgggtaaattacaattgaatatatgtaacccgatatttatattgagttggtacacccaaacattacgtctctttctttttttatatacaaattatgtataagtcaataaagaaattaggctttgctatggtaataggggatgggaccctcaagtccaatccaatcaccgctcactttgttgaaaaaatattctccacctcagatgaccaactcatccaagggtcaaacaaacagagccatgtcagataaagtggcagtagattgacgccacgtaggattgcggagtcatggtgtcctctactggcaatgccacaatgtccaaattatgacaaaaggcattggattccctgcacccctctcttcttttcatgtttccgaatcggaatagctgcaacaatttgactttaaaatgattttggtattaaataattaataatggcacttggattggactgtgtgtgattattatatctacaattcctttctagtcgttacataaggggagccagataggttaaccgtattaaacgtgggttaacattaaggactcctaaagttaagagtaatttggagtataatttctatatataagtatttgatttattgcaacaaatctttaattttaaaattttaatagtaaaatcttctaaactcatattctgttaccacttagtcatttctatctattttgaccgttaacgaccatataagcatattcatatagatacattgtatacatatcacaattttatgggtttgcatactttaattatttaaaaataaaaaaatagttaaaaaccattttaattttttcttaaaaaaatatatacttttttactaaataaattaaaaaaattaaaattaaactaaaagaaaaagaaaccccctaacaaagcatgtctccctcactatcctccctcactcacttctaccaagccaaccaaacggtcgaccactagttgccatcgatggaacctattggccccaaaacctcttctcctccctcactcactctcctctctcgctcacgtctgctctgataaccttacggagcaccaccaacgcctcctcttctatcccatacctaaaacaacaaacttacatttgaaatcttctacacatttcagatcaaaaataccaaaaataacaacaaaatttataatcaatctcaaactcaaattaaaataaaaaaaaaacaatatgggcaaatcaggatgaaactctagtggcttctgcgatcacggtacaccatcgacgacgaggatgaaaccccagtggttttgcaccttggtcgctactcgaaagatgaagtgttggcggcttcgacggggatggatcgacctaggctcgcgactgggatggattgttctgggctcgtgacggcttggtatgaacttcacgatgaagggatgagaaggaacgatgcccaggtggtgaggtttgggccataagatgaaggcgatgtctgggacggaggaaaatggtggtagacgactgcttagatttagggaggtgagagagcacgagaagaagaga

SEQ ID NO: 305131 - DNA, 1171 bp, Cannabis indica
attgtaatattgttattagtgtaatttaatattgaatcttatttccttcaaaaaaaaaaatattgaatcttatttattttattttaataaaaattataaaaaactgctaactaattatatggtgtcatctcatattagtgttagacaccttagtcttccaatgctcaaaataggacaaggaaccactaggaacactacgctaacaaaagttttaaaaaaaaaaaaattgttgactatcaaacttcattaattaattgaaacatcaaactaattaattctatcaaatcttttaggaaaagaaaaacattacaaaagttagtaattaattaataaaactacataaatatatatttaaagaaaatgataaaatctcactagttgtgaatatcacaagagcttaatacatgtcacataagagcattgttattaaatatcagtggcatttagtattattatgagatgatgtcttaaaaatgattaatgatatttcataaaagttaatatattaaataatatgagatctaatacttaattgttataatagtgatataatacttttagcatttctccttactaaattatattaaaatttaattgttatgagtccttaataccatacctcctttcaatatacactatacccccaccaaaagcccataaaaaaataagaaaaacactgggaaccaagtctaacactaccataatacattacattgttactagtataatttaatataaagtgacatattttttttaatttaataatcattaaccacttatatcatgctactttataatggtatcatgcatgcactattagtatatctaacaacaatgatttaaaaattgtcaacaacaaaataaaataccttatttggggaagcacaaaaactagtcccaccgagatagatgtgacaaatttatcttcgttttttagagtagctagtatattagacttactaactttatgaattaaaaatctgtttaatatgtgaaaaagataatagcatatatataatatttttattgctaattagtttccaattctaacaaagtcaaaataaactattatataaatatatagggatatgattttgtcccgtgatataattttacggaatgtattccgtggtacattagatgggtgagtgttaggatacgtttttacttt

SEQ ID NO: 305132 - DNA, 1601 bp, Cannabis indica
gtagcgtgccttagcattagggcgttacaagcttgatcgtaaggaaggcagagggctcttcctctgagtcttctttaggctcatccaggaactcagataaggaatgaatctttgtttctgtttcagtcaggttaatagcacagtttaatgtttggaagagatcatccattgtaaggcgtaacaggaaaatttcagtagagataagcaaaattatattagagtgaaagggatataagagcacacgggttgcaaaggatatgggaatggtttgggctaagaaggaaattattaactgagagggatatttatagtatgtcataatagggtatgatgagagaaaatcaatgataataaggaaagaaaatatgtgcatagtagagaaaggatatcgaaatcaaacaaaaggagtaaatcaaattctactgaagtgaaaccaccaaaaattgcagaacatttaatagaaagctcctcacactacaaaaaaagataacatttcgtgacaaccttttagtcacaatataaaaaaattgtgactattatatgtgacttttagctacaataagaaagttacttgtgactaaacatagtattcagatgcaagttgtcactaatttaatacttattgtgactaaaaatacattttgtcacaacaaattgtaattcttctgacaatttataattagtcccaacttttttacttttagtcacaaattttgttgtgactaaaaataagatgttttgtagtgccatgccaagaaaaattatgataagtgtaggctcgtgttagtgctccctatacaatcctaaaggatgcttggagagggtaagtgcattactaatcgtaatgtagtgataattagacagggaggtgcagagggataaaataaattaactattattttaagaaaaaagaggccaaagagaaagggggagagtcagtatgggatgaaattggctagggataaggatatgagaatttatggtggaagtgacattatgcagagagtaattgtggaagagatgcgtacctattcgaaggagggctagcttcattatgaaggagtagcctatgataattgcagaagatgtcgtgaagatatgaagttgtgggcgactcactactaaaaatgcctaatttgagtcggtcaatgcgtctcaccataatagttgaccgaggtaaaaaataggtgtatattttatgcttcagtggataactgaagctaaaagaaaataattagtgtcagctactacaatgacgctataagaggaactgaggataaaagtgtaaaatttaaaaattgtcttttacattttgcttcagtggaagaaagacgctaatttttttttggcttcggttataaacagaggctaaaaaatttgtgactgtttcccctgaagcaaaaaaaacattaacttttattatttttattagagtaataattccaatctacatccacactgaaacacatttctagttttcaaaagtctcattgcaaaaccctagcacaaccattgattcttcttcttcttccccatttcaagctcaaaaccctcacctccacactactacaaaaaggactttttgcttcagtttttaagtg

SEQ ID NO: 305133 - DNA, 3272 bp, Cannabis indica
gcattaaatgcggcatgggggaagcatctatgaatggatctgaaaagacatgccagaggcattaaacccattatttgatgattacactctaatctatgagccttatgacagttgcataatgaactatcacgtcaattaaggaaggttaagggataatcttacccaacacctaactaaaacctatgcaacctaccatacaggcatacatactctattatttaaacctaggaacttgtgcaagcaattcttcaacacttgcgacaatagtaaccttttttccatctttatgaagttgtaagtacctaactatattctgaagaaggggttggaaaaaatggtgtaaaacatcgtctgtgagaaaaactattatattaaatagtagtgactcgtggagtaaggctcattaatgccccaaccacgcaaaaaatactcgtattaaatctcttctaatcatttaaatagctctcattaattagttgcccaaaatatcggtcaatattttggtactttcattgagaactggagaaggctttacgtaagaagaatatcaaaagtaaattctcagtacgatggtggaaactagaaaccatgcatgccaaccacgtccacctcaaggccctagggggccagacgaagaggaagtggctttgcaagtagacatagaagtagaataacaagaagaaaccaatgatctagaatatgacaaaaatcaagagtatgaagcatatgatgatggtagttacaccgaacttatgttgttaaggtagaaagtcgctgaccatgaagccaagttggtagagcaaaaggagcagaacatgaggatgcaagaaataatgatcgcactacaggcatccatgtgcatccaagtgcaggacctattgggcaagacaaaacaagaaaggaatctcagctgccagataattcgaggcacaaaactcaagagccaagccctatctgatacccttagacgaacccaatggccatttctaaaaagaacaagaaggctcaagatccgtggaaagttttctctaatctcccttaaggaaaaggtccatagaggggtaggtttccaaacagaaatgttggccctcaggaacaggaagactggaaaagcgtattcgtgcaccaagagctgggggagagaacggagaaaatccacaaagaccctcctcttgatttgagatagaaactcaatgccaaagacactgattttagaaatcgcttggagtggaagaaacaagtaataccagtctcagaaagtgccctgaacgaggggatttcagctgaacttgccatcctccggaaagatatagccaaagtctcctggagacaaacgagagagcattggagtgtgattttgaggaacgcaaaccctgtactagaaacatccttaaagcgaagctcccaaagaatttaaaaatgcttgaaatgacactgtatgcaggagactcaaaccccagtgaccacttatccaggtttaactgcgtgatgacagtcagtaatgacgtgaagtatttatgtttcccgttgacattaagagggtccactaaggagtggcttagaaggttagaacttagatccatggactattggaacaagttacaagttagctttagaaggcagtttgtggtagccagaaagataaaccttaaagtcaacactttgaccaacatcaagcaacgaccagttgaaactcagaaaaattcataaaaagatttaaggaagaggcttacaagactaaaaagatggatgacggattgcaatcaggattaatacaagctagaatttgaacgacaacccctttttggaatgagctctagcaggaaggagtcgctagccttcaggacttccagaagagggcctaaaaatatatcaatttagaggaagcacagataactgatttcggaggatattaccccactggtggtccagggtatgctcccagagcgtagtttcctagaattacccttccagttgcatcgtagacaagtagaacgcctagtgtgcgattctttgcaacaccaacatacacccacaaccttgctcttaccccagcttagtcaagttttggagcactagggggtaacatggctcccggagtaggtttgcaatatccctctcaatccgtacctcccgcgataattacaagatgttgctcagatctctcagagtaagagatcttcaaaaaaaagtacgcgaatagagaacaagaggcaaaggaaggttacacttaacaatatacttagtataccaatttagtggacacctaggaacgtgtgtacttggccatgaggcaaaacattcactactgaagatcacctcctctgtaccgggatagctcgcggagagaccctaacaaaagtgaatatcacaatgatattggccacactaccaatgaatataaaaatttgaaagatgaaattgagggcctaataaagctaggtcacttatacaaatggatgaaagatatattaccacacatgaatggtggatagttaagagcaccaaggcctctcagagcaccatctcaagtcccgaatgtccaagtccctccatgagtccttcctcagcaccatccaaacccacacagcctcctagaccaaattggagggtggtcatgatctcaagagggacgcataatagatgaaccacaaggaatgagttgaagagttacgctaaagctatagatcatgatgaagaggtatgggaagttaatcaactcccggcgtaaaggccccgtcttatggatcaacctattacctttacagaagaggatcccaagatggtgcattttcctcatcacaatcccttggtaattcaaactcccatcatcagcaagattgggtctcaaattttggtagacaatgggcattatctgtattctcggatgcttgatacatagcagtcgtggaacggtgacatgacaccctaaaatcactccaaatacatcaatatattatcctcttaattctctcattttttataaagtttataagtattaattaattaattaatatatatacatatatttgttagtcatattttatcacatcacagttgtttagagtagaagagtttacataattctataaatatagtaaaactagtaaacaacccgcgcttcgcgcaggtttaaaaaaaattatatatatgattaaattagtaaatagactgcacttcgcgggcgactatttataaaatttttaaattatacgtatatgattattaattgaacaataaaattgtaatttatttttatgtataatttaaaa

SEQ ID NO: 305134 - DNA, 2421 bp, Cannabis indica
ctctctctttctctctctcttaaatattaaactacttattcattctcgcaattctagcgagcgagtgtggcttaaaagtctagtttagatttctaagtcaaaattttggtacttttattgagggccacaactcaagaaatttattaatcaagatggttgtaacattttctacaagtgttgacatatagactctaataattgaccgaacacctaggggcacgccagttgacgaagttagaacggggactacttatgtgccccaagcaccatgagcagacctcaaaacggactcctcaactcttcctccaaggccaccaccaactgctcccgggactagcaccaaagaccagatcctacttggggagccacacgtcgagataaaagaccctgaggagactgatcctcgtgtagctcaactcatccaaactatggctgacatgcaacaacaactgtgagaccctctctagcgttacatcaattctattaaggtaatggtcatctaagggagttcttcttcattttccaaattcccaattcgcctaacctacaccatgttggtcgtaatcagtccttttgcatttctatcgttgaactttcaggattagtttctacgctacgagtgtactgttggtattctttcctttatttcaaagagaaaagaatcttttatgatgcagtttcctttgacacttcctctgcatatcatttttctttgacttctagtgctacatattcttgtgccaacgtcatagccctaattattaaggatagtcacggttctactattatcactcttttcaactttgatccatgtaccaacccttgcattagtgctttggttgctactgaatttgtgcactttgggatgctcacgcactcccttcagaacctgtttatgaacttttctagaggttcatcaggtccttaatggatcaacatcaggtctatgttaacttttgttgatctgacgcttatcacggagttcattttaaatctcaaaattagatcgtgatacgagtttattgtggttgaagcgaggttatggaaccatcgtaaggtggggcctctcagcccctacgtaaaggtcttgcattttatggtctctaggtcttctaagtgggctgacaccataaccatcttttgctcaagctggcatacgtactctaatgggtctccagttccatcgtactctggtagttttggtgcagcgtatcgatgtagcacttctacgcataagataagattttcgaacggggattgggtggatccctccatccttgcccactcactacttattcccatatggctttctgcttccaaggccagtagtttgtttcacgtcatctcttgcagcttctctgattcttgattttgcattggggagttctcttgagttgcttgtgttgtggtgcatctctttggggttgtgcaaagtgtttccgcctctgtaatttcctctacttccctagttctcctcaattgttcctaggggtgatgagtttcttgagctggattgtttttgtttctaagaaacccttcatgcatggggttgttgcggttaaaatttttatttgtctccttttatgcagaatctgctggttgctagttatttacctcttccatttacggtgggcgttgatacccttcaagcactaccttcatctagctattttttcttttgagttttttgacatgttccttatgttgggctatttctattccttgagttgctattttgtcatctcgattttttaatctttccaagatttcgtgccatggtgggttttgaggtgttgtttcattatggttgttttgggtgtttgaggtaatctctttttcctaacttgaattatttctttatagagttatgacgttttcctgctcattcgtctttttttagaatttttggagaaaaaaggcaagaaattttcttggaagtctaaaaaagaaaagtgaaattttttgacgaaaaaatctactggaaagaagagccaagttcccacagacgataccaaattgttttgaccaaaaaagaagaagactttttgggtcaagaaatccagtcaaagaattttttagtgggttcatgtttttcgaggtcttaatgcttgcctcttctacgtgagttcttacctttttataggggtgcacacgggtcggattttcgggttttcggatggccgggttcgggttttcagatttcggatattaaaaatatgcaatcgaacccgattttcaagcggtcgggttcggcgggtcgtgggtcgggtatgccgggtttgctgtggtcagattcggattaacacccgaatcaatacttgcataaaagaattctgcagtgtacaatttaatttttttctggagaattgtaaaagaaaataaagcaaatagttctctgcatattttactgtgatataaaaa

SEQ ID NO: 305135 - DNA, 2106 bp, Cannabis indica
agttcatattaggatgttaatgaaacattcttgttagtaaatctagatcttggtaaaatatttccaacaattctgctctaagaattctctttggaatggttaaaaatagggtaggagacctcgtcctccggttttagaatcttggaagtattaaaacaacatcccgaaaagctctgaattaagcacctagcgcctaggttgacaaatagcctagtgcgcttttgctttttcaatttttattctgtctcgaccgttcgtccaatttttcacaataattgagaaccattcagacaaaaaattcaaattcataacttcatattttcgcattctgacaaggtaatttactcagaatcgagaaagtttcgagtctcttgtgtccgcagaacagcaacatctccaagaactagttaccaactttacaagaacgcaaatttaggctaagtgatgttaaaatatcacttaagcatcaaaaaatacattttcgacacgttttaccactcacgcagcatctaggttgacatcacatgtcaaacctgcactgggcccataatagccttcagcaaaatagtcataattcactcaaatattgatctaattgacgtatataagcttgtgtttcgtagctaattgaattatatatgaagtgatgtctcacatatcaaacgcaattttgaagttatcagttccaaatttcatcaccaaggaagttatgaattgaagctacaacttactcagaatgggtctcgctatcgtgacccagattttgaaaatttgtcatcaacgtgagaagttaattttcactattagatcatcatctttggtcaaaaataaccaacttgtactttttcatatttttttggattattttattccttttttcaaggacctccttaaaaaagctactctagctcatttttcacattctaaaaagtacccacaaggtcagagtatctctctagaaactagagctttcacaattagctaattttcttgtaatcacgtgagaaataaaaactcgaagtataaatagttccattaccatcgcgacatcggaaatgaactactataaattttgtatgtctctccaaattatatacttacattcattattcatctcgccaatctagcgagctagtattagccatttttcaatgtcaccactactcataacattagttatttataatggtatgatttggctaactatatatgaaacaactaataacaactagagattgctaaactaatgatgtcctaatatattttaaaaaattaattcgttaatagtgtgttatatcatcatatgtcaaattttcacatcctaaaattgtgtcaaatgttacacaatctacacaccatcggcttctggccatcgaaggtcaaatttaaaactgttagtatagttgtcgcagctgttgctggcagcgctgagagcccaacgctagtcacgtatattgacaaaaatgaaagcccagtcaccgaaataactcagtgtaccgattgatgcaacggtaccttctgacttccatagaaacatactgaaatatgttctgcctagagctccaccttgctaacccaccaaatttctcaaatctttagatttaacgtcccttcacaaactgttagatatgaaactgacagtaaagttttgcattagttgagtttttttggcactaatacaattagcgagcacaagactacaaaaatatttcttaaacaaacaaaacatcaataatgcaatattttcaattgcagttttgttattaacatttaatgatggactttaaaacatgttttttaattactatattatcattaattgtctttcaaatatttattttattcatattaatgaaattttaaataaactaaaacaatgtatttaaatttaaaaaaaatttaaaaagatcttctaattaataataagggtaaatagcggcataagtactcaaagttttgagtatctaagcggcataaacccaataatttttttagtgacattagtacccaatgtttgtaaaactgtaatttttctctattttcgtcagtgcaggctccgttttaaatttattaaaaaaaaaaatggaagtaactgatactacatat

SEQ ID NO: 305136 - DNA, 3374 bp, Cannabis indica
caatccaatccaatccaatccacaaagtacggatatccgcatttgtgcggattggattgaaaaattcaaaaccagcacttgtgtggattggatgttaattgacatataaaaataaccaattcgattcattccaatctacacatatttctaaaaaaaaataaacaaattatatatacaaataatattttaatgtaaagaaaatagtaatttaaaagtctaatacatatactataattatatttcaaaatttaatagattaaatgtacattccaatcttatatataattttttttatatacaatttaaaacaaaattaaatatttctttatacataattttttgaatttgttattttatttattttaatttattaatattggagacataaaataacaataatttattttattttgtcgttagttatgtgaaaaaatatttttttttataaatattaaataattaatattaaaaatatcaattcaaaatgatcgattcaatccgtacttttacgaattaaattggattggattagacaattgtacgaattagattgaatccaaaaaataaaaataatgcagttagtgtaaatcaaatgtattataaacaatataatatagtaaagagaatagtaggcaatggtataacttttagcaattctctaaaaacaaacatatacatcaacatcacctcattagcctctcacacatttccaatttccatatatgttaagatagagaatttctttaattgtaaagttggtgatgtcatatccttaactcatcacataagcaggtccagacaggctcgggcttaggaaatctagtacataattcatggggtttttaggaaaatcatcaccctgtcccatcagtataataatactgttaatttactcatctagaaatctagaagggctaaataaataaataaataatatatataatttaaggaaaaacaataataagataattaattgagcacattttttcactgcttctttctttgtagttggtagtggtagggtctaacattccaatctaatatattcttttttcatttcgttcacaaataaaggaaccgcgagtttggatatatcatatatattatgatatgtattatttgaggccaataaatggagaaaatggtccaaaaatagcttaataatgccgtccaattcttgtccatacaattcttaatatataaaaacgtgcatgaatgacgatacactgtttattattttgtttttttatgtgatatattacacggtcagctgatacatagatcaaatcataaaatatcagtaaccccataaatatcaataaaacttcaatctcattactaattggatctaactttaactaactaaaatataaggacgttgatcatgagacagaaaagagctcctttcttattatctttattacatatctccagatctcttttacatgactaaacattacacaagaaggaatatataataatcaagaaatttttacaaaacaaactaattaattaataaatatatataataacaattaaattaaatacttatacatttattatataattaaaatctagcgagaatggcagctttgagagcttggtgatcagatctcattctttgatcgggaaccttgacgacaacgtcttgaagcataaggtcattgatggttgagacgctggcatggttgacctgaaactgaagctcacgcaacgcatccattagcctggccgatgggtaattctcattctccgactgaaccctaatcatcgcatccgtaccaactatcttaatatccagctcgattccgtcgcgatcgacttctccaacggcggccgagggggactgataattatcggaggaggagttgtttgaattattaacggaagtggtacacgtgctctggttgtctaagctgctattatcacaccccatttcaacctttactctcttattgttgtgataatccctttgggaaataactaattgggactccaattcctctatcttcgttttgagctcgtttatgtacgaaacggcgtcggataacagagacgctttgtccatcctcgaaacgttagggacaacggcgcgtagcgcgtagaaacggttattcagcttctcacgccgctgcctttcagcttccacgtggttcaaaggtgtatcccgacccagacccggtttccgcccacgctttttcggtacccgtttgctgacgttatcaaccggtactggatagtccgaaatcgaacccgaattatcagactcagaatatatgctattaatattcgtctttatcaacggtagtaaagtcttcgtttcatttgtgttgatgtccgtttctttccgtgctccggctgtgattccaatgtcggcgaaggaaatattctggcggtgtaggaactgaatcgggttcggatcggttgacccgaataaggactttgctttttggactaaaccccaattctccataatgattttggaagaacccagttcaagaaccccacaactggttgggatacagaccagagtctcgatcccgtgaagttgagcttcgtttgctcggtcgcagttatagtaccgaagctcatggccgccggtcaaccaaaccaacgaaccagaactcaaggccttcccgggaacaccttctccggcgaagaaagatcgactcaacgacatgacgtagaaccactcggcgtcggcgttagcgtccgtagctccgttcgtgttgatgacatcatcatcatcgtcatcatcgataatctttctgtcgaggtgtagggtttgaggatgatgagtggtcctagtagtggagtagtgtttggaggcttggaagtggccgtctccccaggttagaaagattcgtccggcgtcgtcgtttgaggtctgccagaaaatagcataattccagcaatcaggctgggtttggagtaagagttgaagcctctgttgcaggactactactgttggttgttcttgggataatgagactagagacgatgatgaggacggtgaaatcattaggtcttccatataaatttgatgggacaggggagaaattcaggtgagatattagttgtggagtgatgagagttagaaggatatgagtgaccggatatatatatatatatatagtgtataaacttatggataaatagagacacgccaaaaactaataaatagtacaaattaatgagatcgaaagagagagagtgtggtgaattgaactacgaattgtagtggtggattaattaagtaatatagttgttgtatagtaatagtagagagtggttattaattaggaaaacttacaaaaatacttattttttattaaatattttcaaaaatactgggacacggcaaactttacatt

SEQ ID NO: 305137 - DNA, 777 bp, Cannabis indica
catcaacattagcaaacctccattatcactcagctaaacatggaaaataaaggctcagttggtgcaaaatttgattggttctgtgtgagataacattcagaccttagaaattcaacacaatactttagtaaattacgaacaacactaaaatgcataaatcaaggaccttgcatatgatactagtcacaatctcgtatgaacattctaacaaacatctaaaaggcacatctcacatgcaaatggaattgaaacatattttatctcaaaacctctaacaaaattcctaatttccaaactttctccaatcaaaatctttaattgattaaccacctcaaataaagatccataaaattaaacgtaattgaaaaattgaaagcactaacctgttcattgttcttgttttccggtgaccttgttctgtagctcagtctgaactggggtttttcccgctgacgagaaatttgtgctgaagatggaagaagactaaattatgggctgggctcactgctcagaactatgggcctggtttgggctttccgacccgaccctcatcaatacccattttctatcaattttaattgctaaagcttatctatgcttagttttggttacaaaatgcaatttctcgagtgcaattttctaaaatggcaagcataacaaatttatgtaattttagagtaatttgcaggtttaaatttcggttgcaaataaatacttaaatttaattttttacgataataatacttaagttatatttctaaaacttctgtaggtacc

SEQ ID NO: 305138 - DNA, 606 bp, Cannabis indica
gcagtcttttagcttttctaaagctatgccaaacgggcctgtagttatttggcattataattagtaaaaaatgttttttttttttaattagaaaactattctttgagaactatgtttgatattgttttcacaaaacatgcaattttcacaaaacaaggttaaaaaagaaaatttttaaacaacaaaacaaatgtttgttttttgttattttcttttttaaactttctacatattttcttctcatcattttctgactgtcacaggtctaggtctaggtccaagatctgagactaggtcttaagtttggggatggagtcgggacccgggtcaaaggctatactcagggcttgtgccgtgttcgggttggttcataggtacccaattgttattcgaggtttggggccaaggttttgggagggggtagggatcatgttgaggtgtggagtattaaagtaatttttttattgtaaagaaaattttaattaaaagcaatttttagaaaacaataatcaagtaggtcttgtattaggaaaattttaaagaatatcttttgttcatttgtaaggagagagagagagagagagagagagagagagagagagagag

SEQ ID NO: 305139 - DNA, 1713 bp, Cannabis indica
atgtaaatccacatagctcttttcgtcacctgacctcaaggaaatagaagagaaactcgtattacacatcacaggcttatgtaactagaatagtaattagattacaaaaaagacgtcaaatataattaaagcaaatttttatttacctgcataataaactcaaagaacctaccatggtaatacaacttctttaatttgattgataaaagccaagtcatataaaagataacttcctccaattaaaattctaaagaatatttcccagttacaatcaatgaatatacaaattaattaatgttaaaacctttaaaaatatatcattgatgaaataaacaaaataaaagacataaattgtgatgcaggctaacaatgcactagaattgtttgtgcagaatacctgattattgttgacgaaagtaccatgagtactagcaagatcataaatataagcttctccacttcttttgaactggagaactgacatataggaaacagattagcatgagtatgaggaagctaaagtatacacatatgagtgtgtgtgtgtaagcatcaaagaaatcatgggtatttcaaaatcttatctcccaaaatttaaagggaaaacggagctttttctagaagaattttgcgtctaacgcaggacacttaacaatcatgtgggaagtgatcaacagtaaaaaagtgcagaaatcatttacatcactgacagaccttaaattaacactgggaactagctcattcaaaaagggataatcttagctcagaacatcggagcaactataatgcctcactcactaaacgaacagctgctctgcccaactttaacactaaagtaataggctaactaagccaacgtgaataactttcaattaatcacttcaatttcatatcatcacacacatttgacacaatcatagaatgtagtgttttacagttgaaaaagttaagcatctgagctcaatttcaagtttctttgaaacgggaatgaaagcgattacctgcgtgaaagcgagaaacggtgggatgctcaagtacaaagtcacagaggtccacactcccaaatatataagctcctttctcgtatctgaatcaaaactcaaaattcagctatgcaccattaatgaacaacaaaaaagtccaattcttcggcgaatgaaaagaaaaggacttacacatggacttgatttgtcatagaaccttcctttagaacttcaaagtagaaattgtggccgggaggttcactccaagggggaatcgtgtacggaacgacatgttgacgggactcattgcaactctgcttgccaccgggttcaccagttttcgcaacttgggagttgaggggttttgattgggattcttcaacgggaggttcgttttggggttctgaagaagtaggttgttgggggggaggaaacatgggggtctccattgtagaatttgaagaggaggaggttgtgggttcggaacttggcgtacccgtggctggtgtcatggtcaggcacacgcaacacacaactgaactacaagacgagtcatgaatccgatcaagtctggatcagggaccattaatttagtgggtcaagccctaatttagattaaaaaataaatacataatgggaaatttacaaaaataggttaccttttacaaaaataaaaaatttcaaaaatactgtatttttataaaataccagtaaaacacaaagcataaca

SEQ ID NO: 305140 - DNA, 2679 bp, Cannabis indica
actttttggtttatctgttgtaaattccaatttgaaaatttaattgaataaggtggtcaacaactttacttcaattaaaagaaattccaatataattttgttaaaaatcccatatgattcactatttcactcaatttaaatataataattaagttatgttaaaaatctttttaaattatatttgtaatataaaaatcatataataattatattttattgataaatattagatattagaaattcaactttatcttatagctgattgatcaatatgataatataaatattaaaatttaactacagaaaaaatataaaaaaaaaaaaaaatatatcatcatagaaagattttttaaagaatgtaacggtttaaataatattgcgactttacaagatatttttttatcaaaaatgtattagttacatgaaatcccatatatatcttttccttttaaaatttaaaatttagtaacaataataaaaaaatatccatctcttaacaacagaataaataatttttacatttaaattaaaattcgtatactactcagaatagtattaggattcattatttacactataaataaacagagttattcattcttatttgcaaaacagaaaagaaccaataggatcaaaatgtgttgttcattttcaatttcaatgtggtcaacaagaatagtaatagttttgtttgtttttgttgttagtagtaatttttgtaatggaggatacacaggtgtttatgtgagaaaccccttaccctccatggatatgccactagaaactttgcctcctccttctgggttcaatgcaccagaacaggttcatataacacaaggagatcaacaagggaggagtgtcatcatttcatgggtcacaccattaagaggttacccttatgttaagtattgggaacaaggtcaccaccacaatgatcacaatcacaatcacaagcacatggctcgtgccattaccacttcttacacttattacaattacacttctggcttcattcaccatgctaccattaaaagattgaaggtaattgattactagttatattaatctcaactaactcaaattaattttaattattacttactaaattaatggtgtatttttgtttttggcagtatgacactctctacagttatgagctaggatatggctctgtcactcgtcgtttctccttcaaaactcctcctccactaggccctgacgttccatacacatttggggttattggttagaatctatgaaaagatattaacattcaatatttgaagaataatatgtgtacacacttagatgtgacaacatatggtattgaattttgagtgatgatgttgttttctttttttgtgtacttaggtgatttgggacaaacatatgactccaaccaaacattggaacactatgtgtcaaaccccaaaggacaaacaatgttgttcgttggagatctttcgtacgcagaccattatgagtttcatgacaacaggaggtgggatacatgggctcgattcgtcgaaaagagtactgcttatcagccatggatttggacagcaggaaaccatgaactcgatttggcatctgagattgtaagcataaaatgccaaactcatcatactctctttggctcaattattggttttaataaggttgtgttgttgtttttagggagaaaatgtgccttttaagccatacatgcataggtatcatgtacctcataaggctgcagagagtacttccccactttggtattcaattaagcgtgcatcggcacacataattgtcctctcttcttactctgcctatggtatgcatatcaactctcaaaactaccattttattacttttttcataagagattggttggtaattttgtgttgtgttttttgttaaggcaaatatactctacaatacaattggcttgagaaagagtttcaaaaggttgacagatcagtgactccatggcttattgttttggttcattctccttggtacaacagcaacacttatcattacatggaaggagaaagcatgagagttatgtttgaaccttggtttgttcaaaacaaagtcgatattgtctttgctggtcatgttcactcctatgagcgttctgtaacttactcaactcaactcaattcaactctctctttttcacttatcatttttgttagtaattttaccaatttctaatgaaacatatgttacattttaggagagaatatcaaacattcagtacaacatagttaatggacttagtaccccagttaaggatccttctgcaccaatttacataactattggcgacggtgggaatattgaaggcgctgcaagcaagtaagatttttgcaaacatttgaaatctttttttggcttgtataggcgcagattggataaggtcacatgcctgcaagacatataactctaatactatgttgagaatcttttcccatttatttcatgtggggcaaggggtgtacgtcggtcggtttagtcgggttatagcatatttttatcaacccaatataaatatcgggttgcaaatatttaaccataacccgcccaatcaaaaattagagaaagttcaacccgcccaatgatttcgtcggtttggtcgggttaacccgtccaaaccgttcttcacttttttttataattattattgttagt

SEQ ID NO: 305141 - DNA, 2527 bp, Cannabis indica
tggtttacaaacagatagcagttttctctaacccgccaaacaatgatctagtgacatgctaatccatattaaacatcacgggaaaagaaaatatatcgtattaaagcaattgcaattttcacattgaagagttagtaatctatatctatatgaccccggcaatgatagattccgagaacttctcagtacaaaaaaataaccatgaacaagccattttttttttttgtaaaaagaggtagaggcctttgtctaagattgacccctccccatttatatatagaaagcctcacttgtggcggaggaataccatgattacaagtgctatatcacaaacatataaaacatttgaaacaaaaccaaaccaacgagacataaacaattcatgtactattaagccacattacacaacaattcatgtaccatgaacaagccatttaaagactgaaaacgtccaacagatattgtttgttgagcaagttaatctgattactacaagttcacttcaacattgctcttaaaagtattgcattaacattacaggaccagaaagcttcagctattatcgccattgaaattcaatgaaagttttttatttatttaaagatacataaaagtaaaagaaacgtcatttcaagttatagacaattctttactctcacaggtcataatttgtacgattggcttaaatgcaaacctatactactaagaaatgaaagtttccttcacgaaaaaaatcgggtttcatcgcaggaatttcaaaaacccatgaaacttaactccattaccacaatcttcccacagtttcttgataaccaaacaggcccatttcccacaaagttctcagcaaaccaaataataaaatgtgtacatacataaataaagaaataaccttaccaggaacgcttataagaactaaaatccgggtcaaggcgaaaagcccgtttgggtaattggcttctgagaaaaccaacactgcaatccttgagagtccttctggtggcgctcaaattggaggcatccaagaaacgcttggcgagaagtgggttggagagaaaggcgtgaattttgggagagagattgtggtgcgaccgccatgaatgagagttgtagggcggtctatgagagaggaagtgggtttgggtttgggtttgggttttgggtagttttggtagggaagtaatagttttgtagggatgtgaattgaagagcgaagaagaagaatggttagaggtggagtgagagaatttcgaggcgagtttcgaactcaataatctctgcatttttttatttcctttgatcaggcagacaagagcttctgctctgtcttccctgggcttttgtacgattctaatcgttttctaacaagagaggtttaagctttttctttaaactagcaagctatgtagaaaaatactttctttttttttttttttagaaacaattattattaaagaaaagaattaggaacaacaaaagaaaagattggggaatagaattttacccaaccaaaacatatctgattgcgaggtggcagtgcaaggtcttactgcggggctgtcaccggaatggagggtcagggggctatttgatgctacccgtcttcttctcagtcagctgccgaaccacattttacgttggatcccccgaagttggaactctggtgcgcacgacttagcagcctgggctacttctgcttgctgttttagacagttatcttcaagggaagtggccccctttgttgccactatgaactttggcctttaggccttttctggttttaaataaagctttcagttatcaaaaaaaaaatatcttcatccaatcgtagaacaaatttagctaagtcatgggcctcttgattagcatctcttttaacataagatacctttgctctagaaaaaaaggataaaaaataattaatatcttttaccaaatcatgaaaatgagttacacacctagtagaaaataaactattgacatgattaattaataaaagagaattagattcaatgaaatgtatttgaaacggatacatcaaggcccattgcaagttgtagaacactgccatagcctccatttcttttggtgaacagcatccttgtaaggcttttgagagaccagctacaattgcaccttcattattacgtataagagcacccacacctattattgcaccagtaaagtcaaaggcaacatctatattcatcttgtacaaatcttgttctggtggctaccacctcagatggaccagcaatggggagggaatggccggttgtgcactacaagatgtagcagtagtactctagggcggtatagcagcagtaatggctttgtgatattgagtaatatatgtagcagagtaactacatataacctcagcaatcttaggcttagaaccatgcatctttttgttctttcagactaaatacaccacataatgcatacaatcctctccaatttagcatctttatttatagcagcaagatgggaaaaatatcataactgtaaagaccgcttatgattaaca

SEQ ID NO: 305142 - DNA, 2301 bp, Cannabis indica
atcgcctagccttgcctccagcattgttagcaattcataatgtatttcatgtctctatgttacgaaaatatgtctcggatctcattcatgtgttgagttatgaaaacttagaactccaatcatatttttcatatgaggagaaaccaatgcagatccttgatagaaaagattactctggaaaaacagttaggtggagaaagccacctgggagttgaagtttgatatgagagctcaatattcgaagttattcaggttagatttcgaggataaaattcttttaacagaggtataattgtaatgaccgcttaactttaatatgaaaattagtaaacaagcaagacttaatttcagaattagacttttgtttattatttatgcaatcatggagatatattaaaattctaagtgtattaattatgatgtatgcagaattttatgattttcatattttatgcctagtaatagtgaaatgcgacgtatgacctatataatcacgtagatatgatttagtaccttataaatagtggagcaatataattagacattaggaatatcaagaatgtttggggttatagattaagactattttacccctatataagttgattactttatgtataagcaaataaggaataatcattttatcttagctttatctttatttaaaagttagttgattagttaataatcctttagttttattacttaatgagctgaattgtaaacaagagattaaccttatctctttgttgataattagccaaaaacacacacaaaaaaaaaaaaattagaattaacctaaatcattttctctctccaagtctttttctttcttggcctctctagaactcaacaagaaaccatgttttgattcactttttcttggtgatttagcaagaattctgtaggaatttcaagaattaacctaaggtaagttcaccttccctcttctctttgattttcttgagaggttattaggttttatggttatttttgagagtttagttattgtatgctttgaagatgcttagaattggtttataaagttatatttgagttaattaggtggttttgtggatgttttaatggttgtggttgagtttgagctaattttaaacttttgagctcaaacttaggtcactaatggtggattttgaaattgttgatggatgatgcattttttagttggtttatgcttgttattaggcgatctagaacttttggtaagatttggggtagaattctttgaattatgggatttcttgtgtttctgcagcaaaaaacgacaacccgttttcccataaatgacttatcatttttggcagtcagagaccagaaaaatggcttgttgtttttaggaaatggcttgccgtttcttgtgacgtttttctgggaactcatttttttagcattttcttgatctttagtgtattgtcatggtatttaccgataagaaaacttctagttttgagtctaagtccctgaaaagtgatttagcatatcacttatcaattttacgtatgttgtgacttaggggcttgtaaatcgtcgagcatcagttcctactcaggttgaccggcacacctgaatttagagtcaatgtaagattagtataataatatgaatatatgattacgtgtttaactgtgcatatttatgaatgtatgttagataacatatcagcaatggcggtattagtgtacatggagttatactgaataccggcatatatgtttggcaaaagtactgattgacgctattacatcgatacgactagagtttcgagtataggctaatattatggtcaatagtactgtcttaggaatattgtaggctcagtacgcgttggacgcgggatagggttataattgggtgtatgggcgcatagttataatcaagtttttatgtttatgatatgattatatttttcttactgagtctgtcgactcacagttattatttgcatgtgtaggtaagggcaaagctaatgctgatcagcagtgagtacgagcggatgaaaattgtacatatttggacggttagacctgagtgttcgatttttgggacaacgggctttattttgctagtcgctaggtaacaaattttgtagttatacattttgcaaaacaattaaaaattctaaaaggcgggatcccaaattatgtaaaatatttaattgattaagtttaaaatttatttaagaaaatttaaattatccatatttttccattaaccctttgattatcaaaggagtgcacaacattaagaaatcacaataacacgcctaatctagtagggtgt

SEQ ID NO: 305143 - DNA, 898 bp, Cannabis indica
tatatatatatatatatgtgtagtaaaagtaaggaaggcagggacagttggaagtaattaatcgtagaatttgtgggtggaaacttagcatttgtaccttcctttttctacccaccctattataaacgacactataaatttctatgaactcatatgcacaatttcattacaacattacattaaagcttacctctctctactatacttcatcactttaaccaaaacatatattagaatcatggggttctacttcccatacaatatcctaccttttcttactgtaagttcttgttatttttttcaaaaaaacaaatagtcttgttttattttctttctcatttcaattaatatatgtgtatgtatatatatatatacacacacacagttgttgtttgtagcaagccatgccgtgcaatctccagaactttattggaagtctgttctgccaaacacacctatgccaaaagctgttacaaatcttctacaatcaggttggtgctaccaaattgacaccccctctttaaagtttttttttattgaaaatatttcttgctgtatatattcatgaaaaaaatctacaattctcttttttaagaggggtttatcgatgcacccttatctatttcggtatgtggaaaaatattttaatatactttttttttatagtcgtctacgttgtagttatttaagacctctcctgcaaaattttgagaaatttaaaaacatttaacatgcggaaaataggaatcaagcagtttatttcacacgcgtataaaataaaagagtctcgtatgcatcaaactgtttgaatcctgttttagacgtgttaaatttttccgatatctcaaaattttataagatgtcttaaataactacaacgtagatgaccataaaaaaa

SEQ ID NO: 305144 - DNA, 860 bp, Cannabis indica
ttttcttatcgctaatctaattaagattatgtctgactcccttacatcttagttttgtctcctgtatttagatacattaagtcaaaatgtattaaccatatttgttaatagttattttactgcagactacttggcttttcgtgcaatcaaccccatgtgacaaaaggagtcctcttgctatttttttatgttcttttgctttttgtttagagattaattaattaatccatagatatagttgattattgtataaagtttttcaccagtaattagttctttctccaactaaagcctcgttttcattaatgtatgtatttacagttatatatatagcacagatttcggagtgcatgaactttttaatccagtatatatagtacaaaaacagaaaagaaaataaagagcaaggttaacattttgttttcctttgtttgtttgtaattgtttaaacttgttaaatggaacttgtaaaaagtaaattatattattttttaaaaaaagattacgatactagtttccaggattatttttgttagatttttgcagagtgtgactaaatttgaatattatttattaaaaaaaaagactattttaatattattgagttagttgccggtcacctacgacactcgttaggttattagtctaatctatgtctacttgtgttttagattattactcaattttgttgtaatatagttagtcaattattactgttttttaagagaaattattactattgttgattaagctgaaaatttaatagtaacgtacactatttatatttaatcatgttttctttcaaatttcactataaaaacctggtactttccaatataattttttttaaaaatattaaa

SEQ ID NO: 305145 - DNA, 3024 bp, Cannabis indica
tgtggaacagggatgttatggttcttggttgtgtgcctctaactcaccaccccgattctggttcaataaaaatggtggtgcttctctagaaaattgtccaattatgtttatgggggaggcttctagaataaagattgctatggagcgagctcgtgttaggtactcaaggcctaccacagaggagttagcccctacttcaatcctagaagctagggaacgagatgagaaagataggggaaagcttacaatggattcaaatgatcaagtgcccaaggagaaggcagtgactggttgcgcaagctctgtaccttacatggcgaaatgtggtgttgtagcaccagttgctgatggtatgatggaggctctggcaatggagaaatgtggagtaacagtcgatctaggtatttcggatatacttggggaggttgctccaaaagagccaattttgcacgaaatagtttggaagagtaaacctttgtcttctcttaattttactaagtcagagagagaatgtgcacgtgtgcaactacaggttgaaaaaggtaaggctttaaccaaccatgctagtaatgatgagttgtcatttcgtgaagcactcaaacaaacttttgaaccactcatcaaagccaataataaaaaaaacatggaaacaagctttggggaataaggcttttaatataagaggctctcccaattctggtgtgatccttcttagctcgaaattgtcccatgttattattgctaatgccaccaaaaaaccatcgtcttcggggagtaagaaggggaagcataaggtggaatagagaggaattatgagaatagtaagaaaaggaagtcgagctttagttcgaaaactactgttgacatggtggtagatattatggtggagcctgctaggatttatgagtcttttgtgttagaatgcctaaggattggggaaccctggagcattgacggtattgcgagcggtggttcgcaagtactccctaagtttagtgttcttgtcagagactaagctctatggtggttgggtgaaaggagtgaaacgataaatacattttacgaacaattttcatgttcattgtgtaggaaagagtggagcttgttacttttatggaatgatgattggcttgtggatgtgaagtcttgtactacggggcatatttacgccttggttaagtgccctggtttaaagaaatggaggtttatgtggtttcatgagaatctgaagcatagtcttaatcaggattcttggcaattattgaggtgactcaaggatatgtttgacttgtcgtggatttgtggtggtgattttaatgagattcttcagaatagtgagaagaaggggggaagtgcccataatatttcaacaatgactactttccaacaagcacttgatgagtgttcacttgctgatttggggtgtgagggaaaattatatacgtgggtcaataagagaggaggtttggcacaagtctaagaaagactcgataggtttgtttgtaaccaacgttagaatgatctgtttcctactgtgaaggtgactaatggtgatttttgtggtttggatcatcgacctgtggtggctgttttagaaaatgttgttaggatggctagggggataggaaatgtaggttccatgtcaagcctcattggttgtgagatgtggaccgtcatgtcattgtttctcaaacatggctttcaagtagtgcacctttagactgccataacaagattatggagattcttaagtcctgtgcagtaaagttgagaagttagaataaaagaaaatttgcttccattcctcacctagttcgtgaattacaaaaagagcttgacgatttccttaaggtggaggcacctctggtgcagatggacaagatcaagcattttgaaagtaaactagatgatttattgtctagggaagaatgttattggtgacaacagtctcgttcagaatgattggctttgggtgatcaaaacacgaggtactttcataataaggcttcgactaggaagaaaaaaaatgcaattgttgagcttgtaactgatgatggcataaaattagttgatgagggtgagattatgaaggaaattgagaactattttacctctattttttagtcaaattacatgtcattggatcagattcaggcaacctttgtggaaattggtagcagagtttctgaaacaaaaaatgagctgctggtttcaccattttcagcagaggaggttctctttgctgtcaaagcaattggtgctactagggcgccgggtcctgatgggtttcatgcggtgttttttcaacattattggatattttggggcctcgagtaacagttgttttcctagtgatttttaatgatgggtatcagttaaataaattaataagtctaatgtggtgcttgtcccgaaagtcacaaagccatcttcggtgaaggatttttgtcctactagcctttgtaatgtcttatgtaaaattgtggcgaaggccttgtctattagattaaaggttgctatttccccccttatctcttcttttcaaagtgcgtttgtgcccgaccgtgctattcatgataatatgatggtggaatttgaattgttacactcgctttttaaaaatagtattaaatgtaaggggtttaaggctcttaaattagatatgaggaaggcgtatgacatggtggagtgaaattttttaaggggaattatggagaagttttgttttgcttcaaggtggtgtgatttgattatggattatgttttgactccagaatactccttcttggtgaatggtaggcctcatgagtgtgtacgaccttctaggggacttaggtaggggtgtcctttgtcaccatatctattccgtttctgtaatgaccgctttagtaatgtggattagaaaaggcaattagcactaatttttattattttattatattattattatttgtgaattaattttgaatgtggaccccaatatttagaaataaatattagagttataatttctcaattctggag

SEQ ID NO: 305146 - DNA, 862 bp, Cannabis indica
aaaaatctacagggatgatgttgtgagtatacgaacacagtgatgaaaaaaaatctggcatgtaattttggacacagaaattgactaagagattttaatgtgaggttaacggtagcacttctcttctataatatactttttaatatgattttttttggtcattttgtaatctattttggcatctggtaagtctaaatattttatataatgctatacgatatagttatttaaaattaccagtcaatttttagaaaaaataaaatagtttatagtgccgaaaataagattcaaatatttgtacgcgtaactatttttttatacatattgtaaacaactgtttgaaccttattttcagtactgtaaattattctaaattttaaaaaaaatttacatatagttttaagtaagtataacgtacacgaaaatgaaaaaaaattataaaactctcctaaatactgaaacatataaaatacatactaaaatactacttttcaggggtgtactataaatgtttctaaaatcttactcttttttctttttcttatcttttttttttaatagaaaaaataaaaatatataagttatatttaacatttattttattgatatttaagaattatttgttatattgtaatatcttttagtggaatggtaattttcacattatcatatttggtgtgagatatatttttaaaattattactaaagaaataagactacccataaaaggacaaacttaaatcctttcaaaagagtggtatataaacattttcttcagtcataatacaatagatataacatattaataattttaaattagggtaaatggcagtaaaaccctcaatactttcgttttggtttc

SEQ ID NO: 305147 - DNA, 1382 bp, Cannabis indica
tgctaacagaataggagtattggttttaccgtccaaatttgttttgggattaagtgaaactaaaatgaaagttttaagaattttggcgtcatttacccattatataattgatctaatggtattaatcattgtatatcaaactaagcatacagtacattaactaaaaaaaacttcaacattaattttattagattatctcaaattgtgtaatgtttgtgctaaatttggctacaatggatcaatctatatttagctcaaattttataattatgttccaatacactaagaataaaataaaattcatttaaattaatagaaagtgataaaaaatcaacaaaaacatttatttttttctcttttttttgaagaaaaagaattccattaaaaaggcacaaagccaaaaattaaatagagcaatacaagaaattaaaaattggtatccaggaagaagacctggccactaaatttgagaaacatctaaagatagagcatacaagcaagagaatgtgccatactattactattatatgaacacttaaaatgcgaaagagtaataatagaaaaagaggaccagatatggttaatatctttgacaatagaaccaaattcagtagaacaaatttcaatactcaaaatagcttgcactaaacaaagacaaccaaagaaaactataagacttgtgtaacccaaatgaagacaaagcagcaaacatcggcgatgcacctgagcagaggaacactctcaactggttcgacaccacggccccaaggccatgttctacccttctgcatgaattccaacatccacaaataagttaatatccctgaacactatctcatgagtcccatggttagtagacggaccaattaccctaggaacactctggaccaccgacatagaaaacaaaccctgagcgtcttgataccgccaaagaaaattcaaagaccattagttgaccatcgtatctgagagtaatttatgatcataaacaaatgtattctacctatgccaaatcctccaccaaagaacaacaaacatttcatttttattgaaagtatataaaaacatttaatttacaatttagaaaagagtatttaaacattccatttcactcacagcaatacaaaataaaaaaattatttcacacttgtataaaataaaaaaattacttgtacaacaaacaatttgaatcctgttttttgtgttaatttttttttgaatttctcaaattttacaaaatattttaaataattacaacttataggaccatgaaaaaattgaactaaaaaattcgtcaaaatgccaaaacaagtccatagaattttcctataattacataaagcactcttttttgtaaaaaaaattacatttttacgtttgaa

SEQ ID NO: 305148 - DNA, 578 bp, Cannabis indica
gctcatcttcttgtgcctcaaacactcagactaattcaaattcatggctcaaccaagaattggactctgctggtgaacagaaattgaaatgggttcaaaagaactacatgatttacaattattgcaatgatgctaagaggtttcctcaaggttttcctcaagagtgtaacatggcctagaagatagagaaagtactattatgtgtttatatgtaattttgtacctaacactatgcaatagttttaattcattataaatcaatataattcttttatttgttttgaattatttcttcttatttttctagtacttaattaatatatagactgattatataaaagttatcaaacctgtgttttttttttttgctggaaatataaaaatggtactaagtccatcaaactcacatttgaacatatttaatgtaaaattgttatacaaaccttgtgtgaaacatgttattttcagacctataagacttgaactctggctcttttatcttaagaatatttcaaatgggatgttgagaataatgggttttatctcaaaattaattggtgataagtgaagtagctcat

SEQ ID NO: 305149 - DNA, 2497 bp, Cannabis indica
tattattatcattattattatttggattagcttcattgagagagataaaaattatttgtgctgttgaaaacgtagagatcaatatagtagagtatagaccgtcaatcatagcagcgggagcaacattggttgcattgaaccacaaaatgaccaagtcagaagtggagttgaagatgaattccattcctcatcataaatctctgaatattgtgagtagtttttctttgtgctattttattcttcgttttttttcatctgaatattttattcttgtattagtcatataagacaattcatgtcgtgttagatatttatttatgttgaatatttttttcttgttcatataggaagacgtgttttcatgctacaatctaattcaggagttaaagattgatgaaaagacgtccattttgtcctcgccgattgcttcatcatttacaaatgaattacacaatgaaagggaaaggcctcgcagtgacgaacaccatgatgagagagtgaatataactatgccctctaattctaaggagtaagtttgtttcttaaaagatcaatgaaagaaagaaagaaagcatttgggctacttataaaagctgatgatttacagatagcaaaagaggagtgatggcggaaatgtgatcgaagaagaggattttctatttatttttattttaagaacttgctaaagtttgtgtaacagtcgtctgctacttgatactttttatcctatataatttgctttggttttttgtgatttgaaaagattagcaaaccctaccttttgatgcattgcttttgtggaagtttatttatatatctatttgtgggaaattttatggtttacctattaaaaatataggagtacggatgttttctcttattcttttccatattcatattcttttaatatttttatttatatatagtgtatatcttacttattattttttttatacgcatgattattgtttcaaaatttacactgtcttaaataatacaataatgagactaattattcatatatcaaaatatatcgaaagaatacggaagaaagaaatgcatgggcacacttatttttagagtacacataaaatcaacttatatttatttatttattgtgcctgtgttcggtgttggccatcaaatcaatttatatttttttcttgaaaagataaactattattgtgtgtgtgagagagaagggtttgtaaagttaaaatgtgacttgtcatttacttcagtgtttggggggaatatacctgtgtaaagcgataccttcccttctacaatttcaaaagcactagctttgtagtgtgtgttgtgggtccaattcaggcccaagcaaatataatttgtccatccaaaatcaatcatgtaataatgatcacgttttttataaaagttttttttttttggtggtttagctctaaccatattttggacaaaaatttaaaaattatagtatgttacgttgtatgtttttgcggtccacaccccctaacacgtgtgaaatggtatatttttgtattataacaaacaaacaaaacaaaatgtcgcaaattaagccatctttttctgtttgaaaaaaaacaagaaaaagtttttttttgtaaaaattagtttatgacttgttttggttagcatatgaaaaacttgcacagctgcaaacattatttggacatgccattatatgtctatttaggtaagaaaattggacaaatttgtataaataaaatttgagtttctatgcatttaagggtgcctgtaataaaaacccatctactttttgttaagagttcaaagctatattattattttacaacaacacaagtactcctcccgtaaccctatgctcctcttctcttggcttttccatcctagttgaggacaagaaaattcaccataattttgaactccgttaacatcgttatagcgttacctcctctcactcccttctgttcattatcaatactaatcttgaaacacaccatgattattttggatgtccaacactatgaagatcaccagcaataacatctctttacacccgagaaagacttctatgccaactattattctcgagttagaaacaaccattatccaattttttttttctctttttaacaagtcaatatgtaaaaccataaagtttcattaagacacttctatgcatatcttttggttttgtgcactattttctatcaaatctgaaactctataaaaattatgaaaacatttcaatggtttcaaaaagaaaaagacttggtaattgaagaaatttccatgccaattcaatatggcgccactactagaaaattagactttagaggcagtttttaagggccttcagcgtcaattttaataaaattcgctactgacgttgttccaacaacgctatagaggagaagtattgaccgatggtgtaaggtaaccctatgctgtcgattattataaaataaccaacaacatagggagagaatgttgggttttgtgccct

SEQ ID NO: 305150 - DNA, 2174 bp, Cannabis indica
aaaaattattttaaaatttataacatttttatttttaaatatttaattttaaaattataatattaagtgtataaatataaatttatcatgtgtacaagagtgtacacataaacagtccatgatgaccgttaactggatcatgacaccttaaatttattaacatttcagtaatttggaagatttttaccgtcaaaatatgagcatgaaaaattaagtacaagagaaatcacagttggtagggtttagctgcaaaaacaaaaaatgaatcttctatatatataagttttcaaaaaaaaaaaataataataaatcccattacttttcaatttcaaatataatatttggatggtgttttgcattaattaaaaaaaaaaaaaaaaaaaaactctggcttcattttaaatatgtagtttcaataattgattatttttttaaaatcaataatttaattttcttaaagaatgtacgttatgacttagtaactaacaatgaacaaaaaaaaatattcggaaaatagagtaataatctcatcatatactaataatcaatcgttttagcatcaaagaatttagcttttaagaatctaatttttgatgttaaaagtcaattatcttttttctttaatatttgcatatctcatattcgtagagatgcaaatcaagccgctcatggcttggctaagcaagctttaacgttggataataattgtgagagtgttgctccttccattatctctgttattgtaaaagactctttaaatttataatatcagatcttttctcataaaaaagttgccaccactctcatgaatattctctagcatatattatggtatagggtttcatctatttcctaattatatacactctatataacaaaaatttattggaaaaatcaaaagtgtactcatccaaaacaccatttggtacaattttttattgttaatatttaggagagagttttgttttttttttttccataattacgtagtgaatttttgaaaaattaaaaatataatttatagtattaaaataaaaatttaaaaataactaacaaaaggaaaaaaaaaaaatgtgtaaaataaaatatttaaactttattttaaacactataaaatacttaaaattttataaaactttacatttaaataactataatatacaccataaaaaaatgttaaaaattccaaaataatagaatctgttataaaaccaccatttaaggagaaatgtattataaaattcctaaactaagtaatgaaaaaaaaaaattgtaattgtggttaatttattaattgagccacatcgaaacttccattatgcctactgatatttatatataacgtatgctccaaagactatacaaaaggacataaaatagactttgcttttataatctatatataataatctactataataatagtctattaggccaattaattaggtatacgtaccctatcatatagatagtatagttccatttcattgactcattatattaatctagtccttaagaaattagtaatttaaataataataataaaagtaattatccatatctacatgcaattaactcagacattccattattatgtatctcaaattatacacaatgacactgtaattaatcaaaatcaaattataataataaaagtttcattatatctaattttttggtaacattactttcttatataaatctcaacattgttgtgatttatgaattggtatagcacgttcttcaaataaacaataaaaatttttggatgaaatcaattttactttttataaacattttattttctaacctataacgactaccttaaaaaaatctaaatcatacaattaaagtaagtctcatttaaaaatataaatagctaatatttaatatatatatctataacctctataaaaatgagaataattttgggctttccactaaataaattacacaattagcctttactagatattaaattacaagaaaaaaaattcattattttgataaccacaaaataaataaataaataattttcctaataacaaccaaatatacacaattatttaagtgaatcttaatctttccctcctattaacattttttattaatcatttcattttttttataatcttctataataatttttcattgtaacttaaattatattttta

SEQ ID NO: 305151 - DNA, 1011 bp, Cannabis indica
catgtcatcactattgtgctttcctttatttatattgattgatgattgatgattgatattgattgaaaacgatacgatattaatgatgtgaataaagtaagtatatgtacaaaaagcatgaaaacatagtaatgatcaaatcaattcatataatgaccatactatttcttgattctaattaataaaatttaatcattttatcgagaaaaaaaaaataatttatatttatatccatcaaatcgtgttcatatcaatttttacttggttgaataagtatatatacttatttagaatttatcaacaaaaaatataggaatatatattaaaaaaggcagcgaattttcagtaaatcgtggataaaatccatattacttcctctagagaaatatttcaagatcctaaaaaaaatatatgtaataaaataaatatccaagaaataatctattttaggtataatatatttatgaatatgaatatacataaaaaaaaaaagaaatattacatgttttaattgcgtatcaaacattaaaaaggaaaattatattttttttatcaagtatcaatctaaacattaatatgttatttgtccaaatatctaaacattaaatgttgataaataatttacaataatgtatcactctccacacaatataatctctatatatacacacattttcttttcaatttttactataacaaaaaatttctagtcaaaaaaagaaagaagaaaacaatgggttcttacttgaagatttctttcactactatagtttttaccttatttttggtgtcttttactgtgaaaggagaccaatctgatgttaaaaattttggtttaaaacacagaaaaaatctactcatatgggagcagaaaagaacagttccaactggaccgaatcatgaacaatctcctcatagttcaggtgagaatagacttgagaatgaacaagattttttcttgactaaagatgaagatcaagaaagtttcgtctcaactcgtccaatttcaac

SEQ ID NO: 305152 - DNA, 1358 bp, Cannabis indica
aaaaaaataaaaaacaaatcaaacgacacttctccatgataacattacacttcccggaggttttgattcagagaatacaatgcaaaaacataataatcacatgagagaaaaatgctttgttatacgagtccttctttagttcttattctacaaccaaagccttgaaacccttcactacaatattaacaacaacttattattaattattgattatttgaactctctcccatgaaaatcttcaatcgattccgtaagattctcatgaggcttattctttctttcccctcaagacctcaacatcaacatcatcggtcctcctccacttcttcggctacgccacgaaacggcgacgttcggtcgtttgatcctcccaagacttcatgcagctcctactactcatctcactcacactacaatgaggccatagctgattgtatcgagttcttcaacaagtcttcgcaagatggtattttatatcatgaacaaaacccattagatgttcttgtttgatttatatatatatatatatttgttattattaatataattttttgctgagttatatttcctttttcatttattcctcttaatgcgcagtaattaattctgggatttgtacttgtacaattacttaagaaaaggttctaaattaaaatatttttctataaattaaaattgtccaatatattgattttctttaattttaatttgttaataaaattcaatacgagtgatcagattataaagacatacagctggaaaggagaataacttttgatgatactctacttcaattttgattgtggtgccgaattctgattggtattgggaaactacatggggcccttttagtatgagaagagaagaaactagctacgaacaactttgactttgggtcaaactaaataagggggtaaggtttgaaaatggtcgtattgggttgataacttctgattgcattcgcagtggggtctattggttaagtcatgtactttcttgtcattgtcagtcatgttttttctttaaataaaatgttatagagcattgatattatgtccgctagtgatcctttgttacattaaattacatcttcgaaccaacttcttaattaccatttctcaataatatgatatataatattatatttggttttaataactatttaaggctaacttaagtagtcataatagaggggtattgaataggagtgtaaatgggttcggtcggatctgatccgacctgatccagatcatgtaaggatctggcccgttcgctctgctagattagatactcggatcggatcatattcgacccgacttattcgtatcggatctgatccgacccgactcttttttttt

SEQ ID NO: 305153 - DNA, 1751 bp, Cannabis indica
ttatggtgaggaaatgcgagattttctactgaccataagagtctcaaaatacttttttcacccataaagactttgaatatgaggcagaggagggggctagagcttgttaaagactatgattgcgagatctcggccaacctaaatggagaactatccccgatgatctcggcccttaagctctctctcttcaagaatttgttctcctgctactatcaaagcttagatcgctaagttttcgggatgaaaatcaaagaaaatgaatataaagggagaaggttttgtcgaaaggaaagaacgagggtttcgttcgtccttctgctgctactgtaatatttttaaaacatataatatatgtaaactgataaacgaaactttcgtttatatacatataataatataataataataaaatattaataataataatatatattaataataacaatattaataatattaataaaaattttattatttatagttatcttattattttttagccgctaagaaatctatatttctaaggtatttggtcgactccgagtaccccaaaatactttggtattactaaaatcaatttatcataataatcccatcaataattctaactaaaactgttatgatatttttggcctccaatcgggtctccagggtcgtcgaacctgaaaatatttttatttcacaaataactcatatttatatccacgtattttaaataaatcttcgtaattaacaaattacgcttatatatacaattattgactctttagggtcactgaacttgaaaatatttttattccacatatagcgcatattacattcacacatgctttataaatccccgtaattaataaattacgattatttactcacttatagaaaatttaaattttatgctgaaataaattagtaggatcataatctcacttattacttgattaactcctaatataaatataaaccttaattatttaccattagacttatcgggatattacagaatttatcttgtgaaattctaagtgatagaacgcatgaagcgagaatttttggtagaacgggtatccacatgtgaacttttttgcgctaactaattctttggataaaataattatttatttatgtgtgtgaatataatatttttagaatgttataattgttttaattgtcacacatttgatttcattaaaaaaaaattatgatatagatttggaaggaatttatatgtgattcttaaaggtatttgagcaagaaactaggaaataagttaaaaataaactaggagtgaagtcctcctaggggccagccaaactttgaagaaaaagccatctggttttttatatttttggtgttatttgagagaaaacaagcgcatgaacaagcttttccacttacacacacaactcttctcttttgaatgaaaacccacttgcacacaatctctttttctcttatcttttcactcaacaccatcccatcacatggcagctaaaagcacttccttttccgttctaattttttcagccctccctccctcttcaccactctcctttgttttaccaaaatccttccatggatgtgttacgaaaaatataaataatacgcaagtgcacgtaattaagtagtactcacacaggtgaggtcgatcccacaagaaattaaactgaatactactagtctagacttgtgtttctatttggcaaaccaataatttttgtgattgaaacgaaaataaagattaacaagaaaat

SEQ ID NO: 305154 - DNA, 1127 bp, Cannabis indica
taataataataataaaataaactggatattacagatgtacgttgctcggtttggtcgtattatactacattaatcatttaatccaatataaaatcgggttacaaaaatttaagtgcaaccagttcaattaaaaaataataataacataatcaatgagttagtcgggttagccgggttaacccacccaaaccgaccactaatattgttttattatctaaatttaatttatattttaatcaattgtgatactgagacatgtatttatagattaaattcaaaatttaaatcaatcatcataatacaaacatactggtttaaattagaatgtgtaagtgtatggttgaggaagtaagaataagtgtatagggttccatttcaaaatcaattgataataacaggtgtaacccatgcatattatgtatagtatttagttacataataaaacacatctatataaataaaactcctcttaacatgatcgggttagttcatgttgattaagtgaattgatattattttcaacccgtccaatataaatattaagcgagttacatctcgttgggcttttcaatttgtattttttattcagttatttcgatttagtttgggtgagtattcggattacgccgtgtaaaaaaattcattatgtagagccctaataagagcataattagtcaatttaattaattaattagtagaaatattatatgtagcaagagttatagtaatactgtacctctttaataactatataagcaatagttatagtagttaattaaagggtttttagagtcattaaagggactatcatcaataaacttttaattttacgatctctttctctcaaaacaattagtttctcataagaaattcaccaagaaattgcttaatttattttgaagaattcaaagactatattgtcatgacaagcaagcctctataaattaaaagttgaaataaagaatttggaaagagttattaaacttggtcaaaccaactttagatctctacttttctcttgtgattgttatttcataattactttattgactcaatctctctttaagtacaagcattctaaaaaaattgtaataccaaatttccataaaaaaaatgaaaatctcaaa

SEQ ID NO: 305155 - DNA, 4493 bp, Cannabis indica
ataaacaatcactgaagtagtaatattaaatgaaattaaacaaaactccttaaatctaacaatcttattagttcaggaggattttgaacggctaaaaaaattcaaagggcatgatttagtacatgttaaagtttaggggcaaaaatgcctatatagtaatatttataattgtagtagagttgagtgaatggaaattagttttagattatttataaataatcattatgaataataatgtgaaaaaaaaaataatgttatagatatcagataccacttaagtttatcgatgattattgaatcatacatcatattcaaaattaaaattaaaaatggcacattcatgcaccaaaaaaatgacactcattgattagactttcttcaaatataaaactaacatattatatatattttcataatacaatcagcccatatggagcactataaaaaacataacaatctccacatatcacccattactctttcacataaatggcaaacataaaaaatagaaataattaatgaacattttatattatctctatttaaatatttgtcttttatttattgtttttctattgacaccacaactcattaaaagtaataattaacttatatgcctgataatttatagtttattagatttttaggatgtatttgaaagtaatcgtataatttaggtagtataattaataggaatataaaatggtaattatatattaaaatgtaaagtttttagtaattacataatataatacatttaatttttatggagtacgagaattggagaaaataattaaaactcttcaattattttcaattatacaattacaatgtaattatctttaattacacttaaatttaattatactgtagctttctaaatgcaccattagttaaaattgttgttaatttttttttattataaataactaatgattttactctaggactataaacgttatatttatataataaattatatttaatttacctatttaaaaaaacatttctgcttctttgatcaatatatataattacgtagttaaataatattatattttaatttatattaagaagtgtgttacattgcataactcattattgtccacctagctagtaatagttagagaattagtggtattagaaatgttaaaaagtattagtggtgtttaatacatttttacgtgtcaatatcgctattaatttagaatgcatattatactatagttgccacaccagctttgcttccttcccacgtgtcaacctcacacacacacatgactctaaaaccactggctttgagaacccagaaaagcccaaaaaccactcacactaataattcctttatatatttatgggttattaaatgaataaataaatgaacactctttcttcctttttcttcctataaataagaccccattttctcttgttacactctcaactcaccccttttaactttttcattcatttcctcttctcaaattctatactaccaagcaaaaaaaaaaacatggcttttgttttctctgagactgatcatcagaagacattggttgataatagagactccaaatccaaatccaaaggaccaagtgagaccatcacaagtgagctacacctcaaaccatccaagtctctaaatagagatgttgttttgagacgtattcgtcttcacaagtgcttgaaaagagtcacaagtgtttttcaaggccaagctgatgctaactctatcaatgagcagaagtggcttgaccagaatgacaatttttcttctccttgaaaagagttactaaatattgcttcttaagttctgattgaagggctaagctaaactagtcaacaacacatttacaatttattgagaaatatatgtacatcactatattgtatatatgtagttgtattgaactgaatcccaacatgttattttgagcatatcatgtataagtaagttattctagcaatatatttatgtaatgattaatgcttctgtgtcttgagatgttattctagcaatatatttatgtaatagcaaacttggaagaaaaaacacatcaaaagtgcttgaatggtttttcactttaatgcaccaataaaatatatggctgtggattttttttttttaagcgttttttttaagcgttttatatattacaattatgttttacttgaattaaaacccagacttccaacacacacccacctacttaagttagcctcaagtagttatatggctgtggattcagtggcagagaaagtagctattaaaatgtaataagaattagaactaagaaagtgggctcttttttgttttcttatgtttttattgaaaatttacctttcgtgcaactcaacatgaacctagggccaacctttcaaactccaatgagatgaaaatcattgctctatatatacttagtttacttcagaaaatgtaaagctaagctaataagatccaaagatagtgaggaagaagagtagagccagataataaaattggtcattcatcgatttaaagcctttcgaaatggtcatcagtcacaaaaatgtgctcttggtggagcaaaaagtatcttagaaaagaaaaagaagagaaaaacgtaacttatatgacctaacaaaatatataaactataacatacaaaaagcaaaagattaaaagaaaaacagacaaaattgaagattgcccaaattttattttaacaagccagatgaagaaagtaagcgcaatgcttggttggagttattcaacactgcaaatgatcttggcacttgcatttttcttttcttcaagaactccaatgagttctttaagcattgagccgatggtatttcattcaacataacagtctccaccctgcacacatcatatttacaaaaaagaattattactatgattgaaagtaaaaaagcataactctgtgactctcgttttatacgtgttctcagtacaagaagatgattaaacaccaactttaactaaaatgaatagcttttagctaatactaacagagattatttctgggttttgagccaaaattccaaagagacagagtactcaccctgagcctgatgttcttctggattttttcttccttttagaactttcctttgattcagtcttctcatcctcagagtctgataaaaacacatgtctgcaacaattaagatgacccatttggttagaccatcttctataatcataaaagtatgataggtatattattatagaatagagcatcatacttctcacgggcagcaagaacttgaacaatctcacttggtagcattccttctctaccattaggttcgcttgggtcttcggtctggggaacatcttgaacgctttcaaccttttgagatggtttttttggtgtttttctctgagcccataatctacgacgctcctttctttcacgagcaactctatattaccaagtaaatcccattaaaattataaatgattaacaagctttatcaatctttactaattcattaaaaatcccttctgagcttattaatttacaagtacgaagaaacttctaagttctaactcttaactttagttatataaatcatcacttgtcaaaatctccactaattcattaaaatttccttctgagcttattaatttacaagtacgaagaaacttctaagttctaactcttaactttagttatataaatcatcacttgtcaaaatctccactaattcattaaaatttccttctgagcttattaatttacaagtacgaagaaacttctaagttctaacttctaagttctaactcttcactttagttatataaatgaccacttgttaaatcgctattatagcttaatccagagaaacccaaaacccctaaacttgtcaatttaaattctattataaagaatcaaaagctacaaaaataatcataatccttattccttactagcaaaaagccaaaactttaggcttcgattctccattgaactaagcagataaaaactagtcaactttatttaagaattaaatagtatcgtacctggctttattctccttttgaacctttattagctcctggtcttgaagtatcccctatacccagaacaacaaagacgatgaaaaaccttacactctcaactgaattacaaaaatcggataaagaaataagtgaagattgaaggtacctgttccgctgtaagttcctccggagcatcggagccataagcttcatcgtccgacatcgaattactgtgccttgggtttcaggtacgtctagggtttatggtgtttccgttttttcacagaaattcgtcctaggatgaagaaggatgaggaagatttatctggttcgggcttgggcttgggcttgggcttgggaagcctgttcttttgttctttctaaagtaggcctgggctaatttaaataagggaaacttacaatactggaatttaggttaacttttacaaaaatactgtcacacaatttttttttcaaaaatact

SEQ ID NO: 305156 - DNA, 1440 bp, Cannabis indica
aaataatcacgcgtgcaaatttacaatacactgtttgaattctgtttttcggtatttttttttttttcaaatttcttaaaattttacaaaattaaataactatataacatacataatctgaaaaaaaaaataactaaaaattattttaaataccaaaacaattaaaaataaattagtacatctcttttattattaactataatatacatatgtaatatatttaattaaaattatatttatataatattaaataaaatctaaaaatcatataaatttgagagacgaagatgaaagaaacatcatcatcatatggatttaatttaattaactgaataaaattaaaaggatgaaacgatggctgtccagccaaattaactagttggctcatgttttatatatgtgtgaatattttgtatatacagttattaaatacaaatgtatattaaaaaaacctagttaattactttaatattggagtacacctagctcataatattatagaacaataggccagcctgacgatattggaccatactagtgttcttcgatcgattattagtaattatatatatatatatatataaacattaagtatatatatatgtatatagatgtatatatataggttataatgtatccaaatatattggcgatttcttagacatatagtaagattatccatgtgcttaagttttgaaaaaacagaataaaagatttaatgtctgaattaagagccagctaaggaccatgtgcaaataaacactatatataataacaaccacctagttaattaatatttatcaacaaattatataaggtagtttttgtgtgagaaaaattagccacccaacacaacaacatatatgcaaaaacataacatgtcgatatatacatgcaatgaaacaattaacaatgcacacgaacaaataatcttaaaaactacaaataattaacgtatcaaaaattcattaaaggaagaaaattaaaagatgatatatagatgagttgaccaggcatcttgtgggtgagctagctaccagcttatttatcacactccacaacgttgaattaattctttaatcaaaatattcaaactcctttgatgcctagtagtaactaattaataattaaccccatgcaataatcactagctaattaattacccttttattataagagtactctcttgcttataaacttataaagtctagctcttttattatttctcaaaacaactcaaaataaaactatatactactaatatttagtatacttgttaattaattaattaattatcaattaaggtaaagatctaaggaaagagagagatgggtcggatgttaaactttttatttgagcttacattaaattttattggttttattaaaacttaggttgatttgatagttctttgttgtgttagtccatattgatgttgat

SEQ ID NO: 305157 - DNA, 1969 bp, Cannabis indica
tttatattattttataacagcatcactttttttttctaaatgttgctaaataagtgttgcaaaatgtattttttctagtagtgtatgagatgttatatcaatattagtgtaattaaatatagtgttctacttattttaatttaataattattatagaatatcgttaaacattcgtaaggttccacctcttgcaagtgcttagcgaaattggtgcataagagcactctactctatcaatttaataattattatacaatcctctaccttctagtcaattgggtgaattgttggatcaggttagcagcttcttttgccctacggttggtctcttcttgctgagctcgcatctctcgggtagtgtgatccatccattcttagaactcccgttgttgctagtcgagcaattggttcaccgtggtgcgagttttctcttgattgtggtggagggtgttggtgtgcgtctgaacttgtcccaagacttctctgaggctctctaactcagagttatctcccaagtccacttgaggctctccttcggatggcaggcctgtcctggctacagtctctccaacgtactgtcgattggtggtcttgtctcttagacatttggggtgagccttggcaactcggtagtaactccagtggtatttctatttcctgctgtactcctaacacccgtggaaacaaggtctccaaccctggttcccactaaagtattgtttctacgaggaagacagacactgtattttcaggtccaacgtcaataaggatctgaacattcggattagtggccatagggttgtggggttcggtagaggcggtccttctcgtctgtaccattattctcgaattaaagatgatttatggatctttgaaacacagatattaagtagataacaaagatggtttaagctctcaatgaaagcaccaaaatattgacttcgtttttaatcaatgacgtaaaataaaataaaacgaagaaaaaaaattatgtgtttgaatatgaaagataacaagaaccataaatgatacaaaaagataataaaggttcgacccctatatcagtaatgacctactctttttttagttgtattacttcgagaaataagaagatcacatgaacctggtcaagtgagtttcttcttatctctgaatattacagataatttggcagtgaagtagctctcttaagaatgcagaattcaatcactgaatagtaaatatgatccactatttacagggaaaaagatgtagaatatttacatttaattgtagaataaagtatttaatatttgaataagttaatcctacgaaatcctctcatttctcttgattctcccaatctttcaattataggtatgttaattgacctatttgtaagaaaataagttgttggaatgaatttggacatttttcccctatgaaatcgctggtcagacactttctgtgagatggctctttggctactcaaactactgatcgttataccccatccagcatatgctcgaggctagacgacttcatcttgtctatatagccgaccaaagtattttggagagtctcctcaaaggttcctcgtctgctaaacctcttttatgttcgccacgttattaaagcaattttcgggataacaatctcaaatacatatatacatatatattatacaaataaataaataaataaataaataaaagaagtatttcaaaatcttcttcttcaaaaaaatatatatatatatattgtttagaatttttgcaatgttagtaattagttctctcattattgtttcatgaaaaagggaattgggatagtattgatatgtatagtttcgcgatgcgggtggtgcggtttttgaccattttttcaaaccaactatgcaatttttttaatattctaaactccacccgtaccgtgaaactaaaaactgcaaaaaccgcaccgcaaaaaatggtgcggtgcggtgcagttt

SEQ ID NO: 305158 - DNA, 947 bp, Cannabis indica
cagaaatacaatattcttgttataagatcaaaccattacaacttgacctaaattttcccattctagtcataccaaattttgtcacattaaatctcagcccttcatcaagatgaccatcatcatcatcatcagctaactctagcagttttgacttgaatttctttctaaccccagatgtactttggatcaacaatgaaggttttgattgaaggaaattttgattgatgaaattggtacaagatatcaaattaaaccaccttttacaaactaacctcacttcttcaatatcaaattgcaaattggtgaaagttttgtacaaaacatgttctgggagattttcataatcactttcattgtcaagatcatcattatctttctcttctttgtggtatttgataatctggtttttcttctcttttcttgttctgtttgtcatcatcaatcatccaagaaaataagaaagaaaatcaaattgttaagagaaaattaaaaagattataactttactaaaaataaaaatgggtaatgataattaggtagctttaattaccggtgttggaatgtttgatccattgtcactgttgtttatcttctttttcaactctcagtcttagttctacaattataatattctgtaagaatgtgattttgtatctatgaattatatgttatgtatttatagtgtgagagggttcaacattttttactattttaccccttttacaagatattaaaattttaaaatcaaaatagataattttttttttgaataaaaatcaaaatagataattaaacaaacaaaataacaggcttcatattttgagttctgtttctaattttttttaggtaaaacaaatcagaccataacaataatccataacacgtcattttttaaatattgttttttataaaaaggaatgggaaatttgattttctatacttagaaa

SEQ ID NO: 305159 - DNA, 2000 bp, Cannabis indica
tcagcacatataagaaataaatatggcgatagtggatcaccttgtctgataccttgagaaggagtcacttgaccttgaacagtaccattcaacaaaaaagaataagagaccgattgcaaacagtggagaataagatcaaccatttcagttccaaaccccatcttgatcatgacttgagcaacaaagtgccactctactcggtcgaaagctttgctcatgtcaagttttatagcggcaacccccttagaaccacgtttcctactctttagagagtgtaacaattcaaaagccacaagaatattatccgtgataagtctttgagataagaaagcactttgatattcggatatcacctgcggaaggaaaggctttagcctcatcacagtggccttagaaactagcttgtaaagaacattgtaaagactaattggccgatattgtgaaatgtggctcggcttcttcactttaggaatgagtgttatcaaagttgtattcaaggggctaggatctgctccattgtttagtacattcagaacagcagccgttaccagtggaccaacaatgtgccaataattagtatagaacattacggacatgccatcgatgcctgggcttttggcatcactcattgtttttagagcatcataaacatctgttgcagtgaaagtggctgatatgagattccttgcttcaacatctatagtggaaggaattgtgtcaaggattatatccaaagaggcttgatcaacaccactacttgtaaaaagatcatgataataatgtgagattatattcaaaacagccggtggattagtttgagcatttccattaacatcaatcagttttcgaatctgattgtttttcctccgagtactagcatgctgatggaaaaatttagtgttggaatcccctgattgtaaccatgatatgcgtgagcgttgatgccaatagtcctcttctttagcaagtaactcatcaagaatttgtttagaggtttgtacagcttgcaagtgatcattgtcattccttcttgaattatgaagtgtggaaacatgcttttgggtgtccttaatctgttgcttaagttggccaaaagttgaatgatgccaagtttggagcttactcgaaattgtagagatattggctgctagttgagcaatgcaattactggaatccgtagaccaattttcaagaattaatgcagtacattattcctcctgaagccatatttttttgaatcggaatctggatttgaaatgaatattgtgtgcttgttcattcagagcttcaatgaggactttgatagcccgatggtctgacttttagtaatccatgtcttgaactgtacaagcttggaaagtagaatcccaatgatcattaacaaaaccatagtctaacctttccttgatagcctctcttccttgaccttgactactccaggtgattcgatccccttcaaaaggcagcgggttgagacaacaatttgtgacagtgccacgaaatgcttaaatttgagaagaattcctcattgtacctccaattttatcttcatgtgagagtatttcattaaaatcaccaagtacaagccaaggtgataaaggagcaatatcatgacaacgtttcagcattgtccatgtgtaatgtctttgagaagtgcatggataaccatagaaactagtgaagtgaaaggagggcccctcatgaatctcaacaaagcagtcattgtgattagtggaaaagttatttagggaaacagaaactgaggatttccatagcaacataaggcctcccccatggccttgcctaggaacttcaataccatttggaaaacgtagagaatgtctaactttgtcaatactaccagcttttaacttagattcaataataaacaacaaacagggcgcttgctcattgactagcaagcgaagatgcctgaatgcactggggttccccaatccctgggcattccaacttatgcaattcatggctgtgggcggtgt

SEQ ID NO: 305160 - DNA, 1518 bp, Cannabis indica
acacattaccttacgtagaaactgctgcccctcccccgagttggacacattaccttacatagattttgttataatatatttgttatgctagttattcacattatatgcattaaggtgcttatcttaccaaactcagttttactaatttattcaattatttttcccctaagaaaatagaactttcataaatcagtaaaaaggatcgtttattgtaggtcaaatgaaggttgtgaagaactctcgaaaactcatttaacatgacagacggagtaagatgggttcagaattttccatgtaaggtaatgtgtctaactcggggaggggcaacgaaaggggtgtgggtgtgggagttacaaaacgagtttcgacacagttaaatgtcatgaattttacgaattaaggttaggaagattaaaggtaaacatatcaaataccatactaatatattttacacactacatttttttaaataattgtatagaaatatatatttaataattcatgttgaagttataaaaaacctaaatttagttttttaaaagaagattgaaaatatttaaacaaaaaactagttcttatatatatatatatatattctattatatataaaaaaaaattataatttttttagtagaaaattaaatttatttctttcttttacaactttaattgcaccaaaaatcacaaaacggatcaaaaatagatcaacacaaattttttagaattaacctattgtgtgaaatttgggaattgagactaaaaataccgacacttgatcaggattacttgtggctcagaatttctccacatacattaaaaatcaagtaaaacagtgaactaagcacatagattacagcgcggtgacgcaattatatgatattcgattattattgtaaaatcgtgacctaggattatcaccttaagtacgttttcttataaatatgcaataatttgttaaatgaatatttgagtagtgttatgtaagaaaggcataatcaggttagacttggtaattataatcgagataaactctagtaaaaccttaaatataaaagagacgtgtgagcataatacgtaagtctatgtcacataaacattaattatagtgacattattatatatggaataatatgatttagtgcagtgacacaatatgtacgcagtggcgtactatatgaagtgtaattactattataattatcatactgtactattttttgtcttgttaggtcttggcttattgatactttattatgcaagcaaagataaagtaatgtcgggtcaaccaagtttgacaaaaaaaaatcgacatgacagaatataaaaacacaagtttaccacctctctcatatagttaatacgtaatgaatcaaattaataaatgagttaaaagcagtaagtttttctttttaataaaatcacaccaaacataatatttatttaattactaaaactctattatagaaataagactttttttttttttttgtagtataaaatgctattatattaaaacaa

SEQ ID NO: 305161 - DNA, 1291 bp, Cannabis indica
aaatcatcacaagttagcataaaattctttgactatgccatcaatataaccttcaaaactagataaagtaccctcccaatttctttgttgtaaacacttgataatgccataaactcaatgagcacttaaatcaaaattcctctcatttttaaatttatgggtagcatacaatttccaattcctttaattatcattataacaaaacctagaattgagagcttaagaggtattaccagaggaagaacccttcattggttgtttacccttttctttggatgaaaccttggttgtagaagcagaatgaggagttattaatgaagatttggtcagtgacactttaggagacagatcagaggacacttcatctttttcttcctcgacaatagtttgatcttccttatcttcagttgatttaagatcttcatcaacagaattacctcttctagatgaaaaggtttcatctctttggaatcagtttcccaactaaaagccactaggggctcttcttcttcttcttcttcacttgaggacactaaaggagggttgagtttgaaccttttagcagtaagaaaaggcttgtcatgattcttttttgttcgttcttcatgttctagagaagcttgctgagcacgagtttgagaagagggtcctttcagagtagttgttgtagaaagtgcaccaacagtagtaaatggagaccaagacctttgagaatgagattccttagcagtaagaggaagattgtggtccggtgaggatggagacttcgaactagagaagaaaacatcaggcttagggatatgaccaacaaatttttagacttgagactttaattttcccttgcttgaagaaggaagagaaggggacaccacaacaagtactagaacaagggcctgagacacaagtgattccttcgatttggatgaagatggcttcttgactgaagctttctctaattcacaccgaggagacaatgaatcgactgttgcaggggtaggcactgcacgaataatagcagacagagattgtgacggctcaggtacggtgttggatggggtagccttggtgtcgaccagtttccttggttaaccaaggttctttgttttggccatgaaagtttatgaaaaacaaagagagaaaaatagagaagagaaagattggggtagatgaagagtggttgtgagaaattctgaaagcaaattagtatatatataatgagagggaaaaagagaagaggaaaccaatttaaaaaagaaaacaaaaaaataaggactttttcatttttacactt

SEQ ID NO: 305162 - DNA, 3022 bp, Cannabis indica
cacctaacaaagttttgtaattttatagggtaaatattattttaagccttctacttcgataaaaattaagagtagtatgttattttgtattattttaaaaaatacagtgtaatttattatttaacaaaaaaatatttaatattgaaacattttacaacaacaggtggaaagcctcatcaacaacattcctatataaactaaagaataaagagttgtcgaaaactaatttattttttcacttctaaaataggatttcacacatattttatgccgcatcacatgaggtaacgtataacaacactggaaaccagggtcacttgcaagaactatgaaaactgaaaactcatactcaaccaaccaacaatagatggaacgaaatagcaactcactaaccaaatggaaaggacaacaaaaaatcaattattgattaaatttgcttcgttttacatccttctttgaaaaacaaagcagtcactacacaaatctctcagttctaatctaggaggcctttgttttgttttgtttttttaacaaaccactgtagggatgttgaaacagaaagcagacaactgtgcacatgacataaatcttcaacaaatgcagttgtattttgagttcagcaaaattggggttcttcatgattagtaaggcaaaactacacactaactatttcagataggtagatgatacccagagtagcaaataggttatcagtgaagttgtaacctcgaaactccttagtcctttgagtataggtggcatgactgaaaccatcaagaatgttcccaacagccatgagaagataaaagatccagcactgcagcacacaatagaactgttattccaatgtctttcctattatttcatttccacatttcgaaaaatgttcgactagcatgaaatcacatacctgtagagaaaagctcggagtttactcttgagcctgtcgtgtataaaataaatggttgccattagcgaaatggctacctgaagagtagggccttcttcggttgggaatagcacagtgagcgctccgagtacgatgaatgtgagtgaggtttttatgatgaaatttgtggatggaacttgaaacctactcctcacggtctgtacaacacgagactgattgacgtccttgaactttttcttgaagtcaattttcgggttttttctgtcgtaaaatttctgcatgattattttgtcatgagctgattctattgcatctacactaggtttgtgccctgcgtattgtcgaataagaaagttccttgcagattgaatttcatcttctgaggcatctttgcttattccaagtcgtctgtatgggtcctttacattgatcctaggaaagatagctgagcttgccgaggcaattgcaaagaaagtttcagtgtgtgaacaataccaatgtgtaacaatgtctaaaatcaacaactttaacaatgaatattcaatattaaatgaagctagagataagggaaattccatacattttagcataccgaaaaatacaccagaattttgtagatataacctacgcaaacagggtctaattcatttcaatttcaactatgaatttaaagcaaaacatggatgtcattgtcatctcctgtgacattttctttattcttttttcccctccatataaaaatatttatgaatttgcattcaaatcaactagcattaagataaaaattaccagatggtttatctgccatatcaccataagaagcatccatagcacacttgatcaaatgggtcttttgcatactccacttttggatagaaccagccaaataacttctgcatatcacaaaaagaaaaagtaaataacaaaaagaggtctagaatcaccacataatgcaaatatatgagctaaggtaattaagaatacacccctaaaaggaccgttccagtacatcccctatctgttcaacatctaaaaaagctttttagtccaactttcattttcaagattgtgtatgttgtaattatttaagactacttgtacattttcagaaaattctgaatagtttacagtatcgaaaataaagataaaatatttaattgcaagcgtgactgtttttcctaatacgtgtaataaataactatttgaactttatttttcacattgtaaatgtggtgttaaataagtaaaatgtaaaagattatgaaaaaagttggactaaaaactgtcaaagatgcctaaacagatagggtatgtatgtatgtatgtatcaaaacgacaaagcatagattttctgagctatatacataccttcccagactaaggacctcagtctttcccaaaggtttcacattctgtggaaaattgcaacctagtaaactggaactggttacaggtatccgaacacaacatcttgaaggactaccagtcaatccagatacagtcattttcaacttatgccactgctaaacaaagttcaattttcatcagaaactacacaaatatttaaatgaatacaaaagttgttactttgagctcaacaactccatagacaaaaaatatgagcttttccccaataccataagtttctttctcttaagcctggggccaacattgttaacagcttaaatcttcaaaaagcaagaaaattcaaaactagaaacataaaccataatcgtggttatcgattgtgattgatgccatagaaaactatccaaatttaaaacttgatatatgaaagaaaacagaaattgaagaatttatcaccttaatggagggaaataacgccggagacgaagcttcaaatggcgatttggtgaggaagaggaggaggtgggtcgctgcaacggataggaaaaacgaagagaatcagcataaggggtttgttgttagtttcagtagtaaaccctcttcttcgattttggactgtactcgttaattaattaattggttaaatttaattaattatggaaaaaaacacaaatccgttgtagtctagttggtcaggatattcggctctcacccgaaagacccgggttcaagtcccggcaacgg

SEQ ID NO: 305163 - DNA, 2540 bp, Cannabis indica
tttttttttttctctgttgacaaaattgtaattctgaaacaaaattctgaccaaaaagttgatttgcgaatattaagaaccgattgtccaatgaaatgctgccaattcagctcaatgtggaagatggaattaaaaaaatgaatatgtactaattttatttaattatttttaagttttaaaggaaattaaaaaaaaaaagagtagttactggtgtggtgggtgcatttctgagtgggaccaaaaaagttgtgcatgtggacactttccagaaaatatgaacgttagaagatctcacaaaggagaaggaaagagaaaatgagcgccaggcgccgaaacttgtgcgtttttgtttaagtgggccccactccaaactcctgcctgtcactttcgaaccctttctcaccacctgggactgcctatagccggtgccggtcactccttgtttttcttcctttatggaaatttaatgtattaatatttccaattttataaaaaaaaatatatattatagtacgattttgtagtcttacgaaaatattgtgtattgtagtttacgattttgaattaatgcaaacatgaattctattcatttatgagtgtcgtaatgactctaatatcaaatccaatactagatgataaagatgaaaaataaatatgttattatgttaaacaaaatcaaatctaactaaggcaagtatgttatgtttgggatgaattgaaattggcaaccggttgagggagtaaccggtcagcgaacgcgctaaggcccaaaaataaataaaaaaaacttccataaacggagagggagaggtttaagagaaagaaaccaagtgaagagacagacaaatagtattctcatcaaaataaacacctcagagaccttacttttcttctctccaacacctcagacaaatatatatatatatatacatatatctatatataatatactgcaaaactcagtcagtctttgccttggttttgataaatgtaaaaagacaaagaggactgaatttcttctcatacatatttatatataaaggatttgttttcctttatcattcgtaaatttagcttactgggcggctttcaatggctacgcttaagggctctgtgttgtcctccgtttttgggttcgtctgcattgttttgttctcaaatatctgtttcgccgctgaccccaccatttcttacgagttccatatctcttacatcactgcttctcctcttggtgttcctcaacgggtttgtttactttctccctctgccttttatgtaaatcattgtatatgtatgtttgtattacttcccttttcggcttactttgaatttgttttttgttctgggtggtaagatgaaaacattttcatatcacttatcagcactggatccggccggtaggaaaaccatttttgaaaacttcttactttaacatatatatattatatataagtataaggtttatgaggtccaaaaatcgtatatattctgattgtcagatattagtatgggctttaaagggttgtatatgttttcttttaaagtaaatatcaaatgggtttttgacattttcagttttggttcatcaaccttgttttaggttctgcaaatctaatctagcatctaatcttcgaatataatataatattattttatttgagggtcaagtggaggactggagttttttcactatacttgattttcattccatatttcattgatttattgatttttgagtggcaggttatagctgttaatgggaagtttccaggtcctcgaataaatgccaccacaaataataatgtccttgttaatgtcttcaacaaattggatgagaatctcttgattacttggtacgcttgcacaaaaaaaaaacacgctttcttctctctctgtgttacatttgttttctgataagtgaaagggacttttttttttttggtgagacaggcctgggatccagttgcgaagagattcatggcaggatggtgttcttggtaccaattgtcccattcctcctaagtggaattggacttatgactttcaagttaaagatcagattggtagcttcttctacttcccctctatcaatttccagagagcagcaggtggcttcggctcctttgtcatcaacaatcgaccagtcatatccattcctttcgcccagcctgatggtgatattgaaatcttcattggagattggtatatcagaaatcatactgtgagtcattctatgttcaatttgtatttttcatgttaagaatataattttatttgctcttggaataatgttttgtttctttctctatgttttaggcattaaggacatctttaagtgctgggaaagagcttgggatgccagatggagttctcatcaatggaaaagggccataccgttacaacaacactcttgtacctgatggtattgagcatgaaaccatcaatgttgacccgggtatgttttggacctctactactcattatggtgtttgtactttaatagtctttatggtctttaaaaagcactagcaagctttttg

SEQ ID NO: 305164 - DNA, 1392 bp, Cannabis indica
gaccaataatgcaaaaaataaaataaataaaacacaacgtaaacaaattaaaatgaaataagaattattaaaaacctattgcgtacttggaaattatgtcttccatgataagaagctttgaaaggtattcacacaaacttaaatgtaaaaaggacaaaacaaaaacaaatgaaacaaaaatgatacaaatttttacttatttaataaacctcataaatgctggtttactgcacaagcagtattaaggtaatttgggtggagtctagaggaaaaagcggtcatggtactgtgtacatgatatccggtgttgttaggtagaggttattatactttcacgagatacaaaaatatagacaagatttggagtaaattccttcttggtgggaggttgtaggggatccttagaaaccctagccttctacttatgtttctggcttcttcaccctatctcatgactggtttttctaagctgtggttctttttgcaatctcataaagttcagtgtttgaaaggacaaattattgtaatgagtagattgagaacaaacaactgagttcggtgaagagatataaatagctatattttattcccactaaagagaatcataagtagaaacataatctaagtagcatcacacaaaaaaatttgactcgtgatgctaaacaaccataatatcaactaagtacgagattggttggtggtatataaggaagtgagttttacccaactggttgtaacaaatggtatcaaagtcatgcagttgcacccaagtaccaacgtcacaaaaggggtcatgcaccagcacccaaaagtgggaccaacatcgacgacggggcaacgtaggaaaaagccgagagcaagccaacacaaagtgagtccctgtggatgtcgactctaaaggggagtggattattaggatcacgcatccattaagtatgaactagttggtggtataactacttgggcagcatcatctctttgtctagcttttaggagctagttctacccaagtggttgaatttgtacagttaggatcccacgtcgacttagtatgggattagttgaaggtatataactacttggacaccctcctctattagactagcttttgagaagtgacttctacccaagtggttgtaacttgtaacacattcccactaacaagaatcatcagtagaaacataatccaagtagcagtccctcacaagaaacaatttgactcatgatgctaaacagccataacaaactaagatatttctgactcatacgtatgacctgggatgcttaatctatggaatccaaacaactatcgttttagaattacaagaaattagcaggtttatctgattacatggttaataaatcaaataaaaatatattaacgttgaggca

SEQ ID NO: 305165 - DNA, 1728 bp, Cannabis indica
tattctttgttctcgagttaataaaatctaaggggattaggctattaccgaactaaaggggtcaaacctctttaaaccttgtgttccttattgcttactgatttttgttctatcttaattacatttcttatcgcttattaattgactcactgttgttggctaaaagcgaggtcaacacactcggtaaaaaggggtggtgtttgtatgacttagaacaaaaggtattttttttatctctcgtgatattatttttttgtgaacaacaatttcctttttctagtgacatctctttacataataccaatgatgatgtatttcaaagtaggagtattatgaccatgtcactccgtatgaggatacttcccttccaatggggtgtgaggaacatttaattggggtcgacgatattgaccctagtaatgaacaactaaccccaccacttatagatgtggatagtgaggatgtgattgataccactttgcctatagggaggttgtgattaatgaagatattgttccacagagattttgtcgtggaaagcaaatcaatagaccttctagtacactcaaggacttcatcaccaaaatagttcaagtaataagccctgtcacatcacctaccaatgctctgtcaaagtccataggtactccattttataattcttattatgtaaattgtgataagttttctatgagacacaccagtttcttggtagtaattactgcagacaccgaacccacctcctttaaagaagatgttaaggatcccaattagcaaaaatcaatgcatgaagaaatagatgcacttgagggtaacaaaacctagactttagagtacctaccccaagggaagaaggtgatagcatgtaagtgggtctataaaaagaagtattgatcttatggtagggttgaataataaatggcatgactagtagtgtatgggaatcgacaagttgccagtattaacttcaatgaaacatttgcccctatagttaaaattgtcattgttcgtacatgtttagctataacattagcataaaaatgggacctacatcagatgattgtgcatgatgcctttcttcatggagtccttaatgaagaagtatacatgcaattacctcctagtttcaattctaatgctttacaagtattttattcgcatttgagtggcacatagggaggatagtttgtttcttttacaacgcatatacattcttgacattataagtgaggctggcttacttggagctcaaccagtttctacacccatggaacaaaactaccatcttaccactatcaatgttgttgtctttagggatttagagaagtattaatgacttgttgggcgtctaatatactcaacaattacacgacttgaattttgttattatgtgcatattttagctcaatttatgggagattttcatgttgagcatcgggacgcatctttgagagttttgctgtaaaggttgtcctggacaaggaattctgctgtgcaaggataatgattactatataccttctgtgacaacaattggtcaagtttccctctgacccatgagccattgattggatactttattttattaagttcttctccagtctcttcgaaaatgaaaaaataggtaacaatttcccaatcttcggcgaaagctgattatcggtctatggaaactactacatgtgagttaaaatggttgaaatctcttttggcttattttgggatcca

SEQ ID NO: 305166 - DNA, 1138 bp, Cannabis indica
gattaattaacataagaagattcatatgtgtgaagatttataaaagtttatgccacgaaaccaaaccagacaaccatacctccgcttccattatatggttctgtataggtaatcattttggctcaccaagtaggaagccccatgctcattcatagaagttggcagatgaacccaattccctcatttccggctgcgaaaattccaataaactttgtagtttggatattttggtaaggcaacaatagcaaatagtttactgctaagttaaaaccatttaaacatatgagcagaaaaattagctttctcaacttccccctggtcttacattggaatcccaagttcttgtcacctgtatgaaacattctcattaagatatagaccagatgaaagcaatgcaagaagcaaactactctactaaatactacaaatatactaactcagagttcatttaccatgttccaagcatcaaacctcaataaaggtgcctatatctattgctcccgtgataaatggtggtagaattcaattggctggcttgtgacaaattcagatgctccgttataaagttgtgtctccatgtctcaattgaaattctcatcaaatttattctccatgtctccattagaattcttatcaaatttcaccggagcaccctgaatgttatcttcctcaattgtgtccttttagatgcttcagcacttgtaatggcaccctttgcagcctctgtatcagctgctaggagttagataagtcttaatcatgcatacacagtaaacaaactgaaagaatagtcaaccaccaaaccttgttttccagtgtttgaatcccaattgaatgtagtaggtcttgtaatttctctacacaattaacaccagctccagctgaaatatgaaatttagttgtcaaactgagcataagtgaaaaaggttaacaacggtgttttgaaataagaagctttagtatctactcctaaatcactggatttcgaaagcaagtcaacaaaatctaacctcagattctagcctctttcccaaatgatacatataacatatgcataggaatataatccaacaccctgccttttgaaaaatccttggccattttcctagctctccactcatcagcttcttgatcatct

SEQ ID NO: 305167 - DNA, 2126 bp, Cannabis indica
gagagagagagagagagagattgaatgaatgaaaaagggtcttgaaatggagaatttgggacatccattctggaattctttgtcttgatagggcactcatttataacaaaagaagcaaatgtgggatagggtttattattattattattattattattattattatattgatgatgatggtgatgataattgataatgatattaattttttttattgaaaaaaaaaagtagggtatgggaaaaaagaaaaaaagaagagataaatatatgagattaattagggtgtattaataataagttgggtatggggacccaattgaattagcaatggaaacaactagtcacaacacctatatagcaataatattataaattggaccaccacactacacatacttccaaatgataaatacccaattacacctctctctactactttagtgtggggaaaaaagataaatatgtatgtatataaggtaaaaagttaatagggggcataacttgacagctaattaatatactacctgatctttagtacatagtactgttttttatatatagtaattagaattatttgtgaatttaagatataaatatcgtgtaggactttatcgaatcaggatagtttattgtttgaatgaaaaatatgctttgttaattcatgggctgctaaattcttaacgcgaaccacatagaacaaaattactctaaaaaatttagataataaagatataacgtcttcaaacagtactcctaatatattgaacaacacttttctattatattgagaaattaattattaagggaaccttagtgattaacactgagaaagttatgcacattttgtaagaatgatatcgagttagggtcagctttggatttaggtagatcagacttgtgtttagagcccatccagttagtttaggggtcctccaaaaaaattcttttcgaaaaaatacataataaaaaagtttagtaattttgaaaaatatcaaagagtgttataagtagtttttctcctaagaccaaattactcttacggtagccctgcatcgagcacccatcgagctcatcgagctaacaccgtgttttatcaagaaaaaacatattttttcctaaaatcttggttttaattccacattgagtcttatcgaatttttgtatatttcaacgttttaaatcagaagatatcgtaaaaaaaggaatgaaaataaatcatgtttagagctattcaaaatacataagttagtgttttaacttgtacttttcataagaattaagttttaaactattaaaaaaaatgttcttcatgtaagttgggagagggagagaatacgagaagagaaagagaagagattgataattttaaaaagagaactgttaaagggcaccggtagtatcctagcaccacccacgatatatagtattatttgtgtgattttatagtaaattggcagacgttataattttaagtttttttaatctaatgtataatgtaattatataaaaaaattattgagctaaaaataaagttgaaataagttatttaacatgaatatatataatatattatacataaaaaaaaataaatataaaacgcaacatattattttaaaaattttgagcaaaatatattatttaaaagtgaaaatttatccactatttaaaaaaaaaaaaaaatacacacacaatttgagcagctatagaagtatactttgtgtaaaataactaagagaattatgaattatcaataaattatgtaaattctaaatgtagcaaaatttttacagcttctttatatatttttttattctttatttccttctcatcttttatattaactactatactatatactatttttattttttgaatcctttcttttacttgaattaataaaatatattagaaaatattatattaaatgatttaaaagaaaatataaataatttaatatatgatataatataaatgtgtaaagtaaaattaaaaaattaaagtttttgtgtatttcaaaaatagaataaagaaactgatgagagtattctaagagcactctcattaatttctctactctatctttcaaaatatatacatcaccaaaattctatttttcttttatttta

SEQ ID NO: 305168 - DNA, 2525 bp, Cannabis indica
aagtaacttatactacatattcctagacccaataatctagaatctgagctttatatgtgccatgtttaaggcaataacagagtttgtactgatgaaacttgagaaatattacagttttataaacgttgggtacttatgccactaaaaaaatcattgggttaataccgcttacaaacccaaaactttaggtatttatgccactatttaccctaataataataagaataataataatactatactttttttgaatgagaagagaaaactttattaaaatagaataggcaaatcggccattatagcatcattaatagcaaaaggaacattgttaccaacaaaagtataatctgaccaataacaagcaccacgagcaagacaataaataatattgttagcagatcatttgacaaaacaacttgaacattaacaagagaatcaattaaaactttacaatctgaaattaaagaactaaaaacacaaggcataacaatagtactatcaatcacttggacaaccacaagagaatcagttgcaacaactgtatccttccatcatttctttttaattgaacttcgagcctccttaacaccaatagctttaaccaaaatggattgaacacagtcggatttaaacaaattaaaagccccaatcacgcaatcctcctcatcacgagcaaggtagccaacaccaaaagcttaatgtgctacaaataaatctccatccatgttcaccttgattttatttagttctggtgtaatccaatgctccactctactatcaaaaaatagaaggatctaactgtggctcaaaacaattagaaagatatctctattgatcaaggactaaacgagcagagaaaacaacatcagcagcaacatgtacttttttgttcataaaagatcgtttttggttttccaaatagactaggccaccattaaagcttcttcaaacacatcagaacggccacgactcaacaaatccaacacccaaacaccaaactcagaagcagacacaaaaccaatgttaatgcttgatctattccaacaaataaattcctcctccctaaggcgtaaaatacaatttaactccaatggaacatgcttggaaaaaaattgtgttcgtgttggaagacaaccagtgatcaccttccaagcaaaatgaatgactttgggtggaattctagatttccatagtttatgctaaagatttgactccataccagcagaccattttcctttgaaagcctgcaaataatgatagttgctcttaactgtataaaagcctaaattctcatgtaagtgtaaccaaaaccaattgtcttccaaagtagaagaactaagaggaagacttaagataagatcataatctctaggttcaaacaaattattaacaatctccttatcccactgaaaaccatccatagtcattaattgattaacttttgcaccagcacgacttaaatgagaactaatgacaaaagagttatggacataccatggagaattgaggatatgtacactaaaattagagtcaatacgaatacgggctcctgctgtaataagaccttgagtctcaaaaatacttttccaaataaaacttgggtgttgcccaacacaactaaaagaaaagtcccatgggagtagtacctggctttataaatacgaccaacaagagaagactcatgaagcaacaacctccaacctcaagagataaattataatcatgaaggcttctaaaactaagaccacccaagcttttatgtttacagagacgattccagctcatccaactaactcctctaaacttcttagaattaccccacaaattcttatacatcattctctctaattcactgtaggtctccaatgaaagaaaaaaataggcatagcatagctagagaagacttgagcaagagtttttaacaacacctctcgacctgcctttgagagaaactttcctttccgacttagaattcttttatgcattttctccttaagaaaacctaaaatagctttctttttgcgaccaatgatacaaggtaatccaagataaaagctattctcatctgcagcaatcattcccaattgagtatagagcctctcacgcaaatcaatcggggtattggagctaaaaaagataagaggatttagagaaattaaccctttaaccaaaagcaagcttgaaaatatgaagtagccggagcatattatcaacctcttcctaaataatacgacaatacacatagttgtggtctgcaaaaataatatatactttaataactaaaaactagtatgccacccactcatcatttcagtatatatggatagttggtataccaacaccataacaacattttaacacattttcagtataactttggaggggaaaatgttactaataataaactaaaactgttataaaataatataaaataatataaagtagatgagaagaaagaagtagaagatgaagagagaaagagaaagtgaatgagaatttttgagttgtttattccaatggggtga

SEQ ID NO: 305169 - DNA, 943 bp, Cannabis indica
ctacgtgcacttgcgtatctaaaattaacacaacaatatgtagaaaaattattaaaagaattaaaataaataattttttttatacttgaaaatataaaagaatctgccggtattagggtgtattaaattggaaaataaaaaaatataaaattaatagcaatatcggcgggcttaggttaataccggcggacagcctaccgttattagtgggacgataataagtgcaggaaaattcccgcgtggtgcatttaaatctttgtagcgggaaaccaataccggcgggtgtccaccgctaatacttttaataccagcggggtatattattaccggcagacctcaccggtaatagatctctataaatacctccccccaatcggtttcaccatttttttccttctctaatttttttcaatttcaatttttttctctctttctttcagttatatcaccatcgtattttaccatttcaccaccgtgttactatcgtgttccacaacgtctcttctaaatggttagttttttttagtatattattttctgttttaaaataagttaatctagtattcaactttttgtatttatatatatgtgtgctaatatataattgtaatatttttttttttttagatttaaaaagtgggagaagcaatttcgggttgaataagatcatatatttcgtctgtataaggtatatttttattttagagtttttaatttcgatatgtaattgaaaactgaattacatgaaaggcatatctcaattttagattcatgaaaggcagatctcaattagcaatttttcccttcgaactttgacatatactaaatcatgccccatgaacttttttagctgttcaaaattccccctaagctattgagattgttagatttaaggacttttgtctaatttcatttaattttactgtttcagtgattgtttatg

SEQ ID NO: 305170 - DNA, 4830 bp, Cannabis indica
ggaacttcgatgttgcttctgatctctggcgaaataggtggtgcctgagctgaggaatccggcagtgcctctgtcgatgggcagtagcgttcaaacatggcatctaattctgttaattgagccttgaaacgttgctccatacgcagttccatagaattcatcatggatctaacgaattcaacaagctcttcatcagtcatagtgtcgatctctcactgaaatctctctctgagattctctcaatgaaagcaccaatgatacaattaccaattgtatcgaattgcactcttcgagtcagtgccaaactccaataggaataatcctaattttctctcatttcattcattgattcccatttgtgtaatagtattacatatttatactaactaggcaataataacaattgctaattagtccctataacttttcatgtaacataatgttagtatgtaaatttttttaagaatatcttaaaatacaagcttcataaaatagtaaggtctacaaatttaaatcttcactgatactttgtttgtgtaattctttgagaccttgttcactaataagtctgtgatgccaccgctgcatatattcgattcttgccctttcattgagctagcttctcaatttctccttgaagaatatacaaacggttaatattttcacctttcattattatcaaaaaaacctttagtgatccttaagtttctattcatggacttgtatctgtaaccctcattttcaagcgcacctagggatatgaggtttctttttatctccgaaatgtgcctcacattctttagcactttaactccaccatcatatggtcggatgacgatcttttcagttttaatgaccctacaagaaaactcattacacattagaactttacctacatcaactcatttataatcaaaaaatgattcgcaatttggacacaagtgataagtacatccagaattaagaatacactccttgttcattgaggatttcgagatggaaaataattctctatctgttgagcaatcatcactgtcctctgtaattgcagtcatatctttcttcttgtgaatatgcttgtagtccttcctatctctattatagggacagaacccaaggaacaaaaaaaggcaaacttttggaaaaatagataatattgtgattatttattattcattcctgaaaaacagtattatggtattctatatgcaatctatcaaatctgaataagatgaactcgtggactacgaagatttaacttcaaaatcacgtacaaaaaccctcttgttatttattaccattcatactattagttattatataattaattatgcactttattcattacaaaaaaggataattatttagttaacgaaaatttgtgttaacactaactattccataacttcctaggagcaactatctaaggatttttagaagcaattctaggctgcaagggataagaggctagaggcatcctcattgactaatatcaagtagcaactaggagagtccctaaaagcatatttaagtcgttttagtacagcagcaaccaaagtcaaaaatctaaatggtagtattcaattgtcaactcttcaagttggaataactactgacttcaaccgtgggaggtgaactatgggatgatttgcaaggtcgccctgttagaaacataaatgagtttaatgtaagaacacaaatttttttgtaaaaggaagaggtgcaaaatgaaatgaaccttagtgggtcaaatgctaagagaaaggatgagtaaagagatttgtcaaaagataagataaaacaaaagaagcacgagaaatatattcctatatacttggtgtatatggaattaaataaaactcgtaaaaatatctatctcgcaaataaaaattgggtcgctttttgaagactcgatccagtgagacatgcaagagagttcccaataagtattgtcatttccatcgagacattagacataccactaaagagtgttgtcaactgaaagatgagattgaaaatttcatcttgcgaggatacctgaggcagtatgtaagggctcagggaaatgagcagaatctgcccaataaccagaacaaccaaggattgcaacctccccaagtcgagggttaggacatcttagttatctctggagggccacacctaacaggaaatagcaaaaatgcttaaaaaagatatataaatgaagtaaaaaaatgagaaattagctttcgccccagaacctctaaagcgagcaaagtctgaagaaccgcccttcatctttactgatgaagacacatcacatgtgcggttcccctagtgataacggttcagctcgctaataagagaataaagagagttctcattgataacgggagttctgttaatattttctatataaaaaaaactttaaagaagatgggcttagaagaagtaaggttgaaaccatgtacgcttaacctttgcgggttcacaagcgatagtgtttcaagcatgggtacaagatatcccactcaccatgggagaaccaccgctatcaatgaacctgatgcaagaatttttagttgttgacatcttttctgtgtacaacatacttatgggtcgtccagcgttaacaagaatgggggcaataagcttgatcaaacatttgtccctaaaattccccactcattcaggggtaggaactatgagaggcgaccaactattagctcgacaatgatatagtgtggaattgaaaaatagaagggcaagccatcaattaatggtgattctaacaaaagaaaatgaggaagggatggaagatctagatcaaaggatccatgatgaatataaccaactcaaacctattaaagaattagaagaggtgaatttagatctaaacaatcctactaaatgtgtcaacattggaaagagtttgagggaagagctaaaatagcaactaattactttgttgaaggcaaaccaagattagtttgcttggagccattcatatatggtcaggattaacttgaatgtgatatgccatcacctcaatattgactctacttatcccttaaacgtaaaaaacaacgacctttagatcataaaagataaaatgcactaaaagaagagattgacaaattgttgatcaataacttcataagggaagcattctatcagtcatggatatctaatccagtccttgtcccaaaacctaatggggcatagagaacctgcatagacttcttcgatttaaacaagacatgcccaaaagactgcttctattatcaaggatcgaacaattggtagatgcgacagcagggcacaaattgatgaccttcatggacgcatactctggatataactagattaaaatgtatgtcctagattaggagcatacaagctttgtcataaatatgggaatttattgctataaggatatgcaacataccaatgcctcgtgaatggtatgtttgagaaccagatagagcaaaatatggaagtttatgttaatgatatgttggcgaagtctgtgaaaagcgagaaccacatagaagacctcgtagaaagcttcaccatactaaaaaaaatataatatgaaattaaaccccaagaaattttcatttagggtgtctttggagaaattcttaggctttattataaatgcaagaggaattgaagctaacactgacaaaataaaagcattgtgcgagatgccttcgccaactaaaccaaaagaagtacattctttgactggaagaatggcagcactaaatagatttattttgaagtcgattgataaatgcctcccttttttcaacattctataaggcaacaaaaaaatttgaatggaatgaagagtgcgaggaggctttccaagagataaaaaagcatatctacacaccaccagtattggccaaatcaatcactaaagagacgttatttatttacttggccatctcaaaaaacattataaatgctgcactggtgcgagaagatggtaggaaccagcaacctatttattatataagcaaaaggttactgggggcagaatcgagatacctatcgctccaaaaacttacactttgcttggtccatgcatccaaaatgttacaaccatattttcaagcgcatcccatcaaggttctcacaaatcagctatttgacaagtattgtccaaacctgatacatcagggaaattgataacatggtgaatcgaattagggcaatttgaaataacttaccatctgaggacctctatcaaaggtcaggctttagctgacttcctagtggagggaatatactcaagaaaagactttagagcaggaaatgatgataagatatggaaactattcgttgatggagcttcaaacgagaatggctcgggggttggagtaataatggtgttgcccgaaaacattaagtttcattatgcattaagatttcaatttgaagcttcaaataacgaggcagagtatgaagctttgttaactggcctaaggattgcagagactttaaaagtgaaaaatatttaatgttttagtgatttgcagctggtcgtgaatcaagttttgggagaatatgtaacgccccagtattttaccttactttataaaatactattttaatgcatattttgaaaagatttaaaaatacttgaaatacaacagtgggttttagaaatcaaaatgcaacagagaaggatcattcattttaaaataaaatacgataagcaaatgattttaaataatatattttcattgtgtttaaaattattaactgcttaaaataaagctaaggcaccatcggcgttttagatcgttttcccgtccgtagccgctcacagtatacgta

SEQ ID NO: 305171 - DNA, 1209 bp, Cannabis indica
agcctctaaaggccaacattgtagtagtgtcaatagaaagagtaagtttagcaagctcatgagtaatggtgttggcagaaaaataataatgataagcccaacacagtcaaattattataagtagatgatatatcaactaatgcagaacccaacttagtcaaaagagcaaaacctttgaagacaaagcatagaaaagtttgctataatcagactcaacctcaacaaaattaaaagccattgagaaaagaataaggccatgaaaaatagcaatggcttcagcaaagagactaaagtttggacagggaccatcattgagggcaagcaagcacctgtatggtcctaaatcaccatgccataaccaactctcctatcacccacaacaagaccagcatcaatattaagtttcaaataacccaccacaggtgccacctagccaaagcaaacaatatcactcctcacatgttctctcccaagtcgagtagcataagaaaatctaaaatattgacccttctacaccgaagagcaaagttaacttcctagccaagaatgccatcatcagagagaataaaatgttcatgaaccaccttattcttttagtacaaaatttgacaaagtagaattaacatgaatgataaattaatccttcctcaacatagcaacacacttgcaaaggaagatataaaaattagtattaggaggaaaggcaactaaagtatcaaaaggagccataaagacaatagactattgacaaggaaaattccaaagtacataaaatgtggtctccataacttcaaagcagactaggtaaccactagatgaagggatgccatgagatgctagattagccatagttggaatccaattcaagatagctttctaagcaaagacctaaaccttggtgggtataggtaaagtctaaagagtttttcaccactaatcattgccttcagaacatgaaaattgtccccaatccaatagtttgatggcattcgaatacccacgttcaatagtataattacatgatggattataatgccaaataagggaatcatgcatttccaaagaaatgggagtagccaaaatattgatggagattattttgccaagatctagaattactaccatgtatgttgtttaacatcctaaatatgattttctaaaacaatagaatttaaacacatataaagttcaagaaaccttacattaatt

SEQ ID NO: 305172 - DNA, 1041 bp, Cannabis indica
gccactctaggttgaatactcgcacttgttcttcatattgacttctgtttgttattaatagtataatataatttggtgttgcgaaattcactcgacaacactcccttccagccgttgagttcttctctcgttccatctctctctctcctttgttgatattggctttcggctagcttccctcattttcctgggttgttttcaccaattgggctgcctccctaacccagttatccacctgctcatagactccctccaagtccaacagtattgggctgtcatattgggcctgactatcaaagacatctttcatttatatttatagctatttacaaattaaactaaattttagaatacaaactactaatgcattgtacagctggtattctacttgtgtgtgagtgtgataacaattagtaagtaagcataaaaacagagattttttctaagactgctacgacagcagcaaattcactcacttcaaattaaatcatgtcattcattcgttgacatatataatccactgaagagtattataattttcaaagcgacatggttgtgccaatgctaaagtcaccaccattaaaatagatcactaataaaaatggattagagaaaacaatgaaaatatcctccattaattaatattttccttaactgaattataacatttagaggtaatatttggacaaaaataatctgttataaactactgacgatgtcgaacaattttgataaaaattgtgatatatttgatacaaaaaataattttataaaactatctctattgtgagatgtaaaaatcatattatatttgataaaaaataactttataatatattagttttaatattgtattccttctatatagttaaatatattatttcattagtatattttaattaaaaaatattaaaaataataattttattattaattttattatataaaataaatataaaatattataatttaatcctgttaaccgaggttttcggcaaccaatttaataatatatgagaaagctgtaggaagtttagtgca

SEQ ID NO: 305173 - DNA, 3089 bp, Cannabis indica
aagaaaacgcaactattgacaccttaacacgattagcgaacatcactgtaactaataagacaaacttattttcatacatttaagtaagatgtttttcaaaaaaaaaaagaaaaaaagaaggcgttagtgtaattatatgttattttagggtgacattgtaatttgagaaaacttaaggtgttagaagtgaatattaatatttatgagaaagggccgaggtgtgcttaaaaccctggttcaatatacgggtccagatcagatccaacggcccacatatctcaccttcgtctagtatttattcatcgctactgctagggattacactctctccaaccttctcgactcaattgtctctcgcctttctagggtttgcttgtgttgcccaaagcttccttcggctttcaacatggtaacgtcaatttcgaacttcttctctttgtttttcagtttattttacataattgattaatcctattcctattccattcgttttcttcgatcgattacttattatgctttgttttgaattttggatgatttgatttggtttttttggttcttccggctctaatatcttataaaacatcttatttgtatgtgtatatgtattttaggttctccaaaacgacattgatttgctaaacccaccggcggagcttgagaagaaaaagcacaagctcaagcgccttgttcagtcccctaattcgttcttcatggtaataaaaattaaatcttttgcataattagagttcttttatacatgtttgacttgtatctgggtttgctaactttattgtggttcttttttttatcctacaggatgtgaaatgtcaaggctgcttcaatatgtaagtccttggagaaaaatctctgttttgaatgtattgttcagtatgtaatctttagtgggtttgtgctgaattttgctcttatgatttatgttttgaaatatgcagaacaactgttttcagccactcacaaactgtggtggtgtgtggcaattgccagaccgtattgtgccagcctacaggtgggcgtgctagactcactgaggggtgctcctttagaagaaagggagattaaaaacttgttagttcttgttctttgtttgatcatggtggagagagattttagttagccattacttgttaaagggattgaaattaagtatggttttgtttttcctatgatatgttgattttggttaaagctttttttaagctttgaatttacttctcttgttgcaatttttgtttcttaatatggtggatttttggtttctatattaaaggcaacatgtttattgtttaagttatgatgctctgctcagtgtatatgttttggcttcgtagtctgaattgttgaattccttactctatgcttgtgtgtctttatcaatcgagtgtgttttttcccacttcaacaatatcgactctccttaatatgcacttaaggagtattgaagatttacatggcaatgacatgaaatagggtgtagtagatgctttaaacaagagaaatttttagaacctttattttgatggaatgtctctattcataagaacaaatttcagctttattttctccgttctggtatctactatctatagttgtgctaatatattagaatcattaaagtggttatgtacttaacatatgaattaagaataagaataagaagcagatttagcctcacacttttagctgcttatcattttaggagtacttgcttgcttccatagactgtttttttttattgataaggcccaattggacttttatgtaacgacattctacgagagacttctatcaagtaatctgtataaattattcgtcaaaattcatttggatttgtttggttgggttttattaatggaattaataataattgaaatgcaatccattgtattgtcaattccattccgaatagaagcattgaaatgtatggatttctatcattttagcagaatgacttctttggaagacacaaaatgtgagattaaaattttaatctaattctacatattcttttctcaccttcattcctattcattcaagttctaatttggcttgtgtttcaaatgcccaaccaagaagtgaaatactttaaatatttttaatcatggcttggtctgttttctctttcactaatagatttggttaacgtgcattcttagtggtcagtgtcgaaacaatataaatgattatttagggaatccgattgcctaaaacgcgttattgattatcttttcgaaagttttattttagcacaagcttaagataaagtgagatgggagctctgttttcataaaaaaaaaagtgagatgggagctatctctgctgtggaattggaaatgtttgtcaagttaatcgaaatagccattttatacatatgcataaacttctaaactagaagctttcttcattctaccattaaatttaaaacggttttgcttaagaaattgtgaatatgtaatgggttttagtgctttgaagcatctacgtttctcaacaaaatttaattttataaccaaggcaaatatatatttaccaaatgtcttcagaaaagtcacacgtctataaacttacacgattacgattatgtacatataaagtaagctttaaaaattagatcttctattgattgattgattgttgttgttttttcttaggaattgatagttgtttaattggccttgaggtaagaaatgcactgcgtgtaagcttgcatgatttaggatggttagcaggcgtttgatgagttgctattactaatcgtaaaataataggaatttgaattagggctgtttgatctaacttttttcttctcatctgatccaattcaattagtaattgaatttagaaaatcatcatctgattcgatacggttagatttcaaaatccaatccaatcaaattattaattgatattgaatacgatttaagggaaaatgatggagctactaggttttgttttaggaattcaatttaaatgaattaatctaatccaatttaggtggaatgaaattatttttaaggagattagttaaataaatgtattgctaaataaagagatgtttattttttttt

SEQ ID NO: 305174 - DNA, 1814 bp, Cannabis indica
ttgtttccaatatgtttttactggacataaaactttaatttaaatttattatttaaatttctctaaattaaatattatttattttttattcatttattttccttcagtactcataatataatacttaatataaaatatagtatacgtgcatcgcacgtaacaatatactagtataaatataaatggtcattatcaatctaactaattattactgttgagaacttgagatatagtcactcccactcatcatatatagtatacatagatttgacaatcctaccaaactaacctatcttttttttattatcattttgattaattgaagtacaccagtacaatattaggttaaatcaagttgtgttatttatttatttatttttggaaatggagcttaaatctagtattgagtaaaaaagttccatgacttggaaactttttgtaaatatttttgataaattactaaattaatcacatgcattaaataactattaaaatttatgttaattaatatatatatatatatagatatttaaaaaataataataataaaaaaaagatctcatgcctctatatctagtaacatcaaattactacacttgctctacatgcatgtaacatatcttgaaggatcttaattaatttttaaataaaaattttaattgaaaatgaattagagaaaaggagtaattaataagaagttccaactattattagaaaatcctaattagatccaacattaattaagggatcacaaatggtagcccatcatcaggtcccagcaaatattccctaaatcttcaactcttttctattttaatctttatcactgtgtaaaaagagatttttaggagacataagatcatgagatttggtgaaaaaacacaaaaagaaatatgtttttttttctctctaaaatttatatatatatattgttattttgtgatacctttttatcttcaaaatcttttctcaacatatactgcagttgcacatgaagtaaagataaaaaaattgataattaaacactatattatggaccctcataactattcaagataaataacttttttttcttcttttctactcctaaggaaaaaaggtacttttaaatatgattagtaagactagtggtcatggtataaagagcaatcattttcaatactatttttgagtaaattcattatgggaataatagtaaatcattacacacatacctttcttttcaagtaaaaataattttctttcaaaaatatttcacaaatttgataccatgccaagaaaaaatgtatattttttttttggatatatactcaattcatatatattgcaattaggttagttaattaatatatttggaagggtatcaataattgattataattaatattttacaatatgaattgatttgttattgaatattttattaaaaatttaattaaaaataaaaatttgccctttttgactgaaaatggtaaaggaaatgaggaagaagaaaacatacttttttgctttattactatatttttttcattgagatctacaaagatgcaaatgggtatagttttcaagtatagacaatctcatggagaaaggttgtagaaataatatatgtaatgttttggttatgcctaacactaatatcacatttactcactttgtcattaaaatctaaactattaggtagtgcaatgagtacttcatgggatttttggagtagtaataatatatgaggaatatttttgtgtggtactttttgaaatgtcaaaatatgattttatttttcaaaaagttattttatggaaaaattgaagaaa

SEQ ID NO: 305175 - DNA, 2004 bp, Cannabis indica
aagaccgaaaacccattccaccaatttaacaccaaatttaatatttatcattagagttgtcctaataaaattgccttcctaaagtttagacaacaagtctttaaaagttttaaacaaaccctattactacattttgttaaacataaataaatatccaaaattaagaagagatagaagtcgtttagaaccaaaaacttaaaactcagtgtctctaaacaaattatttcaaaaaaaaaaaaaagttaaaagcttgtgtttgaaagactgataagatacaagtatattaaatcgaggacgataaataataataactattatttaattatattttaaaaagtttatgaactatagtctctagccaaagggcaactctacaaataaaagctatttacaatagatgataatactagagactaataaataaataataattaatatagtaaaaaggcaatttgcaaggttgatcaatggattagaattgttcttaatattattattattattattattattattattattagtgttattttaggggaaaggtggatttgatgagattgcatataggcaagcaaggacaaatcttggtttgaatttcatgatagcatgggaccttaccctatcatttattattaaatatttcataagtttttttttatttatttattttttaaaaagtttattttgatgtgtgtatataaatatagttttccaactctatagcacgtgtgccaagcaacactcaatcaaaatcaagagagtctttttgatggtacaatggtagaccattctattttgtctcaatatttctttttcaaattcccaaaaatttattatatcattagtttgaaatctcatacttgttgtgttaataaaaattataatgattttttttttaattatatagtataggaaaaatctatatttgtatcaataattgaacttacataaatttataataattataataatctaattaaaggttttccacttagccccttttcaccaaacatgtgcaaatccctcatgatatcaaaaaccaaaaatgacaaaaatataaacaaatataaagaattaaaagaattagcactaaataaaattgtataatttatgtgaaagtgtaacaacatgaaccttctctagtgttacatagtttacttaattaattacattgtctttttctactagtgtcccaaatatataaatatatatatttaattcttaatgatactattatttaaaatttaaaagtggcctaagaaaaaaccaatagtgacaaagtcatgtcatgtgacttcctttatatttggtagtaattggagtagccattaacaaatatgagattccaaccacacatggttatatgattctaataataataataataataataataataataataataataatagttaatattattttaaaccatgtgttttgtaaaagttattggttggactttttattttgtaaaaagacatattagatcttatttctaaaattttacaaaataggacattgaactcaattttttgagttttttttaatataaccaacttaagacaattctagcacaaacatatgcaaaaattatactcaattttatcataatgactctagatcggcttattgctaacttttattttgataaaaaattagttcagagtactatgttgtactaattttaaaaaaataaatggtttaatttgtcatttaacaaaactaagtatccaatcggtaactttaatttgtaaaatacggaatccaaaataatatttatcctaataataataataatatcttcaaaataataataataataataataataataataataataataataataataatatttttcttcatggaatgtacttgtacttcttatctatttccttccacatgtgattgattggatctaaattccactcaattgatttggatccaatttaatcccaattggatgatttcatacattgcatttgtattagtttctag

SEQ ID NO: 305176 - DNA, 1105 bp, Cannabis indica
gtttaaataagtactcactattaaaataattatattaaaaatgttaaaatttaaatttattataattttataacttaattatcattaaataaaatacaactgcagtggtttatttcctaaaactttttataatatttaaattattacacatgtgtaaacaatgacatgcatcaaatttaaaaacaaattaaagataaaaaagttttaccataagagaaaagttaggagttatgtatctagcaatttaaacataaaaaattttagctgcaaatttatggtttaaaaatgaaaaagatacctattgaaataatttcagagctgatttattaaaaaaaattatttgataaatgctaaaagcaattgggcatgtcatggtgccaaaatttctactccggatggacatttttgtttttctctaattttacagtaaggccaaaagaatccattaaaaaaaaaaaaaaaaaaaaaaaagaaataacaaataacaaatcttatagtgtaataaatagatggcagcaacaataaatgatgggttgccatccctgtactgctttccgttgagggaacaatatatgtaccataaaatttagtggttcctgtgattgattaggttggctatattgataaattttacctggaaagaaaacattatcaccatacaaactgtttgtggatggattttcttttaagaggaatggaatttacaatggtgctaagccactggtcaattttgatttaaacaaaacagtcatataattgagctcagtaacaatcatgtataatatatcatgttgtctcttttatcataagataagataagagagtcacaacaactcaactagtggtggcaaaactgttagagagtctaacattattaatgtgtagaaagatgataaaatatataagattaatgaactatttttctagttgtcaattagtttttaaataaaacctcattcaccttatttcaaattttaatatagtattaaaatatttatatatttagtgattcattaaaaaaattaaatttaattttctttaaaataaaattaaaatatttttttttagtaaaaataaaaaaaatattttaatttttattatatat

SEQ ID NO: 305177 - DNA, 1930 bp, Cannabis indica
catagaaattcaaatttcccaatctaaactcttatataataaaatagagagtaatagataatttttgtaaaatataaaatttaaatgatatttttttttgttgcctgaaaaatttacccaattattattattcttaaatttgaaagcttaattgctaagaaatgtgttcaaggactattttgctcatctcaataaatttaagaggcaaccatgtaaaaatctctaatcttttatattataatatatttttattaaagttattaaattaatttgacctcattataatactagtcaccatataaaaattatactagtttcacacttgctcacttagtcatctttgacaaaattacatcttaccaattatatttctatttaatttttttgtttaacatggacacttctttgagtttggtttgacctattagactttgacaaaactaaatgaaaatcaattatcaatattaatgtgtattaaattaaaaaatttacctaaacaaaaaactttatattttatttatcagtccaatggtgttattgtaaatattttggtcaatacattatcattataatcatgaccctaatcaatgtatataatataaaacacaattacaaatacaaacatggaccaagtttcaagtttcaagcttcaattaattaccataacaaagctctctaattatgcaacttttaattttgtgtttacaaaatgtctcatgttttaaatgctcttcaattttcctgccacccaaacactactattaaagactcatatatctacctctcaacaaattatttattttcttagcaacacccaattggtagttattaaaaattagatctacatctttctcgattgcaaaaattaaataaagtaaataaataaataaaaaacagaactttttcttcaaaaaaaagtataatttaagcaaatattaagtttaggtcacagaaagtgaatacataaatttaatttttcactgtaattacatataagttatatttctaagacttttatacgtgttattttttttacttgtataattcaatgactagaccaattagaaattgatatatggttattaatttgatacttaacaacaaggtattcacagttgaaaatataatttaagtattattattattaaaaataaaatttatgtatttataatcgagtgtgttaaatataaatatttatgccaaaaattatttttaaaaaatacataaagaaatattttttatgagtaaagaaagatctaataaaaacttggcacgtgttgggtagaaacgacaacaagagcagacaaaaattctgtttcacaaattaatcgaacggccaattctcgtcctcaagatctctgacacgcagaatcaacggtggagatgaaatcttggaattttgtgagttaaaacgacaacaaaggaggacatgacatgagcattcaaagaggcccacactccttattcgtcaatgaaataaaaaagtgggccccacattttggacagtgtgcagccacgtcatcaatcccaataaacctaattctcacctaaactaggtggtatggtgttccttcacactaaaaccacctgtcggtcactcttaactaatagtatttttcctcacagcagtactaccatccgtacgagcaaaaataaaaaaaaaaaaacccatgtttcttagctgagttatttattacagaacaaatttttttggtgggtttagaatagaaccaaaggtttattaatggccattttgggtgttgagttatctctttcactaacattaaatgtgatttttccattaaaaaaagtattgttgagcacaagttgattcttagtatttctcttaaaatatttgagaaatactaaagagtactagtagtgcctaataattttttatttgtcaatattactattggtctaattaatt

SEQ ID NO: 305178 - DNA, 844 bp, Cannabis indica
tatatatatatgtttgtaatatggcaagtaaaatatttaaggtgtagttttgagattaattgatattcatgtttgaacaagactacacaaaaagtcatatctataatataacatgtacaacagcccatattctcacctgaataataataataatcataataataatattgtttgtggtatggttcccttgactagtgactctcaaaattcaatggagatgtattattagtaatactttgacagaattgattgacctcaatacacacagtactgacgaaacaatattaattataaacaaaattaattattcattattcatggtggcttaattaagcttggttggtcataatcaaccaaatcatacgcccatttttttctttaattattgatttgattatatttatatgtaattaaaatcatttttttttaaccccacaaaaagaaaaccatcaaaaaaatttatgcctatgtatctaagtgattcattttgggtttattccaggtaactacgtgtgtgtttgattggttccaattaattaatattcaaatttataaaccgaaaattcaacattcaaaccatataatatataactcagtcaaatcacatctctttataaatagatatgaaattgcatatgataatttcactaccatattatatataaactcttttatttaaagaagagaattatattaagaaagtagaaaaagatgggtttaattgtgagagaataattatgctgagaacattattagttgtaagcattttgtttggtttagtcaacaattggtagaactgaggccattatgttattataaaagaagatcatcatcatcatcatca

SEQ ID NO: 305179 - DNA, 1209 bp, Cannabis indica
aaaacaaaaaaatgattaaaaaatgttaccaaactgtacctaaatttttacatatttgtacctaaatttttacatatttgtgattataataaaaaaaaattcacttttttgctagacttgttttttctttagagctactttttcctacagacaactgtgccaaactgacccgccccaatctattactcaactctacttctttcttctccgcgatctctcatcatcgtccgtcgtcgtcaccaaagtgggagtccatcctaaccacgacgaagacgaacgaccccttatttgctttcacactaaatttgaagctttttaattgcagagagagcaattcccaataatggacgagaattcggcattaattgcagcgattctgagagaagatgagttagcagctaacgggtaccacatcaatgccagcggaaacgatgattataattggaaaactgtacagaatcacaagcggaccaagaaatcctctaaaccatcctcagatgtctcctccctccgaaatcttaccaccggattcttcgcttcgggcgatgttttccggccgatcgagcttcatgccgaggagcgtcgcaagcgtggtctagaggttcaatttgattccgctgcggtccggacggactccgttgccaacggatcgaaccggcattcggacgatgatgacgaagatagcgatgcggagccttctgctcctcagaatggcggtggcgacgagccgaaaaaggtgaaggtgaaggcgaagaaaccgaagaagttgaaggtgacggtgactgaggccgcttcgaagattgatgtggatcatctggagacttttcttgctgagattactgtgagttcaattcaacaattattccttctctttgatctctaatccgtttggtttgattctctttttaatgtattcaattatatttttttcgtggttggctaggcttcttatgaatcacaacaagatattcagcttatgcgttttgccgattactttggtcgagcttttgcttccgtcagtgcggctcaatttccatggttgaagacattcaaggagtccaatgttgcaaaattggctgatgtaagtttgctatatcctattttgttttttttccttttttttttgggcaacccgctttcaaattttgtctgggaaaaagctacatggatttgcttttagcagttgacttgtttatttatttatttttt

SEQ ID NO: 305180 - DNA, 1411 bp, Cannabis indica
ctgaattgttttttgtaaatctcttgtttgttttcctttacagctccgtactcaaaagaaaatcttgaaagccatgtaaagagatgcccatacatgaaacaagttcagtccttgactgtccaacccttctaccaaaaaggtataaattctggcacagaaggatccacagaagaggaccgaacaatcacaccttcaaatggaaacatagcattgcctgatgatgataagctagattctggtgttgccgaacatgttacttcagagcttaagaggaatgctgttcatagcttgagcgtatctcaattttgcaaactaattgagaagattgagtgtattcatgagtcggtttgtaaggacattcgggactcgtacaaaatccctgaagcttgtgaaaagtggattaaaagagaatttgatgggtatatatgagttggaaagtttattgtttttgtgagtttgttaaggtcttttagtttgtgaaaaagaaaaattagtttcttcgcaggaaattgccatttcaagaaaagcatgttgcacaacaggcttcgattcttggtaacttggaagaagttggaatattgaagtgttctaatgggagtgagaggtgtgagcttgaagggtctttaggtgatagcagcattgtccctgcagtggttgagtttggagctggtagagggtacttgacacaaatgctggctgattgttacggtattgaaaaggtgtttttggtggagagaaagtcatacaagcttaaggttagttggtttgaatatgaataaaatgcaatcttcatcctatgcttagatttccttgtaataaaagttataagatgttttgtagtttagaccttatttattgtcttattttatgtcaatgctatttctaggctgatcgatccttgcgacagaaagagaaattaatattagagcgtttgagaatcgacagtaagtttttctttaactctcttcttttcatttttttttcccaaaggaaagtcccattatctgtcctaccttcatttaagttttgatattccaaatgttgtgtgtagtcaaaaaaatatatcagaaatgtttgaatggatgcttgttgagttgttctcaacaataatttacttgtaaaagtacattatctacttctgttattcaaattaagctgttctcttgtttagtcaagtctccttccaaataattttctgttcttgggaaaagttaggaatttttcactttactacctttttttttcttcctattttatggaaaatatcactttagtgatgtgaatgatggagaagataacatagctttaaagtgattttggtttctgaaattcttcagccaaccgtatttgcctgcttgtagactgtagatggatgctatgcttgtatgtagtcttcatcccacttttcttg
